United States Patent Application Publication US 2005/0228172 A9 - sequence listing, part 99

SEQ ID NO: 454404 - DNA, 541 bp, Homo sapiens
aaagaatggtattacttccaatatctcaaggagtgtacactcccactgtgatattgttcctaatattcagaagggaagaggatgatattactcccaatatcgcagggggtgtacacattttctgagatattgttcctaatattcagagggggagaggatgatcttactcccaatatcgcgggtgagctacaccttccctgtaatattgtttttaatatccagtggagaagaggacgatattaatcccaataatgcaggggggttacacacccactgtgatattgtttttaaaatccagttaataagcgaatgatattactttcaatatcrcagcgggtgtacacccctctatgatattgttcctaacatctagtggcagagaggataatatgactaccaatattggaggagctgtgcagcgcccccctgcccgtcatattgattctaatatccaaggagggagacaataatattactctcaatatcacagaaagtgtacattcttcttgtggtattttcccaaatatcattaaaagcagaa

SEQ ID NO: 454405 - DNA, 541 bp, Homo sapiens
aaagaatggtattacttccaatatctcaaggagtgtacactcccactgtgatattgttcctaatattcagaagggaagaggatgatattactcccaatatcgcagggggtgtacacattttctgagatattgttcctaatattcagagggggagaggatgatcttactcccaatatcgcgggtgagctacaccttccctgtaatattgtttttaatatccagtggagaagaggacgatattaatcccaataatgcaggggggttacacacccactgtgatattgtttttaaaatccagttaataagcgaatgatattactttcaatatcacagcrggtgtacacccctctatgatattgttcctaacatctagtggcagagaggataatatgactaccaatattggaggagctgtgcagcgcccccctgcccgtcatattgattctaatatccaaggagggagacaataatattactctcaatatcacagaaagtgtacattcttcttgtggtattttcccaaatatcattaaaagcagaa

SEQ ID NO: 454406 - DNA, 566 bp, Homo sapiens
gaggatgatattactcccaatatcgtagggggtgtacactcccctttgtgatattgtttctaatatctatggggggaagaggataatattactctcaatatcgcagaaggtgtacacccaccctctgatattagtcctgatactcagggaggaagaggatgatattactwtcaatattgcaggaaatgtagacccctcccctgtgatattgtttttcatatccaggaggggagataatattattactgtcaatattggagggggtgtacaccccccagtgtgatatttttccaaacattagtgagggagagaggatattgggagtaatatcccaatatcgcagcaggtgtacaactttcctgtgatattgtttttaatatcggggggcgagagggtgatatgactcccaacatcacaagtggtgtatatcccccaataatattgttcctaatacccagacggagagaggatgatattactcccaatatcgcagaaggtttacacacccgttgtgatattgttcctaattttcagtggagagaatgatattactttcaatatcacag

SEQ ID NO: 454407 - DNA, 566 bp, Homo sapiens
gaggatgatattactcccaatatcgtagggggtgtacactcccctttgtgatattgtttctaatatctatggggggaagaggataatattactctcaatatcgcagaaggtgtacacccaccctctgatattagtcctgatactcagggaggaagaggatgatattactttcaatattgcaggaaatgtagacccctcccctgtgatattgtttttcatatccaggaggggagakaatattattactgtcaatattggagggggtgtacaccccccagtgtgatatttttccaaacattagtgagggagagaggatattgggagtaatatcccaatatcgcagcaggtgtacaactttcctgtgatattgtttttaatatcggggggcgagagggtgatatgactcccaacatcacaagtggtgtatatcccccaataatattgttcctaatacccagacggagagaggatgatattactcccaatatcgcagaaggtttacacacccgttgtgatattgttcctaattttcagtggagagaatgatattactttcaatatcacag

SEQ ID NO: 454408 - DNA, 580 bp, Homo sapiens
atattgttcctaatatccagcagggagaggttattactcccaatatcgcagggggtgtacaacttctcctgtgatattattgctaatatccagagggaaagaggatgatgytactttcgatatcacagagggtgtacatgccccgctgtaatattgtttctaatatccaaagactaagaggctgatatcactcccaaaaccgcaggtggcgaaaacaccatttgtgatattatttctaatatccaagaaggaaaagaatgatattactccaaatatcgcagaaagtgttcaacccccctgtgattttgttcctaatgtcgagggaaagagaggatgatattagtcccaatatcgcagggtgtgtacaccccctgtgatatcgttctaatatctaggaaaagacaggatgatgttactctcaataatgcaagggttgtacattagtcctgtgatattgttcctaatatctaagggggaaaaggatgatattactcccaataccgcaggggttgtacacactccctgcgagattgtttctaatatccagtgaaagaggggctgttacttccattattgcagg

SEQ ID NO: 454409 - DNA, 580 bp, Homo sapiens
atattgttcctaatatccagcagggagaggttattactcccaatatcgcagggggtgtacaacttctcctgtgatattattgctaatatccagagggaaagaggatgatgttactttcratatcacagagggtgtacatgccccgctgtaatattgtttctaatatccaaagactaagaggctgatatcactcccaaaaccgcaggtggcgaaaacaccatttgtgatattatttctaatatccaagaaggaaaagaatgatattactccaaatatcgcagaaagtgttcaacccccctgtgattttgttcctaatgtcgagggaaagagaggatgatattagtcccaatatcgcagggtgtgtacaccccctgtgatatcgttctaatatctaggaaaagacaggatgatgttactctcaataatgcaagggttgtacattagtcctgtgatattgttcctaatatctaagggggaaaaggatgatattactcccaataccgcaggggttgtacacactccctgcgagattgtttctaatatccagtgaaagaggggctgttacttccattattgcagg

SEQ ID NO: 454410 - DNA, 575 bp, Homo sapiens
agagggaaagaggatgatgttactttcgatatcacagagggtgtacatgccccgctgtaatattgtttctaatatccaaagactaagaggctgatatcactcccaaaaccgcaggtggcgaaaacaccatttgtgatattatttctaatatccaagaaggaaaagaatgatattactccaaatatcgcagaaagtgttcaacccccctgtgattttgttcctaatgtcgagggaaagagaggatgatattagtcccaatatcgcagggtgtgtacaccccctgtgatatcgttctaatatctaggaaaagacaggatgatgttactctcaataatgcaagggktgtacattagtcctgtgatattgttcctaatatctaagggggaaaaggatgatattactcccaataccgcaggggttgtacacactccctgcgagattgtttctaatatccagtgaaagaggggctgttacttccattattgcaggcggtgtaaacttctttgtaatattgttcctaatatccagaggggagaggatgagattaccctcaatattgcagagagtgtacaccc

SEQ ID NO: 454411 - DNA, 575 bp, Homo sapiens
agagggaaagaggatgatgttactttcgatatcacagagggtgtacatgccccgctgtaatattgtttctaatatccaaagactaagaggctgatatcactcccaaaaccgcaggtggcgaaaacaccatttgtgatattatttctaatatccaagaaggaaaagaatgatattactccaaatatcgcagaaagtgttcaacccccctgtgattttgttcctaatgtcgagggaaagagaggatgatattagtcccaatatcgcagggtgtgtacaccccctgtgatatcgttctaatatctaggaaaagacaggatgatgttactctcaataatgcaagggttgtacattagtcctgtgatattgttcctaatatctaagggggaaaaggatgatattactcccaatacmgcaggggttgtacacactccctgcgagattgtttctaatatccagtgaaagaggggctgttacttccattattgcaggcggtgtaaacttctttgtaatattgttcctaatatccagaggggagaggatgagattaccctcaatattgcagagagtgtacaccc

SEQ ID NO: 454412 - DNA, 575 bp, Homo sapiens
agagggaaagaggatgatgttactttcgatatcacagagggtgtacatgccccgctgtaatattgtttctaatatccaaagactaagaggctgatatcactcccaaaaccgcaggtggcgaaaacaccatttgtgatattatttctaatatccaagaaggaaaagaatgatattactccaaatatcgcagaaagtgttcaacccccctgtgattttgttcctaatgtcgagggaaagagaggatgatattagtcccaatatcgcagggtgtgtacaccccctgtgatatcgttctaatatctaggaaaagacaggatgatgttactctcaataatgcaagggttgtacattagtcctgtgatattgttcctaatatctaagggggaaaaggatgatattactcccaataccgcaggggttgtacacactccctgcgagattgtttctaatatccagtgaaagaggggctgttacttccattattgcaggckgtgtaaacttctttgtaatattgttcctaatatccagaggggagaggatgagattaccctcaatattgcagagagtgtacaccc

SEQ ID NO: 454413 - DNA, 585 bp, Homo sapiens
tccctgaggttcgttgtctcacagccatcatggaaaactaggatgcagacacaccaggagtaaggttaagagcggaagtttaataggtgaaggaaagggaatagctctctctgctgcagagygaagggtcccaaatgggttttctgcttctgtggtgaaatgaaggggattttatagatgagcttgagaagaaagtgtctgacatacataggacacaaaagattgactggatcaggtgtgttatttgcataaggtgcaaaaaactggttagggataggtaggccatttgcatagagcacaaaaatctggccaccctcaccccaatcttttattatgcagatgggctctctgcctggcctgcaaaatgtagctgtttctttactgtacatgtggtgacaaagaaaaggaaagatggagtctccatgttgaacatacatggttcccaggtagcctttttctattggcacacctgccagcattcacctgtgcaagcttccagcttgcttatctgtttgcagctcaattttttaggctgctctttgttagaaaaaaaaatttcttgtgctgctttttgttagaaaggaa

SEQ ID NO: 454414 - DNA, 603 bp, Homo sapiens
agaaaatagttgcaaactttacatttgataagggcttacttcttggaatatataagaaactttaagaattcaaaaacaaaaagacaacctgattaaaaaatggccaaaagagcttaatagacatttctcaaaagaagacataaaaatgaccaacagatatattaaaaaatgttcaacattactaatcatcaggaaaatgcaaatcaaaactacaatcagataataccttactccagttagaatggctattaccataggaaaaaaagaaaacaagtgttgatgaggatgtggagaaaaggaaacacttgcacactgttggtgggactgtaaattagtwcagccattatggaaaatgctatggaatttcctcaaaaaattaaaaatagagctatcatatgacccagcaaccccaaaccactactgggattacaaagcatcaattaaaaaaaatttagacttcggattaacgttacaactgaaacaatatataccatagtatggtgatcatgttatattgcttatactatacaacatatatttaatctctctaaaaatcatatttgtattttaatttaaaaaaacctaccacatcatcttgttgta

SEQ ID NO: 454415 - DNA, 495 bp, Homo sapiens
atagtatcagattttctgtacaacttgcattacagcgttgatatctttttaaactattcctaattgtctgtatatcaagaaagcccaaagtagaacacataagaaagcaaaattaatgttataataggatgaattataaaattaagagagatattagctttagatgartagtttttggaaataatataccagtgatatatagttaaagcagattcttcattagctatatgtaggaattctctctcatcatataaaagtgttataaattattggttaattttaatagcttgtttttctaagttctttacaatttgatattttttctttcagctcttttagtttttcccaattgttacctaatgcataatcaacattaagtgcttggtagtctaaacctttgatttgaactttttcttcatagctgaatatacctcttgtgaatgaatgtccattattacatgttattttatacttataggttaaacttagggccaa

SEQ ID NO: 454416 - DNA, 495 bp, Homo sapiens
atagtatcagattttctgtacaacttgcattacagcgttgatatctttttaaactattcctaattgtctgtatatcaagaaagcccaaagtagaacacataagaaagcaaaattaatgttataataggatgaattataaaattaagagagatattagctttagatgagtagtttttggaaataatataccagtgatatatagttaaagcagattcttcattagctatatgtaggaattctctctcatcatataaaagtgttataaattattggttaattttaatagcttgtttttctaagttctttacaatttgrtattttttctttcagctcttttagtttttcccaattgttacctaatgcataatcaacattaagtgcttggtagtctaaacctttgatttgaactttttcttcatagctgaatatacctcttgtgaatgaatgtccattattacatgttattttatacttataggttaaacttagggccaa

SEQ ID NO: 454417 - DNA, 539 bp, Homo sapiens
catcagagaatggtacaatcttctcatttcacaaaggagtatttagaaacctagaaactttcacaaggtcccatagaaactaaactccaagtctttttacttctaaattggtttcccactgcctatcacacactagctcagtgtgatgaagaaaatgaccatcatgtgagatatcaagtagaaaattaataataactaaaaaagtagaytataaaaagatttgaatgtcaggcttaaaactttatattgaattttacttaggtaataattcatttttgtaattatagtttttaatatccaagagtctcaaacacacttttctctaggtcccagatttttgtatctcttaagtggccatagcaatatccaggtatggtttattttgtatacagtaaatctgtatataagcttccaaaaaatgtcagccattattattattgttgttattattttatggtttctataatattttaatattacatgttaatgtttaatgaaagggtgttagttgtcttcctttctctatttcattcatatgt

SEQ ID NO: 454418 - DNA, 514 bp, Homo sapiens
aatttagtacagacaaagcaaaagttttcagggaagaccttcatattgtcatttgttgggtatgaggataaatatgcaatgaaaaatccttagagwtaagataatcgagtgtaagaaactgataggcaaacagtaagtttctgttaatatagcacacctgacttagttatgacttttggaaaagtctttaaatgaatttatgctcagtgcctctttggcaatgttgtcacacatgttcaagtcaataacttaaccagaacttattgaatgcctaccacttgtaaaaaacctgaattaaatagttttgttatggactgaaagtgtcactcaaaattaatgtattagaaaatgtatccccaatgcaacagtgttgggaggtgggacctttgggaagtgctttggtgatgaaggttccaccctcagaaatggagtaacgccattataaaaagggcttggagaagtggggttgctctcttctgctcttctaccatgtgaggacagagcacgaaagccc

SEQ ID NO: 454419 - DNA, 567 bp, Homo sapiens
agtatataccagcatcaagcttcctgtacaatctgtggaaccatgaacaaattaaacctcttttcttcgtaaattacccagtctcaggtatttctttatagcaatatgaaaaataactatggtaattattgatatatttgggttaaaactatattttgctacgtgtatcytaattgttctctttgctttttgtttctgtttccttcttggtttgctttctctagatttagttaggtacttttatattattcagatttatattcactcagcttatttatattatgttttgtatacacctgtgtttataagacacatctttaattaatgagatgctaccttcaattatttttatatttcttcacatgctatgtaagaactttacaaattatattcctaatgtaccctaccattcttcacactattgttcccatacactttatttttacctatgctataaacacaaaatatattgctatcatttttcctttagtttttaagaataattaaaaataagacaataaatattattttaaatgtttttattacatttacacgtatctttatttc

SEQ ID NO: 454420 - DNA, 568 bp, Homo sapiens
gagtatataccagcatcaagcttcctgtacaatctgtggaaccatgaacaaattaaacctcttttcttcgtaaattacccagtctcaggtatttctttatagcaatatgaaaaataactatggtaattattgatatatttgggttaaaactatattttgctacgtgtatcttaattgttctctttgctttttgtttctgtttccttcttggtttgctttctctagatttagttaggtacttttatattattcagatttatattcactcagcttatttatattatgttttgtatacacctgtgtttataagacacatctttaattaatgagatgytaccttcaattatttttatatttcttcacatgctatgtaagaactttacaaattatattcctaatgtaccctaccattcttcacactattgttcccatacactttatttttacctatgctataaacacaaaatatattgctatcatttttcctttagtttttaagaataattaaaaataagacaataaatattattttaaatgtttttattacatttacacgtatctttatttc

SEQ ID NO: 454421 - DNA, 540 bp, Homo sapiens
tttgggggttaaatattttgatttctttcctcgtctcataatgttatgccagagtcagattggaaagtaagtcacgatatatagggtcaagtaaagcccatcagatgagaatttatggtttgtagggcatggctccccagactccttaaataggaatttgggcaagataaaaaaatcagagctttgtcctcattartaaaggataaaggacaaaactggcaaggataatactatcctaccccagtaggtaaagtgttagaggacaatcaggtggtttgatagtatgtagatggatttaactcagtggtcttatcagctagtttaaaagtataataacactagaaaaatcagacagagtggaagagagattgaggaccacagtgaattgtctagttgaaagatgtatcctggctttaagaaataagatatgaaatctctgtactgtgaaacccacttgtttccatacatgtgaatatatcctgataaaaatagtgctaatccattactttacattttgaacattaaagacattgtcaactg

SEQ ID NO: 454422 - DNA, 647 bp, Homo sapiens
tttgaggttcgtaaactagaaagacctcctatcaatagggactgatatttcacaacagaaacatatggaaattggtgtgtatattaatagcgtttgtagcttatgtatgttcaacagagtttttggaaaactacatagcttattttccttccttgtatttaagagattctttgattttattcatttctaagtaaaatagttgcctcaataatgtaaaagaggaatcaaaatagtttttaaagtccagattctagcatgcaaaatagcaaacaagacattgtggcttcaagttccaaaataacaagcaccagaaattaactagcttcttttgcataataaaacatttttgaaaggatgttaaagcaaatttcacctgtccccaataaagatsgaaaccataaaattttggaaagcaagttttgggtgcatctacagggaactaagctgcatgagtttgtggcattttattttctagaacgtgacttttaacattactcagagattttcagtatttatatgtttctaagtttcaaattcctgggagagggaagccgattgatctatgtcagattaatcagggatggccaggtggggaaacggctacacagaactgaataatccttgcagtactcttaagcacaagagag

SEQ ID NO: 454423 - DNA, 574 bp, Homo sapiens
cctttgcgatattgggagcaatattattttcttccccccggatattaggaacaacattgcaaaaagatgtacaccccctgtgatattaggagcaatattttcctctccccccggatattaaaaacaatatcgcaagggggatgtacactccgcgatattgaaactaatatctctcccctccratatataaggtacaataccacacgggtggtgtacaccctctgccatactgagagtaatatcattctctcttcccctggatattaagaacaatatcacaggggaaatgtacaccccctttgatattgggagtaattttatcctctctcccactggatattaagaacaatattgtagggggtgtgtacacaccctgaaatattgggagtaatgacattctctcccttctggatattatgaacaacataatatgggggtgtacatcccctgccatattagaagcgatatcatcgtctcaccacagaatattaggaacaacatgacatgggaggcacacatcccctgctataataagagtaatatcattctttccattcttggatattaggaacta

SEQ ID NO: 454424 - DNA, 336 bp, Homo sapiens
cccacaagattttctatctctgtagtttgtttttggactttatgtcttaatggattcagtaattactagtttgcatctkgtttcctttctgcaacatagtgccttttgagatttattcattttcttgggtatatcagtaagtggttcattattttttattgctgagtagtattccattgtataaacattctataggttgaatatccattctattgctgataagtattttagttgttttcaagtttttgactattcgtagaaggctgctttgagtattagtgtgcaagcctttgagtgtgtaaatatttccatttatctaggggtggatgtgttggg

SEQ ID NO: 454425 - DNA, 570 bp, Homo sapiens
agtgagttccttagaaagctaagaaagcacagaggtgacagaggtcagtttcaataacaggaatcatagatggctccatggagaaagaaaaatttacgctgggcatcaaaagatgagtaaaaactgttgctaaggtaaagataatggaaagaggacatgaaaaacaaacagaaggaatcacatgaacaactttatagcggcataaaattgaagaggaagcttggaaaagaacaagaagtcatggttatttggcatgtctggtacatgagggggacctgtcagagatgttgaaaggtggaatgaagtcaaactttggagggccgtgaatgccaaaataaggtgtgtgaactttatttctaatgtaattagaaagcggctgtgtggagaaacatgattagggatagactttatgaagtttttttkttgttgttgttgttttgttttgttttgtttttgagacggagtctcactctgttgcccaggctggagtgcagtggtgcaatctcagctcactgcaacctctgcctcccgggttcaagcaattctccctgcctcattctcccaagtagc

SEQ ID NO: 454426 - DNA, 482 bp, Homo sapiens
cttacagtctactataaagcatggtgtctatacctaataatactgtacttaaaatttgctaagagggtagaacttatgttgtgttcttaccatacacacaataagaatgataataataataataaaggcagtgagaggaagcttagggaagtgatggatatgtctatggccctgttggcagtgatggtttcatgatgtatacttatcctcaaacttatagaattatatacattagatacatatagctttttacatgtcaatcatacttcaataaagtagtttaataaasagtggtttaataaaaggcaattggggccactaagtgagcagctctggaaatggaaagaagaggaaactttaaaagaggcactacataggttcagtgaacagattaaagtaagaattagaagtgaggttgagaacagagatgatttgaaggggacataattatgtcatgaaaatggcactgttattagaggaga

SEQ ID NO: 454427 - DNA, 584 bp, Homo sapiens
aaagcaagaagagatgagcccccatctgtctataatgtgcatataaatgtacaaaccccagcaaatcagaattttgctatctgtagagtctctgtaggatcacactgatggagtaacagtggagattgtttgtaacaaattatctcattacagtgtgttgcctataattactgttattctgttggctgacatacataatggtaaggccaggaaacaaaaaaccacataacaagaattattcctctccaaccctcacttggtcccccatctcagtattatacgatrtttaataaggacagcaaaacaaaaagttcatatttgcaaaccactttaaagaagaaggtaatgtgtaaatgataatacattttaagcacttagtaaaataatctctacatatggagtatgtgaatgtataaacattaataaggtcttttgggatatattagtttcttttgtgtgtagatttgggttttctaccattgaaagcaatatggatgtccaggattctagtttcttatcttttattaaatagagattgttagacaagccaaacaactaatgaccttttctgtacactatccgtg

SEQ ID NO: 454428 - DNA, 521 bp, Homo sapiens
aaataatggagagaatggataaactatggggtaaacttagttttgaatatatactggcctattgtattagtctgtttttatgctgctgataaagacatacctgagactgggtaatttataaagaaaaagaagtttaatggactcacagttccatgtggctggggaggcctcacaatcayggtggaaggtggaaggtgaaagtcacgtcttacatgatggcagacaagagagaatgagagccaagtgaaaagggaaaccccttataaaaccatcagctctcatgagacttcctcactaccataagaacagtatgggggaaccacccccatgattcaattatctcccactggctctctcccacaacacgtgggaattatgggagctaccattcaagatgagatttgggtggggacacagccaaaccatatcacctatatctttatttcataaagggagataaacattagatttaactcgatatgaccaaaataacatttcaatgaatgtattagtttgctgga

SEQ ID NO: 454429 - DNA, 547 bp, Homo sapiens
tttgcccaaggttgaattctgcccaaaaactgctaaataagatgagggcatgaaaacagtggcatctagttttgtcagttaagaattataatgtttgaagaaattaaaggaaaactccagaaagaaaatgtgtttctacattttgtgcaaattatacctttgctttgttgtaaaattataattaagtgatactgtagtagtatcttcaatatgttagattgcgtcaattttgtaaatttggttaagataaataacatgtattcgtattattttctactttttgtagtacttttgatacataattttatttgatctcctgaatagccctctaagttaggtaagaaaaaattactttataagkatatttaaatatacagttttaggaacgtaatgcataccagtatatgtagagtgaaagaaataaaaaaaatagaaaagagaagtagaagaattaaataaatataaaataattagacttactgaagactaaagacagaaacagaatattcctagtctatggaaatagcagttagtggtattagaattc

SEQ ID NO: 454430 - DNA, 547 bp, Homo sapiens
tttgcccaaggttgaattctgcccaaaaactgctaaataagatgagggcatgaaaacagtggcatctagttttgtcagttaagaattataatgtttgaagaaattaaaggaaaactccagaaagaaaatgtgtttctacattttgtgcaaattatacctttgctttgttgtaaaattataattaagtgatactgtagtagtatcttcaatatgttagattgcgtcaattttgtaaatttggttaagataaataacatgtattcgtattattttctactttttgtagtacttttgatacataattttatttgatctcctgaatagccctctaagttaggtaagaaaaaattactttataaggatatttaaatatacagttttaggaacrtaatgcataccagtatatgtagagtgaaagaaataaaaaaaatagaaaagagaagtagaagaattaaataaatataaaataattagacttactgaagactaaagacagaaacagaatattcctagtctatggaaatagcagttagtggtattagaattc

SEQ ID NO: 454431 - DNA, 547 bp, Homo sapiens
tttgcccaaggttgaattctgcccaaaaactgctaaataagatgagggcatgaaaacagtggcatctagttttgtcagttaagaattataatgtttgaagaaattaaaggaaaactccagaaagaaaatgtgtttctacattttgtgcaaattatacctttgctttgttgtaaaattataattaagtgatactgtagtagtatcttcaatatgttagattgcgtcaattttgtaaatttggttaagataaataacatgtattcgtattattttctactttttgtagtacttttgatacataattttatttgatctcctgaatagccctctaagttaggtaagaaaaaattactttataaggatatttaaatatacagttttaggaacgtaatgcataccagtatatgtagagtgaaagaaataaaaaaaatagaaaagagaagtagaagaattaaataaatataaaataattagacttactgaagactaaagacagaaacagaatrttcctagtctatggaaatagcagttagtggtattagaattc

SEQ ID NO: 454432 - DNA, 581 bp, Homo sapiens
ctgtgcaattgttatgcttgccatcactactccccaaactgcctgcttgacttttgtttttaagggtactatgagaaacttctgacttcagggatctcagggagtctctggcaggcttcagaaaacctgtgaaaattgtaatgtttctctcatgcatgtcaatgaactcaccagaggaacacttgtgtctctcactacctctgagaacctatatttcccttattcagtccagcccacctctctgttgaagtagcaaccaaatgacaagtaacacataaacttttggttggataaatagacagataatctttagaacatsttctgttccagtgatttcatttccctcagatagaatgatacctggagatttagtcatttccactggtgattggatgcacaaaaatacaagacaaggcaagagtgctgcagcatacaggaaatgctcacttacaaaatctgtctctgacttttcatcagcatttgtgaggaatgggaaaacttgaacccatctaatttttaagaaattttaatccaaagaatgtggaattagagcaattcatgcttgttttacttttattaat

SEQ ID NO: 454433 - DNA, 581 bp, Homo sapiens
ctgtgcaattgttatgcttgccatcactactccccaaactgcctgcttgacttttgtttttaagggtactatgagaaacttctgacttcagggatctcagggagtctctggcaggcttcagaaaacctgtgaaaattgtaatgtttctctcatgcatgtcaatgaactcaccagaggaacacttgtgtctctcactacctctgagaacctatatttcccttattcagtccagcccacctctctgttgaagtagcaaccaaatgacaagtaacacataaacttttggttggataaatagacagataatctttagaacatcttctgttccagtgatttcatttccctcagatagaatgatacctggagatttartcatttccactggtgattggatgcacaaaaatacaagacaaggcaagagtgctgcagcatacaggaaatgctcacttacaaaatctgtctctgacttttcatcagcatttgtgaggaatgggaaaacttgaacccatctaatttttaagaaattttaatccaaagaatgtggaattagagcaattcatgcttgttttacttttattaat

SEQ ID NO: 454434 - DNA, 558 bp, Homo sapiens
agtcagtgaggggtagtccacaactcggggcctggggcagagggattggaggatatggcaaatggtgagccaggaargaggcacctcccatgccaatgaagatcaggagtggtctagatcaatagtgtaggtgggaggttatgagtgtatgaagacaatagcagtagattgtggagaaaacaatggatttaggaagcattttaaaagtagtataaggctgagcacagtggctcatgcctataatccgagcactttgggaggccaaggagggaggattgcttgagcccatgagtttgagaccagcctgtcacatagggagactttgtctctacaaaaaattcaaaaattgttcaggaatggtggcacatgccattgttccagttactctggaggctgaggtgggagaactgcttgagctcgggaggtcaaggctgcagtgagttacaattacaccactgcactccagccagcctgggccacagagtaagaccttgtctcaatagaaagaaaaaaataaacaaacaaaaactacagaataagcggaacttggtgaccaat

SEQ ID NO: 454435 - DNA, 565 bp, Homo sapiens
aagactgcagtgagctataatcaagtcactgaactccaacctgtgcaacagtgagatctcatctctaaaaaataaaaataaagtaattttgtaaaaattctaaaatttaagtccaggaaaacatctaggtaggagttacctatataagggagagctaggtgttataatttcctgggtttccttctctcttggyttaatttatctctgggggtaagataacctcaaagagactggcgcccaggatttcttagagctcctgggttattaaagtcatggaagtctaatggcctgtggggaaaactgaatctgaacctaattttggaccaagaaggaattttggtggcaaagagactagatgaagttccttgcaaataattagatttctttccctgtttgagctttctgtttcttgcttcttgttttaatgtttaagaaaaatctcagttatacataaaataactagtggtgattcatcagtgtctcatcacttttaataaatcttaataattttccatatttcctacaggccaattttaataaataaaatcctgaagaaaagtcacca

SEQ ID NO: 454436 - DNA, 543 bp, Homo sapiens
acacagggatatctggggaaaacctggaaaggaggaatgatcagatattaaaacattatacaaagtcctaatttaaacagtatagtactactggtacctcaataartaattaataaaatagaatagagagagagttcataaatagactcaagtgataaaggcagcattccaaatcactagggcaaagttgaaacttcttcataaatgttttgggacaatttaatagtcatttgaaagacatgataaagaaataaacaactatttatcacactatatatacacagaaatcagctcttaaaggattagaaactttaacttaaatgaaactataaatatgctaaaagttaacatggttgaatttctttatgacttgagcatagagagggcattctaattaggacttagagttcaggtgcaactcaagaaaagattaataaatttgactataaaaactgaacatcttttgcatggcagacaacactataagtaatgtcagaaggcaaattacaaactaggagaacacacttgcaacatttattatgg

SEQ ID NO: 454437 - DNA, 504 bp, Homo sapiens
tttactaaagctgaatggaaaataggaatgaagcagatgttggcaggatttagaagcagtttctttagcaattgtcaagctctgatcatagatattggacataaaactcttgaattgtaaaaatgctcttaggacataggtaattttcaacatttggaacttagggtttagcttaattactttttagggaagttctacttgaaaataaaatgtgcttgaactttctataataataataataataaggatgaagaatgcaacagctaacagatactgaacactgaaaatgttaaaagcactattcagactgcttataactaggtcctctcacaacaacattatcaataggtcctctcgttatcttcattttgcgtwtgaggttactgaggcacacaagagttaaagagctcacccaagttcacataactagttagggttaaactgaggagtttaacccaaccactctggctttccaggtcaagatatcaactattctttattctg

SEQ ID NO: 454438 - DNA, 565 bp, Homo sapiens
caattgatttttttatgttgatcttaaaaaattgcaagcttacctatcttgtttattagatctagtaacttatttgtagattccattgggttttctacaaatagactcatgttgcctaagaataaaggcttacttttttcccactatgaatcctttttatttgtatttttttccttgccttattgcactggctagaatctaaagtataatgttgaacagacatggtgagagcagatattcttacaactgacccacacttaggtttgtggagaaagcactcagtctttcaccattaagtatgttaactgtacttagttaactgtagggtttttgtaaatactttttatcaggttgaggaagtttatttcttttcctagttcactacaatattttatcagggaaagttgttgaattttgtcaaatgctttttctgtatttattaagaagataatttggtttttattttcaactgtgttaatatgatgaattacattgtttgatttttttaatattaatttgctttcctggcataaacccacmcaaaggtcaccttcaattgtaataa

SEQ ID NO: 454439 - DNA, 628 bp, Homo sapiens
gctaaaaggggccaatgtagagctcagcccgttgcttcagagggttcaagtcccaagccttggcagcttccatctggtgtggggtctgtggatgcacagaagtcaagaattgaggtttctggaatctccacctagattttaggaatgtatgcacatgcctggatgtccaggcaaaagtctgctgcaggagtggagacctcatggagaacctctgctagggcagtgcagaaggaaaatgtgtggttgaggcctccacacagagtccctactgtggcgccacctagtggagctgtgagaagaaggctaccattctccagaccccagaatggtagatccactgacggtttgcaccatgtgcctggaaaatctgcagacattcaatgccagcctgtgaaagcaactgggagggaggctgtaccctgcaaagcmacaggggcagagttgcccaagactatgggaacccacttcttgcatcagcatgacctggatgtgagacatggagtcaaaggagatcattttaaagctttaagatttggctgcctttctgaatttcagacttgcatggcaccttagcctttcattttggccaatttctcccatttggaatgggtgtgtttacccaatacct

SEQ ID NO: 454440 - DNA, 607 bp, Homo sapiens
agaatgaaataatggcctttgcagcaacttggatgaacttggaggccattattccaagtgaggtaactcaggaatggaaaatcaaatattgtatgttttcacttataagtgggagctaagctatgaggatacaaaggcataagaatgatataatgaactttggggactcagggggaagggcaggaggaaggtgagggataaaagactgcacattgggtacagcacacactgctcgggggacaagcacaccaaaatctcagaaatcaatcaccactaaagaacttatcgatgtagccaatatcacttgttccaccccaaaaattattaaataaaattttaaaaattacccggactgtattttgtcataacacacaaactgatgctcttgtaaaagactatattaaaatcatatagtcagtgacgagttaaatgtgccccattcaccgaaatttctaaacgtataaaggttctgcagtgttcagaaggtttgattagtatgttatctgatttcttataatctgtaacatacaatcctttatttcatsgacttcactaatatatatttttttatttttgaaactaaaagtaaagtgagttaaatattaac

SEQ ID NO: 454441 - DNA, 439 bp, Homo sapiens
ctttcctcttggttccaagagcccataaaatcttacaaccacacaaaccaaaattatacaggagacatttagttatgtttggcacagactcgatattgtgtaaatggaacctaacttctttcttccagggacttgctaaactctactcctggactctgtttcaacctttcctstggttcagctgttatttttcaagaagccttatccattcctcctattacacaccttctgatccgggaaatattgttggcctctctcacttgttagggtgaatagacaggctcatgttcttacttaacaattcctgcgacatatcactgaaataaacttaagctatggattataaagctttctggcacttcagtgatattcaaggccactcaaggagctttgctaatacaaggaggtatttaacagagaggtctcactcaattcaatg

SEQ ID NO: 454442 - DNA, 546 bp, Homo sapiens
tattggacaacagcatgctgggctttactttggcattaaccagctggtaaccatgggcaagtagcttagctccacttctttttcgtgtaaattgagaagctgaactagattcatggttccaaaattgtttattggattttttaagatgtttacagacttcctaaaaactaaaaagtgctctgtaaaataagattagaaattctgggttaaacaaattaaatagatttctttgctgaaagagttctcaaaacctttaataagctgatgtgcttttagaagtcctggaaggaaacagaataaaaaaygtttcacaaaatctggattatagttttatttatttatttatttttgaccatcttttaacagagtttcattgaacactttaggaaatgctagacctacctggtttctaaggcttaaataatatgttatggattagtcggagttcttcagagaaacagaaccaatagaaccaatgtattggcttacatcattacggaggttgagaggttcccatgatctgccatctgtaagctggagacccag

SEQ ID NO: 454443 - DNA, 495 bp, Homo sapiens
tgcatttgttgattcatgtatacccatgtgtctgtctcctaactagacccttcaagggtaagaataagccgcttagttttcctttattcagagtgcctaggatagggctctaagtacaaaaggacttcacatgtagatgtactctgtcatgatttatatattttccagtttactaatagaccaatgtttcttctcctctgagcaatttctttccctatactctatttagtctcatgatttttaagaagtgacatttgcaattgcttaaataattcctgtcaatagtctaagttgttcaaaagatgagttgaactttaggtgatattattttctggagagaactttagtctcatttgataccataccycaagaaaaatatgccgtgccatttcagacagattttaaacttcctgtttatccctcctccagtgtgccagctcctctgcagaatgaactgtctccaaatcgctgagactgtaatttccatgacagtgt

SEQ ID NO: 454444 - DNA, 495 bp, Homo sapiens
tgcatttgttgattcatgtatacccatgtgtctgtctcctaactagacccttcaagggtaagaataagccgcttagttttcctttattcagagtgcctaggatagggctctaagtacaaaaggacttcacatgtagatgtactctgtcatgatttatatattttccagtttactaatagaccaatgtttcttctcctctgagcaatttctttccctatactctatttagtctcatgatttttaagaagtgacatttgcaattgcttaaataattcctgtcaatagtctaagttgttcaaaagatgagttgaactttaggtgatattattttctggagagaactttagtctcatttgataccataccccaagaaaaatatgccgtgccatttcagacagattttaaamttcctgtttatccctcctccagtgtgccagctcctctgcagaatgaactgtctccaaatcgctgagactgtaatttccatgacagtgt

SEQ ID NO: 454445 - DNA, 529 bp, Homo sapiens
ctttgctccaaaatcctaaaggtcagtgtcataattcacttatataggggtgccaaccgtccaaacagcattgctatttgccagtgacacttcaagcaccattatatctcctggatcatatgtctcaagtgtcagcgtcacttgcatggcaggctaggcctgttgaatagtcttctgttgttctgggccctcttcaaaactagtacctctcaagtctcttagtaaatgggtcacaatggtacatccgaatgggatgtaccccaaatccaaagaggcccactgcaagaggagccagatgtaccaattaatcaatcaccctggaagaaatattttgacatggtccctataattggaccattagaagttttactgagctgaaatgtttctgaattcttgtgggaatggatatyaggagaataggattaaggtaatttgttatgcagtagtggaaaactaatgtgtctagattcagaacttcaaaaactaagaaatattaacaaaaacagggtgaggtgcaatgagagttgat

SEQ ID NO: 454446 - DNA, 556 bp, Homo sapiens
gttgttcctctcttgaaccattttaatttctgtgacacagaagtctttctttccttcattttccaagaacaattgactctgcctgcctggcctgaggaaggctcctgggcatcattgctctggcaggtggttttcatttgctgtctagagatgctggcactcctgcaaattcagttcccatctcactcccagccaggtccccaacactgcctgcatctgatacaatggcttgttaccgcctggaatatgtagttctaacagtaacacagccctctttttcttcagcaaccatcagaaaaaaggatttcttggaccattacatttcaaaatatatttttacatttcaaataaatatactaccttaaaaatatttcttctgaaataaaatatattgtccatttaacctctgacaaagaagctgaattggagtgggacytcattgtaaagccctggcagctgctgcctaggttcagtttcctaagcaacctggaaacttaattagacccaaacaacaaggatgagtatttagagaaataagatttagtggaatcactat

SEQ ID NO: 454447 - DNA, 540 bp, Homo sapiens
tcatatgtcatccttatctgcctttgatacttcaaacaccagtggatctgctggatcatatgcccaagtgatagggcagatcacatagcaaactggacttatggcagagccttcttttgttctgagccccactcaaagcgagcatcttttcagattagtcagtaaatgggccagggtaaaaaacccacatgagtaatatgttgccgccaaaatccaaaataaagtctactaagtattttgactcttttgttttgtrgaagaggccagatgcaataaattatccttcaccttggaagggataccttaatatgtcccacatgattggatacctggaaatttgacagaggtataaggccactgaagtttagtcagatgtatttatcaccatctgatatgcaactgttttaccaataagtctagagtacttgctacttcttgttcactaggtccaattggcatgatgccatgatgtaatagaccggtgtgctatcttgtgaaagggaaaggtaatcaagatccctgagaactaaattatgacac

SEQ ID NO: 454448 - DNA, 540 bp, Homo sapiens
tcatatgtcatccttatctgcctttgatacttcaaacaccagtggatctgctggatcatatgcccaagtgatagggcagatcacatagcaaactggacttatggcagagccttcttttgttctgagccccactcaaagcgagcatcttttcagattagtcagtaaatgggccagggtaaaaaacccacatgagtaatatgttgccgccaaaatccaaaataaagtctactaagtattttgactcttttgttttgtggaagaggccagatgcaataaattatccttcaccttggaagggataccttaatatgtcccacatgattggatacctggaaatttgacagaggtataaggccactgaagtttagtcagatgtatttatcaccatctgatatgcaactgttttaccaataagtctagrgtacttgctacttcttgttcactaggtccaattggcatgatgccatgatgtaatagaccggtgtgctatcttgtgaaagggaaaggtaatcaagatccctgagaactaaattatgacac

SEQ ID NO: 454449 - DNA, 694 bp, Homo sapiens
aacatcatggtggttttttctcccagtttccttcaaaatccccattgatattttgattggtattgcaagaaacttaaaaaatattgagtttagactgatgtgtttacaatattatctgtccatccaggaacataatatagctccataatccaagtcttcytttatattgttcagtattattttggagtttcttcaaaatatgtttgtttaaataaaaaaactatttttttctagaaagatttgaattacctcagagttaattcagcaagatccagttggatagttttctggtttattggagatttgtcatttcctagagcaaattaggattcaaaaatgactttttaggtctaaaaacatctttctagttattcaaattttccaagcctgcttcttttcattaattcatttttttgaaatatttttaatattagttttaacacatttaactgtgggattgagaatctcaaaaacaattctggctttaggatctttcagaacatctaagttttataacatgtgtgaggtaatatcctgcctgctttgcatcttttgtgtcttttaaacaaacttgtgactaatttagaaaatataggtattaatgagaaaagaaagacaaacacatgctaagtctccatgcaatcaatggtcatgttgatggctacaagactgatttcttcactggctgtgttca

SEQ ID NO: 454450 - DNA, 464 bp, Homo sapiens
aaagtttcctcatgccatttggaaaccctcctgtctacttctttctaccattccttctttctcatccaccaggaaactctttatctgctttctaccagagaatatctttagttctctagaattgtatacaaatgtaattatagagtatgtcctttttgagtttggcttctttaactcagaataattattctgatattcatccatgttgtacaatgtgacaatagttcattgtttttactgctaagtaatattccattgcatggatataccacagtactcacctgttgatggccaactgggatgtttacagtttgaggctaatataagattgctatgaaaatctgtacaagtcttttatagacataagctttcatttcttyggggtaaatgcataggaataaaacagctaggatatatggtaaatttttgcttaactttcctaatgtttttccaaagtgattgta

SEQ ID NO: 454451 - DNA, 694 bp, Homo sapiens
aacatcatggtggttttttctcccagtttccttcaaaatccccattgatattttgattggtattgcaagaaacttaaaaaatattgagtttagactgatgtgtttacaatattatctgtccatccaggaacataatatagctccataatccaagtcttcttttatattgttcagtattattttggagtttcttcaaaatatgtttgtttaaataaaaaaactatttttttctagaaagatttgaattacctcagagttaattcagcaagatccagttggatagttttctggtttattggagatttgtcatttcctagagcaaattaggattcaaaaatgactttttaggtctaaaaacatctttctagttattcaaattttccaagcctgcttcttttcattaattcatttttttgaaatatttttaatattagttttaacacatttaactgtgggattgagaatctcaaaaacaattctggctttaggatctttcagaacatctaagttttataacatgtrtgaggtaatatcctgcctgctttgcatcttttgtgtcttttaaacaaacttgtgactaatttagaaaatataggtattaatgagaaaagaaagacaaacacatgctaagtctccatgcaatcaatggtcatgttgatggctacaagactgatttcttcactggctgtgttca

SEQ ID NO: 454452 - DNA, 546 bp, Homo sapiens
aattatttttgcactattgaggcaatattgttctgtgtattctacccaatccttcataatcataaggtatactagtctcactggagcaaagcatgtttcccagatctgggtgaatgtcaggcatgttacctttaattctttcaggttgctctttccctaatatttgatagttttctcacatacatatgttggtcagtactcagctgaatactgaatggtaaccccttgcagatctcctgagctctctctgtgcagctctctcttctctggtactccrctctataaacttgagccactttcaccttcctaatttctcaactttatatcctcaactcaaggggtgtataaatgtagagtttggagaataactagtttaaatacagttagctgaaagaatgaaggttaaaaaatgttaacaaggataaggggtgacgaggcaggaagtaggagattggatcagggaagaagatctcagttgccaggagttcatacattaaggaaaggaaggtacatgtaagacctataatgattaacttcacttagttt

SEQ ID NO: 454453 - DNA, 549 bp, Homo sapiens
gtcagctccattctcagagaactctagagactgttaagcaaacctgtttctaatgaatacaacaagagccatttgaatcctctacacttgagccagtcacatttaacagatcacccagtctatcttccattattctcagaggcatcctgggcctcacagcatcttttcaatttcagcttcaaatgacccaagctctgtgttgtcttaggcttcaataggattcaataggaaaacaatrtcagaaggttaacatatttttcccattatactatataattgctatgtactttactcatcccaatcccttagcactttggatttcaatattcaactagtcttcactatttatcaatagaatcaggaaaggcacatagaaacgtgtaaagccagtagacctagattttcttctccacttcacactcatcacttacttgtctctgagtaagacacttatcttcttcaggtctcagtttctgcatctataaaaaggacatagaatgtcctcttacctaaaatgtttgcttaaagaatggtagtatttatttgaaa

SEQ ID NO: 454454 - DNA, 571 bp, Homo sapiens
cttcactatttatcaatagaatcaggaaaggcacatagaaacgtgtaaagccagtagacctagattttcttctccacttcacactcatcacttacttgtctctgagtaagacacttatcttcttcaggtctcagtttctgcatctataaaaaggacatagaatgtcctcttacctaaaatgtttgcttaaagaatggtagtatttatttgaaaagtataaagtaatataaaaatatgttagaataagtatcaggcctaacrgttgccaaatatctgaagttgactttctactttgtttatttgtgttctttgtttatttgcattttataaagcagagaatattctactcttcatcatgacttgagtgagcatgctcatcattcctttagttagctgcttcaattcacaaatcattctctttattctgaattctctcctctttgctactcaatatctgatcctcaggggtccattgagcaagaatattaagtaggtacaatgctggtaagattctccatgactttcttccaaggacattacttctattggaactagttcacatatacttttc

SEQ ID NO: 454455 - DNA, 614 bp, Homo sapiens
ctagggctctcagatcatcctattcttccagtcaaattatgatacctaaattttgagtgaaatcactgtgttggaactgattgaaaactttatgaaacactgtacaggccgagagcagtgtttctcccagcacgacgtttgagctctgagaacagacagkctgcctcctcaaatgggtccctgagcccggtgtagcctaactgggagacacttcccactaggggtcgacagacaccacatacacaggtgcccttctgggacaaagcttccagaggaaggatcaggaagcaatatttgctgttctgcaatatttgctgttctgcagcctcagctggtgatacccaggcaaacggggtctggagtggacctccagcaaactccaacatacctgcagctgagggtcctgactgttagaaggaaaactaacaaagagaaaggaatagcatcaacatcaccaaaaacgacatctacaccaaaaccccatctgtaggtcaccaaagaccaaaggtagacaaaaccacaaagatggcgagaagccagagcagaaaagctgaaaattctaaaaaacagagtgcctcttctcctccaaaggatcgcagctcctcaccagcaat

SEQ ID NO: 454456 - DNA, 620 bp, Homo sapiens
attacataattaatacctccatatttactactcagcttaagaaataaattgtttaaaatcttttttgtatggggtcagttatttgtgtttcttttatgcatggtaactattgtttcttgtaaactagaaactctcaagacagggaataagtcaatcaagtcacagcactttaacaaaaactctaccatatgtatatgctatgttttgtgataaaattatcataaaatcttatggtgccatacccaggctttctctctccgtattagttatgtaagagtcaatgatgtccccaaagaattttaaaaagacatatagaaggcatatgagtgaaagctacagaaattgaagttttacagtctagaagaaaacctgagggatcacttataaatagactacaatrtaatagtaatagtaaatgtaagtataattcaatggtaaatagaatgaaagttattttaataaataaagataactaacagttatctgagaggtgtttggttacaatactaccaaagtactaagccttagggattatgttaagtgcttttatgtggactatcttaatgaatattcacaataacctgaggaaaaatgttttattagagccattttacaaatga

SEQ ID NO: 454457 - DNA, 596 bp, Homo sapiens
acccatgttaagtttgcattgctcatatccctgctacatcctgctaggtcactcaggccttaccaggagatagtgtctaaattcctatggctcttcagttgtagggagcccctgaccctgagcatctgagctctgccaacagccctgttagtattcatggagcaggtctatccgctgctgtccttgtcaagaaagagtggggagaccagggaaatttgccgttcaaaaaaatgagtattgttgactcatgaagcatccttttggcttgtcagctatagagctgacaaatgatttacacacttctgtagaaaacctgaagggctacagcacaaagactcagcatgtgtgatggagtcaaatctagggtactaagatgttactcactcaagggccaggtgactagtcttccaagagctcaggggctgagctgaaacaggagggccacctttccctttcttacaagctgagtgtcgagaaccaggtcatactaacttgtggccacagaaacaggatggragatttctgcacaataatgaggattttgccagttacacaaaaaaatagttcgctgacatctaattacctcctttccccat

SEQ ID NO: 454458 - DNA, 520 bp, Homo sapiens
attacatgatgagggagctaagcatgctaatgtgctagctcaggtctctcatcctcttcttataaagccaccaatttytctcccatgataatccattcatctgttaacccattaatccattaatagattaatccattcatgaagacagagccctcattatcgagtcacctcttaaaggcccacctctcaatactgccacattggaaatgaaattttaacgtgagtttggggaggtataaatattcaaacagtagcagtagcataacaggacagaaatcaattttgttaacatgaaaatctggatgatgtgctgttctgattgttttgcccactctgtgcactcatattttgtcactaattatcaattatattctacttagtccaagtagtttatgtatgaaaaacataatatctaaaagtattctataaatcagaatttcatgaagaaaataaaaagacgttaaagaatggttaaaactgtgctaaaaggaattttgcttcatttattagaagtttttaa

SEQ ID NO: 454459 - DNA, 520 bp, Homo sapiens
attacatgatgagggagctaagcatgctaatgtgctagctcaggtctctcatcctcttcttataaagccaccaatttctctcccatgataatccattcatctgttaacccattaatccattaatagattaatccattcatgaagacagagccctcattatcgagtcacctcttaaaggcccacctctcaatactgccacattggaaatgaaattttaacgtgagtttggggaggtataaatattcaaacagtagcagtagcataacaggacagaaatcaattttgttaacaygaaaatctggatgatgtgctgttctgattgttttgcccactctgtgcactcatattttgtcactaattatcaattatattctacttagtccaagtagtttatgtatgaaaaacataatatctaaaagtattctataaatcagaatttcatgaagaaaataaaaagacgttaaagaatggttaaaactgtgctaaaaggaattttgcttcatttattagaagtttttaa

SEQ ID NO: 454460 - DNA, 570 bp, Homo sapiens
atacaactgacaaacaggcttatgaaaaggtgctcaacatcactgttcatcagagaaatgcaaatcaaaacygcaatgagatatcatctcactcaagttaaatggcttatatccaaaagacaggcaataacaaatgctaatgaggatgtggagaaatgaaaaccctctgatgttgttggtgggaatgtaaattattacaaccagtatggagaacagtttggaggttcctcaaaaaaacaaaaaatagaactgccatatgacccagtgatcccactgctgggcatataccccaaagaaagtaagtcactcacatgtttgttgcagcactgttcacaacagccaagatttggaagcaacctaagtgttcaacagatgaatggataaagaaaatgtgataattatacacaatggagtactatttagccataaaaaaaatgaaagcctgtcatttgcaacaacatggatggaagtagaggtcattatattaagtaaaataagccaggcacagaaagtcaaacatcatatgtcctcacttatgtgtgggatctaaaagtcaaaacaatttaactc

SEQ ID NO: 454461 - DNA, 543 bp, Homo sapiens
tttgtggactaagtggtatttgtgtcaggtcttcaggagttataaaattttgagtaacacaaataaaagggggaagatggcacttcaagcaaagaattgagcccaacaaggcatgaaggcagaaagcgaaaaatacatcctcaaagtagctagttagataaatgtaggctagggattctggaagttaaggcaaaacacaggttggagttatattgtgaagagattttatttactacgaattatgcaagccatattttagcaggaaagaamagaagcatagtttagaatacaaacccgaaaattagattaaaacggaaaccttctggattctggggctctcattagaagtaaatgtgccttgctgttcaacgtgtgataggggaccagcagttttacattatctgggagcatattagaaatgtggaacctctggctgtcccagacctacagaatcagaatctacatttgaataggatccacaggtgattctgctgcacattaagatgtaagaagcaaggtcaaaagagaactgggaagagcctg

SEQ ID NO: 454462 - DNA, 551 bp, Homo sapiens
cctgaatccaggcagctgtgtgttcttggagaaaaacatacaacagccatttaaattcaggacctaacttcaagtgggccgttaatgctgtctctcaaccatactacagactgttgtccattctatagcctactgctatagaatttcacaccttttcttctcacctggaacttccargatctctttcccaatctccatgccagcttctaactttgcttcctgtctcactgagcaagtacaagcattcagaagacaacttttaaaatctccctctctgacatccgtttgcctgcctatcttcgtctatgtcatatactcattctgccttccctctaattccccatgggtgaactgcctgtgcttctaagaccagcccatccatttgtgtattaaatctcatcctcttgcataattaagcacatcactttgaaatgtttttttattatcattttttccttctctactaaattatctccatcaatatacaaagctatggcttgatcattcatcctcttcaagtatttctgcaaatgttaccttcttagtgaggc

SEQ ID NO: 454463 - DNA, 551 bp, Homo sapiens
cctgaatccaggcagctgtgtgttcttggagaaaaacatacaacagccatttaaattcaggacctaacttcaagtgggccgttaatgctgtctctcaaccatactacagactgttgtccattctatagcctactgctatagaatttcacaccttttcttctcacctggaacttccaggatctctttcccaatctccatgccagcttctaactttgcttcctgtctcactgagcaagtacaagcattcagaagacaactkttaaaatctccctctctgacatccgtttgcctgcctatcttcgtctatgtcatatactcattctgccttccctctaattccccatgggtgaactgcctgtgcttctaagaccagcccatccatttgtgtattaaatctcatcctcttgcataattaagcacatcactttgaaatgtttttttattatcattttttccttctctactaaattatctccatcaatatacaaagctatggcttgatcattcatcctcttcaagtatttctgcaaatgttaccttcttagtgaggc

SEQ ID NO: 454464 - DNA, 483 bp, Homo sapiens
ccatctggcctgcaaaacctaaaatatttaccacctggacatttatagaaaaagtttactgacctctgacctagaccataaagtcctctattgcagcatttagcagagtcttgcatgctacagacatgcaacaatctatgtcccgtgaattattagtgagatgcacccttcactgacagtctaatgcatcataaacagggcctggtaaaaatcaaaatgctgtgtttcaaatttcagatcttttttattttttgtagtgaatatgttgcttagagattcaaatttttggtcaagcttaaacatgctatctggacattgctatctccagtaaaataaaycactaaaaaacaaatgcaaacaaaaaaaaaaccaattagatttaatttagaggtaataagagagttttgtttgataagtgcatattttggtttcacactagctcttattctccaacaactgtcattttgcttccttttcagggac

SEQ ID NO: 454465 - DNA, 619 bp, Homo sapiens
gttgcttagagattcaaatttttggtcaagcttaaacatgctatctggacattgctatctccagtaaaataaaccactaaaaaacaaatgcaaacaaaaaaaaaaccaattagatttaatttagaggtaataagagagttttgtttgataagtgcatattttggtttcacactagctcttattctccaacaactgtcattttgcttccttttcagggacagctttctactctcatccagaaactgattcatttactggtttcctttcttttttttttttttttttttttttttttgagacggagtcttgctctgtggcccaggcgggagtgcmgtggagcaatctcggctcactgcaagctccgcctcccgggttcacgccattctcctgcctcagcctcccgagtagctgggactacaggcgcccgccatcacgcccggctaattttttttgtatttttttagtagagacggggtttcaccgtgttagccaggatggtctcgatctcctgacctcgtgatccacccgcctcggcctcccaaagtgctgggattacaagcgtgagccaccgcgcccggccggtttcctttctttgtggcagatgaaattccaatgatat

SEQ ID NO: 454466 - DNA, 535 bp, Homo sapiens
ttttaacctatgtggaaatgcaacttttgtacacaaaagacaaaagctactgggaagactaccgtcagttctgtaagaccactgctaagcctgtgaaggtatgtgtgtttaagcttaaagcaagagaacaatttaacttwttttttcaatctcaagtgtaacgtgagaatttgttactgaacaagctcccaaatcttctaggaaatgattagatacaatttcattgaaacagaaatgcatgtgtactgggtgtgcatgcacaccagttatagcacatcattttgtagatttggggtgtcatgaaagactgttatgtctggttaattagcttctactattccccgacactaataaattctctacttggatagacttttactctagaactaggagttaatgtcatttgcaatcaccatttcgttaatgtggtgatgaagccccatagcaacttagtaacaagtagaattttatttccaagcccagtttgataacaactcatttaaaaaaccccaacccttacctaggtttgagatac

SEQ ID NO: 454467 - DNA, 450 bp, Homo sapiens
tcttttttgcctagtcagatatagtttgataccattctctattattttttcaaagatctggttttctttgaggcagctggtaggtagcttttactaaatttaaatgtacgcttctgygtaaaccatattacactataagcttagacgtcctacattcttgacttcccagaatatttgaattatgtataataaacacatttttatgtttttgagtaattatctcttctttaggctaggagggtctgtaagatttgaaaaggatcagagtgaagatggtgcagagtaggagactggggaagtagagaacagattttccaattcacgtacaaaagccaagcatttaacaaacttaggaaaatgaaataagaatatttcacagcattttcaacagttaggtattttatcctctgtttcctttacttaagtctatttttttcctcttctaggata

SEQ ID NO: 454468 - DNA, 614 bp, Homo sapiens
gtgttctgaaatctcacaatttgatagaggcctgtttaattctttctttgagtccttagtaagtcctttaatcctgaagaactatgactctcatcagctctggacaattttcttctgttatttctttgcgatttttatcccttccattktttcagttgtctttctggaactattggtcatacctggattcgtctcagtgcctctcctttttttccttctatttttcatctctgactttttgttctgtattttagaatttcttaattttttccatctcttcttttgattttttttttgttttggcaattatattttaatctttataagcctttcttgttctccaattattcttttacaataacatcacatttttattttgtgaataatctgcttaaatttctctgaatatattagaggttttaaagttccctcctatgcccttaattattttaataatttaatttttgtttgtttgtttagtttttctcttttatgttttgattcctcatatatgcctgatgctacataattatctattactaaagaaaaaaggactgggtggtttgggtggatttgctttgctgctgtgttagtcagtcatctaccaaggaggc

SEQ ID NO: 454469 - DNA, 578 bp, Homo sapiens
cctttctagcttgcagggtttctgctgaggaatctcctgttaatatgataggttttcctttataggttacctgatgcttttgcctcacagctcttgaaattctttcctttgtcttgactttagataacctgatgtatatgatgatctttttgtgatgaatttcccggttgttctttgagcttcctgtattcagatgtctatatctctagcaagggcagggaagttttcctcgattagtccctcaaatatgttatccaaacttttagatttctcttcttccttgtgaacacaaattatycttaaatttggttgtttatcataatcccaaactttttggaggctttgtttttttttaattatttttctgtctttgttggattgggttaatatgaaagccttgtctttgagctctgaagctctttcttctactttttcaattctgctgttgagaatttccaggtattttgtatttctctaagtgtgttcttcatttccagaagttgtgattgttttttatttatgctgtctatttctctggagatttttctgttcatattctgtaactttttttcatttct

SEQ ID NO: 454470 - DNA, 578 bp, Homo sapiens
cctttctagcttgcagggtttctgctgaggaatctcctgttaatatgataggttttcctttataggttacctgatgcttttgcctcacagctcttgaaattctttcctttgtcttgactttagataacctgatgtatatgatgatctttttgtgatgaatttcccggttgttctttgagcttcctgtattcagatgtctatatctctagcaagggcagggaagttttcctcgattagtccctcaaatatgttatccaaacttttagatttctcttcttccttgtgaacacaaattattcttaaatttggttgtttatcataatcccaaactttttggaggctttgtttttttttaattatttttctgtctttgttggattgggttaatatgaaagccttgtctttgagctctgaagctctttcttctactttttcaattctgctgttgagaatttccaggtattttgtatttctctaagtgtgttcttcatttccagaagttgtgattgttttttatttatgctgtctatytctctggagatttttctgttcatattctgtaactttttttcatttct

SEQ ID NO: 454471 - DNA, 563 bp, Homo sapiens
atcaaatattttttggtgaaatttaaaaggaaaaagtcgctaatactaaattatcatttatataaagcatgatttttaaaatacatgtggaaataaacttataaatcaggcactatgaatggattgttgaatattttatctgcttcattatattttgatgaatctctgctataaactgaatgtttgtgtcccccaaaatatacgtgttgaaaccccaatcctcaktgtgatggtgcttggaggtaaaggcctttgggatgtgattaaatcacaagggtggtgacctcaggaatgggattagtgcccttgtaagaagagacaatagggatgatctctctctctctctctctctctctctgccatataacaatacagcaagaaggcattcatctagaaatcaggaagagggccctcataaggaaccagattggctggcaccttgatctttgatttccaagcctccagcactgtgataaataaatttctgttgtttaagccattcagtctgtggtgtttgttaatagcagcctgagctaagagaaataaattggtactgagaagtg

SEQ ID NO: 454472 - DNA, 517 bp, Homo sapiens
ccatcaatggtgcccatagtgcgaagagtcacaaattaataatgggacagccaagaacctgccctgccagccagcaaggacagttaagtggcattatgaggaaagtgaacagctcaaaacgtgtcttctgtatattgtcttactyaatgaactaaaggtgaaaacatctaaaatagaactacctaaagcagcccttccctttttccattcctattttctaagttctacaagttgtgtgaaatgcttttatggatgagatgaaccctttccaaaagagatgttcaagcccttgctaaaggctttaatctagatttcttaggattttgtgaaagttaatttcgaagattggcatttttggagagataacacttcttagattatgaggtgtcagaattggcagaaataatcataaagttcaatcctagcatttgcagggaaggtttgtttccgtatctacttgtattacagaatgattttttttttcctgttcaaagtgataatactctgcatcattgaa

SEQ ID NO: 454473 - DNA, 555 bp, Homo sapiens
gaattcatttatcgggtctaggagccttttggatgagtctttagttttctagctatgtgatcatatcatcagcaaacagtgacagtttgacttcctcttttccaacttgccctttatttctttttttgtctggttgctctgactaggacttccagtgctatgttgaatagaagtrttgcatgtagacatccttgtctttttccagttctcagggggaatgctttcaacttttccccatttagtatgatcttggctgtgggtttgttacagatgccttttattactttgaggtaagtcccttctattcctttttgttgagggctctcatcagaaagcaatgctagattttatcaaatgctttttctgcatctattgagattgatcacacaatttttgtttttaattctgtgtatgtgatgtatcacatttattaacttgcatatgttaaaccatccctacatccctggtatgaaactcacttgatcctgatgtattatcctattgatgtcctgttggattcagttagctagtattttgttaagaatttttgcatct

SEQ ID NO: 454474 - DNA, 556 bp, Homo sapiens
agcattggattacaggtcgttctgttaccgtactgggaccaggctgcacagacactgagttgaggtaaattctctaagtctagtaaagggggagacaaagagatgcatgagtctgttaagtggctttttggtagctgacaaacagttgttgtattagaaaggaataaactgtaaatgtttaaaggaggagaacaataaagaccaacgtctttwaacttttctctagtgtatctgactgttaggattatttaaactataaagtaaaaatagagaaattaaatatatttaagggaaattaatatcatcattcaccttattatctgctttctcatgcacataagctactacttttacactaggatatgtatctgcttttatattttctccagattcaaacagatgttagcaagcttccttcactgtacaacttttattttcctttccatataaccacaaatagttttctgcatttttcttgatcttgtttttctgatttattctcttttgcctttttctttctcaatctttaataacttcggattttcatcaggagccc

SEQ ID NO: 454475 - DNA, 556 bp, Homo sapiens
agcattggattacaggtcgttctgttaccgtactgggaccaggctgcacagacactgagttgaggtaaattctctaagtctagtaaagggggagacaaagagatgcatgagtctgttaagtggctttttggtagctgacaaacagttgttgtattagaaaggaataaactgtaaatgtttaaaggaggagaacaataaagaccaacgtcttttaacttttctctagtgtatctgactgttaggattatttaaactataaagtaaaaatagagaaattaaatayatttaagggaaattaatatcatcattcaccttattatctgctttctcatgcacataagctactacttttacactaggatatgtatctgcttttatattttctccagattcaaacagatgttagcaagcttccttcactgtacaacttttattttcctttccatataaccacaaatagttttctgcatttttcttgatcttgtttttctgatttattctcttttgcctttttctttctcaatctttaataacttcggattttcatcaggagccc

SEQ ID NO: 454476 - DNA, 612 bp, Homo sapiens
aatggattgcatggcagtatttttagtgaaggaagataaatgtcaaaatgcacctctgtaaagtgtatgaatccaagaagaaatagggaaaattagaaaaaaatattgaattgaatataaaaaatactacatttgtacaatacaggtaaaactgtgcttggaggaaaagttatggctttaaatgctcatataccatatcattaaacaagaaagttctaaaatcaaagatccaagagaggggctgggaaacatctgtaaaggataagacagtaaatattttaagctttaggccatatcgtctctgttccaactatttaactcagtcacagtaatgtgacagcagtgataggcaatacataagyaaatgagtgtggctgtattccaataactttatgtacaaagctggtggcagaatgatttggcccatggtccacagtttatagacactcaatctcagtttccactctaagatatgggaagaaaaaagcaagcaaacgtgatgtaaatagaaaggagtaataagagcagaattcacataatagaaaaaaaacactctaaaaatattaatgaacacagtatcatttttggggggaaatcataatattgaaaagc

SEQ ID NO: 454477 - DNA, 576 bp, Homo sapiens
gtttttcaaacttttttttcttttttttaaaattctgagatatatgtgcagaacatgcaggtatgttacataggtatacacgtgccatggtggtttgctgcacccatcaacctgtcacctgcattagttatttctcctaatgctctctctcccctagcccatcacccccccaataggtcctggtgtgtgatgttcccctccctgtgtccatgtgttctcactgttcaactcccacttgtgagtgagaacatgtggggtttggttttcwgttcctatgttagtttgctgagaatgatggttccagattcatccatgtccctgcaaaagacatgaactcatccttttttatggctgcatagtattccatggtatatatgtgccacattttctttatccagtctatcattgatggacatttgggttggttccaaacttttgcattctagcaactgactgagcccacccagacttgtgactgatgactcaaccagtcccctggaccccaccaagaggtggactcagaacatgaggactgcactccacactcctgtgattgcatccccagccaaccatcag

SEQ ID NO: 454478 - DNA, 585 bp, Homo sapiens
cggggtgatggatttagatgtgggatccttgattggtctctgagacataagaaggacgttagtgaaaaaacagataaaatcctcaagtctgcagtttggggcatgtggaaatgtcagtttctcaggtttgataaagggaccctggttacgtcagtgttaatatcagggaatcctggggtatcagcataaccagctctgtcctatgatttttattattattattttttcagaaggagtcttgctctgttgcccaggctggagtgcagtgtcacaatctcggctcactgcaagctccgcctcccgagttcacgccattctcctacctcagcctcccgagtagctgggactacaggtgcctgccaccgcacccggctgctctgtcctattatttttaactcttccctatacctaaaattatttcaaaatgaaaagatttagaaatgatgtagaagcaaacagtagtagaactgctgctgcgtcctcacagaacatctgtatttaataaagtctagtttatgatttgctggggtacctgaaagaccctagccaggtgtsagagagagttggatttgaattcttattaaa

SEQ ID NO: 454479 - DNA, 581 bp, Homo sapiens
aaagttacaagcagataggagccatcctccatcggtatgatgacttatttgcagatgaggaatcaaatctgagcagctttggtgcccagaacactgctgccatttaaacaaggtgctttcatgcagctcttgttgctctgagcccttgagcgctgtgcattttccctccccactaacccagacgcagccagtgtggcatgtacgcctgctttctgcccggactgaatcaccttatttgtcaacagctgacactgttcatacaggatttacacatatcactggaaatgtctgcatgctgcttaagtgcatgccaattggttaagtgtgacattgtggcaatatgttttagaacttttgtttgagctcttctagagcaaattggcccttaagtgaaaacatayggacaggagagatcccaggtgcttcaaattagcagagatttggctaattccatggattttggtatattcgacataagcaaagttcattaaatctggggccaactttgtacctgatgttagctgactaatccatcttaagaattccccaagcccacaacaaaatattcattgataatcttc

SEQ ID NO: 454480 - DNA, 594 bp, Homo sapiens
gtctcaacaaggagatgcaaaaataagtgaacaaatgtcctgctggggagatgggaaggtgtggttccatggcacttagctatgtgtttgtcatggagccccttccttctgcaagctctgatttggtattccaacatgtgaagcagagacacggtgaagaattgtttcatttctccttccctcccttcctctctccctggcttcatctccctctccttcccttcctttcttctttgcattttttctttgttttgtctgtctttgctttttctttccttccccttttttccttctagaataaggtattttatatactcagkcttcaaaaattaccttgttattcgccatccactgataacagggcttatggaagatgaacatagggttatatcagcctccagattctgcctgcagtgtattctgtttgcactatatcaagaaagttctgcttcacataggtaagtagttacttacatacgcaatcatatggtgggtcccctcagcttaagtcagcacacatcacacacatccatgtaccccccaagaagagctgcaaacatcccaaatcaatgttctgtctcaagagttcagagt

SEQ ID NO: 454481 - DNA, 580 bp, Homo sapiens
agagtgtataagttatccactgctgtataatraacaatccccaaaacattgtggcttaaaataataactgtttaataatactcacaagccaaagggtgagctggctggtaatgcggatctggctcaggctcagctgaacttggctagacttgctccttttcagtggttggctaggtgggatggctttattcacatgtctggtgcttggctgccagttaggtggagcgatgaaggctattgggctgagtgtctcctgtcatccatcaggtaagcttaggcttgttcataggtggtgacagtgtttccaggagtgagaggaatgagactctacctcttgataagagagccagcaacatcacattgcaaggggacctgagtataaacaaaagtagagagttgtggctattttttgtaatttattgaagaaagctacttacatatgaatgaatgaataaatggcagaatcaaatttgtgtctagagtaatcattctaacagcagtaggagaaatggaaaggagatagagtggacaaaaaacaagagtagctgtggactttgtaattgtactgggaaaaattatt

SEQ ID NO: 454482 - DNA, 606 bp, Homo sapiens
tacatttggtgatatctccttctaaagcagaggaagctacaggagatagtagataaagacctagtacaagacaaataaacaaaataaaacatcttttcagagtagcttatgcccacagaaggttttgaatagccacaggaggctactcctgtggcacagagggagaatgccagtggagagccatgtaactgagaccgggcctttaccatgaaatatacttccattaaaaaatatgtgaaattgaggtttgttcatttggcagaattttcactactgtcagttttctatttaattttatgtggtgttattggcttttctttttttaaaaaataataatcccatgtttctatattgtggcccctgagcttacgtttaagaagtttgtggggagatttaccactttttcaggcgaggactttaaaagagcgatacccattatcagaaacttaagccttcagtggtagaagtcagttggaaataaataatttttttaagtcacagttgacyatttacttgagctatggtattgtaagtaaataatcaaatataacctgtcttttgaattttgattatataattaatcactattaatcatgcttcaactat

SEQ ID NO: 454483 - DNA, 554 bp, Homo sapiens
cttttctttttttaaaaaataataatcccatgtttctatattgtggcccctgagcttacgtttaagaagtttgtggggagatttaccactttttcaggcgaggactttaaaagagcgatacccattatcagaaacttaagccttcagtggtagaagtcagttggaaataaataatttttttaagtcacagttgactatttacttgagctatggtattgtaagtaaataatcaaatataacctgtcttttgaattttgattatataattaatcactattaatcatgcttcaactattccaatcttttttttaacttttattttaggtttgggggtacatgtaaaggtttgttacataggtaaacatgtgtcatgggggtttgttgtatagattatttcataacctaaccygggtattaagtccagtacacaatagttgtaggtaaactcgtgtcatgggggtttgttgtacagattatttcataacccagccattaggtccggtacacacagtttcttttctgcttctctccctcctcccacccttcactgtcaa

SEQ ID NO: 454484 - DNA, 472 bp, Homo sapiens
tctttcttaagcttgatgttttttttttgcggtgtgtaatctgtgttacttactgaaaatacatcccatttctcagcaagcaggcttaactcctgaaattttattactttctccttcaccaattctgtccatttttgtaatattttaaatcctactaacctctttcattacccaaggaaaaataatcccacaattgtttaacttcgttcaataactaactagtttggaccaatttattataaattaccctagaatattctgattcagtaatgtttatgaatggatcatctcttacctctgaaactggaaaatatcaggcagtgtattccatgacaaatatcaattcactcctaaaatatacctaatsagaagtaaatttagccttgatggtagaattttttgcacttgccagagcttgacaatagccaaagacaaggttgatttataccctcagagcaggtaagccactgga

SEQ ID NO: 454485 - DNA, 605 bp, Homo sapiens
tgtgccactccaaatgttccgactgtgttaggaaagaaaatgattcagagaaactctgattgattaaagcagcattatgagtagtattctgggtgttttagaaactaaaacacattartaaaacttattttttgaaaaagagtataaatttggtcatttactggcttagtagtgattttcattttagtgcaattatgcttatattcttcctgaaatatcattggatattatcataacataccacttttataatctctgactctcaaaatatctttgagatagagataaaaacttgctacacttttaatgaagtgatgatcattgaagtcaataggttgtacatattatacacaatagaagcgttttgcaaatccctctctgtattttcttcattgttgatatatgttatcaacaagagtattatgcaactggaaagcaaaattcctctttatagatgccacattttagggactgtaaacagaatcacaaatcagtggtaccatatgctgacaatacttctttggtagaaagcatctctatttgccatgattatgaagaatcacactttttgtgtttcaatacttgagaataattataataaccag

SEQ ID NO: 454486 - DNA, 615 bp, Homo sapiens
agaattcttgtatccttataactgattttgggacaaatcataatttgtccagctcagacaagttacccacaatcatctagtaaactaggccaaggggagggataacacagccccctgtccattcagaagggggtttggggcccactattcctagaacaggcattgactaacagggaaattgactagcaagttctgtttagctctgttttgaagatggacttaaaaatttaacagaaggaatgtaaaaacaaagtagagaatatctgttaattaatttcctaatcaatttatttttaaagtgacttacatacattttcactgttcacctttccatgtgtccccttagcctcatgtctggcacatgacatggaggatggtggctgtcctgtctactccttacatcataggaacaggggatgrgtaaaatggaggcccagatgtctaaatatttaaagttacaaatcaaactaacagattgttgaataaaatatgttttatcctatttcttttacaaattgaccttcataattattagaaaggccagatttaaagttagggatctcagactccataaggttctatgctcaaatgaggtggcttacccatttttctttc

SEQ ID NO: 454487 - DNA, 515 bp, Homo sapiens
agctataaaattattagctggaatttctttaagaatgctgaatataggctccctaatgtcttctggctttttaggcttctgctgaaaatttcattgttagcctgatagggttgctttattaggtgatctgcctcttatctctagctgcatttaacattttttctttcattttgaccttggagaatctgattactatgtgttttggagatggtcatcttgtataktatcttaggttctcagcattttctgaatttaaatgtttcctctctagtgaggttggggaaattttcatggatgatatcttcaaatatatttgccaagtcgcttgctttctctctctcttttagggatgccagtgagtcatagatttggtctctttacataattttacatttctcagaggctttatttattcttctttcttcttttttcttttttttttgtctgaatgagttatttcagagaattgttcttcaaggtctgagattcctttcttagcttggttgattctgttg

SEQ ID NO: 454488 - DNA, 593 bp, Homo sapiens
cttttctggtatttaaggaacaaaacaggatagatctcaacacccatcataacttagattttcaattatttcctatgatatattctacataagttgcttaaatatgtatgtctgttaaataaggactatgccataaaactgtgcggaagaactgtgcaactactaaaaaaggtaaagtggcagattctaaaagatttacttcccatttatcctgtattgtgagcattacttgaatgaattacaacagactcagttaattttttcatacataattgttacattttatctagcctattaaatctaacatttaaatttaaaaacccagttaccgtaaattaaatacctgccaattttatggatataagcacatgctaatcttcatgctggaagatgagccatgcagataatgagaaacagagctatatttagaagcacataactcgagctggttatttaaattttagctccgctagatcttgtatgwagtttttttccattttgtgaaaagtatgttcaacagttcttctaactgtatcatttaactactgagaagcctacctgacattacctatttttgtgcagacaatcgcagt

SEQ ID NO: 454489 - DNA, 570 bp, Homo sapiens
tttttccattttgtgaaaagtatgttcaacagttcttctaactgtatcatttaactactgagaagcctacctgacattacctatttttgtgcagacaatcgcagtgttgcatttttggttactgacacacaaaagcagcactgtggtttttctgaatacactttcagctctatatgacatctctggtaatatctgctrtggcttcctgagaagctccctaaactattgatgagcaagagagaagcaaagggaaatacaaatcccaaagggtgccttccttactctctttgcaccttgatcattttcatgctccttggcttgaaaggagtgtcctacgtgtttgaacacttattgtatgccaaacactatcccgagaattttacttatatgctttatcctcatttaaccttgataaactttatgaaatagccactgattatatctttattttacagatagggtgacagaagagattatgtgacttgcaaatgcctaataaggtcatatagctaataaaaacataataaagattcaaacctaggcagcctaacttcatagccagtgttctga

SEQ ID NO: 454490 - DNA, 596 bp, Homo sapiens
tctgcaagacttgaaattccccgtggaccgggccatgtcaaagccgatataattaactagaggctcagcaacggatcaattaccagacaagcaagtgatagtgaaatcaatgaaagatcatcagccacattatcagtgttgcaactcattagggcaaaactgagaaatgtgctcaaagcaagcccaagcaaggtggcattacaaaacaaagggctaatttggagaccctgctgtgaacaatctgtaacagaattagccttttttccccctaaactgcacagctccgtaactaaatgtgacagactgagagaagcagtttattaagacaccaaccccaagtttatttagttcataaactctctcctagaaaatcaatacagtctgtacagggttattaggctgactagctaatacatccaaatctagtctgcccagccagcagtcttctgacaaaatgctacccagtrtaggcaaactgagctccttcagatatcatggactgaggtggccctggctgaaacacgtctgcaatataacatgttactgccacaacacgagccttaaaagcagcaggatatctttctaagttttaaaaa

SEQ ID NO: 454491 - DNA, 440 bp, Homo sapiens
agaacaaagtatgggacttgctctccaacatctgttgggctgtgtgaaatgttaacagatgtcttaagtgaaaaaagaagtaataaaggaaacctcttctgaaaagataatccacccaaatttccatattcctgaggaaagaagttgacagcaagctttttcccttgtgaaacctgccatccttactttattgtgtaaagtttcattttctatgtgaagttaaggggaaaaaatttttgactcactgtaaagaaatgaayagaaaagaagtaaaacaataatttcaattcaggttttccctttgtaaaaaattatatcataatttaagctgcctgttttccctggactcacatatgtaaatagatggaaagacagtaaaaagttcacctcctcccgcccaaaaaaaaaagaaaactacacacacaaagatgaaatattac

SEQ ID NO: 454492 - DNA, 440 bp, Homo sapiens
tagagaaagtttcagaaattacagtggtagggagaaaatccacacattcaaaaaccttaagttttcagaaartgttgtcactttatcaagtggaacgccgtgagaggtcaattaaaggaaaacacctttcttccacattcagccttccacatgcattcttttggggtttgccttagatgtaaaagtgtgcgtatttatgtatctaaataagtgaggtgggaaacagggggaggaacggcacatgatccatctacttacagatgggctgaagcatgcatgcgaacacacacaaacacacacgcagagcaattcgcagattatcaactcatgccatgagctactgcaaaaaagttctatgattttaaacttgccatttatacaacaataagcttcatttgtaaccacaaagcattctgaaaaagattccctggcaagcccca

SEQ ID NO: 454493 - DNA, 440 bp, Homo sapiens
tagagaaagtttcagaaattacagtggtagggagaaaatccacacattcaaaaaccttaagttttcagaaaatgttgtcactttatcaagtggaacgccgtgagaggtcaattaaaggaaaacacctttcttccacattcagccttccacatgcattcttttggggtttgccttagatgtaaaagtgtgcgtatttatgtatctaaataagtgaggtgggaaacagggggaggaacggcacatgatccatctacttacagatgggctgargcatgcatgcgaacacacacaaacacacacgcagagcaattcgcagattatcaactcatgccatgagctactgcaaaaaagttctatgattttaaacttgccatttatacaacaataagcttcatttgtaaccacaaagcattctgaaaaagattccctggcaagcccca

SEQ ID NO: 454494 - DNA, 510 bp, Homo sapiens
ttatttttggtttttgtcagtgtttcacatacagagaagtcaaatgtaaggactaatcgggaaggtttaccttttatgtttacttttattgcctaatttagccaaacacattactctaaactataatgttgtaaagatgcttgattcggcaataatctaatccaaaaattatattaacatcacatctttttatttayaccatagttgtgtgaataattttcgttttgaatgagctatcaatgtaatactcaaaaaatggccagaagactcactacattcagaagattcactacattaattagagaagatcttggcctctgtggtttcttcctaaaattcactctttctaaatgaactttaatgtttgtgtgtttgggggagttcagtgctgggctgatcaagggcaagtacttagggtgaatctagaaatcacattgaggcttacaattggataaaggcagacagcagaactgggagcaccaacagtagtggggaaagagtaaaggatga

SEQ ID NO: 454495 - DNA, 584 bp, Homo sapiens
tcaagccttcttttttgcatagcttacaacactttacctttattttttcattaatccttaaaatatccctgtggaataggatgagtgggtggcatcttagggtaaacagttactatcctttctggtgaggaaaccgaggcatatagaaatggttgtttttaaagagttatctgactagaaagaaaagcaagataaaattaatttttagaagtgaaaaatattttgcattacgtatagcacatgtcaatatttasaaaacttacacaaacataactttgtggacctataattttctaaaagtttggaaagtaggcgacacttaggattggaaaaggcatagctttgtgaataatttttttgctacctggaagctgcaatatattttgagctagaagcttctataagatatttcccttttctgaatgcaattgattatgctatactgcataatactacatttacctatatataatccagttaaagctgtattacatatttatagaagtcagactttggtctgaaatgccattatttataaacacaaatcagtgagtaattagtctactgtgtaaaaaaaataaaaa

SEQ ID NO: 454496 - DNA, 584 bp, Homo sapiens
tcaagccttcttttttgcatagcttacaacactttacctttattttttcattaatccttaaaatatccctgtggaataggatgagtgggtggcatcttagggtaaacagttactatcctttctggtgaggaaaccgaggcatatagaaatggttgtttttaaagagttatctgactagaaagaaaagcaagataaaattaatttttagaagtgaaaaatattttgcattacgtatagcacatgtcaatatttacaaaacttacacaaacataactttgtggacctataattttctaaaagtttggaaagtaggcgacacttaggattggaaaaggcatagctttgtgaataatttttttgctacctggaagctgcaatatattttgagctagaagcttctataagatatttcccttttctgaatgcaattgattatgctatactgcataatactacatttacctatatataatccagttaaagctgtattacrtatttatagaagtcagactttggtctgaaatgccattatttataaacacaaatcagtgagtaattagtctactgtgtaaaaaaaataaaaa

SEQ ID NO: 454497 - DNA, 594 bp, Homo sapiens
catagccttacaagctggtcttacaagttaytattttcatggctgaatgctaacagactgcatgtcttgctttatcagagtgtaaagtgagaccttttttttaccttgaatttttttgttgttgttctttatgcaatcatttaaacaatagctctggcatcacttgattgtgctattagcctcaccttttcagcaacaagtattctaaattcctatcttgggagctgcttgggaacctggatttttgtatgataaccagtcaaaaaataacataagattgatgtccagggttggatttttatgtgtcatttaaaaatggcatttgtgccacagttcactttacagccgttttccagataattcaaaatactagaaaaatccatctggtcctttagaaaactatcctggagcccttcccttcatgtgcaggttatagaaaaaactctggctggatggatgctttggtgactaatttaaagtatctggcaggacgattgatagcgcctttcctttgtgttgtaacaaatatatttcggctgcagtttattaacataattcagcacaaccacagacatattgtacatattaaagcat

SEQ ID NO: 454498 - DNA, 594 bp, Homo sapiens
catagccttacaagctggtcttacaagttattattttcatggctgaatgctaacagactgcatgtcttgctttatcagagtgtaaagtgagaccttttttttaccttgaatttttttgttgttgttctttatgcaatcatttaaacaatagctctggcatcacttgattgtgctattagcctcaccttttcagcaacaagtattctaaattcctatcttgggagctgcttgggaacctggatttttgtatgataaccagtcaaaaaataacataagattgatgtccagggttggatttttatgtgtcatttaaaaatggcatttgtgccacagttcactttacagcygttttccagataattcaaaatactagaaaaatccatctggtcctttagaaaactatcctggagcccttcccttcatgtgcaggttatagaaaaaactctggctggatggatgctttggtgactaatttaaagtatctggcaggacgattgatagcgcctttcctttgtgttgtaacaaatatatttcggctgcagtttattaacataattcagcacaaccacagacatattgtacatattaaagcat

SEQ ID NO: 454499 - DNA, 560 bp, Homo sapiens
cagaattagatagacgttttaggttgttaataaagcttttttgtgggatgtttaaaaccgtagatcttttgacccatgttctgtatctttctgactcacctcttccttgtctccttttgatacttggttgcaaaactcttcagtacaacaggtggatattcttttacattcrtcatagatgagttttgtaatcaagtacaagtgaaattgatatgtagtcttgtagttcatgctggtcttaagtaagcttagtagttgtccaccgtgcaagaaaaaatgcagaattttttcgctcaagctgtattgtgatgtggccagttaggaagctgatttcttctcccaaggcagtattatataaattctgaaaattatacagggagatatttgctgacttaatcaccattactatcatgtgagttttttagtctttgtggcaatgtttgaagtactgtcttagcatatcatacacaacctatataaaagtgcttgtttcatctttttggtcatgtttataagatcactctctgcatccacaatgctagcaagccattagtttgttt

SEQ ID NO: 454500 - DNA, 601 bp, Homo sapiens
ctacctgcacaaatagagaactacttcttctctaactgcttaaattatcattcctataagcagtacatatttctttaaacagaaacaaccagaaagaaatcagataccacrgaaaaagaaatgaagatcagctcatccacttataagaagcaaaaacgtgttagaaacttgaactgcagcttagagtggacggtaggaaactttgatgtggtttcatctcctctgcatgatacatgataatagttaaccttataatttgtggaccatgactccaataaaaatatgtaactacaatttaaaaacatataataattgtgtaattcaactgcttttgttagaagttggtttctgaaacagattcttctatcaaataagtactgaaagcatgcataatgtttcaatcccactgggtactatttttagtttttccttacactcttctctaaatcttcactgatctatcatatgtcatggtttaatagaagcattaactatacctattcgggttcctaggaccattggaaaatgccagtaaagatttgggtctacttttgaacatctgaaagagccaaattaccctgtggcagaattctgctaaata

SEQ ID NO: 454501 - DNA, 601 bp, Homo sapiens
ctacctgcacaaatagagaactacttcttctctaactgcttaaattatcattcctataagcagtacatatttctttaaacagaaacaaccagaaagaaatcagataccacggaaaaagaaatgaagatcagctcatccacttataagaagcaaaaacgtgttagaaacttgaactgcagcttagagtggacggtaggaaactttgatgtggtttcatctcctctgcatgatmcatgataatagttaaccttataatttgtggaccatgactccaataaaaatatgtaactacaatttaaaaacatataataattgtgtaattcaactgcttttgttagaagttggtttctgaaacagattcttctatcaaataagtactgaaagcatgcataatgtttcaatcccactgggtactatttttagtttttccttacactcttctctaaatcttcactgatctatcatatgtcatggtttaatagaagcattaactatacctattcgggttcctaggaccattggaaaatgccagtaaagatttgggtctacttttgaacatctgaaagagccaaattaccctgtggcagaattctgctaaata

SEQ ID NO: 454502 - DNA, 609 bp, Homo sapiens
  misc_feature (1)...(609): n = A,T,C or G
ggagaatcaaatatcccatcgctgcaggtttgctgagggaaagagcactgcaaagatctcacatctggcaatcatttgtcaatagctggaaagagaactgcaggaaacttntggctcttggagaagatgaaaagacaaaaaccatgtgtcacacacacaaactcacacacacactcactcactctgcaatggtacaatgactactacacttattctctacccctcccttcccccactaaatttaatgatcttcagatatactctactccatggtcaaaaacatgcagtcacttgacttgttaaagctgcagtgtatgtacatttttcaaataaaccgcagggctgatgttagaaaatcaaaatcagtcaagcatagaccgcctggtactttgggcaggaatccttgcggtttagtcaataaacagaatctgaatgaaagacaccacagtaactagacagtaacgttttgaacagatcttaacctgaaagagggggttgggggaccggtgcgctggtgaccaaggatgtaaggctactggtccacttagactgctctaccggcaacacsactttgtttagcacaaggtcatctatttggaacagaaaaaa

SEQ ID NO: 454503 - DNA, 458 bp, Homo sapiens
actctcctgtatatacataccttgaaggaatcatggtgtgtgagagagctatttacaacttactttgtgtataatcagcagaaacaaaagatatgacaagtataaaggcctctctctctcccctcaggagaattcaacaagggagggccagtgggcattcacttcggtgtcaaaagggcttccagaaaacatattttctgtggggcagggaggaaatatggcaggcttcctacacacataaccacacacacacacacatacacacactytttgtttactgagatcccaaaaaaaaaaaaaaaaaaaaaaaatgttagggaccagacttctgaaaagaagacataaaaagctccaggttgtaaatgggagctaccgttgaaaatatttgaagatgaatggctgtgaaaaatgggtggcagaaaggggacaaaggaaaaaagagaaaagtcacagaaatg

SEQ ID NO: 454504 - DNA, 592 bp, Homo sapiens
agaaaaattcaaagggattgaatcctaaaacacctacacttaaccatttttatttacatgctattattacaaaacaaacaagcaacaatattagatcaaaaaactggatttactgacttattgcttgtgcagagagttctgccttccaagcaacataactgacaagsaactattttaaaaagtatgtataccaaatgaaaaattaaaatcatactaaatgtttacaaatgtttttataattttaaaattgttctcatgtagccctttataaccaatcacaacagtactaatttttgcaagttaacagaggtcatagttttgcaccccaaaatacccctttcttcttctaccactgattctcctaccactgaaggatgtcttccagattgtctttttctgatcattcatcttattaactatcttcatatgatgcacattcactttcaatcttgtccaattgttttattattcctcttctctactgtagtcataggcaattctaaaaagcacaaagtcccctctttttgccctgaccttgagctacagccaggtgagctgtgattatccctacagaaggcagaaggtgttccag

SEQ ID NO: 454505 - DNA, 547 bp, Homo sapiens
aatcagaacaatacagaacctgctgaagaaaaaatgtcgtatcagtaagttcactgaaattcaaaaaggtgcccaragttttgtagaaatgttaatttattttggtgggtacaatgtgagtagatcaaatctgtgataaccagccgtgatttccattttccttgagccaaaagaaaactttactgtgttaaatggcatttagaaataagagttttaaagttctgtaagctacgttttaatttctagaaagcaaaataggtgaaagttttctcatgaacttctattaaaaacaggacatgcatgtgcaaacaggcatacgttaatttattctgctctgcagggattcatttggagtcgagagattggctaaatcaaccccctcctcaacacacacatacaacatgcacatgcaagcaaaggcagttaacagacaccaaccctgagtgagggaaaactcactcagagatgagaaaggacaagatgtgtatggacaaaagagagaaggaaggaaaagcaaagagatggtgtgggaggaaaaccagattga

SEQ ID NO: 454506 - DNA, 597 bp, Homo sapiens
aagttccccactagacttctgtatcataattgatctgtcataatgcttagtacagggtgtgaatattatattattggtgtgattatcgatatgggtttgttttcccctctagaatttaagttccatgagggcagtatagacatgtctgttgggctttcaatgtatagtggcaaataacaggtgctcaaaaggcactttaaaaatacatgattctctgagcccgctttcttcatctgtaaaatgatagtaacaatgacattgcaacagtggcaaaacactcaaatgaaataatgaagaaaaagtaagtgttaacctatcyggcaacaggaaaagctcaataaatgacaaccatttatggccacaagaaactttccacatattacatttaaatgattgttttctctcttatgattcttcccaatgtattgttttactccaacaccttgcaaattgcttaacacatatttagtcttaataaataaatgaacactttgacatacataataccatattattcatactatagtcctctaaggtaggcacacagattattatttctgttttactattatggttcagaaacgtttatgtgtttta

SEQ ID NO: 454507 - DNA, 532 bp, Homo sapiens
ggacaaacttttacctgtaacaaaaactagcgtaactgtatatattgaaagtaatactcgtttaaatggctggcttcaagagatatcagagatataatttcaataagtctctctctctcacwcacacacacacacacacacacacacacacgtgctgaatcagcattgctgatgaactacaggtaagaaaaacaaacatattaaatatgaacagcacacatactttcactcacatagtttgaacttaagttatgtaatatttatacaaactaaaatgtcatcttgaagagaaaaaaaatgcaagctcatatcctcttttacatgctttccaaaaatgcacaagaggtaaacattcagtgaccatgacagaaaaaggtgggttggggggataggagtgattgctaactacatcaaaaccaaaaaaaaaagaaaacatatttaaaactgtgatttctctccttttgttgtactactctatttcataaatagcataatattatacagttttaatagcatccattaagcataaatt

SEQ ID NO: 454508 - DNA, 606 bp, Homo sapiens
attaattacaacattgacttctgttgctgtttcagaatcatgttgtctgagtattatgttagtctcatttttctatttgtaaacagatctaacttatctctatagaacagtagaagaggaaaaaaaggttctcttgccattagtgagttttatttttcttgattaaataaaggtttgtgaactataaagagtacaaatttaacatgctgtaaaagcaacaagaaaaattcacgcagagcacagacgagaacaaaattcaagccctggcattcttcasaggaaccaagggccccatctgctgatgtttaaatgtactacagtagcaaacagatttaaaaaaaaataaaaaaaatcttattgaactaaaatacaataaagagcctgaagctgcagaatcttagcagcagaaggcacctttagaagttagagaacctgcccctgatccaacacttctcacccttttctgtactgctgcatagctgtatggaagttatttggagcagacagtagtttatttttaattttcttagttctcaggaaaaaagtgccaagcactaccttcactggccaccacctctctactgacagacctttggctgaagtgag

SEQ ID NO: 454509 - DNA, 537 bp, Homo sapiens
ttccccaagctggccttggtaaagctgagatcaaggggaagccaagagtaatagagatgtggtattgcccaaggtaatttaccttaattctatttctgagtctataaatatccacactcagaaccatgtggactttgactatttccatgcatacttcttttgtttattaaattcaagarttgtatataatttctggatcattctgtcccttgatggccacaatgctttttcataagaatctgcctccttccatagtcttggcttgcagaatcctattgctaggccatcccatcagtgtctactcagatcattgcttctatgtttgagaaaattttcttttgaaaaatggcagattttcttattttccctattaattacatctataactgtatcactggcatgtctatgtcaaggctgaggcatagaaaagagaaagagactgttctcatgacaagccagaaaactacttgtgagttttgtggtaacattattctaaagtagaattcagttatgcattttgttgattttgcggaattc

SEQ ID NO: 454510 - DNA, 607 bp, Homo sapiens
ttgatttggttaagtggcttcagctctagccaggaagcattagattgaaagagaaaaaaaaaccttgccagataataaagccagttagatttattgtatttatgacagtagggaattcctttaatcacatattctcaagtgcctttgggaacatggacgataataaagtgtatgctgagaggaatcagtgacagtattctccccaaggagaaaaaatgttactgaagctcatcatttcaatgtttcttgaggrgctcagaagagcaaatcttacagctgcccgcaacctggatacgtggagtgctggactggaaactccttaggaaaactattaggatacatagccagcactgttctggaaagccagtttatttaactgtgtaaggtagtgcaagggacttagagaagaaggctgaattggatcttttctctttagttaggcaggcattacaagccataccttcatatctctaggtggctttgtggtttgtgtcactggtcctagctaatggggactaggctccagatggttgggtgcaaactataccatgtagtggcccagatggctctagtaatcaaattaaatgctggctatcaatcagtgtgc

SEQ ID NO: 454511 - DNA, 516 bp, Homo sapiens
gagccaattaaacctcttttctttataaattgcccagtttttgggcatttctttatagcagtatgagaatgaattgatacacctgggaacatgtagcatgctcaaggtcacatagtcaggaagtatcacaggatcccagacatgggcagtcaagagtttgagtgacaactacatatttcatttggccctgttctcgtacaaatcagggttcttggttgtaaacagtggaaattgactttttaactgaagcaaaaaarcaatgtatgggggaaatgtcagggatttcttagactagccaggaagtcttgagaactgggctcacaaaataggcagaagccaaagcatatttggcagcaaattctacagaaaaatgccacaggaatagtcaacttgggaagctactattgaagctgctgccagtggccacttgcctctggtctctgggcttttcacccaccaccactgcccatagcagctgttggccctttcatctccatagcaaaccccaatattatg

SEQ ID NO: 454512 - DNA, 442 bp, Homo sapiens
ataaaaacgattccctttgtagcaaaacattgctctcattaaataaagcacaactttcttttaaaacatttttcygtaaggacttgaatatattttaacttgtttggaataatttcttatactgattgaggatgcatttaaatttgaaaaaaaaattatgtcattgtagaaattctagtggcacacacacacacacacacacacacacacacacacacacacagattcccaatatggatctgggggagaatctaccctttcatgatccaatatttaaaacaaaactcaatacagcaagcatactgtatacatagagtgcttacagatgtctagcaaagcaaagtattagtgtttttaaccacaaaaacatttataatttactgtgttcatgaggatatgaatctatgcacaagtaccaaaatccacttattttcatgtacat

SEQ ID NO: 454513 - DNA, 448 bp, Homo sapiens
aatgtgttttaacaaaagggccagcctcaaaggttgccaatttggtgtttattgtcattgtaatgactgcatccaatccctgggattctgttggtggtcttccagcagatgctattctggatgattcagtgctaatgtggtaatttagaataaatctgtgtgccaagtaataaattataagaactatatcatttgaaattcaactttatttaaccaatggtaaacaagtttgcttagattttttccttggatttataaaaacaactgtttgtagcatgtagggcagttaagaacacatttaattttgtctgttaaatgaaatttaataatttaagtttctttgtagactgcaaaaatgagttacaaatttttaaartgtgttattattataataactataaaattatcagagaagctcacaaagtgagactccctccaaaaaagaatc

SEQ ID NO: 454514 - DNA, 598 bp, Homo sapiens
ctgcaatatttaatgtgtaagacctctttttggccccacatcaaatattcataccatctttttctttgcaccaaatagcatgttggtagaacttaagcttttagctttagaaaatacatagtactaattttctcctgaaaaaaatttccaagagaatataacaaaggagaagagaataaattaagtttctttggcgactatgctgaagcctctagattgtgctcatggaagagaacgtgyacccctagtgcatcagtactttatcacagatacggcacctgacacccaaggcctcccaagactacttccattcccgcagctctgatacagaccctttacttgaaacaatctagtctacatctgtcctgcaaacatcccttgcatcttagggcccatcattactcctttctagctttatagttataattattcctcaacctagttccagtctcacgttccagtctgaaggttctctaacaattgacaatcttgctcttccctgtgaattcctatagtagccctctggtctcacctgcattcatttggccagtagtaccttgtgctattggttaccttcttaaatgggtgggtgccatag

SEQ ID NO: 454515 - DNA, 596 bp, Homo sapiens
ctaagaagcataaggagaaatgtgctctggtttagggattaaggtctggagtcagggagaactgagttctgatgctggcactaactagtgtgtctttttgcaagttgcttaacctatttaaacctaagtttctttatgtatataatgggcataatacaatcacttctcttattattgtgattgttaagtaagatacagaatctaaaggatgtaacacatatttaataaccaaaatatgttggatgatgagtacatagatctgactagagtacaggtaaataactaacttaaggagccagacactatggacacctttgagataagtggaatgggaaaaagatatctctctagtaaattggcctctttgaagtttttttccagttggtgtcagcaccagaaagtaaggaatccttaaaagttggtactagaactcagtctcatccacactgaagaaagcaaaggaaaaaagtatactaggagtcaaatgttctgtcatccttgcacttcaagcatgagataatttgtgtgacagtgctttgaatactatcaggtataacrcagtggccaatgatgtttctgaggcctgtgagacagac

SEQ ID NO: 454516 - DNA, 598 bp, Homo sapiens
cactcttataagcatgtaaacccctttagaagcaaaatgacacattacagggtatgtagttgcagtacacttggaaaactacactgcaaggccgacggaaagcattgtgctccatgtcattaacttccaaatatctaatatgtgtagttaccttggtttacttgcattcaaaattgcatgctatttcttatgagattcttcatatattgatgcctagtttatgtagtacataaattcagttctgtcttcaacacttckgagaatcttcacactttaaaaagaccagatacttattttatataaccgagaaaatcttgtcactgaccaaaaaaataattttaaaaatgtttttttgtgtatataaattagtatttctatacatgtgcctatcatttgataaatcatataggtaaccccagttcaaatcttatgactgtttttgcttagttaaaaccataaaaatagagaccagaaaggaataagacttagaattcaaaagtaggtgctataaatcctgcaagagccaaataaataaataaataaatatcagaatagtaatgtatcactagccagtgtcaccaagatgatttgttttact

SEQ ID NO: 454517 - DNA, 512 bp, Homo sapiens
agttcaaatcttatgactgtttttgcttagttaaaaccataaaaatagagaccagaaaggaataagacttagaattcaaaagtaggtgctataaatcctgcaagagccaaataaataaataaataaatatcagaatagtaatgtatcactagccagtgtcaccaagatgatttgttttactcctctaatctttaccrtatctaagctgactataataaatgaataattgctttgcatacagagcagttaattgaaaaaccgcaccaagtataaaaccaagaaatcataacacaaaatacaaggtttcatcagtgtttaggaacttgtctttgtcaatatttttaaggttcagcgtaaatgatactgtttactatcatatatcatagaccatcatgaattatgttaggtgtcccatgaatattaatggtcttaagttacaagatatttcatcaacacacatccaggtgtaaaattctgatggagtttggcttcctcataaaagaaaatggtgc

SEQ ID NO: 454518 - DNA, 454 bp, Homo sapiens
tgcatgggcctcatttcctgttggttctgtttctctgtagaactcctgatgaatacagtatatttgaagaaagcaattcaaaaaataaaaagtcgttcttaatttatcyccaacagagttgagattttgcaataaactggttacagttttgttataaagaggtattagagtactcagttgtgaatgttcaactacacctctgaatttcctgcatcacttttgtggactcattttcagtagacctagccaaacagtctttaaatgaacatattatatgttacttttgtcaaaagcacatcatattattagacaaagcaatgcaatttggccatgagactgctctcttaagacacctctgaaagtgtctcaaagcatagtcagctattagctaggaacagaatttcacatatttacttccaaactagccagtgcatggtgtgcaagagaataatgg

SEQ ID NO: 454519 - DNA, 330 bp, Homo sapiens
ataattagctcagttgttttgcatatttgtatgatttgtttaattatttttattagttttgtatttagtaaaagaaaatttatttatccatcaaggcctaggttctgttgcgcaattattatttattatctactgacattyctggtactgcaactgtatctgggatctttcaaacaatatttcaatatattatgctttaagtttagggagaagagacatgcacatacaaaaagtggggctggaaaagtagcttgagacgagatcattgagaacttttactggctggtgagaattttgataggcagtaagaagacattgaaggatgttgag

SEQ ID NO: 454520 - DNA, 608 bp, Homo sapiens
cttgtttaggttgtgtagaccccctgattatttattatgtcagcagactttatgtaataggaaagacaattgctcaagggcatagagagatattgttaaaaatgggaattgaatgcccagcaaccaaaaaaataartccatggtactttactttttataaaaaatgtaaaacatattcaacttaacctttgcagcaacactctgaaatatacaggcagtattaaaactgtgttatagattaggtaatttaggattaaacatatcaggtaaattctcccaaatcacatagtaattcagtgacagaataatattcaaaaccaagtgtcctcattatatattttatgtttttctttgctttctttcctattctttggggctttgatacacaaacagataagatcattgaggaacttcagttccaaaatattttctccttttatccctctggccctcccaccctctgtcatcactccttgtatctttctttgttccctttggctaatattattgaaagcttattgaatcctcttcccttaattaatttgaaaagatgaacttcaggtactgagtgtattgacttttttttttttatctccatgtctgtatta

SEQ ID NO: 454521 - DNA, 608 bp, Homo sapiens
cttgtttaggttgtgtagaccccctgattatttattatgtcagcagactttatgtaataggaaagacaattgctcaagggcatagagagatattgttaaaaatgggaattgaatgcccagcaaccaaaaaaataagtccatggtactttactttttataaaaaatgtaaaacatattcaacttaacctttgcagcaacactctgaaatatacaggcagtattaaaactgtgttatagattaggtaatttaggattaaacatatcaggtaaattctcccaaatcacatagtaattcagtgacagaataatattcaaaaccaagtgtcctcattatatattttatgtttttctttgctttctttcctattctttggggctttgatacacaaacagataagatcattgaggaacttcagttccaaaatattttctccttttatccctctggccctcccaccctctgtcatcaytccttgtatctttctttgttccctttggctaatattattgaaagcttattgaatcctcttcccttaattaatttgaaaagatgaacttcaggtactgagtgtattgacttttttttttttatctccatgtctgtatta

SEQ ID NO: 454522 - DNA, 599 bp, Homo sapiens
cttgtcagtggagttagaggaattcctagaaatagctcagtttctttaaactataatactaccagaaagaaaagacgtcataaattatgtatcaaatatattgttttgagagtcaatagataatagcaaacatttattaagtgcttrccttaagctaggctctgtgctaagaacattatgtgcataaggtcatttaatcatttgagagtaagcacttctactattacgaattgctatggcctgaatgttcgtgtctccctaaaattcacatgttgaaaacctaattaccagtgtgatggtattaaggggtgaggcctttgggaagttattagatcatgagggcagagctctcataaatgggattcatgtccttataaaagaggcccgagagagttgccatggcccttccacgatgtgaggacacaacaaggaggcgctgtctatgaaccagaaagcaggccctcaccagaaaccaaattagccagcaccttgatctcggacttcacaacctccagaaccctgagaaatgaatttctactgtttatgagctactcagatgatagtattttgtcatagttacctgaacagactaagacatg

SEQ ID NO: 454523 - DNA, 572 bp, Homo sapiens
tctagggacgtgtggacagacaagatgctgcgaatgagaaaagagaggacttagggatgacatctacattttcagctagggcggcatctgtgcatgaatttagcaccacttgctgagaaggggagcactggcattacagcagggtcctccagggttcagttttaggattgtaagtttgagatgcctatctaaagagagttaagaaggctgttggctacacaagtttagagctcaagggagagaactgggttgaagatagaaattgggagccatcagctttcaaatcatgytgaaaactagggtctggttgagatcaccttgggagtaagagagacaataactgaggagcgggaccattaaaagtgtggaggagcaaaacccagtgaggtaggtgggaaaccagtgaaatatactgtgtctgaagccaagtgaagaagagtgtttccaggaggagagagtgaatagacacgatgggcattcctaatgaccttgataaaagcaatttcagtgaagttgtgggaacaaaaaccagatctgacttgactgacgcaagaatgttaggtgagaaagtc

SEQ ID NO: 454524 - DNA, 626 bp, Homo sapiens
ctttgttagccacaataatagctattgagaccgaaaaaggattaaattgttcatgtaccaatgaactcacccttttaggttcctttcactcactcattcctaatgaatctgaagccagataaaaccacaaatgccactttttaatccactctaacaaaaatatatcaaatgtttactatattaaggtaatattaggttttgtgatatttacactttagttaggataataacatttagacactgaatcaacctgtctctcaagtttatctttacttcatcccttttctacttctcctgattctgtcatgtgccaagtcaagggcatggattaacattggttttgtagaagcrtaaagtacaagaaatcaggcaggggtcagaaataaaaacagaagcaggtagtaaaacatccttatgtgaatttagatgataaatgtcagtaatgatcttaagcagggaatatcatggtttgattcatgtgttggaaagagaactcatttgaagttagattagatgagggcaagttagaaggaaagtaatcagttagaaattaatatcactagggcagatttgtgttttctcatgatggtattgccagtacctagcacaaatcttggcattctata

SEQ ID NO: 454525 - DNA, 464 bp, Homo sapiens
tccactctaacaaaaatatatcaaatgtttactatattaaggtaatattaggttttgtgatatttacactttagttaggataataacatttagacactgaatcaacctgtctctcaagtttatctttacttcatcccttttctacttctcctgattctgtcatgtgccaagtcaagggcatggattaacattggttttgtagaagcgtaaagtacaagaaatcaggcaggggtcagaaataaaaacagaagcaggtagtaaaacatccttatgtgaatttagatgataaatgtcagtaatgatyttaagcagggaatatcatggtttgattcatgtgttggaaagagaactcatttgaagttagattagatgagggcaagttagaaggaaagtaatcagttagaaattaatatcactagggcagatttgtgttttctcatgatggtattgccagtacctagcac

SEQ ID NO: 454526 - DNA, 498 bp, Homo sapiens
tttatcacagtgactagaagatattagatattcagtaaatgttaaagtttggttataaaaaggagagrggaaaggtgataaagaatatataaatttacaactccttttgcaattttctatttttacctcttattctttgatgggccgataaagatggaacataagaatttcttgagactgtcaagtgccaataacctgatgatctggggactcttcattctgtccagactctaacattagccactagggtagcctcaagcaagccacttaagtgttctgaatcacagattccagatctgtatgttaggtataataataccactccattcagttcagtctttataatttctaaatgagtggattagaagtgactcagatcctggttcaccacacttagcacagagccttatcccctatttcagtgagaaaattaaagccatcagacatgatctcattcagctttctgccactatgaacaaacaaatcaaaatgcatgct

SEQ ID NO: 454527 - DNA, 498 bp, Homo sapiens
tttatcacagtgactagaagatattagatattcagtaaatgttaaagtttggttataaaaaggagaggggaaaggtgataaagaatatataaatttacaactccttttgcaattttctatttttacctcttattctttgatgggccgataaagatggaacataagaatttcttgagactgtcaagtgccaataacctgatgatctggggactcttcatkctgtccagactctaacattagccactagggtagcctcaagcaagccacttaagtgttctgaatcacagattccagatctgtatgttaggtataataataccactccattcagttcagtctttataatttctaaatgagtggattagaagtgactcagatcctggttcaccacacttagcacagagccttatcccctatttcagtgagaaaattaaagccatcagacatgatctcattcagctttctgccactatgaacaaacaaatcaaaatgcatgct

SEQ ID NO: 454528 - DNA, 491 bp, Homo sapiens
accacataattgcattggtttattcaaagcaactccatggtgccagctttgtaactatctgcctaagacacaattgtttctctggctgaatcagagtatgttttccctaggaagccagcatggttctggcacaacaagaaaactgttcttttggtttcaayatattcatctgtaatctctatctcatcttagaaaagattccactctttaagggcagccttagaagtcttttttttttttccagttttgtgtatatagttttgagatagcaacctatgcatttctctctctgcctttttcctattcccttctcttccactgaagcaagaggcaggccctgagctcacttgtctcccaggggagaaatagggaaagtcagaaagcttttaggacagtagataaaagggacatatagagagtgaaagcccaactccagctaccaactccctcctactccccaccttccaggtttggggcctaagagtacaaag

SEQ ID NO: 454529 - DNA, 523 bp, Homo sapiens
tactttgtcaggttgtctttattttatagcactaagcatttcataatatttcattccttatagtaccagaagtgctctttaatactttcatattgaattctactaacacgggcccctccaggcattaccatttctttccctcatatatatattttttggcctttctctgggtccgtggtatctttagtgtgccaattttccccataagaaaagctctcaattttttaatgttctttgacttctgttttactttccccagakaataaacttatagccttgagctgtacattatggtcaccattagctccatgtggctattaaattaaaattaattaaaactaagtagaattaaaaattcaattatcagtgaaaaaaaatctcaaaagaatcaaggtgattcagttcagtatttgatgaattcctttaaggccagtgaactactctttgagctcattgcccacctcagtccaatcacccacagtggagtgggaagggggcatctggtgtagaccatagcacacta

SEQ ID NO: 454530 - DNA, 545 bp, Homo sapiens
  misc_feature (1)...(545): n = A,T,C or G
agtgaactactctttgagctcattgcccacctcagtccaatcacccacagtggagtgggaagggggcatctggtgtagaccatagcacactatgggctgggtggctggagtgggtacactgccttagaggtgggagggacacagtggtaggcatttttaatatcctccatgacttcatttggattttaggacaatccttgacataaacattattcctgcttttggtctcttttaagagatgaagaaactgaaaatctgagaaatgaaatgagttacccaaagctacacagataccaagtagaaaagacaggattccttttccaataagctgggattattcaaatttcaaatgatttgggaccaggcatccagagttccagtcttccctgtcctaacatataggatgatgcttcacaagcygattcctgccccacccacagcacagagctattgtcagaacagtgagagaatggatgggaaagagctctggaatgcacgaatattgtatacatnnnnnnnnnnnnnnnnnnnnnnnnnnnnnnnnn

SEQ ID NO: 454531 - DNA, 538 bp, Homo sapiens
acgctgctgataaagacatacccgagactgggtaatttataaaggaaaagaggttgaatggactcacagttccacgtggctggggagacttcacaatcatggcagaaggcaaaaggcacgtttcacatagcagcagaccagggggaatgagaaccaagcaaaagggaaaacccttataaaaccatcagatcttgtgagacttattcactaccttgagaatagtatgggggaaaacaccccatgatttcaattattttccacgggtccctcccacaacacttgggaattatgggagctacarttcaagatgagatttgggtggggacacagccaaaccatatcagaagtctttttaggaaaaataagatgataataaaatgaacttcttacattgataactatccctgatgtactaaaaaaggcttacttggtaagtatttactaatatatatgtgtatgtctagggccttgtgtccaaaactgttctatctctctctctctgtgtctctttgtatcaattgaagactcttttgtgatc

SEQ ID NO: 454532 - DNA, 499 bp, Homo sapiens
acatgtttatataattacaagaaaaaagaggttaacacattgtgcctcgtccaatcctgtcaaaatgaacccatataatgcttcacacaggggaacagcaaaagaataaatgcaagcactataaatatacataagccacaactgaaacggtttcccaacccaactttcaagaatggatttctcccaatagacayataagagccaacatatatccttatctgcctagtgtgacctagttgaaggcagcctagaggcagagatggaatttccactacatttgtaggatgtcatgcatatgtatttaggttttagcagaggacaacaaatatctcatattcctaatttgagtaaaagcaccatttgtttttcttctcacatacctgtttgtgacacagaaagcgtggcacaaagtacacctcagagaaaagctagaaaaggttatttatggacaaatttatggaataaagatactgagaagacagtacaaacttaaacaaag

SEQ ID NO: 454533 - DNA, 499 bp, Homo sapiens
acatgtttatataattacaagaaaaaagaggttaacacattgtgcctcgtccaatcctgtcaaaatgaacccatataatgcttcacacaggggaacagcaaaagaataaatgcaagcactataaatatacataagccacaactgaaacggtttcccaacccaactttcaagaatggatttctcccaatagacatataagagccaacatatatccttatctgcctagtgtgacctagttgaaggcagcctagaggcagagatggaatttccactacatttgtaggatgtcatgcatatktatttaggttttagcagaggacaacaaatatctcatattcctaatttgagtaaaagcaccatttgtttttcttctcacatacctgtttgtgacacagaaagcgtggcacaaagtacacctcagagaaaagctagaaaaggttatttatggacaaatttatggaataaagatactgagaagacagtacaaacttaaacaaag

SEQ ID NO: 454534 - DNA, 499 bp, Homo sapiens
acatgtttatataattacaagaaaaaagaggttaacacattgtgcctcgtccaatcctgtcaaaatgaacccatataatgcttcacacaggggaacagcaaaagaataaatgcaagcactataaatatacataagccacaactgaaacggtttcccaacccaactttcaagaatggatttctcccaatagacatataagagccaacatatatccttatctgcctagtgtgacctagttgaaggcagcctagaggcagagatggaatttccactacatttgtaggatgtcatgcatatgtatttaggttttagcagaggacaacaaatatctcatattcctaatttgagtaaaagcaccatttgtttttcttctcacatacctgtttgtgacacagaaagcgtggcacaaagtacacctcagagaaaagctagaaaaggttatttatggacaaattyatggaataaagatactgagaagacagtacaaacttaaacaaag

SEQ ID NO: 454535 - DNA, 554 bp, Homo sapiens
tccttttcaagctccctgcttttgcaatagccccacttcggtgaaaagcactagagtcttcctagtcacctaagctgcaaagctctaaggcctcttttgtctccgtactatccttccctatctcaaaaagatcttcccattcaatcattcctttgagccccctgggctctataccagtccttattaactcaggcttgaattgcaggaagcctgctacctgctggagtgtgtcttatgcattcacacagagccaccagatatgccttcctggaagcaggatagggcaggaaaagcacaagttatcaagttagaagggactgatcttaaacgctcagccttaaccttactaatcaaatgtccttgagcaacatgctaaatatattggcacctcagtcccatcatctgtaagtgagaaataatgctcatcctacagcatttttgtgagacttmgagttagtgtaaggcaaacatatctttatataatcaccacaaattgcatgatatttagcaaggcatggtaaatgatattacttttattgcactctcctgttcta

SEQ ID NO: 454536 - DNA, 554 bp, Homo sapiens
tccttttcaagctccctgcttttgcaatagccccacttcggtgaaaagcactagagtcttcctagtcacctaagctgcaaagctctaaggcctcttttgtctccgtactatccttccctatctcaaaaagatcttcccattcaatcattcctttgagccccctgggctctataccagtccttattaactcaggcttgaattgcaggaagcctgctacctgctggagtgtgtcttatgcattcacacagagccaccagatatgccttcctggaagcaggatagggcaggaaaagcacaagttatcaagttagaagggactgatcttaaacgctcagccttaaccttactaatcaaatgtccttgagcaacatgctaaatatattggcacctcagtcccatcatctgtaagtgagaaataatgctcatcctacagcatttttgtgagacttcgarttagtgtaaggcaaacatatctttatataatcaccacaaattgcatgatatttagcaaggcatggtaaatgatattacttttattgcactctcctgttcta

SEQ ID NO: 454537 - DNA, 541 bp, Homo sapiens
atatgcagttttgtttactattgtattatttgagcctctaacagtatttggcacattaataggcattcaatcaatatttgttgagtgaaggaaggaattattttgggaaggaataattttgagatgggtaatgttttacgagtttgaaactcaggtgaaaggattgtagaataaatttgtgagtcattagcacatagataatatttacagctaagaaactggttaagattatccaagggtatagtgtgaatagaggagtgccaaagagtgatcttagaagtcaagaagagaaagagaagcaaaggtgattgaagatgtgcagtaaggtagaagaaaaacaaaaagagtctaatttcaggaagactagagaagaaagtgttttgagaasgacatggtcaattgtgtcaaatcaagctatgagaactgcttaattatggtaagcttgaagaactaatcattttgatttgacacgaaagcattgttagcgacctcaatactattgtctgcttggaatgttggggacaaaagctaagctggactg

SEQ ID NO: 454538 - DNA, 612 bp, Homo sapiens
aaggaattattttgggaaggaataattttgagatgggtaatgttttacgagtttgaaactcaggtgaaaggattgtagaataaatttgtgagtcattagcacatagataatatttacagctaagaaactggttaagattatccaagggtatagtgtgaatagaggagtgccaaagagtgatcttagaagtcaagaagagaaagagaagcaaaggtgattgaagatgtgcagtaaggtagaagaaaaacaaaaagagtctaatttcaggaagactagagaagaaagtgttttgagaaggacatggtcaattgtgtcaaatcaagctatgagaaytgcttaattatggtaagcttgaagaactaatcattttgatttgacacgaaagcattgttagcgacctcaatactattgtctgcttggaatgttggggacaaaagctaagctggactgtattgagggaatgtgaggtgagagagaagaggtatcaagtctaactagttatttcaatggggtttcaatttaggataccatagaaatgaacctgaagagatacataaagtcacataaattttttttaaacattgaattaaggcatgtttatataggtataaa

SEQ ID NO: 454539 - DNA, 612 bp, Homo sapiens
aatctgctgtcttaatatgctatcaatgtaaaacagcaatcatttataattgtcatcaaatgacaaagttaagtgtgataagaatattttgcacaccaattaatttttctatcagytttgatactttaaaatgttgaacatacagttctttaaactgcattgtttcttttttagctgtttaaaataaattctttaagaagtgcaacaataaaaaaacaaatcagcaatgttaaaaaatatgtaaggagacatgcagattttaatcttcttgttgctactgtattaaatattttgtccttatcaaaatgtatgcacaaaaactggacagaatatgcttctgtgatctttagcagctctgtattgccccataaatgactcagctacaaatcagtgaatgtgcttcaggctttgatttttgttattagttcaaagatgaacatcatgaggacatcactcagagacagatttatcatgttttgtttcagatctcatagtgaaagctgaattttcttgtctttgttctaccaaatacattgctatatacatgatagtttaaaaaaattaaacctttttgaatatgctagagaatattaaccaatgcataataaaatt

SEQ ID NO: 454540 - DNA, 590 bp, Homo sapiens
actgtaacaatacaaaggaaatgttattttttatagcaggtagcaaagcggtttcctcaaaggagagaccctatttgtgatttctttcataagcctgcttagtggataggcctccaggacttctttgtcagctggtgcttaagcttgaggagttgaaatgcgtttgtgtttgccataggaaagaggaagagaactggacaaggcatgaggggaagaagactacatatcacgtagccaagaagacagatgtggggagtgcattgtgacttgtgatataaaccttctcctctgtctctctaycttttcaccaaaatctacacttgtagttttgctaatggaaaatgtcaagacgtgctgaaagttgccttgaggttgtaaacagatttaaagagtgaaagtagagcctgcccatggaaggacaagtcatgggggttacagagtggactctctctgacagacttctgttattattgcttgccccaggcagctctcacttattttgtatcaaattatcccctcagaacgtcatacctgtctcattctacaaagtcttccctggcaacacacactctagactcctaacttactta

SEQ ID NO: 454541 - DNA, 600 bp, Homo sapiens
taagcagctattctctagttaatatagaaaaaaaatgctttaaaatggaaggaaaagaatcttccattaaagaaatagataggtgtcatcctcccagccaaataactgggctttgcgcggggtaggtatttaagtttatggctatagcagtatctggattgcagggttcaaatcatatgttyctattttctggctaacctcttatctctcagcttcagggtttggcatagacctaggatggcacagaatcatctaccatttctatgagatagaagcctgagaattcttgccattaacgttcagcctttctctcataggggtttgccttgctgctgaaatacgcagttggtctagatggaaaatagctttctgacagtgtcaattcaaggatgttctgagtttattattaactctgggaattatatcataagaggcaaatactcctacaaaacattgatcaatgccactgttagagatacttggtcttaggttgatttgatcagaattacatttactatgttttaagtacaagaagagccctctgatgttcctcattgtggagttcttttcaaatagaatgcattgtaaatgtcatctcct

SEQ ID NO: 454542 - DNA, 599 bp, Homo sapiens
cagtttttacagcaacaaatagcatgcaagtaaactataaaaatgtattcagcaaggtagggtgactcagcctgcaatcccaacattttgggaggccgagatgggcagatcacttgaacccaggagttcgaaaccagactgggcaacatagagagactctgttctctacaaaaataaaaataaaaattagctgggagtggtggtgtgttcctgtagtcccagctacttgggaggctgagatgggaggatcacctgagcccagggaggtagaggctacaatgagccatgattgtacccctgsactccagggatacataataccctgcagtgcactccaagtgcaccctgcagcctgggcaacagagtaagatcttgtctgaaaaatacataaataaataataaatatgtttttatttttactgcatattctcttctttaataagttgttctacatttcatttttctttattacctcttttaaaactataccactttctctggtctttctgttgtttgcatttcatgcctttgacttttcttaaccctatggaattctgacatacttacatggaacacatatattatttaattcactacat

SEQ ID NO: 454543 - DNA, 599 bp, Homo sapiens
cagtttttacagcaacaaatagcatgcaagtaaactataaaaatgtattcagcaaggtagggtgactcagcctgcaatcccaacattttgggaggccgagatgggcagatcacttgaacccaggagttcgaaaccagactgggcaacatagagagactctgttctctacaaaaataaaaataaaaattagctgggagtggtggtgtgttcctgtagtcccagctacttgggaggctgagatgggaggatcacctgagcccagggaggtagaggctacaatgagccatgattgtacccctgcactccagggatacataataccctgcagtgcactccaagtgcaccctgcagcctgggcaacagagtaagatcttgtctgaaaaatacataaataaataataaatatgtttttatttttactgcatattctcttctttaataagttgttctacatttcatttttctttattacctcttttaaaactataccactttctctggtctttctrttgtttgcatttcatgcctttgacttttcttaaccctatggaattctgacatacttacatggaacacatatattatttaattcactacat

SEQ ID NO: 454544 - DNA, 569 bp, Homo sapiens
ccccaaaataatcaacattaataaattagtaagatagacgtttggtcaaaagttatcgaattttcaaaatcatttgttgctatgtgtttttggtaaactttagaacagttttttaaaatagatattaaaatgtctgaaattgtatatgtgtgtttatatacgtatgtgagtatgagtatgtgtatattcagtgtacaagaatgttagtccactggtccactatgataaaacatattcatgtctttattcaatcattcagtcattcaacaaatagtggctacagagtcaaatgtactatgccatcttgtagtaatgagtaatttacataccctaatctcaagcaattcatatcctcaagaggatacaatacaaataaaaaggtagcacaacataatgaggtaaatgtgatacagkgtattcatagaattgtttccacttaaagaacacatgcaattgatgtttcatattaagggccttgtgaatatggtgctctaggcaaagagtataagtgaccatggattaacttctaaatgcactgcaagaaattggaaccaggtggaaaaaggtga

SEQ ID NO: 454545 - DNA, 569 bp, Homo sapiens
ccccaaaataatcaacattaataaattagtaagatagacgtttggtcaaaagttatcgaattttcaaaatcatttgttgctatgtgtttttggtaaactttagaacagttttttaaaatagatattaaaatgtctgaaattgtatatgtgtgtttatatacgtatgtgagtatgagtatgtgtatattcagtgtacaagaatgttagtccactggtccactatgataaaacatattcatgtctttattcaatcattcagtcattcaacaaatagtggctacagagtcaaatgtactatgccatcttgtagtaatgagtaatttacataccctaatctcaagcaattcatatcctcaagaggatacaatacaaataaaaaggtagcacaacataatgaggtaaatgtgatacagggtattcatagaattgtttccacttaaagaacacatgcaattgatgtttcatattaagggccttgtgaatatggtgctctaggcaaagagtataagtgaccrtggattaacttctaaatgcactgcaagaaattggaaccaggtggaaaaaggtga

SEQ ID NO: 454546 - DNA, 488 bp, Homo sapiens
ataagcaaagagatagaattaaaatgcaacattaattttactggcttctcacaaactgaaatattctgaagagaaaattgaaattagcatatactgagcttagaccctaaagtgttagaagccaaaaggttttagccttggcatggccaaaagcactgcttactttttgataatggcataattgctttttttcatatcagtgaaagcagaaacagaarcagcatattgactttataagtcataatcaggctggcagcctgtattagtctgttcccacactgctaataaagacatacccaagactgggccatttctaaagagaaagaggtttaatggactcacagatgactggggaggcctcacaatcatggtagaaggttaaggaggagcaaaggcacatcttacatggtggcaggcaagagaggatgctcaagggaacagcccttttataaaaaacaacaacaaaaaatcagttcttgtgagactta

SEQ ID NO: 454547 - DNA, 555 bp, Homo sapiens
  misc_feature (1)...(555): n = A,T,C or G
gttcacacctgtaatcccagcacttcgggaggccaatgcaggaagatcgcttgagacgaggaattcgagacctgcctgggcaacacagtgagacctcctctctactaaacataaagaaaaacaanacgtactaacaaaaagaaacamaaaaaaattcagctgggcatggtgctgtgtgcctatagtcctagctacttggcaggctgaggtgggaggatcacttgagcctgggacattgaggttgcagtgagccatgatggtgccactcctggcctacctgggtgccagaccaaaactgtgtgtcaaaaaaaaagtaaaccatgttgaaaaatgaaatagtcttccccaagaggcaatggtttgcccatcactgcaaatatttaaaggacagagaaggattgttactgagctttaggcataaattaggtgttcagactcaattcctccaaaatggatagtttattattctaccgtgtgaaaatttctgctattttctctcagttttctccataaaatataatattatacgtgaattaagcatggaaatatttaata

SEQ ID NO: 454548 - DNA, 580 bp, Homo sapiens
tgtccatacatcatatatcctgataatgtatacattatatacatatgtgcatgcacacagatatgtacatcacacatgtgatattttgtattaattatcagccttccactcctcatagatagaagtacattgacaagtattcaaaatgtctacagacatattaactttattcacaatcctacgtgtatgcacatgtgtggcatttttatttaatatatgtgggtcttaagtgattcactaaatagataatgggatttgcaatcagttcctacaataatttgttaaaatacagcctcatgtatttgatctattcctgctttaaattatattctcaattatatcattgaggcaaayataaatagggacacatgtatagctagttgattatatacatttaatggagtcctgacctcaaatttattaaaatgcttactatttagttactcattactatttaaaggaaactttgccactcccttggctttgaaggtgacatagacagttggatatttgaaaagtctgattagttaagtggtaatgctaacttagaattgttacagaattattcatagaataaata

SEQ ID NO: 454549 - DNA, 580 bp, Homo sapiens
tgtccatacatcatatatcctgataatgtatacattatatacatatgtgcatgcacacagatatgtacatcacacatgtgatattttgtattaattatcagccttccactcctcatagatagaagtacattgacaagtattcaaaatgtctacagacatattaactttattcacaatcctacgtgtatgcacatgtgtggcatttttatttaatatatgtgggtcttaagtgattcactaaatagataatgggatttgcaatcagttcctacaataatttgttaaaatacagcctcatgtatttgatctattcctgctttaaattatattctcaattatatcattgaggcaaacataaatagggacayatgtatagctagttgattatatacatttaatggagtcctgacctcaaatttattaaaatgcttactatttagttactcattactatttaaaggaaactttgccactcccttggctttgaaggtgacatagacagttggatatttgaaaagtctgattagttaagtggtaatgctaacttagaattgttacagaattattcatagaataaata

SEQ ID NO: 454550 - DNA, 580 bp, Homo sapiens
tgtccatacatcatatatcctgataatgtatacattatatacatatgtgcatgcacacagatatgtacatcacacatgtgatattttgtattaattatcagccttccactcctcatagatagaagtacattgacaagtattcaaaatgtctacagacatattaactttattcacaatcctacgtgtatgcacatgtgtggcatttttatttaatatatgtgggtcttaagtgattcactaaatagataatgggatttgcaatcagttcctacaataatttgttaaaatacagcctcatgtatttgatctattcctgctttaaattatattctcaattatatcattgaggcaaacataaatagggacacatgtatagctagttgattatatacatttaatggagtcctgacctcaaatttattaaaatgcttactatttagttactcrttactatttaaaggaaactttgccactcccttggctttgaaggtgacatagacagttggatatttgaaaagtctgattagttaagtggtaatgctaacttagaattgttacagaattattcatagaataaata

SEQ ID NO: 454551 - DNA, 453 bp, Homo sapiens
gtgaaagcaactgtctgcttccaagacggcaccctcttatattctccagaggggaggaacactgtgtcctcacatggtgggagaaaccaaagggcaagagagtggtcctttcagcctggagctcttttataatgttgctaatctctttcatgagtgcttaatgcagtgatgatgacttaatcatctctcaaaagccacascttttaattctgttttattggggattaagtttcaacatgaattttggaagggggcacagtcaaaccatagcacgcacttttgtgaatagtaagcaatattcatatttatctatttaatcatattcatacctatatttatctatgtactaaactatactatttatacatatctatatctatttactagaaagacagtgtcactggtcacagtattaataggataagcatttataatacatggacttggtacact

SEQ ID NO: 454552 - DNA, 499 bp, Homo sapiens
caacctaattcaattaatcttaccacctattcttaagaacaattactcacaggaaaaatacagctgcaccaaagaataaaatccatacctgccacttattaaagtaattttcaatttgcttaagtctctgtgcctcattttcctgtacgaagaaaaaaaaccacttcctcgtagtaagttgtcataaatattatcaaatatcattctcaaaaatcctgagttgcattaaagcaamaataaatcatgaatggtatatttttattttctttttaaaatgtagaataaaacacaatggaccatagacatgtacttagggtaccaaccagtggacatgacaagataacataatgttgatagggaataggagtagggaacaatgtataactatctaaatgtgcatgggaaggggtgctaactagccctagtttttaggagttccctacagaattacaaggaccactgcttaatatcagttatgagagaggctgtggtatgcatc

SEQ ID NO: 454553 - DNA, 621 bp, Homo sapiens
ctaatgccctcactaggagcagatgccagcatcatgcttcctgtacagcctgcagaaccatgagccaaaattaaactttttctttataaattaccatgcctcaggtattactttatagcaatgaaagaaatgactaatataattggaaagcagactatgaagtggatattattgtgcaggaatttctatagggaaatggaaaaaaagcaggattgggcaaatggaatgctccraagctgtgatgaccccttcacagttgtcacaagtaggggtgatggatctgtgtccttatatcctgacatcctggcattgatcagttattagatgtgagttacctagaaaggaggtatgctttgggtaaaaaacttcagctgaggcaattcctgggaagaccagctgacaacatttccatcagctgaaggaatgtatccttcagtgttgaaagcgattctggaagtcatgggatagaattactaatatcacatatatatatatatataaattgctttttcacagacaagcactacgtctatcatctctctttagcaggaaggactgggctttgcagaattgttcagcaataaatttctaggattgaattgaagcaaaattatattcatg

SEQ ID NO: 454554 - DNA, 468 bp, Homo sapiens
tgtcacctcctttggaataatttcccctgagtcctcccactctgagttagattatcctgtatatgattcctcaatgatgtgttctttccaaccaaaatattatttgccagtcttcatttgtagttacttgcttaatatcattttcccctgtatacttttagtattgtatgcacagaaacttcatctgattttgtctttctatagtgaaagaataaccccattaaaaaatgggcaaakgacatgaaaagacacttctcagaattgttctacccaatgttgagaacaatgttggacttacagtaagaagattataagtcatacacatttgttagatgcattattaaatgaatattttttctcttttttctgcagttagttgtatttatggttttctgactcacctttatgaagttgagaatcttgctttgaattaattattttattgtcctgttagtataatatagttac

SEQ ID NO: 454555 - DNA, 631 bp, Homo sapiens
tttgcagcaacatggatgcagctggaggtcattatcctaagtgaattgatagagaaaaccaaataccacatgttctcacttataagtggatgctaaatattgggtatacatgaacataaatttgggaacagtagacattaatagaggggaggaggagggaggggaagaaaggttgaaaacctgttaggtactatgcttactacctgggtgacagaatcatttgtacccagacctcaacatcatgcaatatacccttgtaacaagcctgcaaatgtattccctgaatctmaataaaagttgacataatttttaaagtatctatgtaaatttaaataaatccctatctgaacttaagttttgtgttgattttagtgtatactgaaaagacagggtttggttcaccattatttaaggtctttagtagttaatactgaatcagaatttaagcccattgaaatgtaaacctcatgagcacaggaatttttgtctgttttgttcaatgctctattctctgacacaaagaagattctgaatactaatttgttgaatgaattaatttagaacttcttcagttttaaacaaagttaacgtgaagccttcagagcccatttggtttcctgcagcattcctg

SEQ ID NO: 454556 - DNA, 567 bp, Homo sapiens
tatgccaaccatactctcagaccatagtggaataaaaatcaaaatcaacaccaaaaagatctcccaaaactacagaattatacagaaataaataactacaacttgctcccaaatgacttctgcataaacaataaaattaagggagagaacaaaatattctttgaaataaatgaaaagagatacacaacatataccaaaatctctggatgcagaaaaacagagttaagastaaagtttatggtgctaaacacctacctcaaaatgttagtaagatctcaaataaacaatttaacatcactcctagggataatagaaaaacaagaactagcctaagctagcagaagaaaataactataattagacaggaactgaataaaattaagacccaaagcccatacataaaaaatcaataaaactaaaatttggtcccttgaaaggatacacatgatcaatagattgcagctagattaaccaagaaaaaaagagaagctccaaataagcatcatcagaaatgtcgaaggtggcattacaactgaccccacagaaatacaaaagatcctcagagac

SEQ ID NO: 454557 - DNA, 512 bp, Homo sapiens
caccaaaagtgatataaactgtttattgatccagattctccaagatctacttttgtattctattaatttaatcatcagaaaccaygaattgttaggccatattaccttacatctatgtagaaatatttttcctaagttatcatggtttctctgggaaatgaatataaaaatttcctttgaaatattttttagttttttttaaagtgatgagccaacataccatgcaccatgctattcactgtcttcaatccaaataacaatttacatgataaactaaagattgaattcaaagcataaagattgtttatcaacccttgatttcatttatttatcatttgagataacaattctactttttaaattatttatatcgttagagaattagagaagaaactatatgtattagtctgttctcatactgctaataaaaagatacctgagattgggtaatttataaaggaaagaggtttaatggactcacagttccacttggctggggaggcctcacaaac

SEQ ID NO: 454558 - DNA, 565 bp, Homo sapiens
cctgcccatcttcacatctgcagattacagataattgcttcttgctggagtgaataaggtgtcctcctcccctaggcttagcctatttgccatgctttggatttgatcctctctttttcctgagacacctggctccatcactaatgccttctcttttctaccttttagctttctcttcctattggttctttccctctgcatataaatatgttaagtctttctcattataaatgaagcaaagacacaaacaccctgagattttatcttcacctttcactgtcctgttttctgctactctttaatattctagcttcattttgaagaatattcatttttttaaataacaagattaacrtatttccattgttagctatttaaattatacaaataaataaaaaatcagaaagtcaaaattaatcaaatgcctatcatctaaaatgaaccaaggttaatatattgttatgcataagggcatattataactacttctgaagcattttgtcatcaaataccttctatagaataattttaaaatggctaaatatatagtattttattaagtata

SEQ ID NO: 454559 - DNA, 565 bp, Homo sapiens
cctgcccatcttcacatctgcagattacagataattgcttcttgctggagtgaataaggtgtcctcctcccctaggcttagcctatttgccatgctttggatttgatcctctctttttcctgagacacctggctccatcactaatgccttctcttttctaccttttagctttctcttcctattggttctttccctctgcatataaatatgttaagtctttctcattataaatgaagcaaagacacaaacaccctgagattttatcttcacctttcactgtcctgttttctgctactctttaatattctagcttcattttgaagaatattcatttttttaaataacaagattaacgtatttccattgttagctatttaaattatacaaataaataaaaaatcagaaagtcaaaattaatcaaatgcctatcatctaaaatgaaccaaggttaatatattgttatgcataagggcatattataactacttctgaagcattttgtcatsaaataccttctatagaataattttaaaatggctaaatatatagtattttattaagtata

SEQ ID NO: 454560 - DNA, 603 bp, Homo sapiens
aaataaagaagtgaacatccttgcagctaaatcagtgacattttccttaagtttccatccygtaagtagaattagtgctttcaagtgtgtgatatttttaaagcttgatagatttaaaaaaaggacttcaataaagtttgtgtcgatttatttttctattcagctgtgctctttcttacacctcaatacatttgattcataaagattctatctcattgttttaattaacctttcccttttcctgtttttgaacattttcttacatttagtggttatttgcatttattatttatgaatattatctacttatgttctttgccagtttttctactggagttgtgttttcagtagctagtttttttattgaatatattattttcttgtaaaatgtattatatttaatatactttcatatattttcatatttgtctttcgttatatttgatgcatagatgtttttcaaatattgaagctacatttagtaatattgcctttatttttactgcttgtgttttcaaacttagaaaggccttagcactttcatacaattgttttttaaagtaaaattttattaaagaatgatctatgtaaagtgcacacatg

SEQ ID NO: 454561 - DNA, 603 bp, Homo sapiens
aaataaagaagtgaacatccttgcagctaaatcagtgacattttccttaagtttccatcccgtaagtagaattagtgctttcaagtgtgtgatatttttaaagcttgatagatttaaaaaaaggacttcaataaagtttgtgtcgatttatttttctattcagctgtgctctttcttacacctcaatacatttgattcataaagattctatctcattgttttaattaacctttcccttttcctgtttttgaacattttcttacatttagyggttatttgcatttattatttatgaatattatctacttatgttctttgccagtttttctactggagttgtgttttcagtagctagtttttttattgaatatattattttcttgtaaaatgtattatatttaatatactttcatatattttcatatttgtctttcgttatatttgatgcatagatgtttttcaaatattgaagctacatttagtaatattgcctttatttttactgcttgtgttttcaaacttagaaaggccttagcactttcatacaattgttttttaaagtaaaattttattaaagaatgatctatgtaaagtgcacacatg

SEQ ID NO: 454562 - DNA, 492 bp, Homo sapiens
tctggttcttttttgcttgacaaattcctgatttaattcctctttctttttttttttttttttttttttgtattttattataagcagtcaggaggaatcaaattagctgcttcttcaatactttgcttagaaatctcctcagctaattatctagtttcattgttcgtagtccttccttccacaagacactaaaacatagttcagccaaatcccttgctaatttrtaacaagaatcacatttcctccagtttctgatatgtcctcatttccatctgacacatcaccagaattgcccttaacactcatatttttatgtttctttaaaatttgttttaacttcctattatcaccacttaattaatgcccatatttttagtatgcacttcaaattcctacagcctccacccactactgagttccaaagctgcttccacatatgcaggtatttgttacagcagcaccacactcttgttaccaaaatctgtattagtc

SEQ ID NO: 454563 - DNA, 558 bp, Homo sapiens
ccctcagtgggtgattggagggtatatttatttaaaactcttccattaatttttgtttattacattattcaatctatcttatagctggtctgccatttttgtgggtttcagaattgtgaggactcttaatgggaaatgctgtgacactgtgataaatgaaagagcagtggacrgtgagtagcacacttgggttctcgttcaggctctgttattgactggctcaaggaccctgggcaaagtacttcacctctgggcagcttctcttaaataaggactagtctaccttcttaatttatttcattgtttttaatgaagaaatgatatagcaaatgtaagataatcttttaaaatgttatattttttctttaaaaaattaggtaattataaggaagatttatatttctcagatattcttgaagttgaggagccacaattgtgactgtttccatcacttgatgtttcttctcctctaacctacttaaaaattgcaggcccctgtgctatcctggtaaatctccctccagtttgccagtatgtgtcatgtttcactgcaaacct

SEQ ID NO: 454564 - DNA, 606 bp, Homo sapiens
agtaaatatttggagaatgaatgaatgaatagcaatacataggaggttttttatgaaggatcgatttggtaccatttcaacatctgtgtctgtttactaacttcactttccccttctggttcaatttggtcacagggcattctgaagattaatgaataaaatatgtatgagttcttttagaaaggcaaatgaaagatcaacataatatttcctctgcataataaagcaggagaattcctaatatccgttaggcaaattcaccctaaaactcttcatttcatttttgtctgaaacattcttctgatttattaatgtggatttaaaaagtattggccaagcatatcttggaaattagtgcatcagagtagattcttgaccatttcttaggcctttatatcacaaaactgcataggctacattttttaaaatttgcctttctaatgtaaatataattactcagatagtgtcatgaaaaaaagcatcaacaatttgatattaaactagctatgkcatgttcattcatttagttaatctcacccagagcattaaaataagcaactacctactcttaaatttaaaagtaagtaaatatttacacagttgcat

SEQ ID NO: 454565 - DNA, 445 bp, Homo sapiens
taaactagctatgtcatgttcattcatttagttaatctcacccagagcattaaaataagcaactacctactcttaaatttaaaagtaagtaaatatttacacagttgcattcttattcagttgtcgcttttgtataaacagggatcaaaagatcctttgagaatgatgaactgtactcagaacatagtagcatctgcactaaagtgaagaaagggcayttatcttgaaacaaatggatatcacttatggaggatcaactactggccagacactgtcttcaagtggtgccagagttatgtattcaatctttagagtgacactgtgatgtaggctggtttcatcgaatagctaaggcaactgaggctcagaaatattaaactgttagcagaagtttacaaaggaaggaataagcagactgttttcaagagttaggtgatttagatta

SEQ ID NO: 454566 - DNA, 581 bp, Homo sapiens
gcactcaatttgtattacaaaaccttctaaggataaaaaaatcaaattttccttttatccctacagtatcaaaaacaagctttgaagctattgaagtaattaatggaaaaattacaagcataatagaaaaagcttttctacatacatgtaaggatagaggatgtttttgtttataaattctscatttagactaatactcattaaaagcaggtggtaatttcctatgaaatgtaaatatcaccccactgctaagctatttccttaattatagtgatactttagtctgtagaaaaatgatttaataagaaaacatcaggcatttataattttcaaaaataacatgacacatacctaccaggtctgacaaggtagacactagccacatttggctactacagagtaaatatgactgaaatgtgactactctgaattaatatgcatgatgtcaaatacataccatctttcaaggatttagtataaaaaatataaaatgtctgaagtcataatttttatattgattacttatttaaaaataatatttttacatagtagcttaaacaaacactgatttttacctatct

SEQ ID NO: 454567 - DNA, 526 bp, Homo sapiens
tttttttttgtcagtgtttctttgtttgattgttgtttttagaaagcaagtcacaaaatacagcttctaactaatgaaaactgtatgaaaggtgtgaaaaaaatgctaaggccaagactagcctttttggttgcagaaacaatacagttccttcatctcakgtctcacacctaggaacttcactataagtttccaataaacactttatgcctgttgccctttctagtctgtatatagtgaactttcttgctctgccctttagttgtcccaggagatatgaggccaaagctatcatggaaatggatgccaccatgaaaacatccagcatgtggagttttgccctctttctagttggcatagctaaccctcgaacttatggacaatattgagaatcaaggcaagattaatgccattggttctgtgaacagcttgcctcagactcatacagctacacaggctagataataagaatacaattcagtggaaagcagctggcattggcctgagctctagtctgtgctatgaa

SEQ ID NO: 454568 - DNA, 614 bp, Homo sapiens
ttgtcaacctctcttttgttatagagatctcagccttgaacctcatgaagtgtgaggaaaagaaatcttttctcccctacagctgccattaaagaaagaccgggctgatgattgacaaaaagagaattcaaagtgtgagtggagacacaaaaattagaagatataaaacctattcaggagactgatccacatcagttcagctataaatgagaattcctaaaggagaatagtagcaaaaggaaatgggaaagtttgattaggatcaaagtataaaaggccttcaaatgtaggcctatgagttctatgtatcctaaactagttgtttcatttattttccctattgasagatacttttgatttccccaaaatcttacgcttatgctgagttgtaacagcactgaaatataatttgctgatgagggaatgctctcacttcctctccacccccaccactaagtttcttacaagctgcaaaaagttgtctgctaggaaataatatagagatatgccagagccagctttgctatttttaagtaaaatacatcctactgcatgaataatctcctttggaggtaagagttgtcatcacaggaagctattgcaatcaattaaat

SEQ ID NO: 454569 - DNA, 476 bp, Homo sapiens
cagagtgaaagtagaccagaaaaaaatacagtggtgtgacactgtcaaacaaagcaggtcactgaccaaaatgtttacagtgactttgtgtagacatagcttaaacaaatgtctcaagatcaaatgaaatgacccaactgtagactatgggactttgtgtgttcagggtggagagtgagacacacacatacatacacacacacacacacacacacacacacacacacacccctctatgagagatttccattaaaaatgataatactcctaaacatcccctgagaagtgaactgcatatttataatcaagcaaaggttttaaagcatttgttctaaaattcgttagtgagaattattagtctatcacctcttgtgcatttactccatgttgaatgtgcagctcttaactgagtgtaacayagtaggtgctcaataagtgttttttgcattaatataaatataatgatatgtagagtc

SEQ ID NO: 454570 - DNA, 575 bp, Homo sapiens
gattaatcaggtactttacaaatagaatatctagatggtccataggcaattcttctgtcatcagtgagattacaaaaattaaaacaaaaacccacaccaatgtaataccactatacatcagtattcgaaagtttgaagattataataattgacagtgctaagtactgataaggacatggagcaactggataactcctatcttgctgatggaagtgaaatctgttcaactactttgaaaaatgttttggtaatagctactgaatgtgaatatacagctaccctatgcctcaaccattctacttttgggtatacacccaggagaagagtgtttattttctaaatgacttgcataagagtatttacagtagtactatttataataacaaaaattttaaaaatgaatcaaatatccatcaaccataayacaaattttaaaattgtgatacattcatgtaatcaaataataggcagcaataataaatgaatgaactacacaaaacattatggttaaactgtacctctttaatattgagtgaaagaagccagacaaaaaaaaagacatactgtttaactgc

SEQ ID NO: 454571 - DNA, 562 bp, Homo sapiens
tcattacttaattagaattttgggatcttagtttagttgtgtgacttactttgatctcgtggagcgtagagtgagctttttagatttttgggtttgggctccatcatgcaacgtgcttaggctaatgagatgatarcatataagaaacagaagagatttgaaatacactttgatagtcatgcttgctctctgtgtcttctgccatcaccatgagaagaaaacatttcagatagcctgctgatccaagggggatgacacacatatagaccacttgtgtgaacaatcttctacctttggccacttcctgctaaattgaccaaaaatacccagccccagccaacctacagatggatgaatatgaataaaagactattgtttgtgatttcagcttgaaattaatggtttgaaatgtgatttcttatacagcactatgcagtgacagcaaacaatataaaatactaaattctccaattaaaagacaaagactgattttaatttctaggaaaatggagtagacatacttctccatattcatgatggtggtacatttaagaacttaaac

SEQ ID NO: 454572 - DNA, 593 bp, Homo sapiens
catgagtgctttaggagtctatgtaaatgagaaaataagaggtaagaaaagaccaagaaattgaatgaggagaccctccacagcaaactagcctaatggatgatttaatgaaaatcaagctggatgggtgatttgatgtgagaaggtgagtgagtgcaatggcagcttcaacaatttctacaccgtgttgctaaatttgaagagtccagttgattcgagggctgtatcaggtcctgaatccatgaaacacactctgtgatgtagctccagcaaatgaaccgataacaagggtaacacaatrccacctccagggatgcctctggtggagcagtttggagatgtgatcacctgggtgagtgaatacttgtcctgcaagcaaccctacttgtctggcaggaagatcactcctcatctccagtctgaattatcctgggacacagttcacaggtctacccctcagcaacaatgaagccttctttgggcttagaactcgcccaagccttctctactcagaaaatttcaagtcattaaaggagaaaatgtgttcttttatgctgccaaccttcatttgtcctgatgtctttacctgcagt

SEQ ID NO: 454573 - DNA, 572 bp, Homo sapiens
tgcctaccctcacaaggtgtccactccaagctggggatttaattataccctcaacaagctgtttcatcactttggcaggccagcagcttctgggtggtgtgtttgtaattgaagcaatggatagcatggtcatatgtgcactgctgcacctcctttgctgaaaagtagggcaatttctctaatgcagtctcatatggcagcccacagtggtgaatcatacattttctaagacttattatagtagtactggctaacggagggtccattagccccaaaattaaacttattccttgaatttgaaaaaaatacctattcacatcaagaggacttactatcctttacagaatggaagaggataaatggacacacttggcaccaggtaggtagttagttcttctcaaaggatgatgtcctactcagtattgtctctatctggatagttgggcattcagcatctagattagttagaacagacattgtaaaygggagctcaagctgttggtcccaaacattgcttccatgtctgccaccatagctacttggctcaggagtttgttgtgacagcactgggg

SEQ ID NO: 454574 - DNA, 479 bp, Homo sapiens
tggtccaacagaaaaccctgcatatcctttgcattaaccaattttggaggtacaggcttattgcaagataaccacaaaatagccctcccagaaccatctatatttcatgagtgggarttagactgtgatatttggtcacagaagtcatgcattaagttccttgtgttctttcaggaatgcctacttagcaaggatttgtgtgcaggaatgagagcacccttcctccagagttgcttggtctttcctacaaaatcctttctttgatatgtatacatgtgtgtatgtgtgtacatatacacacgcaaacacatacactcatacagacagacacaaacgtgcaaatacatatagctattgatataaatacacagagagggttgtgtgtatatatatgtataatctagctaagagtttcaaaatttgtggaactggtttaaagaatttcctttgaacgtttccatgaattaatgtggaaagta

SEQ ID NO: 454575 - DNA, 423 bp, Homo sapiens
tcctgggagccttaagcatttgaactgaaaggatatgcaagaaatgcatgtgctgggagcttaagcatgtgaactgaaaaaatttgcaagaaatgaatgagtcctaactggaacatgtacaatgaagtagctcataaaacctctctataaatatagtataaagaaaatattcataggaaaatagagaggaggaacaagagggaaaatgagatggatagagtagcagcttgggttcccaagacttccagatcctggttgaagttcattaggcccatgaaagaccagcccttgggttcaagragatacccttgggatcctctaggatgtcttcttcatttgctaagctagtctgagaagtgtctgctagttttaccgaaaaaggtacagactaaatatcttgccaagcagtacagttcaaggcaa

SEQ ID NO: 454576 - DNA, 549 bp, Homo sapiens
actgttagttaagggtgatctctggaagggactcagcaccagtatgagatgccagtagctcttggcctcagtgggactggccactgtaatccgtagccagggaaatctaggcagcacagcacgacatccaatataagagcagaaacatcaataagagaatgagaatgtgttcgacactggaactaaggtraggtgagtgaggcacttgtcttaggggcaaattctagagacttccaaaaaagccaatagtcaaaagaaatcatgtcttaatccaatgcttttaaatcaacattaatgcaaaaccaatcaatgttgaataatatataaaaattttaaatggactcaggatccatattactggctttttctttagcctcaggcatgtggcttggcccatcattgatgtatatgaattggttttatttcttgataattccctaaaaaataacttactgttcattaaccctgggaatggtataccccataatggaatcacaggaaaaatttaccgagaatcttttatacagggattgcgctagggactttaag

SEQ ID NO: 454577 - DNA, 613 bp, Homo sapiens
ttttaaatttttgtagttttctttcattgcaatcagaaagaatgttgtacaaattcaattatttgaaattcgttgaaacttgcttaatggcctttgctatgatcaataatggtaaatgttccaagcacacttgaattaatgtgtattctgtaatatttacccttagtgttttttatatatatagtgttttatatatatagtgttcattaggtcaastttgttaattatgttgttcaaatattctataattttattaatttttttggcttaatttgtacttactaagagaggtgtatcaaaattgtcaatcatatgtgtgtgtttctccttgatttgttttcgatttgttattgactttctgaagatgtgttattagggtcaaatatacatagaactgccatgtcatcttttaaaatttatactttcattattgtgaattctcctttatgttattttttgcctaaaatcgactttgtatattaatatagttttgcctttttttaacttgtactgtatttattttccattttttgccttcaatgtaccctaaagtctgtcttttaaaacaccacattgtttctttctgcctgtcattctttgtctttcttataaa

SEQ ID NO: 454578 - DNA, 534 bp, Homo sapiens
catttaaaatgaatctaagaaaaatactcaaatatcaatcaacaatagaagaaagctttgtagtatatttacaaatttgataatatatacagtaagagtaaattacaactacatgcagaagtgtggctggatctcatacacacaatgttcaaccaaagaagacagatatgaaagagtagatactcatagatagtttatttatataaattcccaaagaagcaaaactaatctatgttaatagaagcaagaataacattacctgggcgtgggggagggggtggcaataaagactgagagagagtacatgggtaggattctggagtatgagtaatgatctgagtttttatctgggatgctaagctgtactctttggatgtrtgcaagcttccctgaatgcattttttttaactacacacgcacgtacattatatacattacatacgtgtgtgtatgtacatgcatatatattatatataacatatgtatgtgtgtataaatacagttattttaaatatgaattctactgcagtcgga

SEQ ID NO: 454579 - DNA, 562 bp, Homo sapiens
taggctctgaagatactgaaacgtacaaaagagtcactcttaattaaaaaaacaactcacaatctagagaagaagacagaaaaataaacatctgattataatagaggatgaaaatcctctatttatggaagcagtcaaccgaaattgtaggtatcatattggaaaatcaaccaattcatcctggtgggagaaaagaaacaggttggctgagcgcagtggctcacacctgtaaacccagcactttgggaggccaaggcgggtggatcacctgaggtcaggagtttgagaccagcctggccaacgtggtgaaaccccctctctactaaaaatacaaaaattagccgggcatggtggcacatgcctgtaatcccaagctactcaggaggctgaggcaggagaatcacctgaacccgggaggtagccattgcaaggagctgagatcccgccattgcattccagcctgggcaacaagagcaaaattccatytaaaaaaaaaaaaaaaaaaaaaaaaaaaaaaaaagatggctgagtgctaacttaaaggacaagcaaacccctacaa

SEQ ID NO: 454580 - DNA, 558 bp, Homo sapiens
agcgaggacattaacatgtgcctgtcacattgcaccctttaccttaagtagtgctttggttgttctctcatccacccacctcttcatcttcagtgagacatggaatctgcacctggtgattcagtgagcaagaggtaacctgcgatcattcagctttcagctcagttgttcctcaggaatakattccttttctaatttaatggcaaatctgatattatagacacactggctgtgaatgcttgacttggctatacattttgatacagtttttttttttcggtggggaggagctgaccttttaaaaagtaaaatgatgaaagattttagctttctctagcaagtccacgtaattccttctctcagtacttaatgctatatgaatgctaatgtggtgtgatttggaaggcaatgggttagaaatcaaacagatttgagtttgaatcttagttgtcctgctaaatcagcacgttgccttgagtaagtcacttaaattctttgagcctgagtctccccatctaaaatatggggatagtatatctttcggaggttttttcctca

SEQ ID NO: 454581 - DNA, 614 bp, Homo sapiens
gtgctttggttgttctctcatccacccacctcttcatcttcagtgagacatggaatctgcacctggtgattcagtgagcaagaggtaacctgcgatcattcagctttcagctcagttgttcctcaggaatagattccttttctaatttaatggcaaatctgatattatagacacactggctgtgaatgcttgacttggctatacattttgatacagtttttttttttcggtggggaggagctgaccttttaaaaagtaaaatgatgaaagattttagctttctctagcaagtccacgtaattccttctctcagtacttaatgctatatgaatgctaatgtggtgtgatttggaaggcaatgggttwgaaatcaaacagatttgagtttgaatcttagttgtcctgctaaatcagcacgttgccttgagtaagtcacttaaattctttgagcctgagtctccccatctaaaatatggggatagtatatctttcggaggttttttcctcaggaggcgacatcttggatacaaagtgctttattcctagtaaatgctcaataaatgctacttactcatgggaagaaagatttctctactgggaattaagaattgtgg

SEQ ID NO: 454582 - DNA, 501 bp, Homo sapiens
attatagacacactggctgtgaatgcttgacttggctatacattttgatacagtttttttttttcggtggggaggagctgaccttttaaaaagtaaaatgatgaaagattttagctttctctagcaagtccacgtaattccttctctcagtacttaatgctatatgaatgctaatgtggtgtgatttggaaggcaatgggttagaaatcaaacagatttgagtttgaatcttagttgtcctgctaaatcagcacgttgccttgagtaagtcacttaaattctttgagcctgagtctccccatctaaaatatggkgatagtatatctttcggaggttttttcctcaggaggcgacatcttggatacaaagtgctttattcctagtaaatgctcaataaatgctacttactcatgggaagaaagatttctctactgggaattaagaattgtgggttataatactggctgtatacaaaaattagatacgtagtcatagcatgtt

SEQ ID NO: 454583 - DNA, 614 bp, Homo sapiens
gtgctttggttgttctctcatccacccacctcttcatcttcagtgagacatggaatctgcacctggtgattcagtgagcaagaggtaacctgcgatcattcagctttcagctcagttgttcctcaggaatagattccttttctaatttaatggcaaatctgatattatagacacactggctgtgaatgcttgacttggctatacattttgatacagtttttttttttcggtggggaggagctgaccttttaaaaagtaaaatgatgaaagattttagctttctctagcaagtccacgtaattccttctctcagtacttaatgctatatgaatgctaatgtggtgtgatttggaaggcaatgggttagaaatcaaacagatttgagtttgaatcttagttgtcctgctaaatcagcacgttgccttgagtaagtcacttaaattctttgagcctgagtctccccatctaaaatatggggatagtatatctttcggaggttttttcctcaggaggcgacatcktggatacaaagtgctttattcctagtaaatgctcaataaatgctacttactcatgggaagaaagatttctctactgggaattaagaattgtgg

SEQ ID NO: 454584 - DNA, 516 bp, Homo sapiens
attcactatcacattttatttttctagcctggaagctacaagaggacaattcagatgatgaaaatattattgtttatttgttaaaagaatttgaagtcacagatgcaagggagaaaggagacccagctgtgtcaaaattctggagaataaatgtttatatttctaaatttaggaatggtttaagggaactttagagcaaaacatagaaccaaataaaaatgtaaattarctaagccattgtttgtctatgaaaattgtagttacataatctaagatgttaagtgagagacttttgtacatgtagtatcactattagttgtttgtttattttaattctctgaatagaaaatcatcccactttgttctttggaaacattttcctccttcaatttctcagtactagatggtcaggaaacattagcaaagtcaatttcacaaacatatttccatttaagtatcagtcagtttccagccagaaggtggacacaaaaccttctattttatggcaagaattca

SEQ ID NO: 454585 - DNA, 578 bp, Homo sapiens
ttgtacacattgagtatatatgatttttatttgccaattaactatttaaaatataaaagaaataatcttgctatcaacagatttattaaatgtcttggtttaattttattccaagagcttggtattaatgaataatcatagaaactatatayaaaccaatacactaaagagtaacacaattattgttgatatccaaatttgtcagaattaaaatccaattttcagtttaaaaaagaaaatgagagaaatgagttaaagagggaattattaagcagaagggaaggagaacttgaagatttgaaaaattcttagcctatccctattgcaaaaagtgaaaaagcatggccaattgcctatttgaaaagaagattaatatgggtgtgaactatgaacttaatccaccacccaagcaggaaaactgccagttagaactgaaaagaaaagaaacaaaaagtaatgaaggaaagctatcaggctttgttgtttttgcagcatgggaccagagaggtatatatctgagaacagacattattcttcaatacaagaacaatgaccccggaaggcaattcagagaccat

SEQ ID NO: 454586 - DNA, 604 bp, Homo sapiens
aaatctctttttacttattgattttagttaccccatcactcactctattgctattgctggattctgtgtgagagaccattgatcatttccttaacttcacaaaagctttgctttgctcaagtgggagtttctgtgcttgttgatgtatgtttatccattaggaatgaaatcatgttgctctgcmttacagaggatccacctcatctaacttgagcagacttaataatgtcttcaatatgtccaagttttctatatattctagggaaaaagaacaaactatcaaggaagaaaaaatgtttcacatgcaataaaggaccatccaactggagggaatcgctgtcttccaatcctaattttaagacttcattgtgagttaagagaacccaaactttctcagtcaaaccaccaataatgagacaatctgaataacctagtcactctagtgtccttatgtagaagcagaggaaaatttaaaaaaaataggtttctcatcttatggctacttttatttacagaaggaacaagtggactctgctatacagttacaaactgcagagcaacaaataatcaacatttctcaaaatcaagcttcatacttataata

SEQ ID NO: 454587 - DNA, 604 bp, Homo sapiens
aaatctctttttacttattgattttagttaccccatcactcactctattgctattgctggattctgtgtgagagaccattgatcatttccttaacttcacaaaagctttgctttgctcaagtgggagtttctgtgcttgttgatgtatgtttatccattaggaatgaaatcatgttgctctgcattacagaggatccacctcatctaacttgagcagacttrataatgtcttcaatatgtccaagttttctatatattctagggaaaaagaacaaactatcaaggaagaaaaaatgtttcacatgcaataaaggaccatccaactggagggaatcgctgtcttccaatcctaattttaagacttcattgtgagttaagagaacccaaactttctcagtcaaaccaccaataatgagacaatctgaataacctagtcactctagtgtccttatgtagaagcagaggaaaatttaaaaaaaataggtttctcatcttatggctacttttatttacagaaggaacaagtggactctgctatacagttacaaactgcagagcaacaaataatcaacatttctcaaaatcaagcttcatacttataata

SEQ ID NO: 454588 - DNA, 598 bp, Homo sapiens
atgatcatggagattttctcctattattgcttaatattgtatggtttcagtttagtcatatgatcatttgagtaaatttttttacataatgtaagcgtcaaggttattttttttttytaaatggataaccagttgttccagcttcatttcttgaaaaggttattctttcacatatttaattaccctgacacttttactgtaaatcaattgaatacacacacacacacacacacacacacaatacctctgatcttactgttctattccttttatttctatatctatttttaatggaaatatgatattgtcatatgaactctacatttgtagtaatattgatattaggtgttatgtttttccaacttgctcttttcaaaattattttgaatattttaaatgctttacactgaaaaatcttaatatcagattgtatctatttttagaactactactcggattttgacagggtttgtattgaatacatagatacatttggacagaactgacattttaataggattaagtcttcagtccataactatagcatacatctccatttagttaggtcttttaacatttcttgtagaaatattagttt

SEQ ID NO: 454589 - DNA, 549 bp, Homo sapiens
ttttctaatttatgcacgttaaagtgttcatagtagctttgaaagatctgttttgtttctacctgagcttatttggactttctctcttcttttcttgattaatctctcccatgatctatcaattttatttctcttttcaaagaaccagctttttgtttcatttatcttttgtatttttttttgtttcagttttattatttctgctctgatcttggttatttgttttcttctgctggatttgggtttgcttttttttcttgtttctctagctccttgaggtgtgtgaccttagattgtctatttgtgctctttcagcctttttgaggtaggcatttaatgctatgaagtttcctcttagcaccgcctttgctgtatcccagaggctttgatagtttttcactattatcattcagttcaaataattatttaatttccatcttgatttcattgttgacccaatgatagttcaggagtgagttatttaatttctgtatatttgcatggttttgaggstttctttcggagtcgctttccaattttattccactg

SEQ ID NO: 454590 - DNA, 642 bp, Homo sapiens
gttaggtgcctatatatttaggattgtgatattttcccattggactagtccttttatcattatataatgtccctgttttgttttgttttttaattgctgttgtttcraagtttgttttgtctgatgtaagaatagctattactgctcatttttggtgtccatttgcatggaatatcttttttcgtcgtgctatatgttgcttaaataccttgggttttttgggtttttttctttctcattatgttgttgttttataggtcctgtgagatttacgctttaaggagatttaattttggtgtatttcaaggatttttttcaagatttagagctccttttagcagttcttatagtgctgggttggtagcggcgaattctctcagcatttgtttgtctgaaaaagattgtatctttccttcatttatgaagcttattttcactggacaaaaaattcttggctgataattgttttgtttaaggaggccaaaaataggacaccaatcccttttagtttgtagggtttctgctaagaaatctgctgttactttgaaaggttttcctttataggttacatgatgcttttgcctcatagcccttaagattctttccatcattttgactttagataacctgatggctatgtgc

SEQ ID NO: 454591 - DNA, 642 bp, Homo sapiens
gttaggtgcctatatatttaggattgtgatattttcccattggactagtccttttatcattatataatgtccctgttttgttttgttttttaattgctgttgtttcaaagtttgttttgtctgatgtaagaatagctattactgctcatttttggtgtccatttgcatggaatatcttttttcgtcgtgctatatgttgcttaaataccttgggttttttgggtttttttctttctcattatgttgttgttttataggtcctgtgagatttacgctttaaggagatttaattttggtgtatttcaaggatttttttcaagatttagagctccttttagcagttcttatagtgctgggttggtagcggcgaattctctcagcatttgtttgtctgaaaaagattgtatctttccttcatttatgaagcttattttcactggacaaaaaattcttggctgataattgttttgtttaaggaggccaaaaataggacaccaatcccttttagtttgtagggtttctgctaagaaatctgctgttactytgaaaggttttcctttataggttacatgatgcttttgcctcatagcccttaagattctttccatcattttgactttagataacctgatggctatgtgc

SEQ ID NO: 454592 - DNA, 573 bp, Homo sapiens
acattaattctctaagcttcaaattcttatctgtaaaatagagaaagtagcatctgccttatagggtttttgtggggaataaatgaatatgtgtttgtgtatgtgtgtgtgtttgtgtataactttttatatatatagtttagcatagtgcctggcacatagtgagttctcaataagtggtagctataattattcttgctactatttatggacctccagttatgtctgaaaacactggaatgataagctcacatgtattatctcattcatgacatggtatatttcaatctggaaagatgrgtattaaatttaaaagaagtggagtcattatttgaactagtatcccctaacctcacacccaccttggccttgctttccttataacaatatttaagagtcagttgatttaaagaaatgtgatataggggatttaactaatgactgggcagaaggacagattgaaactgtgtttttcagcagttcttctgatttgtctcatttaaagtaaagatttcagactgttgtgggggtggcgtaggggaaggaaatacagatttgttcacagctgctatt

SEQ ID NO: 454593 - DNA, 622 bp, Homo sapiens
agttccgtaaatggtaatgttatacaactaacatataaatgacaatctgtaaagcttgtacaaccagtaagtaatagggatagtcaagactcacacccaggttgtctttctaaaaatgcagtgtttttcctactcaatcaggctgcatctcaatctgtaagaatcatattcttagaaaactagaaaacataatatctatttataatattaatatcaattacttcttttgaattgctcttttggaaaattggtcaagccaytagattctacttgttctatctattttgtattagtcattatctgtgataagaagagaaggtaatgatggctttggtggggatgctctagctttggtggagcttatttagatgaacattatgagcattctaaatatttttggaaaaaattacaaaacattatagatatttttgagattccttgaaaaaatttcatatgggcctttggacagatctttgaagagcaatactgcctaaaagccagcagagggagaacagaacattgttttgctaattttcactaagtttctcctcatgctcttttacattttatttttccacatatttaatacatttcttgaccatgagataatattatcctgtcc

SEQ ID NO: 454594 - DNA, 622 bp, Homo sapiens
agttccgtaaatggtaatgttatacaactaacatataaatgacaatctgtaaagcttgtacaaccagtaagtaatagggatagtcaagactcacacccaggttgtctttctaaaaatgcagtgtttttcctactcaatcaggctgcatctcaatctgtaagaatcatattcttagaaaactagaaaacataatatctatttataatattaatatcaattacttcttttgaattgctcttttggaaaattggtcaagccactagattctacttgttctatctattttgtattagtcattatctgtgataagaagagaaggtaatgatggctttggtggggatgctctagctttggtggagcttatttagatgaacattatgagcattctaaatatttttggaaaaaattacaaaacattatagatatttttgagattccttgaaaaaawttcatatgggcctttggacagatctttgaagagcaatactgcctaaaagccagcagagggagaacagaacattgttttgctaattttcactaagtttctcctcatgctcttttacattttatttttccacatatttaatacatttcttgaccatgagataatattatcctgtcc

SEQ ID NO: 454595 - DNA, 622 bp, Homo sapiens
agttccgtaaatggtaatgttatacaactaacatataaatgacaatctgtaaagcttgtacaaccagtaagtaatagggatagtcaagactcacacccaggttgtctttctaaaaatgcagtgtttttcctactcaatcaggctgcatctcaatctgtaagaatcatattcttagaaaactagaaaacataatatctatttataatattaatatcaattacttcttttgaattgctcttttggaaaattggtcaagccactagattctacttgttctatctattttgtattagtcattatctgtgataagaagagaaggtaatgatggctttggtggggatgctctagctttggtggagcttatttagatgaacattatgagcattctaaatatttttggaaaaaattacaaaacattatagatatttttgagattccttgaaaaaatttcatatgggcctttggacagatctttgaagagcaatactgcctaaaagccagcagagggagaacagaacattgttttgctaattttcacyaagtttctcctcatgctcttttacattttatttttccacatatttaatacatttcttgaccatgagataatattatcctgtcc

SEQ ID NO: 454596 - DNA, 593 bp, Homo sapiens
aaattcaagatatattttgcaatagtcaggacttgatgagttttataacatatcctcctttactgagcacttatgtgctctgcaggggacggagtgctttgcatgcattatcttatttaaatttcacaacaatcacctgtgtaatatgtaccacagctcttcctgtttttcatatggggraaaaagaagattaaagagaccaaatgctagtttgaaccatatgaaattgccacctaataacttgcccaatatagttaatgagtcagtaagtactctacaaactgaatgtgtgtttcctcaccaaatttatatgttgaaacctaatccccaatgtgatggtattaggaaatggtacctttgggaggtaattaggtcacagatatagagtcctgatgaacggaactaatgcccttataaggggctgaagaggtcagagttcttccttccaccatgtgagaatacacaccaaatctgccagctccttgatcttaaactttatagtctcaagaactgtgagatataaatatcttttgtttataagccaccagtttatggtactttattatagcagcctaaatggactaagacaaagt

SEQ ID NO: 454597 - DNA, 569 bp, Homo sapiens
cgtttcatttttagcctaataatacacagtcaaaatattgtttgacaaagttacttaggttagttcttttcttctcctttcctttggtgtaattatattattaatttgtcatatattgggatcatgtttattgtttgtatttcattgggaatctcctcayatcttggttgattttaactttttaaatttgttctggggatatgctaaatatactaagagtcagagctagacactaaaaatgatatactcagagaagagtcattttccatcatctttgctaccccatacccagtgccccattctttccaccctgttcccacccagcacctttcagtaactattgccggtagtgtctagtttatccttcctgtatttctttttcacaacttagcagatcccaatatattttctgatatctctgtctttcttacatgaaggttagcatgctataaatacactttatgctttgtttttttgatgtaacaggatatataaaaatcaactgtttttttacagttacatggtactctactgagtgaatgagccatagtttattcaaccaaaaccac

SEQ ID NO: 454598 - DNA, 575 bp, Homo sapiens
taacccttaataatcacagtaagcacttatatattgcttttccattttcaaaatgatttttcaatcagtatttcagttgatccacataaagatgcagaggaaaggagggcagataatatcttcctcattttatggaatagaaaagttagrtccagataaattaagtgacttgcccaagttccccattattttttgccagagcctgaatttcagaccctttctcttgtttccaaatcctgcatacttttcccaacaccttcttgctttcggaagtaactccaggcttagacttttggatattggtgaaggccagtgaggaagacagtgtgatcaaggggaccttcagaggatcctcagaactctggtgaagcagctgtctactctgcctataaggaagggggtactcctgtggcttatgttcagtgggaccaaggaaataacacatggctagaacaaggatgaggcaagggaagcgccaagggcaaatgattcaaggagatgcttattttcaggattgtacaagggcctgccctggccccataacatcattaaggccatagctgcaaaattcagac

SEQ ID NO: 454599 - DNA, 575 bp, Homo sapiens
taacccttaataatcacagtaagcacttatatattgcttttccattttcaaaatgatttttcaatcagtatttcagttgatccacataaagatgcagaggaaaggagggcagataatatcttcctcattttatggaatagaaaagttagatccagataaattaagtgacttgcccaagttccccattattttttgccagagcctgaatttcagaccctttctcttgtttccaaatcctgcatacttttcccaacaccttcttgctttcggaagtaactccaggcttagacttttggatattggtgaaggccagtgaggaagacagtgtgatcaaggggaccttcasaggatcctcagaactctggtgaagcagctgtctactctgcctataaggaagggggtactcctgtggcttatgttcagtgggaccaaggaaataacacatggctagaacaaggatgaggcaagggaagcgccaagggcaaatgattcaaggagatgcttattttcaggattgtacaagggcctgccctggccccataacatcattaaggccatagctgcaaaattcagac

SEQ ID NO: 454600 - DNA, 594 bp, Homo sapiens
tacaggttcctgtcaccacatccagctaataaaaaaatatttctttttagagatgggggttttgctatgttgcccaggctggtcttgaactcctggcctcaagcaatcctcccactcctgcctcccaaagctttgggattacaaatgtggaccactgcacctggctctatggagagtattttaagtgccttaatggaatgaaaaggaaaataccctaaaactgtaggaaagtctaggatgtgtccaaagcttcaggatgatcaaggccctagccattctttattatttggatgtccattccaatattactttgcagatgtcagtgttaatattagccagacatgtcctaaatctttgaagactagagcatgcactcattaacctgtcatgagacatcatccaaagagtgaaaagtttaaaaggactgaaactttaattcccaaaatttaacattagccagacttctctggcttatagacatgtactccaaactacatcattcaagatcaattacttaccattcatttctttttccaatacatrtcatcaaacattttttttttttttttagatatagcatcttgctctgtcacc

SEQ ID NO: 454601 - DNA, 645 bp, Homo sapiens
aacgtggcacagctggacgtatatgtgggaggctatggcagcaccaaaggggggtgttctgggtcaaggtaggttgggggatccagaaaaggcttccagaaaataggagttccttttaggattatgtagttgctacctaaacatgatagcccatttatacaaaaggcatggtggtgagcccatgcaaacagggagcatttgggttcaagtcatttgtgatttcaggatcttcaactgaaaagctcaacctattcccaaagtcatcaactaaggttgggacagaaatgggctatgaaatcacaggccctttccccatggcaagcaggctctgggagtgttcagatgcacctcatggtaactatggcttcataaaaatcaaagctgattgatgggaggaggctctctgtgttcatgtgtttagtctacccatgcttttagttccactgtggctgtgcttcctaatggaaatgcatttctctctctcaccattatccagatatagatgctgtcagatatgaaagagccttttyacctcaagatttttgtcttgtaaggcaaccctaattcaggaaggaaatgaggaggagtcgacaaaaacccaccacaaatgttttgtcagatagttcagagagagagaaagttaaa

SEQ ID NO: 454602 - DNA, 618 bp, Homo sapiens
aggtcctgggcctacaggacaggcgacgaccctcagagaggtcagaggcggcagaacctgtgctgggctttgacacaaggcgttgcgtcgcagatgaactacgcgggggtaggggtgagaggccccggccagcagctggaaatccccctcacgtgtgcgggcctcctcttccacctctccccgggttcccccgttacgccgccgggctccctcgccacccaggggccygtctccactctcccactcctctccagggcctcccccgttccccttccaccttagcttgagctctcctccgcccggcttcgggcaagatgcgagtccacacaggccacactcgaccgaccgcttcccagccagtccccgcgctaccactgagaggacggcaagcgcgggctagaggagctcaacgccaccacaaagagacgtccgggagaagcctagagcggacacgaggctggccgcctccggggacggaaggggcggggcggtgtgaagtggcaaatgattcaaggcgaggcaagaggtgcttcagatgctgtcttttgcagtcctccgagaggttagggatgtgggaggtccctgggggccatctcttacaagacacagtttccacta

SEQ ID NO: 454603 - DNA, 618 bp, Homo sapiens
aggtcctgggcctacaggacaggcgacgaccctcagagaggtcagaggcggcagaacctgtgctgggctttgacacaaggcgttgcgtcgcagatgaactacgcgggggtaggggtgagaggccccggccagcagctggaaatccccctcacgtgtgcgggcctcctcttccacctctccccgggttcccccgttacgccgccgggctccctcgccacccaggggcctgtctccactctcccactcctctccagggcctcccccgytccccttccaccttagcttgagctctcctccgcccggcttcgggcaagatgcgagtccacacaggccacactcgaccgaccgcttcccagccagtccccgcgctaccactgagaggacggcaagcgcgggctagaggagctcaacgccaccacaaagagacgtccgggagaagcctagagcggacacgaggctggccgcctccggggacggaaggggcggggcggtgtgaagtggcaaatgattcaaggcgaggcaagaggtgcttcagatgctgtcttttgcagtcctccgagaggttagggatgtgggaggtccctgggggccatctcttacaagacacagtttccacta

SEQ ID NO: 454604 - DNA, 610 bp, Homo sapiens
taactgcagtttttcttaaatttcttaccctctagactgcttatttcttaygcttagacataactatacattttatggttgctgtacatttaagtcttgaaagttgttggtagtttgtgttgcagaactggtctggaatatgtgccttctaattccatatttcagctcaatgaaacaaggagaaagagaaggaaaccaaatttaattaaggaaaacccaggtttacttgcaagctcatagtcacagcttcctacatctgatcagcttccactctttttttcccataatttcaatttaggtgcctgaatagaattatctccatttgaaccatgagtttgaacgctcttttttcagtttatttttaaaaattaaaatagtaatgcatacacatgcaaactagaattcataaagtgtagaaaaatagaaagggaaagtaaaattcttccatttcttgtcccaatcctggggcaactactttagcagcaattaaaatttacatggtatgtttatgcctcaatttctggatatatcaaattaggtagtaactagtgattccctgcaaagaaagacaagaccactaatatgctcaatcttctatctctcttcttta

SEQ ID NO: 454605 - DNA, 610 bp, Homo sapiens
taactgcagtttttcttaaatttcttaccctctagactgcttatttcttacgcttagacataactatacattttatggttgctgtacatttaagtcttgaaagttgttggtagtttgtgttgcagaactggtctggaatatgtgccttctaattccatatttcagctcaatgaaacaaggagaaagagaaggaaaccaaatttaattaaggaaaacccaggtttacttgcaagctcatagtcacascttcctacatctgatcagcttccactctttttttcccataatttcaatttaggtgcctgaatagaattatctccatttgaaccatgagtttgaacgctcttttttcagtttatttttaaaaattaaaatagtaatgcatacacatgcaaactagaattcataaagtgtagaaaaatagaaagggaaagtaaaattcttccatttcttgtcccaatcctggggcaactactttagcagcaattaaaatttacatggtatgtttatgcctcaatttctggatatatcaaattaggtagtaactagtgattccctgcaaagaaagacaagaccactaatatgctcaatcttctatctctcttcttta

SEQ ID NO: 454606 - DNA, 610 bp, Homo sapiens
taactgcagtttttcttaaatttcttaccctctagactgcttatttcttacgcttagacataactatacattttatggttgctgtacatttaagtcttgaaagttgttggtagtttgtgttgcagaactggtctggaatatgtgccttctaattccatatttcagctcaatgaaacaaggagaaagagaaggaaaccaaatttaattaaggaaaacccaggtttacttgcaagctcatagtcacagcttcctacatctgatcagcttccactctttttttcccataatttcaatttargtgcctgaatagaattatctccatttgaaccatgagtttgaacgctcttttttcagtttatttttaaaaattaaaatagtaatgcatacacatgcaaactagaattcataaagtgtagaaaaatagaaagggaaagtaaaattcttccatttcttgtcccaatcctggggcaactactttagcagcaattaaaatttacatggtatgtttatgcctcaatttctggatatatcaaattaggtagtaactagtgattccctgcaaagaaagacaagaccactaatatgctcaatcttctatctctcttcttta

SEQ ID NO: 454607 - DNA, 610 bp, Homo sapiens
taactgcagtttttcttaaatttcttaccctctagactgcttatttcttacgcttagacataactatacattttatggttgctgtacatttaagtcttgaaagttgttggtagtttgtgttgcagaactggtctggaatatgtgccttctaattccatatttcagctcaatgaaacaaggagaaagagaaggaaaccaaatttaattaaggaaaacccaggtttacttgcaagctcatagtcacagcttcctacatctgatcagcttccactctttttttcccataatttcaatttaggtgcctgaatagaattatctccatttgaaccatgagtttgaaygctcttttttcagtttatttttaaaaattaaaatagtaatgcatacacatgcaaactagaattcataaagtgtagaaaaatagaaagggaaagtaaaattcttccatttcttgtcccaatcctggggcaactactttagcagcaattaaaatttacatggtatgtttatgcctcaatttctggatatatcaaattaggtagtaactagtgattccctgcaaagaaagacaagaccactaatatgctcaatcttctatctctcttcttta

SEQ ID NO: 454608 - DNA, 597 bp, Homo sapiens
gccagtctggaacttgaacttgggtctgtttgactccataatccaygctcttaaccgttgccttcaaaataagaatggctaacttttaaagagcctgcaggtgctcgttacgctaactggcacagccaacctgccagctcctaaagtctgggtgctatgtgatctttgcactttccccttcacagcttctgtgccaaatccgagcacagctgccccaaggcttccaagctgtaatccctgcagaaggtgcccagaagactatagtaataagaacccaagtctttttgatgcagccagctcaggacctgtctgtgcattgaaaatttgtggacgttgatttgtaacaccagggctgtgaccctgagtagcccacctgaggataacaggcaccaacttcctgtttccaaatcctgctttcctaggacgcacccagcccccactgaagtttgtgggggagtaaattgctattcacctgtccaagcctccctggatttatggcttggcagctcccttctgcctgcaccaccgtactgtgtactgcaaacacagatgaccttttcagcgatttcgtcctaacttgcttccataaagaaaacc

SEQ ID NO: 454609 - DNA, 597 bp, Homo sapiens
gttaaggtaaaatgaggtcatatggatgggccctaatccaatatgactggtgtcttttaaggagaagagattaggacacagatataccaaaggtagatcatgtaaagrtaccagaagagaatggccatctacaagccaaaaaaaaagcggtcttcaaagaaaccaaccctgccaacaccttaatctcagacttcagcctccagaattatgagaaaattaatttctgttgtttaagccacccagctggtgtactttgctatgtaattccagaaaactaatatagggagagttattaagacatgtctcatatttctgccctttcctattgcctccaaccagattgtatctgcttccctgtgtctacttgctggcttggaacttattaagattggatccttcctggaagaaatttgctgatggaggcagaaggacactcagaattgaaactgtgtgagctttggtgcctgggatccttacttgctgttgcccatacttaattcaaatactcaatggatatttattatgtcctagggctataagaacataagaaaaagacccctgaaactaggaaagaaagcttcaaagagatggtcattt

SEQ ID NO: 454610 - DNA, 650 bp, Homo sapiens
gatgcttaggcactctgaagtcagaggcccactagtctggacactgcctaaggccagtccatgtgctcagacctctgcatctgctgctacatctccagctaccaaactacctaataatctcacatacagaagactggtcctaaggtgagacaaagtcccaagtcatcagataaagaggaacttatgttcacaatttgtcgtgggctttggagtgaggcagactccaatggaaagcccagttctccttcttcctagcagagactttagggaaattacttaaacccactgaacgtcagggtcctcatctgtaaaatcctcrtaggatggttgggagggtgatcaggtaggaaccatggctttctctaagctgccttttatttgctgacttttgagaggggacgtcttactcaggcacagtcacatgtgcctgtagccctagctactttggaggccaaggcaggaggatagtttgagtccaggagttcaagactgcagtgtgctgtaactgtgcctatgaatagccactgcttaggcaacacagtgaaaccccatctctaaaagaaaaaaaaaaaaagaccagacatcttagaaagattcttcaaatcctaaccctagttagacattagacattgaatgcctctcctagactt

SEQ ID NO: 454611 - DNA, 585 bp, Homo sapiens
ttttcctgtggcctttgctcttcgtattctgtatgttaggcttctgtttctatcaatatttgtcattaatagcatttacattgctccttcagaatttatttattttgagacagggtctcgctctgttgcccaggcctgagtgcagtggcacgattatagctcactgcaagcttggacccccggggctcaggggatcctcccaccttagccgcccaagtacctggggccacaggcgtgtgccaccacacctggataattttttttttttctgagtttcactcttgtcacccagactggagtgcaatggcatagtctcggctcactgcaacccgtctcccgggttcaagcgattttcccacctcagcctcccaagtagctgggattacaggcgcccgccaccacacccasctaatttttgtatttttagtagagacggggttttaccattttggtcaggctggtctcgaactcctgacctcaggtgatctgcccgccttggcctcccaaagtgctaggattacaggcgtgagccaccgcgcccggcccaatttttattatttttattttatttttttatagacacgg

SEQ ID NO: 454612 - DNA, 598 bp, Homo sapiens
ggtttgtcatatttaccagttttatctatttagcaaacttttttttgacagtgtataaagttttcaacaattgatattggaaggttggtagggcctaggaaggttgcaaggaacttacatgcttcccctgctgttgagtgttcctctcatttccattttgtttcatctaagctatctaatagaggctcagtaaattcttagagarttgtaaaatcaagttagatgaacatgtgtttgaaggataggcagggttctctatgtggagagaatacgtggaagccagtggaagactgcctggaacaaatagaagaatggagacagggtgagcctggtgtattgggagaagtggggaggctgcgttgactggagtacaagtcagactggtacagatgttggtgaaatcttggggagcacagacctgcatcctcctttactcctgttttccccataggtgaacacatccagctcccaggtggatcgtttggttataccagaagagaaccacttggggtatgtgtgggaataggagcatggaactacccctttcagattgcctcttggaagtcggctccagcattagcctgtggtaagaatgaat

SEQ ID NO: 454613 - DNA, 598 bp, Homo sapiens
ggtttgtcatatttaccagttttatctatttagcaaacttttttttgacagtgtataaagttttcaacaattgatattggaaggttggtagggcctaggaaggttgcaaggaacttacatgcttcccctgctgttgagtgttcctctcatttccattttgtttcatctaagctatctaatagaggctcagtaaattcttagagagttgtwaaatcaagttagatgaacatgtgtttgaaggataggcagggttctctatgtggagagaatacgtggaagccagtggaagactgcctggaacaaatagaagaatggagacagggtgagcctggtgtattgggagaagtggggaggctgcgttgactggagtacaagtcagactggtacagatgttggtgaaatcttggggagcacagacctgcatcctcctttactcctgttttccccataggtgaacacatccagctcccaggtggatcgtttggttataccagaagagaaccacttggggtatgtgtgggaataggagcatggaactacccctttcagattgcctcttggaagtcggctccagcattagcctgtggtaagaatgaat

SEQ ID NO: 454614 - DNA, 584 bp, Homo sapiens
agtacaaagaattcccatgtacctttgaaccagatttctcaaatattaacattttaacagattcactttatcatcttctttatctgcctgtacatacgtaggcatattaagtttttctgaaccttgagagtaaattgtagacataaggcccctaacctctaaatataaagttcctaaaaacaagtgcattcttttacataagcacggtacacttagtaaaattaaaaaattaacattgatatagtactgttactgaatctatagcccttactcaatctatagcccttattcaaattttgccacttgtttgactaatgtcctcatagtaaaatagaacaaaaatggttttttttccggtctaggatccagtcaaggatgatgcattggctttagttgtcttgtctttaatctcctttagctgagaacagttcttcagttattcttgtctttcaggacrttgacattttgggagaacaggccattcattttgtagaatgttccttaatttgggtctgtctgatgttttctgttatattcatattatgaatttttggcaaaataccacaaacatgatgtcatatcct

SEQ ID NO: 454615 - DNA, 449 bp, Homo sapiens
cccttactgccctaacccctccaacagtccctctgacctccttgctccttgaaaactccaggtatgttcattgctgttccttttgtctgaaacgctcatccccgagttatctgaaatcaggaccagctacagaatatttgggcccagtgtatagtgaaaatgtggagcttcttgttaaaaaaccattaggaatgtcaaggtggtgacagcagagaatcaaaccaagtgtaggtctcttctgagtatgaggccctgyatgcaagtccgaaagtcctcagcaccttcaggagtttgttcaacagtcaacttcttattttttattcttcttcttattttctttttctatttagcatttctcactctcttaactcactgtttaacttacttattccacattttctgtcctctccctgcattaggatatatgaaggccaggggttttgttttgg

SEQ ID NO: 454616 - DNA, 436 bp, Homo sapiens
catgtatgtgtgtgtgatgtgtgtgtgtgggtatgtgtgtgtgtgtgtgtgtgtatgttagcagccattgatgctaattgcctasttctattaacatattaagggtttcaaatgatatttgaattcaatcactgtttcttaatttattagctttaatgtctattaaaagacccctcccctgactatttggctacctaataattcagttcatatacgaaaggcagaacaagtgtctgattctttccctttatttaaaagttctcaaaatagttaagttgcttcctaatcatactccacaggtgatcaaatagagttttttaaaaaggtaacattttaaacccatggattcaaacataatttggtgcatttcaaatgatttcagtttttattcttcttgatgcttgtgctccaattattctgtctttgctaataagtg

SEQ ID NO: 454617 - DNA, 436 bp, Homo sapiens
catgtatgtgtgtgtgatgtgtgtgtgtgggtatgtgtgtgtgtgtgtgtgtgtatgttagcagccattgatgctaattgcctagttctattaacatattaagggtttcaaatgatatttgaattcaatcactgtttcttaatttattagctttaatgtctattaaaagacccctcccctgactatttggctacctaataattcagttcatatacraaaggcagaacaagtgtctgattctttccctttatttaaaagttctcaaaatagttaagttgcttcctaatcatactccacaggtgatcaaatagagttttttaaaaaggtaacattttaaacccatggattcaaacataatttggtgcatttcaaatgatttcagtttttattcttcttgatgcttgtgctccaattattctgtctttgctaataagtg

SEQ ID NO: 454618 - DNA, 388 bp, Homo sapiens
tgttgttgttgttgttgttgttgttgttgttgttgttttttggaggcagactcttgctgctctgttgcccaggctggagtgcagtggtgcaatcccagctcactgcagccttgacttaccagsctggggtgatcctcagcatccccaggagctgggactataagtatgtgccaccatgcttagacaaatttttatttttagtagagatggattttgccacattggccaggctggtctggaactcctgacctcaagtgatccacccaccttggccttccaaagtgctgggaggtgtgagccactgcacccggccaatgatagcttttttgatcacacagaagaatttggccttctcctcaacccaaataagagaataactaaaaatcca

SEQ ID NO: 454619 - DNA, 614 bp, Homo sapiens
caaagtcagtaacctccaacttgtcagggaagattgtggttaatgctgtgaaagacatgtgctgaaagatttctggttgcccttaaattcctgaatttctagtcaggatatcataccacacatgtgcaaaacagaaaagtctggtaaagtctaagtgggtcctgctgtaagtgtataaaatcttaacttataaaaccaatacattagataatcacatatcaaaaaaggattaactcaaaaatatttttaaataaaaatttccctactcacatagtaggttgaatcatatgaaactgcaaatatttgactctttttgacccaaaaacccccaaattctggcaattcaagctatacatttcattaacaacattggcactaaaaatttaaagagagtattaggaawccctacaaaaggttgcagaaataaaatttttaaaaaatatatttctcaaattacaaagtcaacaggaaattattttgttcaatgttttctatttttagatgtataatttttttcagtgacatacctatagcctcttttaatctgaataccacaggatataatcagtgataactaagaagaattttttttttttttttttttttttgagaca

SEQ ID NO: 454620 - DNA, 595 bp, Homo sapiens
tttgtctggtctcagaaagccaaattttaaggattgccaataaagttgtattgatactagtaataataaaataataacatactactaataaaagtcatcggataataaactcctctaataaatccagaaaaaataaaagtagaaaaaataaaaatttctactcccaataatgagggtacattttatatcagaccaattgtgttttgccaaacacaattgcaaattctggatagaaacaactatttgaagtgactaagagtaaattaatgcaggagaaaccagaaaggactccaccgtgacagaaagaaaactgcacggggtaaaatttttacacagcactttgcttgaaggcgctctccaaaccaagcaatacaagatgtatagatgaagaaagtacaacattattacttgtttaaagatccaaaggatgaaatttaagattcccagrgaatctaaaaagtaagagaaaaaactaaggaagaaattgaaacaagaggaagaaaccccatgttctgccttcaaacatttctctagtcctttgttaacatcagaagtgtgcaagcatgggagagactccaatcgtccaggcaaaaca

SEQ ID NO: 454621 - DNA, 339 bp, Homo sapiens
cacatgacgcctgtcttggaggagctgatacaatgttgggagacataaacttacttaaacctctcattataatggaaagaggaacaagtaaatatactactaaataataggtgttttgaggccagtaagaacaaatttacttatgagaaaactaaatgttaaagctagctcacaaaatgttatctctctaagactaagtctcctcatctgtacaatgggtaaaataagacagtgaaagtgaggtatgaggcacctaatagagtgtggccccacattgttacartgtgataggtatactattggaatactaaaataaaatgctatagggcacagtggaaa

SEQ ID NO: 454622 - DNA, 552 bp, Homo sapiens
attagtcggtctaatattttaacactattcttcaagttctctattattgactttttgtatgcttgttctattcattattaaaaatttggtttagaattctccaattattattgtttaactctttttaacttggttaatttttgtcttttacatttgggggtctgttgttaatatgtttctaattgttatatgttcttggtgaatgaaattttattatcaatatgtaaggttcttatttgctcattgttaccttatttggacttgaagtgtattttggtggctatrttatataaaatacattttttttcttttttactttcaaactctttgtgtcttagtatctaaagtgagtctcttgtattatagatagatctttttttaagtcttatctactagtatcttccttttaaaggagagtttaatccatttacatttaaagtaattaatgagaaggaaaaatttacttctgtcatttaactatttgcttctctgtctgacatttttgtacttttcatttcctccattactgattatttttgtatttcattaatt

SEQ ID NO: 454623 - DNA, 552 bp, Homo sapiens
attagtcggtctaatattttaacactattcttcaagttctctattattgactttttgtatgcttgttctattcattattaaaaatttggtttagaattctccaattattattgtttaactctttttaacttggttaatttttgtcttttacatttgggggtctgttgttaatatgtttctaattgttatatgttcttggtgaatgaaattttattatcaatatgtaaggttcttatttgctcattgttaccttatttggacttgaagtgtattttggtggctatgttatataaaatacattttttttcttttttactttcaaactcttygtgtcttagtatctaaagtgagtctcttgtattatagatagatctttttttaagtcttatctactagtatcttccttttaaaggagagtttaatccatttacatttaaagtaattaatgagaaggaaaaatttacttctgtcatttaactatttgcttctctgtctgacatttttgtacttttcatttcctccattactgattatttttgtatttcattaatt

SEQ ID NO: 454624 - DNA, 641 bp, Homo sapiens
ttaaatttccttttcacattgttcaccgttggcrtatagaaatgctattgatttttgtattttggttttgtatcctgcaactttactgaatttgtttagcagttctaatagctttcttgtggagtcttcaggatttttcaaatataagaccatatcacctgcaaacaaggatgagaaactataagaaaagacaaagaaaaactgaaagtctttcctctaatatctttcagtttttcttcatttagtataatactagatgtgtatctgtcatatatggctttattattttaaaatatgtttcctgtatgccaagttttctgagggtttttaacattaagggatgttgaattttatcaaattctttttcagcatcaattaaaatgattatatggtttttattctttattctgataatgtatcacatgtattgatttgcatacattgaaccatccttgcatctcagggataaaccccacttggccatgataaatgatctttctaatgtattgttgaattcagtttgctagaattttgttgaggatttttgcatcagtattcatcagcaacattggcctgtagtattctttttttttgatgtgtctttggtttcgttatcagggtaatacttgcctcatagaatg

SEQ ID NO: 454625 - DNA, 431 bp, Homo sapiens
ctgtcatctaggttttaagccccacatgcattagatatttgtcctaatgctttccctccccttgcccccacaccctgcaacggtccccrctgtgtgatgttcccttccctgtgtccatgtgttctcattgttcaactcccacttatgagtgagaacatgcagtgtttggttttctggtcctgtgtgagtttgctgagattgatggctggtgggaaaggagatattatattaaatatcccttcaaattcttatatagcttgactttaaaatatctcaacttagcatccttttctgtaaataaattcaatgcttcattaaaacacaccagtaatataaatgataatgaaggccttacactactatttaccttacatttgttttgtggcactttacatataattctgcatttggctacatacagctatgtagct

SEQ ID NO: 454626 - DNA, 431 bp, Homo sapiens
ctgtcatctaggttttaagccccacatgcattagatatttgtcctaatgctttccctccccttgcccccacaccctgcaacggtccccgctgtgtgatgttcccttccctgtgtccatgtgttctcattgttcaactcccacttatgagtgagaacatgcagtgtttggttttctggtcctgtgtgagtttgctgagattgatggctggtggraaaggagatattatattaaatatcccttcaaattcttatatagcttgactttaaaatatctcaacttagcatccttttctgtaaataaattcaatgcttcattaaaacacaccagtaatataaatgataatgaaggccttacactactatttaccttacatttgttttgtggcactttacatataattctgcatttggctacatacagctatgtagct

SEQ ID NO: 454627 - DNA, 431 bp, Homo sapiens
ctgtcatctaggttttaagccccacatgcattagatatttgtcctaatgctttccctccccttgcccccacaccctgcaacggtccccgctgtgtgatgttcccttccctgtgtccatgtgttctcattgttcaactcccacttatgagtgagaacatgcagtgtttggttttctggtcctgtgtgagtttgctgagattgatggctggtgggaaaggagatattatattaaatatcccttcaaattcttatatagcttgactttaaaatatctcarcttagcatccttttctgtaaataaattcaatgcttcattaaaacacaccagtaatataaatgataatgaaggccttacactactatttaccttacatttgttttgtggcactttacatataattctgcatttggctacatacagctatgtagct

SEQ ID NO: 454628 - DNA, 637 bp, Homo sapiens
ttacccattttctcaaccagaagtaatttgttgggaatagaaccaattgatggcaatggtgacagtgatgaaggtgataatcagtctagtttgttgagtgaataatggcttacaaagtgcttttaatttctgtaattttccgtaacccctataccaatgatggtaaaatgaatctcccttgatggaatataaggcactttggaacctggctatttatggaaatatagggattgcatagtacctggttcaaatcttatgtagggaattgtttattctgcatttgtaaggaacagcatgcttgggactcatatgcatattatagtcccaaaagctgtcccaattgcctgtgattgtctcagagttagttcactctctgaatggatgctcagggtaaattttatccaaaaacattgtgagctttgctgctctctatctaaaatccagccctgaactatcttgtaaacttaaaatgaatcacagttcaattgtttgttcctaggtagaaacttagtgtgctcatattctttgcaacaacaaggaaaatagctatattttatctctttcatstaaagttcattcatatatactacctcacttgatcttcacaattctgtcagacaagaggaggaagtggaat

SEQ ID NO: 454629 - DNA, 577 bp, Homo sapiens
atagctgctcattttttagttgactaactttctaatgttgagaaaaaaataaaatatattttattctaaattttcccgtgayatactttatactttttcagttttattttgatatgtttgaaaatgaggaaagaaagacaggaaggggaaatcaagaagaattgagaaatatcaagtatatgttctatgctaatgattctgcatgcattgtgccatcaaatccttaaattaatctcataaaaatatattattttacccatattacagacaataaaacagactcagggcaagatcatttgttgaagcttacacatctagtatgcacagatgctactctactaggaaatacagttaataagagttaaagcccaagttctctccaggaagccacccactctcctgtcatctgttcttatccacgtagtcagacaaaaggtttggggtagcaggttgaggtttcctagaccttgttaactgcccccacaacagtttttgtctcatttgcaaaaaagaggaaatttatttttagtggccccgatttgctcctactctactcactaagagattttgtgtttta

SEQ ID NO: 454630 - DNA, 577 bp, Homo sapiens
atagctgctcattttttagttgactaactttctaatgttgagaaaaaaataaaatatattttattctaaattttcccgtgacatactttatactttttcagttttattttgatwtgtttgaaaatgaggaaagaaagacaggaaggggaaatcaagaagaattgagaaatatcaagtatatgttctatgctaatgattctgcatgcattgtgccatcaaatccttaaattaatctcataaaaatatattattttacccatattacagacaataaaacagactcagggcaagatcatttgttgaagcttacacatctagtatgcacagatgctactctactaggaaatacagttaataagagttaaagcccaagttctctccaggaagccacccactctcctgtcatctgttcttatccacgtagtcagacaaaaggtttggggtagcaggttgaggtttcctagaccttgttaactgcccccacaacagtttttgtctcatttgcaaaaaagaggaaatttatttttagtggccccgatttgctcctactctactcactaagagattttgtgtttta

SEQ ID NO: 454631 - DNA, 577 bp, Homo sapiens
atagctgctcattttttagttgactaactttctaatgttgagaaaaaaataaaatatattttattctaaattttcccgtgacatactttatactttttcagttttattttgatatgtttgaaaatgaggaaagaaagacaggaaggggaaatcaagaagaattgagaaatatcaagtatatgttctatgctaatgattctgcatgcattgtgccatcaaatccttaaattaatctcataaaaatatawtattttacccatattacagacaataaaacagactcagggcaagatcatttgttgaagcttacacatctagtatgcacagatgctactctactaggaaatacagttaataagagttaaagcccaagttctctccaggaagccacccactctcctgtcatctgttcttatccacgtagtcagacaaaaggtttggggtagcaggttgaggtttcctagaccttgttaactgcccccacaacagtttttgtctcatttgcaaaaaagaggaaatttatttttagtggccccgatttgctcctactctactcactaagagattttgtgtttta

SEQ ID NO: 454632 - DNA, 577 bp, Homo sapiens
atagctgctcattttttagttgactaactttctaatgttgagaaaaaaataaaatatattttattctaaattttcccgtgacatactttatactttttcagttttattttgatatgtttgaaaatgaggaaagaaagacaggaaggggaaatcaagaagaattgagaaatatcaagtatatgttctatgctaatgattctgcatgcattgtgccatcaaatccttaaattaatctcataaaaatatattattttacccatattacagacaataaaacagactcagggcaagatcatttgttgaagcttacacatctagtatgcacagatgctactctactaggaaatacagttaataagagttaaagcccaagttctctccaggaagccacccactctcctgtcatctgttcttatccacgtagtcagacaaaaggtttggggtagcaggttgaggtttcctagaccttgttaactgcccccacaacagtttttgtctcatttgcaamaaagaggaaatttatttttagtggccccgatttgctcctactctactcactaagagattttgtgtttta

SEQ ID NO: 454633 - DNA, 509 bp, Homo sapiens
atttttcttcttaagatagtgattgtttcaatacggygagggccccaagggaaacccgttggaaactgagtttactaatgtgctctagtgaaatggtttcatgatgtaatttgtgcctataatatcagaagctttacattgtgtaacttctacagttgtaatgttttagtcctgatgactgccattttgtactttctctgttgagtggaaaccttgccttccatgaactgaaaatggaaaactctaaatcatctcttgagggttttacatttcctatgataccttcagtgattccattagtgtttagttttctattaaaatacactcagaaaaaataactaatgaatacaagtcttaatacctgggtgatgaaataatctgtacaacaaatacccatgacacaagtttacctatgtaacaaacctgcacatcctgcacatatacccctaaatttaaaataaaagttaaaaaataaataaagtacactttgtattataagtaagataaac

SEQ ID NO: 454634 - DNA, 509 bp, Homo sapiens
atttttcttcttaagatagtgattgtttcaatacggtgagggccccaagggaaayccgttggaaactgagtttactaatgtgctctagtgaaatggtttcatgatgtaatttgtgcctataatatcagaagctttacattgtgtaacttctacagttgtaatgttttagtcctgatgactgccattttgtactttctctgttgagtggaaaccttgccttccatgaactgaaaatggaaaactctaaatcatctcttgagggttttacatttcctatgataccttcagtgattccattagtgtttagttttctattaaaatacactcagaaaaaataactaatgaatacaagtcttaatacctgggtgatgaaataatctgtacaacaaatacccatgacacaagtttacctatgtaacaaacctgcacatcctgcacatatacccctaaatttaaaataaaagttaaaaaataaataaagtacactttgtattataagtaagataaac

SEQ ID NO: 454635 - DNA, 509 bp, Homo sapiens
atttttcttcttaagatagtgattgtttcaatacggtgagggccccaagggaaacccgttggaaactgagtttactaatgtgctctagtgaaatggtttcatgatgtaatttgtgcctataatatcagaagctttacattgtgtaacttctacagttgtaatgttttagtcctgatgactgccattttgtactttctctgttgagtggaaaccttgccttccatgaactgaaaatggaaaactctaaatcatctcttgagggttttacatttcctatgataycttcagtgattccattagtgtttagttttctattaaaatacactcagaaaaaataactaatgaatacaagtcttaatacctgggtgatgaaataatctgtacaacaaatacccatgacacaagtttacctatgtaacaaacctgcacatcctgcacatatacccctaaatttaaaataaaagttaaaaaataaataaagtacactttgtattataagtaagataaac

SEQ ID NO: 454636 - DNA, 509 bp, Homo sapiens
atttttcttcttaagatagtgattgtttcaatacggtgagggccccaagggaaacccgttggaaactgagtttactaatgtgctctagtgaaatggtttcatgatgtaatttgtgcctataatatcagaagctttacattgtgtaacttctacagttgtaatgttttagtcctgatgactgccattttgtactttctctgttgagtggaaaccttgccttccatgaactgaaaatggaaaactctaaatcatctcttgagggttttacatttcctatgataccttcagtgattycattagtgtttagttttctattaaaatacactcagaaaaaataactaatgaatacaagtcttaatacctgggtgatgaaataatctgtacaacaaatacccatgacacaagtttacctatgtaacaaacctgcacatcctgcacatatacccctaaatttaaaataaaagttaaaaaataaataaagtacactttgtattataagtaagataaac

SEQ ID NO: 454637 - DNA, 614 bp, Homo sapiens
agaaaaaataactaatgaatacaagtcttaatacctgggtgatgaaataatctgtacaacaaatacccatgacacaagtttacctatgtaacaaacctgcacatcctgcacatatacccctaaatttaaaataaaagttaaaaaataaataaagtacactttgtattataagtaagataaacctaatggccatttttaaaatgaaaagaataatatgttataataaggtagtaaatgtagataatttctcaacagcaaaaccagactagaattaatgtatgctttatcaagtggtatgttatagtaaagagaaatttcagctaaaatgtttaattactatctcactaagagagccaaaaatggcctattacctaattcctgtttataccattattgacattaactagacatgtaaactttgcctgagtgttgttataatatggtggataactaacctgaytctggaatcaggcaaacttgggtatacaacttgcttttgcttctcacaaactgtataaacacaggaaaataattttgtcttatgtaaaatgcagttttagcaactgcaaaatgtaataataaaagtgtttccatgaatgaatgcatggaatact

SEQ ID NO: 454638 - DNA, 614 bp, Homo sapiens
agaaaaaataactaatgaatacaagtcttaatacctgggtgatgaaataatctgtacaacaaatacccatgacacaagtttacctatgtaacaaacctgcacatcctgcacatatacccctaaatttaaaataaaagttaaaaaataaataaagtacactttgtattataagtaagataaacctaatggccatttttaaaatgaaaagaataatatgttataataaggtagtaaatgtagataatttctcaacagcaaaaccagactagaattaatgtatgctttatcaagtggtatgttatagtaaagagaaatttcagctaaaatgtttaattactatctcactaagagagccaaaaatggcctattacctaattcctgtttataccattattgacattaactagacatgtaaactttgcctgagtgttgttataatatggtggataactaacctgattctggaatcaggcaaacttgggtatacaacttgcttttgcttctcacaaactgtataaacacaggaaaataattttgtcttaygtaaaatgcagttttagcaactgcaaaatgtaataataaaagtgtttccatgaatgaatgcatggaatact

SEQ ID NO: 454639 - DNA, 599 bp, Homo sapiens
aggccttgactctaggtttattaacttccatatgtttcttctgcatgctttccaacagcctgtcattctaattagcattatttaaatgtaagtagcaattagttctgtcaagagtcaaatcatcagctatgatctaataattattaaatgtctattacctgccaaatattatagaacaggctttaataaatattttataacatgctccttcagtcattagctatacttaaaagccatcaattctgccactgtactagctaccggggacacaatgaagaagatacattcctcaacttaaagagttttttttttttttaraaagaggttttttttgtattttttagagtagtttaggttcacagcaaaattgagaggtaagtacagagatttcctgtatttcccctgcccctgcatatgtatagcctcccatattatcaataaccctcaccagagtatcaaatttgtgacaactgataaacgtacattgacacatcattatcacccaaagtccatagtttaatttagtgttcactccttgcgtataggtttggacaaatgtataatgacatgtatccaccactatagaattatagggagta

SEQ ID NO: 454640 - DNA, 584 bp, Homo sapiens
ttttaactatgttattctggtccactggtaaacttatgagaatttttcaaaggggctgacttccacatgggatttgatwtggactctgaaacctacagtcaggttaaattctaaatgtatttaaagaaagtagcttccaagatcaggtatacttaatggcgtctcactgagatttgtgttgctttatgctgctttaccagttaaattttgagagagagagacagagaatagccaattgcagttatgtggtctttacatgaacaacctactatagatgaatcacacaggaaccacagaaaatattgtggatggttttgaaaaagagaatcataaaaatgatgactactcacctgcaagcttaggaaaactacaagaattgaaaaatcaacaggctttatcttgcttcactctgctccatctatggcactaccagacaaaaaaatccttatgttaatatcaactatgaaaaattaaaaagcatttgagtaaaatgacttccattactataactttaatagtgaaaaatatatatgccactggaaccatttttatatttggggcttggttcaaaaatttgttacaag

SEQ ID NO: 454641 - DNA, 584 bp, Homo sapiens
ttttaactatgttattctggtccactggtaaacttatgagaatttttcaaaggggctgacttccacatgggatttgatttggactctgaaacctacagtcaggttaaattctaaatgtatttaaagaaagtagcttccaagatcaggtatacttaatggcgtctcactgagatttgtgttgctttatgctgctttaccagttaaattttgagagagagagasagagaatagccaattgcagttatgtggtctttacatgaacaacctactatagatgaatcacacaggaaccacagaaaatattgtggatggttttgaaaaagagaatcataaaaatgatgactactcacctgcaagcttaggaaaactacaagaattgaaaaatcaacaggctttatcttgcttcactctgctccatctatggcactaccagacaaaaaaatccttatgttaatatcaactatgaaaaattaaaaagcatttgagtaaaatgacttccattactataactttaatagtgaaaaatatatatgccactggaaccatttttatatttggggcttggttcaaaaatttgttacaag

SEQ ID NO: 454642 - DNA, 378 bp, Homo sapiens
tcttttatggatctaaaaagaattgttgacttttcagtttgttcagctttttacctattgttacgatggagtggtggcttctaagctccttatatgtgggactgggagttggaagtctattaagtttakagtgtcataaggtaaaggcacaaacagtcagactactacagaatcatgtaagtgttaccacagagaactttcctctcattatttttctatttttatccgattatagattaagaaactgaggtttagtgaggagcataagaaggaatagaacaacaactaatatgaagagcggcttagattcaactcaaatcagtctatcacttaacctttaaaaatttttttcatatcatgtatatagtcattgtcaaa

SEQ ID NO: 454643 - DNA, 378 bp, Homo sapiens
tcttttatggatctaaaaagaattgttgacttttcagtttgttcagctttttacctattgttacgatggagtggtggcttctaagctccttatatgtgggactgggagttggaagtctattaagtttagagtgtcataaggtaaaggcacaaacagtcagactactacagaatcatrtaagtgttaccacagagaactttcctctcattatttttctatttttatccgattatagattaagaaactgaggtttagtgaggagcataagaaggaatagaacaacaactaatatgaagagcggcttagattcaactcaaatcagtctatcacttaacctttaaaaatttttttcatatcatgtatatagtcattgtcaaa

SEQ ID NO: 454644 - DNA, 378 bp, Homo sapiens
tcttttatggatctaaaaagaattgttgacttttcagtttgttcagctttttacctattgttacgatggagtggtggcttctaagctccttatatgtgggactgggagttggaagtctattaagtttagagtgtcataaggtaaaggcacaaacagtcagactactacagaatcatgtaagtgttaccacagagaactttcctctcattatttttctatttttatccgaytatagattaagaaactgaggtttagtgaggagcataagaaggaatagaacaacaactaatatgaagagcggcttagattcaactcaaatcagtctatcacttaacctttaaaaatttttttcatatcatgtatatagtcattgtcaaa

SEQ ID NO: 454645 - DNA, 378 bp, Homo sapiens
tcttttatggatctaaaaagaattgttgacttttcagtttgttcagctttttacctattgttacgatggagtggtggcttctaagctccttatatgtgggactgggagttggaagtctattaagtttagagtgtcataaggtaaaggcacaaacagtcagactactacagaatcatgtaagtgttaccacagagaactttcctctcattatttttctatttttatccgattatwgattaagaaactgaggtttagtgaggagcataagaaggaatagaacaacaactaatatgaagagcggcttagattcaactcaaatcagtctatcacttaacctttaaaaatttttttcatatcatgtatatagtcattgtcaaa

SEQ ID NO: 454646 - DNA, 584 bp, Homo sapiens
ttttaactatgttattctggtccactggtaaacttatgagaatttttcaaaggggctgacttccacatgggatttgatttggactctgaaacctacagtcaggttaaattctaaatgtatttaaagaaagtagcttccaagatcaggtatacttaatggcgtctcactgagatttgtgttgctttatgctgctttaccagttaaattttgagagagagagacagagaatagccaattgcagttatgtggtctttacatgaacaacctactatagatgaatcacacaggaaccacagaaaatattgtggatggttttgaaaaagagaatcataaaaatgatgactactcacctgcaagcttaggaaaactacaagaattgaaaaatcaacaggctttatcttgcttcactctgctccatctatggcactaccagacaaaaaaatccttatgttartatcaactatgaaaaattaaaaagcatttgagtaaaatgacttccattactataactttaatagtgaaaaatatatatgccactggaaccatttttatatttggggcttggttcaaaaatttgttacaag

SEQ ID NO: 454647 - DNA, 580 bp, Homo sapiens
atactgctgttttcctgtaaaccactatttttcaccttctttattaatagaagctcaggtttgctcaggtatctcgtgtccctgcactctggattatttttagctccaagaagtaaataaagatgggttaaaagaatcagatcaagaacattctccttgayagtgttggcttggtcttgtcacacagttccggtaaataggctgaaaagagacatctgctgggaaccatctggataaagtccattaaggagacccatagaaggaaagactgcatttatgcctctctacattttacagtcatcttgggtccataaaaggcaaagcaattcactgaggatgacaggtcataaagatagaaaacacttaggtcactgatgatgtcaatatgccactgaattatctaactctcaaacctttcaacctttagacttcctaatatgtgaaataatacattttgcttattgcttaagcaattttgcgttggattttcttattcttgcaggaaaaaaatataaaaggtgtttttgtggaattccttacatagaactttaaaaatgttttcaagttccttccttgaatt

SEQ ID NO: 454648 - DNA, 580 bp, Homo sapiens
atactgctgttttcctgtaaaccactatttttcaccttctttattaatagaagctcaggtttgctcaggtatctcgtgtccctgcactctggattatttttagctccaagaagtaaataaagatgggttaaaagaatcagatcaagaacattctccttgacagtgttggcttggtcttgtcacacagttccggtaaataggctgaaaagagacatctgctgggaaccatctggataaagtccattaaggagacccatagaaggaaagactgcatttatgcctctctacattttacagtcatcttgggtccataaaaggcaaagcaattcactgaggatgacaggtcataaagatagaaaacacttaggtcactgatgatgtcaatatgccactgaattatctaactctcaaacctttcaamctttagacttcctaatatgtgaaataatacattttgcttattgcttaagcaattttgcgttggattttcttattcttgcaggaaaaaaatataaaaggtgtttttgtggaattccttacatagaactttaaaaatgttttcaagttccttccttgaatt

SEQ ID NO: 454649 - DNA, 593 bp, Homo sapiens
gacaggtcataaagatagaaaacacttaggtcactgatgatgtcaatatgccactgaattatctaactctcaaacctttcaacctttagacttcctaatatgtgaaataatacattttgcttattgcttaagcaattttgcgttggattttcttattcttgcaggaaaaaaatataaaaggtgtttttgtggaattccttacatagaactttaaaaatgttttcaagttccttccttgaatttttctcttgtccttcttccttcctaacaccacaatattttagtgacatrcaaatattatagtcatattggagggcctaagatgaagtttaaagtctcttactggacccagtattagatatgagaccctgatttgtgaaaaaggctatagttactgggcacctaaaagtcactcagagatacttatggattatttgggaggcctgagagtgggtttcctgagaaaggaactcagataaggcaaatttaagttttacattttaagattggttgagtcaatttttatgtttatctaaaaactataaatatcagttctgtgaggaagttgggctggtttcagtaccaagagaaac

SEQ ID NO: 454650 - DNA, 584 bp, Homo sapiens
ttttaactatgttattctggtccactggtaaacttatgagaatttttcaaaggggctgacttccacatgggatttgatttggactctgaaacctacagtcaggttaaattctaaatgtatttaaagaaagtagcttccaagatcaggtatacttaatggcgtctcactgagatttgtgttgctttatgctgctttaccagttaaattttgagagagagagacagagaatagccaattgcagttatgtggtctttacatgaacaacctactatagatgaatcacacaggaaccacagaaaatattgtggatggttttgaaaaagagaatcataaaaatgatgactactcacctgcaagcttaggaaaactacaagaattgaaaaatcaacaggctttatcttgcttcactctgctccatctatggcactaccagacaaaaaaatccttatgttaatatcaactatgaaaaattaaaaagcatttgagtaaaatgacttccattactataactttaataktgaaaaatatatatgccactggaaccatttttatatttggggcttggttcaaaaatttgttacaag

SEQ ID NO: 454651 - DNA, 578 bp, Homo sapiens
atagatgcatagatgaaagtaatcatggcctagaagtactatacattccaagtcactatggagatttttgttttatgcctgtgttctgggtaaaataattagtattctccccctcacttgcaaagatagtttggtacaacartaaattatatgtttactctacttgaaggctcttcataatctgacctctccttagctatacagccacaattttcacaattctctttcccacctgtatcctgaacttagccaaatcagttttcttccatttcctcaaatgcatcacaatctcttttgcatctgtgcctgtgtggattatttttcccccgtatatctatttcactttatttttcaagacaattcaatgcattctttgaaccccagagcatgaatgattttcccagagaccagcccttcctaatcccaagcccctgcctagattctatgtcttgcctgctcctctgcagccagtacatttctgtacttccaaaacttttttggttcgtttgtttttttttataggatccttctctctatcatgaagccatgcattatctgaggtcagaataggttacatt

SEQ ID NO: 454652 - DNA, 578 bp, Homo sapiens
atagatgcatagatgaaagtaatcatggcctagaagtactatacattccaagtcactatggagatttttgttttatgcctgtgttctgggtaaaataattagtattctccccctcacttgcaaagatagtttggtacaacaataaattatatgtttactctacttgaaggctcttcataatctgacctctccttagctatacagccacaattttcacaattctctttcccacctgtatcctgaacttagccaaatcagttttcttccatttcctcaaatgcatcacaatctcttttgcatctgtgcctgtgtggattatttttcccccgtatatctatttcactttatttttcaagacaattcaatgcattstttgaaccccagagcatgaatgattttcccagagaccagcccttcctaatcccaagcccctgcctagattctatgtcttgcctgctcctctgcagccagtacatttctgtacttccaaaacttttttggttcgtttgtttttttttataggatccttctctctatcatgaagccatgcattatctgaggtcagaataggttacatt

SEQ ID NO: 454653 - DNA, 578 bp, Homo sapiens
atagatgcatagatgaaagtaatcatggcctagaagtactatacattccaagtcactatggagatttttgttttatgcctgtgttctgggtaaaataattagtattctccccctcacttgcaaagatagtttggtacaacaataaattatatgtttactctacttgaaggctcttcataatctgacctctccttagctatacagccacaattttcacaattctctttcccacctgtatcctgaacttagccaaatcagttttcttccatttcctcaaatgcatcacaatctcttttgcatctgtgcctgtgtggattatttttcccccgtatatctatttcactttatttttcaagacaattcaatgcattctttgaaccccagagcatgaatgattttcccagagaccagcccttcctaatcccaagcccctgcctagattctatgtcttgcctgctcytctgcagccagtacatttctgtacttccaaaacttttttggttcgtttgtttttttttataggatccttctctctatcatgaagccatgcattatctgaggtcagaataggttacatt

SEQ ID NO: 454654 - DNA, 520 bp, Homo sapiens
aatatttaagagaaaaggattaaggaacttgaagatgcaccaagagttattcaactaaagcacagacagcagaagttaaaaacaaaattgagccagaatgacctgtgaagcyaaatcaagccattctgcatatctgcaattagagtcctagaaaaagggcgagataatggttcagaaaaatatatccagataaacaatggctgaaaaatttctaaatttaattaaaaatttcaaactcaagatataagagatccaacactcttcaggtaggatagatgcaaagaaaaccacaactacacacattatagtcaaagtgctgaaaaccaatacaggcacaccttggagatactgagtttggttccagaccaccacagtaaagcaagtcacacgaaattctggtttttcagtgcatataaaagttatgtttacactacctatagtctattaagtgtgcaaacacatgtttgcaaaacaatgtgcatatcataattaaaaatactttattgctaaaaaatgctaa

SEQ ID NO: 454655 - DNA, 561 bp, Homo sapiens
tttttttttttttaaaaaaaaagaatccttggacatttcagttaaggtaaaacaattcctggggttttcacatctgagtcattgagtygtcaaagcaaaaagaggcctcctcagtaaacaatgtattaatatttaggtaactctgtctttgagaacctaaagtttccaaacttcatgtatgtaaacttactgagtgacaccaagtcagtgtagtttcctttatgtaggtgactagtattttctttaatattgtaattatcagaagagacaaaaggaattgctctgttaaatctgtatctaaagatggtggtatggaggcatggctttttaacataatggcttagtcttgttgattcattttagaaaagagattgccataaaatatgtggtaaattggagattctcaataacgactactttaaatattttctaaataagtattcacacaactcttttccattgaagctgttagtacctgttcattagtacctgtataaatgttctaacacaagcagctgtacaaccaatgctaaatgaaataaaaattgacacatttcagag

SEQ ID NO: 454656 - DNA, 561 bp, Homo sapiens
tttttttttttttaaaaaaaaagaatccttggacatttcagttaaggtaaaacaattcctggggttttcacatctgagtcattgagttgtcaaagcaaaaagaggcctcctcagtaaacaatgtattaatatttaggtaactctgtctttgagaacctaaagtttccaaacttcatgtatgtaaacttactgagtgacaccaagtcagtgtagtttcctttatgtaggtgactagtattttctttaatattgtaattatcagaagagacaaaaggaattgctctgttaaatctgtatctaaagatggtggtatggaggcatggctttttaacataatggcttagtcttgttgattcattttagaaaagagattrccataaaatatgtggtaaattggagattctcaataacgactactttaaatattttctaaataagtattcacacaactcttttccattgaagctgttagtacctgttcattagtacctgtataaatgttctaacacaagcagctgtacaaccaatgctaaatgaaataaaaattgacacatttcagag

SEQ ID NO: 454657 - DNA, 561 bp, Homo sapiens
tttttttttttttaaaaaaaaagaatccttggacatttcagttaaggtaaaacaattcctggggttttcacatctgagtcattgagttgtcaaagcaaaaagaggcctcctcagtaaacaatgtattaatatttaggtaactctgtctttgagaacctaaagtttccaaacttcatgtatgtaaacttactgagtgacaccaagtcagtgtagtttcctttatgtaggtgactagtattttctttaatattgtaattatcagaagagacaaaaggaattgctctgttaaatctgtatctaaagatggtggtatggaggcatggctttttaacataatggcttagtcttgttgattcattttagaaaagagattgccataaaatatgtggtaaattggagattctcaataacgactactttaaatattttctaaataagtattcacacractcttttccattgaagctgttagtacctgttcattagtacctgtataaatgttctaacacaagcagctgtacaaccaatgctaaatgaaataaaaattgacacatttcagag

SEQ ID NO: 454658 - DNA, 654 bp, Homo sapiens
aactcaaattaatctttctcaagtatgtccatgtttttattctggcttgaaaattttgggttacctattgagattgtacagcaaagaaaatatttgagcagattgcaggcagtattataaccaccatggtactcccccttcatttttaatgaaatagagtttcaactatgttcactgcattctcaatccctagttattagatctgagacagttttgcctttaaactaaaggttattcrgatttttggtccacgaacagtgcaatgcttggaacttcctatatttatctggtgcaaagtcctttatgtgtggtaaacaagagtctagggctctatggactctcacttttcatcatagttgttatagcactcctgacctcagcctagaattgtgagaatacagggctgctcccaaacaagtgaggctgagttattttgtttacttgacacttttgatagaagagagaggtttcattctaaaggactcattcctgtagaaatttgatttacagacataccccagatatattgtaagtgcaggtccagaccaccacaataaagtgaatatcacaataaagtgactgacacaaaatttttggtttcccaatgcatataaaagttatttttacaccacgctgtagtctactaggtataca

SEQ ID NO: 454659 - DNA, 604 bp, Homo sapiens
tttttccatatcggcagtaaggttattttcttacaatttgtgaataccctggagtagcacttttaattttcttttcttctgcattcataactgggctaacagtttggctcaagaggcctatctttcagcctttctgggcttttgacatacctttctcactaagcttaatcatttatatcttttgattaaaagtgaaagacgtgtaactactcctttcatttgaacacttagagaccattgcatggttattaattgtcccaatttcaatattgttgcacctcaggaaataaggaagcctaagaaggagaagagagatagggaaacagccagtgggtggagctgtcagaacacatacaacatttatcactttagttcactgtcttatgtgagcatggtttgtggcaccccaaaacaatcacaawaggaacatcaaaaatcagtgaaaacagattaccataacggatataataataatgaaaaagtgaaatattgtgagagttaccaaaatgtgacaaaggggcaggaagtaagcacttgcttttggcaaagtaatactgatagacttgctggatacagtttctgcataccttcaatttgcaaaaat

SEQ ID NO: 454660 - DNA, 518 bp, Homo sapiens
agtgggtggagctgtcagaacacatacaacatttatcactttagttcactgtcttatgtgagcatggtttgtggcaccccaaaacaatcacaataggaacatcaaaaatcagtgaaaacagattaccataayggatataataataatgaaaaagtgaaatattgtgagagttaccaaaatgtgacaaaggggcaggaagtaagcacttgcttttggcaaagtaatactgatagacttgctggatacagtttctgcataccttcaatttgcaaaaattgcagtatctatgaagtgtaataaagtgaagtgcaataaggtgaggtatgcctgtacacagtgtagcacttagatgtaattctgaatgattctggcttaccttcactcacatttctttattccataaaatttttaactcattttatcatttgttttataagatagctaatgggatattcattaacttatttacagtagtggacaatggtttgtttatagtaagctcattttttgctgctgta

SEQ ID NO: 454661 - DNA, 518 bp, Homo sapiens
agtgggtggagctgtcagaacacatacaacatttatcactttagttcactgtcttatgtgagcatggtttgtggcaccccaaaacaatcacaataggaacatcaaaaatcagtgaaaacagattaccataacggatataataataatgaaaaagtgaaatattgtgagagttaccaaaatgtgacaaaggggcaggaagtaagcacttgcttttggcaaagtratactgatagacttgctggatacagtttctgcataccttcaatttgcaaaaattgcagtatctatgaagtgtaataaagtgaagtgcaataaggtgaggtatgcctgtacacagtgtagcacttagatgtaattctgaatgattctggcttaccttcactcacatttctttattccataaaatttttaactcattttatcatttgttttataagatagctaatgggatattcattaacttatttacagtagtggacaatggtttgtttatagtaagctcattttttgctgctgta

SEQ ID NO: 454662 - DNA, 518 bp, Homo sapiens
agtgggtggagctgtcagaacacatacaacatttatcactttagttcactgtcttatgtgagcatggtttgtggcaccccaaaacaatcacaataggaacatcaaaaatcagtgaaaacagattaccataacggatataataataatgaaaaagtgaaatattgtgagagttaccaaaatgtgacaaaggggcaggaagtaagcacttgcttttggcaaagtaatactgatagacttgctggatacagtttctgcayaccttcaatttgcaaaaattgcagtatctatgaagtgtaataaagtgaagtgcaataaggtgaggtatgcctgtacacagtgtagcacttagatgtaattctgaatgattctggcttaccttcactcacatttctttattccataaaatttttaactcattttatcatttgttttataagatagctaatgggatattcattaacttatttacagtagtggacaatggtttgtttatagtaagctcattttttgctgctgta

SEQ ID NO: 454663 - DNA, 580 bp, Homo sapiens
ttttaactcattttatcatttgttttataagatagctaatrggatattcattaacttatttacagtagtggacaatggtttgtttatagtaagctcattttttgctgctgtataattaaacatttttttctgaatttaacttaccctgaaggcattattggagaaaatgcatctacagtatttacatttgtaactcctttttaaatttactagcacagggaaattttattctttttaacacatcttgggtttggttctttgtctctggatcaaatagagatcacaattactagaacatttaatgtcccatatgaatttctcaggctccttactctctgagaattcatctgcacaatttaaccacaggaagaaataaacatttctttggatttataagaagtaaaatattcaaacctcaaccgaagaaacattcatatcatctgggtatgttcaagaaaaaaaaatgtaagccagaccatccaacaacacattaaaagagatagtcatttctctcatcttggggctggaaatttcttttccaactgacgtttccaacatgtgaaatatagctgccatcaca

SEQ ID NO: 454664 - DNA, 580 bp, Homo sapiens
ttttaactcattttatcatttgttttataagatagctaatgggatattcattaacttatttacagtagtggacaatggtttgtttatagtaagctcattttttgctgctgtataattaaacatttttttctgaatttaacttaccctgaaggcattattggagaaaatgcatctacagtatttacatttgtaactcctttttaaatttactagcacagggaaattttattctttttaacacatcttgggtttggttctttgtctctggatcaaatagagatcacaattactagaayatttaatgtcccatatgaatttctcaggctccttactctctgagaattcatctgcacaatttaaccacaggaagaaataaacatttctttggatttataagaagtaaaatattcaaacctcaaccgaagaaacattcatatcatctgggtatgttcaagaaaaaaaaatgtaagccagaccatccaacaacacattaaaagagatagtcatttctctcatcttggggctggaaatttcttttccaactgacgtttccaacatgtgaaatatagctgccatcaca

SEQ ID NO: 454665 - DNA, 580 bp, Homo sapiens
ttttaactcattttatcatttgttttataagatagctaatgggatattcattaacttatttacagtagtggacaatggtttgtttatagtaagctcattttttgctgctgtataattaaacatttttttctgaatttaacttaccctgaaggcattattggagaaaatgcatctacagtatttacatttgtaactcctttttaaatttactagcacagggaaattttattctttttaacacatcttgggtttggttctttgtctctggatcaaatagagatcacaattactagaacatttaatgtcccatatgaatttctcaggctccttactctctgagaattcatctgcacaatttaaccacaggaagaaataaacatttctttggatttatragaagtaaaatattcaaacctcaaccgaagaaacattcatatcatctgggtatgttcaagaaaaaaaaatgtaagccagaccatccaacaacacattaaaagagatagtcatttctctcatcttggggctggaaatttcttttccaactgacgtttccaacatgtgaaatatagctgccatcaca

SEQ ID NO: 454666 - DNA, 580 bp, Homo sapiens
ttttaactcattttatcatttgttttataagatagctaatgggatattcattaacttatttacagtagtggacaatggtttgtttatagtaagctcattttttgctgctgtataattaaacatttttttctgaatttaacttaccctgaaggcattattggagaaaatgcatctacagtatttacatttgtaactcctttttaaatttactagcacagggaaattttattctttttaacacatcttgggtttggttctttgtctctggatcaaatagagatcacaattactagaacatttaatgtcccatatgaatttctcaggctccttactctctgagaattcatctgcacaatttaaccacaggaagaaataaacatttctttggatttataagaagtaaaatattcaaacctcaacygaagaaacattcatatcatctgggtatgttcaagaaaaaaaaatgtaagccagaccatccaacaacacattaaaagagatagtcatttctctcatcttggggctggaaatttcttttccaactgacgtttccaacatgtgaaatatagctgccatcaca

SEQ ID NO: 454667 - DNA, 578 bp, Homo sapiens
tactttcactgaaatcttatatatcaaacttatttcatttgctcaaagaattgccattttctcttctgcattttttttcattcaaatcccacctcaaaggaagaaattctgataaaataagaaattcctagagattattttaatatctattctgggttacatatgaaacccattgttcaaggcttgtggagcacttacataaaaaccagtttcagtcagaaattgatcataagcatatgttgtgcaaagaatataatatccaatttggtgagaagaacaaatgaacatataagcttgaattaaaaataaatataaaatttaaaaagtaagttacatttggaacttttggtccaagaataaatgtctccatgaaagatatagaaargaggttgattttttttttgaaacattgggatttatttatctttctcttctaaagatatatagtttctttttagcacaacagtcaagacagcaccttgggctctcagagatggtaaattctactctcagttgctccattaactcaatatatgaccttggaagtttctctaaatcccttggtgcctcagtttcct

SEQ ID NO: 454668 - DNA, 554 bp, Homo sapiens
attcaggattgtccttactaggagataatagattattaccaatatttcactgctataattaactcttgcattatttgggacatacttatacaaaaatatttattgtttatctgaaattacaatttaaataaatgttttatattttacctgttaaycttagactatgaaaggaaagttcttagggatacttatgggaaggttatcttctctgtccttgtctcaccactgtaggtccacaacctggcatttagtggtaggcctggagctgctcttggtcaacagtgtcagaagttgggaagaagagctgcatatcaagcagaagagaatgagaagaaacaggaacccacttctgcatctgtctatagcaacatctgactataacgaccttcaaaagataatggctgttgcttcatttccaaccctccaaatctcaagcaagtatatctttgggccaactgtaacctataactctatagggaagaggtttctgagaactctgtgtcacagcttaaccatacaaagacaatacaaaccatcccgatgatgatgatggt

SEQ ID NO: 454669 - DNA, 554 bp, Homo sapiens
attcaggattgtccttactaggagataatagattattaccaatatttcactgctataattaactcttgcattatttgggacatacttatacaaaaatatttattgtttatctgaaattacaatttaaataaatgttttatattttacctgttaatcttagactatkaaaggaaagttcttagggatacttatgggaaggttatcttctctgtccttgtctcaccactgtaggtccacaacctggcatttagtggtaggcctggagctgctcttggtcaacagtgtcagaagttgggaagaagagctgcatatcaagcagaagagaatgagaagaaacaggaacccacttctgcatctgtctatagcaacatctgactataacgaccttcaaaagataatggctgttgcttcatttccaaccctccaaatctcaagcaagtatatctttgggccaactgtaacctataactctatagggaagaggtttctgagaactctgtgtcacagcttaaccatacaaagacaatacaaaccatcccgatgatgatgatggt

SEQ ID NO: 454670 - DNA, 554 bp, Homo sapiens
attcaggattgtccttactaggagataatagattattaccaatatttcactgctataattaactcttgcattatttgggacatacttatacaaaaatatttattgtttatctgaaattacaatttaaataaatgttttatattttacctgttaatcttagactatgaaaggaaagttcttagggakacttatgggaaggttatcttctctgtccttgtctcaccactgtaggtccacaacctggcatttagtggtaggcctggagctgctcttggtcaacagtgtcagaagttgggaagaagagctgcatatcaagcagaagagaatgagaagaaacaggaacccacttctgcatctgtctatagcaacatctgactataacgaccttcaaaagataatggctgttgcttcatttccaaccctccaaatctcaagcaagtatatctttgggccaactgtaacctataactctatagggaagaggtttctgagaactctgtgtcacagcttaaccatacaaagacaatacaaaccatcccgatgatgatgatggt

SEQ ID NO: 454671 - DNA, 554 bp, Homo sapiens
attcaggattgtccttactaggagataatagattattaccaatatttcactgctataattaactcttgcattatttgggacatacttatacaaaaatatttattgtttatctgaaattacaatttaaataaatgttttatattttacctgttaatcttagactatgaaaggaaagttcttagggatactyatgggaaggttatcttctctgtccttgtctcaccactgtaggtccacaacctggcatttagtggtaggcctggagctgctcttggtcaacagtgtcagaagttgggaagaagagctgcatatcaagcagaagagaatgagaagaaacaggaacccacttctgcatctgtctatagcaacatctgactataacgaccttcaaaagataatggctgttgcttcatttccaaccctccaaatctcaagcaagtatatctttgggccaactgtaacctataactctatagggaagaggtttctgagaactctgtgtcacagcttaaccatacaaagacaatacaaaccatcccgatgatgatgatggt

SEQ ID NO: 454672 - DNA, 603 bp, Homo sapiens
ttctcaaggaaggctacttcttgatggcagttctgggagacataagakaagttttatttttacccaaatggttggtaaataaattactgtgtgacatgacagagttcaagttatatgatatagtagattcacattatgccaaaaactataagactcccagacacagcccaggaattcattttgagagctatcataggcttctgaatgtgctaccatctatgctcttaatttaaaccttaatttgctgtgtggacgacagactactctgaaaacaaccccaaatgcttcagtgcaggactatgtgtcgtggataaagtaacaaaattacatattcaacccattatggccatcctcttgtatggaagatgtagattgttaccaatatttaactcttataattaacttgaataaatttccttacaaaataaatatgtacacttgtaaatattccattatagtatctttcttagtgtagatatcctggagtaaaagaaaaatatttacaaaacaaggtaacaatttttaaagcaaaatatctattatcaaattgttctccagataggtattaccaattacacacccaccagcccagcagtgtgaaaa

SEQ ID NO: 454673 - DNA, 582 bp, Homo sapiens
ctcatataaattgaatcatatggcacatattcagcagaacatggtgtcacaggaattcatccatgtagttgtatgtatcagtagttgatgcctttttattgctgcatagtatctttccaatraaacatgttattcttttcaaagaataaaaaaattctttagaaacaattgcttatccattcacaagatgataaatatttaggttatcatcaggtgcttgagttttctattgctattttaacaaataaacacaaacttgatgggatacaatgacacaaatttatcatcttatagctctggagataaaaagtccaaaataagtttcatggtactaaaatcaagatgtggcaggactccatttcttctggatgtttagaggcagtgttttctttctttttccagcttctagaggttcccacattccttggctcctaggctcctttcatcttcaaagccaacacatctttctcatagcttcttacctctgagttgacaatgtctcttttttgcttgtaggtagccttgtgattacattgggcttacccagatccagatcatctaggataatctctctacccaaga

SEQ ID NO: 454674 - DNA, 582 bp, Homo sapiens
ctcatataaattgaatcatatggcacatattcagcagaacatggtgtcacaggaattcatccatgtagttgtatgtatcagtagttgatgcctttttattgctgcatagtatctttccaatgaaacatkttattcttttcaaagaataaaaaaattctttagaaacaattgcttatccattcacaagatgataaatatttaggttatcatcaggtgcttgagttttctattgctattttaacaaataaacacaaacttgatgggatacaatgacacaaatttatcatcttatagctctggagataaaaagtccaaaataagtttcatggtactaaaatcaagatgtggcaggactccatttcttctggatgtttagaggcagtgttttctttctttttccagcttctagaggttcccacattccttggctcctaggctcctttcatcttcaaagccaacacatctttctcatagcttcttacctctgagttgacaatgtctcttttttgcttgtaggtagccttgtgattacattgggcttacccagatccagatcatctaggataatctctctacccaaga

SEQ ID NO: 454675 - DNA, 582 bp, Homo sapiens
ctcatataaattgaatcatatggcacatattcagcagaacatggtgtcacaggaattcatccatgtagttgtatgtatcagtagttgatgcctttttattgctgcatagtatctttccaatgaaacatgttattcttttcaaagaataaaaaaattctttagaaacaattgcttatccattcacaagatgataaatatttaggttatcatcaggtgcttgagttttctattgctattktaacaaataaacacaaacttgatgggatacaatgacacaaatttatcatcttatagctctggagataaaaagtccaaaataagtttcatggtactaaaatcaagatgtggcaggactccatttcttctggatgtttagaggcagtgttttctttctttttccagcttctagaggttcccacattccttggctcctaggctcctttcatcttcaaagccaacacatctttctcatagcttcttacctctgagttgacaatgtctcttttttgcttgtaggtagccttgtgattacattgggcttacccagatccagatcatctaggataatctctctacccaaga

SEQ ID NO: 454676 - DNA, 479 bp, Homo sapiens
atttattgaaattactgtatttctcttattgatatgcattggcaactctgtagaaaattaattatattattgtacttagcattttaataatattttaaatccttttgttaagtatgtrttgcttatattttctctttatatgtttcttttgactgtctttctaatacatacctatttaataaacatgtcaaaatcagctggatttttcactatttttaaatcttggatttataagtcaattctataatttttctctcttgcaattatgcaagggattatgggaatgattataaacctgttatgaaaaatattagaatttaataagagagaaattgaaagataatatataaaagtctataattgcctatgttcaaataatcaccatcagaatacagaatattaaaaaatgtatgttgtttaaaaaacaatggaaaatggtaaaatggttagatataaattttacaagtattgcatcagac

SEQ ID NO: 454677 - DNA, 421 bp, Homo sapiens
attggtatagcctgggtcaaatgtctatttctgtaacaatggccatggctaatcactggtmagattgttcaggacaggtcatgtgtttcgcttgacagaaactgatcaacttctctcaaaccacctgaactaataatgagtttacggtggaacccagataccaggggtggggcaggagttggggagagcgtaagcattgttctccaaaaagggctccagatgttatatgcatacactcactactggtatcttacaattctcttttatagttgaaaaacctgagagcaaaagagattagataccttgatttgtattttcaagctcattaaaatcagatctaataatttaaaactgtgagttacataacgaacagaacacccagttacctcatttaccaatgagaaaactaaggcatcctggg

SEQ ID NO: 454678 - DNA, 421 bp, Homo sapiens
attggtatagcctgggtcaaatgtctatttctgtaacaatggccatggctaatcactggtaagattgttcaggacaggtcatgtgtttcscttgacagaaactgatcaacttctctcaaaccacctgaactaataatgagtttacggtggaacccagataccaggggtggggcaggagttggggagagcgtaagcattgttctccaaaaagggctccagatgttatatgcatacactcactactggtatcttacaattctcttttatagttgaaaaacctgagagcaaaagagattagataccttgatttgtattttcaagctcattaaaatcagatctaataatttaaaactgtgagttacataacgaacagaacacccagttacctcatttaccaatgagaaaactaaggcatcctggg

SEQ ID NO: 454679 - DNA, 421 bp, Homo sapiens
attggtatagcctgggtcaaatgtctatttctgtaacaatggccatggctaatcactggtaagattgttcaggacaggtcatgtgtttcgcttgacagaamctgatcaacttctctcaaaccacctgaactaataatgagtttacggtggaacccagataccaggggtggggcaggagttggggagagcgtaagcattgttctccaaaaagggctccagatgttatatgcatacactcactactggtatcttacaattctcttttatagttgaaaaacctgagagcaaaagagattagataccttgatttgtattttcaagctcattaaaatcagatctaataatttaaaactgtgagttacataacgaacagaacacccagttacctcatttaccaatgagaaaactaaggcatcctggg

SEQ ID NO: 454680 - DNA, 491 bp, Homo sapiens
ttggggagggggataagctacacattaatttggtcatgaagctttgatttgtgatctttgttagacccagagatgcaaagtgcagctggttttgtaaacttcccaccatgggctgaggcaatagctttattttaaaagttcccacttctgagggtggttcctatctcatgaattcatgtccagaatgtaatatccttgaaagcttctggatgattctgtctctgtacttgttttgttaattttgaaaaaccacatcacatgtcatctaaacttcagtggtaagaaaagcaaaacccactcaaggtggcaattcaaattacagcacatcactagcattgtaaagcctactgcaaacacttccatattcatctttccgcctggcatccctatatttctagaacaatgttttgtcttcctttgggatggttgttttttggtggtgtgarcagagaccagacatgtgaatttgtacacatattcagctaaatatc

SEQ ID NO: 454681 - DNA, 588 bp, Homo sapiens
ataattgttgtggtgtgagagtacagggaaaacatggttagggatagttttctcacaatatctaacatatttaacttgatttatgcttaatagtatattttctacacactartattttattggtcatgtaagttttgtgaattgtacttttatttaaaatgataaattcttatttctcccactcagcagtttttgccctaaattctgctttgactgatattgaatctgctagttctgctttccttcatttacaatggcctattccatatctgtttctttctttattttaacatttttgtttctttattttttcagctgcacctctgtgtaaatagcatacagctcacatattccttttggtctttatgacaatcttgttttttttttaatgaacaaataaaatgtttttacattttcttataattattgatatttgtgatcttattcctgacatgttatttagtgtccattctagcaatatgttttatattttttcctttctttttaaaatattgatcaagatttcttctataaaaatctaccatggtttaaaatatacaaatcttatgttacatcttaaaatcaggt

SEQ ID NO: 454682 - DNA, 588 bp, Homo sapiens
ataattgttgtggtgtgagagtacagggaaaacatggttagggatagttttctcacaatatctaacatatttaacttgatttatgcttaatagtatattttctacacactagtattttattggtcatgtaagttttgtgaattgtacttttatttaaaatgataaattcttatttctcccactcagcagtttttgccctaaattctgctttgactgatattgaatctgctagttctgctttccttcatttacaatggcctattccatatctgtttctttctttattttaacatttttgtttctttattttttcagctgcacctctgtgtaaatagcatacagctcacatattccttttggtctttatgacaatcttgttttttttttaatgaacaaataaaatgtttttacattttcttataattattgatatttgtgatcttattcctgacatgttatttagtgtccattctagcaatatgttttatattttttcctttctttttaaaatattgatcaagatttcttctataaaaatctaccatgrtttaaaatatacaaatcttatgttacatcttaaaatcaggt

SEQ ID NO: 454683 - DNA, 583 bp, Homo sapiens
atgagataggtatttttctgcaataattgaagaaatgcaatctcattttttagtcatctgtgttgttctcactgggagcaagaaataaaacttaaggaaaaacaattccaaagtatcccatatgtaagaaagcaagactttgaacttacttcatgggactgcagagatatgaaataaaagttgaaatgaaaaaggaagctagaaatagggagatacagaaagctgtagagaaagaaccataatgatataccacagaaactggtggggctggggagaagagacagattttatgatccaaacactgaatatttctggttttgyttttatcccgaggctactgatcatgtgtcctaaaggaataatgcatgtttcattgttcaaataggaaccatttaggttacagaagaatggattattagttgaagtaaaaacttcataccttcccaagagggctctaggtgtgaaatgctttaattaaaagtaatctgattatggcaatgattcaattttacttttttgctttaaaatggacctttaaaataaaatgtcatgggcttttaaaaaattgcttaaggttttttgt

SEQ ID NO: 454684 - DNA, 583 bp, Homo sapiens
tctgaatttctttcttctacttgttcaattatattgctgagactttccagagcatttcacatttctaaaagtgtgtccaaagtttcctgaatttttttattgtttttttctttaagctatctgtttccttgaatatttctctcttcacttcttgtatcattttttgggtttccttgcttcgggctttgcctttctctggtycctccctgattgcttaataactaacctcctgaattctttttcaggtaaatcagggatttcttcttgatttggatccattgctggtgaattagtgtgattttgggggtggggggtgttgaccatccttgttttatcatattaccagggttggttttccagttccttctcatttgggtaggttctgtcagagggaaactctaaggctcaaggctgttgttcagatattttttgtctcacggggtgttcccttgatgcagtactctcccccttttcctatggatgtggcttcctgtgagccgaactgcagtgattgttgtctctcttttgggtctagccacccagcaagtctacctggctccaggcagagtcctgtgatgttaac

SEQ ID NO: 454685 - DNA, 583 bp, Homo sapiens
tctgaatttctttcttctacttgttcaattatattgctgagactttccagagcatttcacatttctaaaagtgtgtccaaagtttcctgaatttttttattgtttttttctttaagctatctgtttccttgaatatttctctcttcacttcttgtatcattttttgggtttccttgcttcgggctttgcctttctctggttcctcccwgattgcttaataactaacctcctgaattctttttcaggtaaatcagggatttcttcttgatttggatccattgctggtgaattagtgtgattttgggggtggggggtgttgaccatccttgttttatcatattaccagggttggttttccagttccttctcatttgggtaggttctgtcagagggaaactctaaggctcaaggctgttgttcagatattttttgtctcacggggtgttcccttgatgcagtactctcccccttttcctatggatgtggcttcctgtgagccgaactgcagtgattgttgtctctcttttgggtctagccacccagcaagtctacctggctccaggcagagtcctgtgatgttaac

SEQ ID NO: 454686 - DNA, 559 bp, Homo sapiens
ctgtatttttcataaggagattacctatatttgcactttaaacctaatttttatatcytacttaaatcaacttatttttattttaatatgtttcatgcagtttatttctgcagatttggaatccccgctttacatctggatacagagagctgctggtgatttgaataggctgaaagcaccctaagtaaattttttttccatacactaagaaccaaaggctcattttttttaagtcattcaaataaggaagtgattgttcacaggcaaaaaaaatgctatcagtttttgcaggagttgttgggtcttggagcctgtaatggggaccgtggaaagcagcacaaaaaagtagaacaagagcctgcagtatgtcagtgaaatgccaagggatgcaaagtgacagcataatgcaatgtgacgtgtctctgcaatgacatgtcaagcctgtacaattcaaaggccgaggtttgcctaaaaccttggctaaagcatggttccagttagttacatgtaagggacctcaacataaaaaaaaaaaaagtttattaacaaaatgctttta

SEQ ID NO: 454687 - DNA, 559 bp, Homo sapiens
ctgtatttttcataaggagattacctatatttgcactttaaacctaatttttatatcttacttaaatcaacttatttttattttaatatgtttcatgcagtttatttctgcagatttggaatccccgctttacatctggatacagagagctgctggtgatttgaataggctgaaagcaccctaagtaaattttttttccatacactaagaaccaaaggctcattttttttaagtcattcaaataaggaagtgattgttcacaggcaaaaaaaatgctatcartttttgcaggagttgttgggtcttggagcctgtaatggggaccgtggaaagcagcacaaaaaagtagaacaagagcctgcagtatgtcagtgaaatgccaagggatgcaaagtgacagcataatgcaatgtgacgtgtctctgcaatgacatgtcaagcctgtacaattcaaaggccgaggtttgcctaaaaccttggctaaagcatggttccagttagttacatgtaagggacctcaacataaaaaaaaaaaaagtttattaacaaaatgctttta

SEQ ID NO: 454688 - DNA, 583 bp, Homo sapiens
tctgaatttctttcttctacttgttcaattatattgctgagactttccagagcatttcacatttctaaaagtgtgtccaaagtttcctgaatttttttattgtttttttctttaagctatctgtttccttgaatatttctctcttcacttcttgtatcattttttgggtttccttgcttcgggctttgcctttctctggttcctccctgattgcttaataactaacctcctgaattctttttcaggtaaatcagggatttcttcttgatttggatccattgctggtgaattagtgtgattttgggggtggggggtgttgaccakccttgttttatcatattaccagggttggttttccagttccttctcatttgggtaggttctgtcagagggaaactctaaggctcaaggctgttgttcagatattttttgtctcacggggtgttcccttgatgcagtactctcccccttttcctatggatgtggcttcctgtgagccgaactgcagtgattgttgtctctcttttgggtctagccacccagcaagtctacctggctccaggcagagtcctgtgatgttaac

SEQ ID NO: 454689 - DNA, 583 bp, Homo sapiens
tctgaatttctttcttctacttgttcaattatattgctgagactttccagagcatttcacatttctaaaagtgtgtccaaagtttcctgaatttttttattgtttttttctttaagctatctgtttccttgaatatttctctcttcacttcttgtatcattttttgggtttccttgcttcgggctttgcctttctctggttcctccctgattgcttaataactaacctcctgaattctttttcaggtaaatcagggatttcttcttgatttggatccattgctggtgaattagtgtgattttgggggtggggggtgttgaccatccttgttttatcatattaccagggttggttttccagttccttctcatttgggtaggttctgtsagagggaaactctaaggctcaaggctgttgttcagatattttttgtctcacggggtgttcccttgatgcagtactctcccccttttcctatggatgtggcttcctgtgagccgaactgcagtgattgttgtctctcttttgggtctagccacccagcaagtctacctggctccaggcagagtcctgtgatgttaac

SEQ ID NO: 454690 - DNA, 604 bp, Homo sapiens
gtttgaaaaaaaaataaaaagagtgatttaattttctctttctggatgcctaagattctttcattattcttgaygtttaaaaactgaaccagccatttttatcttttcattaacttttcctgctactcagtgaacactttgatctgtatacttgggcctttcacaggtcagagaagcttcttcatgttttccctcttttctttaataagaaatattacacttcattggctctcttgtctctggtgttcaatttctaccatattcgttcctattgtctttgtgtctgaatatttctgctgcactttaagagtaattaccatttgtctttcaaattatttatttgattttcagaattatcaattcacttctgaactttttactgctagtaattttctttctgaaattgctttttagtttcctaatatggtagtcattgaggctgttcacatgtttttagttttgttttgttttgttttttaggttgtagagaaggtactgttcccattgaaatcagtaacggccatgtgacctgattcgactcatgaaatgtaagtggaagatgaatgtagactttatgtgcagaggctttaagagttatgagata

SEQ ID NO: 454691 - DNA, 495 bp, Homo sapiens
cctgaggctttccacctcccagttgtgaaagaaaagggctttagttcttcctccacctgtgaagtctgtaagccggattcacaccctctcccaagttctggccaggaggcttctcactctgttcaaattgttacaaaggtcagctagagaattccttctgcctgtggagttttaccctcggcttctctggccaccctcctgatggatccctatggtgccaggcagcaataggctgcktggggacccagcaagctcccagagcttttctgctgcttcctctacccctgtattttgttcagcttggctctctaacctgactcagctccaagtaaagttggaaacttctcccgcaaacagaccttcagcttctccagcgggggtgtgtgtttgggagaggaggctctccctttcccacttctgcagctggggcactcacagtatttagggtgtctcctgggtcctgcaggagtagtcgcttccttcagagggtctgtg

SEQ ID NO: 454692 - DNA, 548 bp, Homo sapiens
cgactcatgaaatgtaagtggaagatgaatgtagactttatgtgcagaggctttaagagttatgagataattgtcatactctcgttcataatctttgtacctcagtgattagcaacactcactgtcatggcttcttcatcatcctgggtcctagagtgaagtcctagagcccattatcaacccatgctaaatatgtaggataagcaagaaataagatcttcctgcttgaagccactgatattttggactttttgttactgcagcaacatcatgcctatcctgactgatacatggtatataatcattcctaatattttcctaatatttgtaatttatacaatttcatttgtttgtttactatcataattatataattatacaatagttacttatacaattttatctgtttactgtcataattattccaaaaattgtgaccagtttcttcatattaattgccatcatctcttttcttacagcrtggactttttcatagtctcaatgggatgtttatctaaaatgcatacattcctaaatgaagagtgccc

SEQ ID NO: 454693 - DNA, 495 bp, Homo sapiens
cctgaggctttccacctcccagttgtgaaagaaaagggctttagttcttcctccacctgtgaagtctgtaagccggattcacaccctctcccaagttctggccaggaggcttctcactctgttcaaattgttacaaaggtcagctagagaattccttctgcctgtggagttttaccctcggcttctctggccaccctcctgatggatccctatggtgccaggcagcaataggctgcttggggacccagcaagctcccagagcttttctgctgcttcctctacccctgtattttgttcagcttggctctctaacctgactcagctccaagtaaagtyggaaacttctcccgcaaacagaccttcagcttctccagcgggggtgtgtgtttgggagaggaggctctccctttcccacttctgcagctggggcactcacagtatttagggtgtctcctgggtcctgcaggagtagtcgcttccttcagagggtctgtg

SEQ ID NO: 454694 - DNA, 495 bp, Homo sapiens
cctgaggctttccacctcccagttgtgaaagaaaagggctttagttcttcctccacctgtgaagtctgtaagccggattcacaccctctcccaagttctggccaggaggcttctcactctgttcaaattgttacaaaggtcagctagagaattccttctgcctgtggagttttaccctcggcttctctggccaccctcctgatggatccctatggtgccaggcagcaataggctgcttggggacccagcaagctcccagagcttttctgctgcttcctctacccctgtattttgttcagcttggctctctaacctgactcagctccaagtaaagttggaaacttctcccgcaaacagaccttcagcttctccagcgggggtgtgtgtttgggagaggaggctctccctttcccacttctgcagytggggcactcacagtatttagggtgtctcctgggtcctgcaggagtagtcgcttccttcagagggtctgtg

SEQ ID NO: 454695 - DNA, 539 bp, Homo sapiens
gttgctgtcgagaatctgatgcaagtttgattttcatttctttgtgggaaattgttttctcctctttaaaaatttggaatctttamgattttcttgatgttttaaaactttacaagaatgtatccagatgtgggtttcgttttcatttccattctttgtacaaggcactcagtaatatacgacctaaagatttatgttctgtaactcaaagaaagtgtctcctattatttcttggataatgttcgcccttccattttctttgttctgtatgtctacttgtcagttactggacctctgcacttgtttattaggttccatcctttcctttatgtttttgattctacttttatttctttacattctggaagatttcctgtatatttgaagcagctttcttgactttttaaaattttagcaattctctttttaatgtctaacatcccattaaatgttagtaattctatttttaatgtctaacatcccattcttacattatagtagttacttttcatagcatcctatcttaattttatggaaca

SEQ ID NO: 454696 - DNA, 539 bp, Homo sapiens
gttgctgtcgagaatctgatgcaagtttgattttcatttctttgtgggaaattgttttctcctctttaaaaatttggaatctttaagattttcttgatgttttaaaactttacaagaatgtatccagatgtgggtttcgttttcatttccattctttgtacaaggcactcagtaatatacgacctaaagatttatgttctgtaactcaaagaaagtgtctcctattatttcttggataatgttcgcccttccattttctttgttctgtatgtctacttgtcagttactggacctctgcayttgtttattaggttccatcctttcctttatgtttttgattctacttttatttctttacattctggaagatttcctgtatatttgaagcagctttcttgactttttaaaattttagcaattctctttttaatgtctaacatcccattaaatgttagtaattctatttttaatgtctaacatcccattcttacattatagtagttacttttcatagcatcctatcttaattttatggaaca

SEQ ID NO: 454697 - DNA, 539 bp, Homo sapiens
gttgctgtcgagaatctgatgcaagtttgattttcatttctttgtgggaaattgttttctcctctttaaaaatttggaatctttaagattttcttgatgttttaaaactttacaagaatgtatccagatgtgggtttcgttttcatttccattctttgtacaaggcactcagtaatatacgacctaaagatttatgttctgtaactcaaagaaagtgtctcctattatttcttggataatgttcgcccttccattttctttgttctgtatgtctacttgtcagttactggacctctgcacttgtttattaggttccatcctttcctttatgtttttgrttctacttttatttctttacattctggaagatttcctgtatatttgaagcagctttcttgactttttaaaattttagcaattctctttttaatgtctaacatcccattaaatgttagtaattctatttttaatgtctaacatcccattcttacattatagtagttacttttcatagcatcctatcttaattttatggaaca

SEQ ID NO: 454698 - DNA, 539 bp, Homo sapiens
gttgctgtcgagaatctgatgcaagtttgattttcatttctttgtgggaaattgttttctcctctttaaaaatttggaatctttaagattttcttgatgttttaaaactttacaagaatgtatccagatgtgggtttcgttttcatttccattctttgtacaaggcactcagtaatatacgacctaaagatttatgttctgtaactcaaagaaagtgtctcctattatttcttggataatgttcgcccttccattttctttgttctgtatgtctacttgtcagttactggacctctgcacttgtttattaggttccatcctttcctttatgtttttgattctacttttatttctttacattctggaagatttcctgtatatttgaagcagctttcttgactttttaaaattttagcaattctmtttttaatgtctaacatcccattaaatgttagtaattctatttttaatgtctaacatcccattcttacattatagtagttacttttcatagcatcctatcttaattttatggaaca

SEQ ID NO: 454699 - DNA, 442 bp, Homo sapiens
agtacccagggtcttatgctcagatagtaagtacccaggggtagtattatggggtgggagaaagcatagttcatggtaaaaataggtttggaatagccttaarttaaacagagtactgtaggacttctcagggcctttaatgggcttgtgttcatgtcaaattctttagaaaaaaactggcttaaaagtactgatcaaaagaccatagaagataaaagaaaaaaaaaaacatggcagaaaccaacttgagtgatgcagtcagataaaatgaaaagcagaaatgaaatgaaaaccttagcctgggtgtgtagctagagagaaagaagaaggtgaaggtcaattttactgcattacaaataaagcctatgtctgactatcagggaaattgctgttgactttaccaaatgtctcttggagtccacttccccctctaagtagaggg

SEQ ID NO: 454700 - DNA, 465 bp, Homo sapiens
ccccttttgtgatcacagagaaggtttaaactgagaatcaaagattagtttgtttaagacttctttgcaaggtggccttctacaaaatgctatgaaaactggtcataactgagtgcttaaggcaatcaattttggtagaaagctgagggggtaaattgggtcagccattcaccttaccatataaggtgtaactrcaaggcctgaagcccagctttctgatcacactaggcgtattagctgtctattgctgcataacaaatttccccaggacatagcaactgaaagcaaaaaggtttattacttcacagttacagtgagtcataaggaggagtagttgagctagagggtgatgatttactcccttatcaggatgtaatcaaggagtccagtaatttcaaaacttgacttgggggagagtcacttacaagttcacacatgtgactcttggtaagatttagaaaatct

SEQ ID NO: 454701 - DNA, 550 bp, Homo sapiens
tggtcatttgcccttgttgatggattacttcttttgtcttagtattttatgttctcttggtatttcaaacccaaaccttccttaactggtgtacacaattttattcttactagattaaatcctattaaatattctacccattattttcttgaaaaaaaaaatctctttgggagatttctgacctgctacgtagcaaatgaatatgagttggcttttcctctaccgtcatcctgtggattcctttaacttccatcctgtaatggattccctatttcttagatttcttgtatttctccttcttggttactttttgttgttgtttaaattattggattctgttttcagtagcttattaaaaatgktacattagaagtaaaattattaggcattagtatggaactctagattagaaatcatttttgctcagaattttgaagacttgctccactgtcttctagcttaaaaaaaacttccatcaactagcctccatacctttgtataaaaaacgttttttgtttttgttttgcctctctgcaagccagtatcacct

SEQ ID NO: 454702 - DNA, 550 bp, Homo sapiens
tggtcatttgcccttgttgatggattacttcttttgtcttagtattttatgttctcttggtatttcaaacccaaaccttccttaactggtgtacacaattttattcttactagattaaatcctattaaatattctacccattattttcttgaaaaaaaaaatctctttgggagatttctgacctgctacgtagcaaatgaatatgagttggcttttcctctaccgtcatcctgtggattcctttaacttccatcctgtaatggattccctatttcttagatttcttgtatttctccttcttggttactttttgttgttgtttaaattattggattctgttttcagtagcttattaaaaatggtacattagaagtaaaattattaggcattagtatggaactctagattagaaatcatttttgctyagaattttgaagacttgctccactgtcttctagcttaaaaaaaacttccatcaactagcctccatacctttgtataaaaaacgttttttgtttttgttttgcctctctgcaagccagtatcacct

SEQ ID NO: 454703 - DNA, 436 bp, Homo sapiens
catattatgttcgacattcatgaatatcctctgttgtggaaagcaatagtgcagtttgaaaaaaaaatcaatgctgctacctgggggaaaggcaagtgagatggacttggaaagggaaaagagaaagtgaacccagaggtccaaggtcaaagtataccctccaacagatcagagaaaagatgaaaatatagaatgagtaaggttgtgtgaaatttaatgaagaaagaaagcaaaattgcagtagcaatartatcacaagaataacccataagtgtgagtgtacctgcattcaccctgagatgcacaccaaacccaaacttcccttctcccaactaaataatcacaagttctttatctgcctcaaattagatgctgaaggatagagaaaaaagcaaagaaaagtctaaagttcaaaacataatgcacaaaacatttt

SEQ ID NO: 454704 - DNA, 550 bp, Homo sapiens
tggtcatttgcccttgttgatggattacttcttttgtcttagtattttatgttctcttggtatttcaaacccaaaccttccttaactggtgtacacaattttattcttactagattaaatcctattaaatattctacccattattttcttgaaaaaaaaaatctctttgggagatttctgacctgctacgtagcaaatgaatatgagttggcttttcctctaccgtcatcctgtggattcctttaacttccatcctgtaatggattccctatttcttagatttcttgtatttctccttcttggttactttttgttgttgtttaaattattggattctgttttcagtagcttattaaaaatggtacattagaagtaaaattattaggcattagtatggaactctagattagaaatcatttttgctcagaattttgaagacttgctccactgtcttctagcttaaaaaaaacttccatcaactagcctccatacctttgtataaaaaaygttttttgtttttgttttgcctctctgcaagccagtatcacct

SEQ ID NO: 454705 - DNA, 633 bp, Homo sapiens
agtaaaattattaggcattagtatggaactctagattagaaatcatttttgctcagaattttgaagacttgctccactgtcttctagcttaaaaaaaacttccatcaactagcctccatacctttgtataaaaaacgttttttgtttttgttttgcctctctgcaagccagtatcaccttctatttgccttcagcactctgawatttcacaatgatgtgagttaattcacaaccattgtactagttgcttggtgagctgtttacatctgggagctcatgtctatgtccttcagttctatgacatcttcttgacttatgccattgataatttcttcttctttcttttttctcactttccgaaatatatatatctttaatgctcttgtgtcctttcatattctctttgatttaggaattaacacccaaaaaaccatttggggcaaaaagaaaaataaaacacttttactctaattttagcaggcttatataaggcaggaaatgagcagaaattaaatgtctgtatttaatctattatcttgatctgggcaaactaaattatttttacattgatttattgacaaatataattagagtgttttattcgttacatttaatacacttattgatgtgatt

SEQ ID NO: 454706 - DNA, 554 bp, Homo sapiens
taaaccattgcatttcaaggctgtttgtgatgcagcatcctggctaataaaccagccaggtctattctaacaattgtagctcagagtaaagaatgtgggcatctcatcagcagacatgatcactaaaaagacagagaaaagatacaatgagaaaactataagcaaackcttggaaatccaaagaaccaaatagaagaaagaagaaagattaagaaatttctagaaacatcctacagtggtcaggaagactgagacattgagcctagggataaaaatggacaggcagattcataacatgcttaaaaagaaacagcaaatgattgagaagtttttttttaaaagtggaactatttcaaaagtaagaaattagtaaagggacaaagttgttaatgcaccataaacaagtgatcaaaagcagaaaaaaaaaatgaactgctgtggaaatggacacagtgtgatcctatttttagtggactacttgagttttttaaaaaattaggaggaaggtaaaaggttcagaaaatagaaacagaagtgtaaataatactatgaaa

SEQ ID NO: 454707 - DNA, 554 bp, Homo sapiens
taaaccattgcatttcaaggctgtttgtgatgcagcatcctggctaataaaccagccaggtctattctaacaattgtagctcagagtaaagaatgtgggcatctcatcagcagacatgatcactaaaaagacagagaaaagatacaatgagaaaactataagcaaacgcttggaaatccaaagaaccaaatagaagaaagaagaaagattaagaaatttctagaaacatcctacagtggtcrggaagactgagacattgagcctagggataaaaatggacaggcagattcataacatgcttaaaaagaaacagcaaatgattgagaagtttttttttaaaagtggaactatttcaaaagtaagaaattagtaaagggacaaagttgttaatgcaccataaacaagtgatcaaaagcagaaaaaaaaaatgaactgctgtggaaatggacacagtgtgatcctatttttagtggactacttgagttttttaaaaaattaggaggaaggtaaaaggttcagaaaatagaaacagaagtgtaaataatactatgaaa

SEQ ID NO: 454708 - DNA, 554 bp, Homo sapiens
taaaccattgcatttcaaggctgtttgtgatgcagcatcctggctaataaaccagccaggtctattctaacaattgtagctcagagtaaagaatgtgggcatctcatcagcagacatgatcactaaaaagacagagaaaagatacaatgagaaaactataagcaaacgcttggaaatccaaagaaccaaatagaagaaagaagaaagattaagaaatttctagaaacatcctacagtggtcaggaagactgagacattgagcctagggataaaaatggacaggcagattcatawcatgcttaaaaagaaacagcaaatgattgagaagtttttttttaaaagtggaactatttcaaaagtaagaaattagtaaagggacaaagttgttaatgcaccataaacaagtgatcaaaagcagaaaaaaaaaatgaactgctgtggaaatggacacagtgtgatcctatttttagtggactacttgagttttttaaaaaattaggaggaaggtaaaaggttcagaaaatagaaacagaagtgtaaataatactatgaaa

SEQ ID NO: 454709 - DNA, 554 bp, Homo sapiens
taaaccattgcatttcaaggctgtttgtgatgcagcatcctggctaataaaccagccaggtctattctaacaattgtagctcagagtaaagaatgtgggcatctcatcagcagacatgatcactaaaaagacagagaaaagatacaatgagaaaactataagcaaacgcttggaaatccaaagaaccaaatagaagaaagaagaaagattaagaaatttctagaaacatcctacagtggtcaggaagactgagacattgagcctagggataaaaatggacaggcagattcataacatgcttaaaaagaaacwgcaaatgattgagaagtttttttttaaaagtggaactatttcaaaagtaagaaattagtaaagggacaaagttgttaatgcaccataaacaagtgatcaaaagcagaaaaaaaaaatgaactgctgtggaaatggacacagtgtgatcctatttttagtggactacttgagttttttaaaaaattaggaggaaggtaaaaggttcagaaaatagaaacagaagtgtaaataatactatgaaa

SEQ ID NO: 454710 - DNA, 633 bp, Homo sapiens
agtaaaattattaggcattagtatggaactctagattagaaatcatttttgctcagaattttgaagacttgctccactgtcttctagcttaaaaaaaacttccatcaactagcctccatacctttgtataaaaaacgttttttgtttttgttttgcctctctgcaagccagtatcaccttctatttgccttcagcactctgatatttcacaatgatgtgagttaattcacaaccattgtactagttgcttggtgagctgtttacatctgggagctcatgtctatgtccttcagttctatgacatcttcttgacttatgccattgataatttcttcttctttcttttttctcactttccgaaatatatatatctttaatgctcttgtgtcctttcatattctctttgatttaggaattaacacccaaaaaaccatttggggcaaaaagaaaaataaaacacttttactctaattttagcaggcttatataaggcaggaaatgagcagaaattaaatgtctgtatttaatctattatcttgatctgggcaaactaaattrtttttacattgatttattgacaaatataattagagtgttttattcgttacatttaatacacttattgatgtgatt

SEQ ID NO: 454711 - DNA, 580 bp, Homo sapiens
atacataaaaagtacacatactttgtataacttggaaaacatttgaggatcaaataaaataatgtattcgaaaatatttataaaaagcmtgaagttttctacagacaaattagtgggtgcaatactgagcgctactccttgaaggtgaacaacatagaaatattgttcagtgcaactcaacaaatgtttatttaacgactgcaatgtactgagcaaattttaggctctggtaagacacatcagtaatgaaggcaaacatatgcattaactatatcaagcaggacaaagggctctaaagagaatgaatgcagttctccaaacagagatctctgctgtcactattgaatatcttgtaaactctccagaaacatgtgtatgtgcaagcgtgtgtctgtttgtgcatatatatatatgtgtgtgtgtgtatattttaatgctacacatttgaagataccttattacactattcacgactttgtgattttctcttaacacagcaatttggagattaccccctttcagaacatagagagagctacttcatttctcctaatagcatattttattgcatggttgtgcc

SEQ ID NO: 454712 - DNA, 580 bp, Homo sapiens
atacataaaaagtacacatactttgtataacttggaaaacatttgaggatcaaataaaataatgtattcgaaaatatttataaaaagcctgaagttttctacagacaaattagtgggtgcaatactgagcgctactccttgaaggtgaacaacatagaaatattgttcagtgcaactcaacaaatgtttatttaacgactgcaatgtactgagcaaattttaggctctggtaagacacatcagtaatgaagrcaaacatatgcattaactatatcaagcaggacaaagggctctaaagagaatgaatgcagttctccaaacagagatctctgctgtcactattgaatatcttgtaaactctccagaaacatgtgtatgtgcaagcgtgtgtctgtttgtgcatatatatatatgtgtgtgtgtgtatattttaatgctacacatttgaagataccttattacactattcacgactttgtgattttctcttaacacagcaatttggagattaccccctttcagaacatagagagagctacttcatttctcctaatagcatattttattgcatggttgtgcc

SEQ ID NO: 454713 - DNA, 580 bp, Homo sapiens
atacataaaaagtacacatactttgtataacttggaaaacatttgaggatcaaataaaataatgtattcgaaaatatttataaaaagcctgaagttttctacagacaaattagtgggtgcaatactgagcgctactccttgaaggtgaacaacatagaaatattgttcagtgcaactcaacaaatgtttatttaacgactgcaatgtactgagcaaattttaggctctggtaagacacatcagtaatgaaggcaaacatatgcattaactatatcaagcaggacaaagggctctaaagagaatgaatgcagttctccaaacagagatctctgctgtcactattgaatatcttgtaaactctccagaaacatgtgtatgtgcaagcrtgtgtctgtttgtgcatatatatatatgtgtgtgtgtgtatattttaatgctacacatttgaagataccttattacactattcacgactttgtgattttctcttaacacagcaatttggagattaccccctttcagaacatagagagagctacttcatttctcctaatagcatattttattgcatggttgtgcc

SEQ ID NO: 454714 - DNA, 580 bp, Homo sapiens
atacataaaaagtacacatactttgtataacttggaaaacatttgaggatcaaataaaataatgtattcgaaaatatttataaaaagcctgaagttttctacagacaaattagtgggtgcaatactgagcgctactccttgaaggtgaacaacatagaaatattgttcagtgcaactcaacaaatgtttatttaacgactgcaatgtactgagcaaattttaggctctggtaagacacatcagtaatgaaggcaaacatatgcattaactatatcaagcaggacaaagggctctaaagagaatgaatgcagttctccaaacagagatctctgctgtcactattgaatatcttgtaaactctccagaaacatgtgtatgtgcaagcgtgtgtctgtttgtgcatatatatatatgtgtgtgtgtgtatattttaatgctacacatttgaagataccttattacactattcacgactttgtgattttctcttaacacagcaatttggagattaccccctttcagaacatagagagagctacttcatttctccyaatagcatattttattgcatggttgtgcc

SEQ ID NO: 454715 - DNA, 507 bp, Homo sapiens
taattttgatacatagtgccaaatagccttcaaagtgaaacattcacttatattcccaccaacagtgcacaaaattgcttttgtcctcaaacttcctgccaatgccatttattatcaaaccatttgatccttgcaagtacagtaagtaagaagctatctcattgctgtttgaattacaaactacaaatctcattgtagtttaaaatgcaaaccataatggtcttattatgagcaaatatgagtagctttttacatatttaaaagtcttttgagtttctcttactgtgaattatctgtctataatcttggcctatttttaaaaagtaataagttagaagaaatgagccaattttcatatatcttggcaggtttttccagtttcttattttccattcaaatttatttatggttgttttaaaccattttgamattttgatctttttttaattttgagattattgtagatttatttgcagttttaagaaatactacagacagaattccata

SEQ ID NO: 454716 - DNA, 589 bp, Homo sapiens
atcaacaacgtctagggttctagtttctcctaaggagttttaacgagacgcataatatggctagatttgtgctttaggtaaatcaatctggtagctactaaaaatgagactgaaaataatgagcctgtttaggaagatgttgcaatartctagctgagatctctactacgattcccaactagaccattggaggagaagattatctcagaagaagaacaatgctgctgaataagaacaggtgatttgcttccatcagttgctcagccttgggaacgtgactcacggtggtgtgaggacaaagcaggtacctgtccgccagccagattagctgaggaaatacacttcaggtatgtaagcttatgccttcacatctgaaatgtcctgtactaacatatacaccctcaaactttccaacacttatactatcactgtgtcattttttcctggttcaccaactgcatactggacacagtgctgcacatgctattgggtatttttcctactttacagctcatgttcatttggttctaaggataattgcaagaatattgttgtgctataagtaaataaatgctatgtatttataagt

SEQ ID NO: 454717 - DNA, 338 bp, Homo sapiens
gtgttgaaatcagtaccctcctatttgttggctcaatgggtcaaacaatccatagtytttccatctcagttttgttatctgtaaaatagacctctgatttttattcctgtcattaccattcatctcactcccagcaaaagcactatgtaccattattatgaacttgctgttatgtgcttgtgtgcatcccttctacttctgtagaaagttttccaccattgtgtccttaatatactgagttttacatcaaaattcaacacagatactgaatttctctgtaaaaccctaccatctattaaaaaaggtgtttaagtgctctgattagctatattcttatt

SEQ ID NO: 454718 - DNA, 559 bp, Homo sapiens
tcttgtaaactttaaaatatattttccccacagtaattctcatccttaaaaatgggaagagtgaagaaaaagttaatctttgtgcgatgttagagttcagctaacgttgataagactaaatgaaagtttgcagcctaaggggtgacaaaacataaaatatattccagaattaagcattgattagtaagaagcaaactaaaatgtgcagattaaatgtcagatattgaaattctctgctgtttcattattgttgatagcagtaaacgttataaatctcaaatttaccaggcagaatgtcatgtaatttgtcaaatgcagtttagctaaaatgaggtttgtcgcttacacaatcaacttgttaatttggctggcacttattctactgctgttrcataaattctcaactataagctacaacatacattttaatttgctggacatcaggttaaacaaaaaaatatgtattcattcaagttatgttgtagttacactgattattgtcatcagacttttccaagacttttttttcaggtattgattcaaattaaagtcagaatat

SEQ ID NO: 454719 - DNA, 559 bp, Homo sapiens
tcttgtaaactttaaaatatattttccccacagtaattctcatccttaaaaatgggaagagtgaagaaaaagttaatctttgtgcgatgttagagttcagctaacgttgataagactaaatgaaagtttgcagcctaaggggtgacaaaacataaaatatattccagaattaagcattgattagtaagaagcaaactaaaatgtgcagattaaatgtcagatattgaaattctctgctgtttcattattgttgatagcagtaaacgttataaatctcaaatttaccaggcagaatgtcatgtaatttgtcaaatgcagtttagctaaaatgaggtttgtcgcttacacaatcaacttgttaatttggctggcacttattctactgctgttacataaattctcaactataagctacaacatacattttaatttgctggacatcaggttaaacaaaaaaatatgtattcattcaagttrtgttgtagttacactgattattgtcatcagacttttccaagacttttttttcaggtattgattcaaattaaagtcagaatat

SEQ ID NO: 454720 - DNA, 584 bp, Homo sapiens
caaacagccaaaaaatcatatatatgatatatatatgattacatataatcatatgtgtttgtatatatacatctcttatgtgtatggtgtgtgtgtgtatatatatatatatatatatataattagagagcatagaaaaagcattttcagaatgataaaatagtacaaactcttcccagaatatctctgggtgtatccaaggtgatacagttaactctgttgcagagtgaaaaaaatacagaatttttttttctttttcaaaaagcctctattaattgaagaaaggtgatcattttgaatttctctgaaattcaaagcaaaaaaaattatttttgttttctcacacacacacatacacatatatacatacttaaagaaaacctcttttagagattaataygaaatttagtataaattcagctcgaattcatgtcatagaatgttagtcctgaaacaaactcagagaacatatttaaatttctcatcttcaaagagaaaacggcctgagaggcctgaattaatgtgatcaaagaatctcggtgttacatagaagatcaaaataagaacccagatctactcaagcc

SEQ ID NO: 454721 - DNA, 552 bp, Homo sapiens
cagatgcaagctacattctagtgttagcttcattaataataaaggtgatattttgatctctcatatttctaagccataaatcactacttatctatgatttattttatttcagactttaatagggaagggaggtgctgtttattgtgtgctttctaaaattctaacatgtattgtcttattcmtgacacatagacatagattacaatttttcagaggctttttacgaactcagctagtgtttgcaacacttttgtaggtgggcattaagttttaatatggggaaaataactttgatcttggcagtcggcacaggctaaattgagcaattagatgttcttcaattgactttttaaatgtgtctttagactgagtgaaaatcacacaggattttcagcatgttaggacacatcagtttatggtgttcctgtttatagataggccaccttcctgtgtatcttaagggagtggcatgaaggccttacctactttaagcaaaagagattgcctctaatttcagtcagaccatgaataccttcacccaatactggctgt

SEQ ID NO: 454722 - DNA, 552 bp, Homo sapiens
cagatgcaagctacattctagtgttagcttcattaataataaaggtgatattttgatctctcatatttctaagccataaatcactacttatctatgatttattttatttcagactttaatagggaagggaggtgctgtttattgtgtgctttctaaaattctaacatgtattgtcttattcatgacacatagacatagattacaattttkcagaggctttttacgaactcagctagtgtttgcaacacttttgtaggtgggcattaagttttaatatggggaaaataactttgatcttggcagtcggcacaggctaaattgagcaattagatgttcttcaattgactttttaaatgtgtctttagactgagtgaaaatcacacaggattttcagcatgttaggacacatcagtttatggtgttcctgtttatagataggccaccttcctgtgtatcttaagggagtggcatgaaggccttacctactttaagcaaaagagattgcctctaatttcagtcagaccatgaataccttcacccaatactggctgt

SEQ ID NO: 454723 - DNA, 462 bp, Homo sapiens
tgcaagctttagtaaaaatgctgctcatgcatgtcagaaagcacaatcatgggcttgcaagtttgaatgaagggcccactccaacgctttaactggcttggttggccttaggtataggcagctatggcttgacattgaactacttaggtttttcttacacagtcatggctgaggctaacatatgatatagggaaaaggatggtatttatactggcattaagcatwtgtgagtagcataacatttgttactttaaattatagatgaattattcctgtggatgctctagttaagatttacttttaaatcatctgtgcttagaccaaggcagtgttatattaagtaccccaaattccagtgggtacttaggaccgaggaaaattcaaatccttgtcctcaggattaagggccataaaactctccagagactaaatgagttgcaaagataacaaaggtaagaaata

SEQ ID NO: 454724 - DNA, 590 bp, Homo sapiens
gatatgactttaggatatgtgactaaaaagcgtatataacaagaagctagttgccgagttgttgtctgacctgactcctggctccatggatattacattcccaccaacatgtatgtagtaatatccatggatattacattcccaccaacatgtatgtatcacatatggccaactctagccccaaccagggtgagtagggcaatctgttctttattatcttagcattaaaataatataaamatttattcagtctactgagagaagtaggcttggctacttctgctaccttacatgtgataataataatcttacatatcacagtaattataaatcacaggaatttatcagtttttaagtagtaacagaataatcaagagtggtacctatttataataatcaatagtggtgattattgtattatcatatagatatttataacaattaacagtggtaccttagatatttacacatttacctaagctattgagaagcttctgcatacattaatcatatttgatgcttataactcttctgtaagaaactgtatttcatagactggaaaatgggcccagagaagccaaagaatataa

SEQ ID NO: 454725 - DNA, 588 bp, Homo sapiens
gcctccagctactgaacagctttggttaataagaagcacctgcagaagactagaagacaacaggaaaggggttgtctagtattttctagtctcctccctgtctgttcttattggattacctgtgtcctacttccaaaggccacaccttctgtaacctagaagctttccattttaggttctggtccttctcttacctctgtctctttaggcccaatgctggttttgctgttattggtctcttgagaactgtaagrtccttagttttccttaaactctacccatattttaataagtaattaccatattaaactctccccaaatacccagttagactgtttattcgctgatgtgactctgatcaacacagtggatgaacatattggaaaatgtcaacaaatgccttgcaaatgatttattataatgactaaatgactagaaaggcaagaaaaactggaaggagattaggagatgtaggtgaggtcaaaataaagaatagttgcaatgggaatgaagaatgggaaaagtgaaaagcagcaagattatgtttaaaaagaccaaattttaggttttatttactaataatgaaga

SEQ ID NO: 454726 - DNA, 568 bp, Homo sapiens
aaacttatattgttaacaaaccaaaggtcagaattgtaatataatcctgatatgggaggcagagtccacacatattttggatgtacctttaaagctgagaggccaggcgcagtggctcacgcctgtaatcccagcactttgggaggcctagagggrcagatcaccaggtcaggagatcgagaccatcctggctaacacggtgaaaccccatctctagtaaaaaaatccaaaaaataaatagccgggcgtggtggcgggcacctgtagtcccagctgcttgggaggccttggcaggagaatggcgtgaacctgggaggcgaagcttgcagtgagcccgagatctcgccactgcactccagcctgggcaacagagcgagacttcatctcaaaaaaaaaaaaaaaaaaaaattaaagctgagaataagctatacttgaaagcagttctgtagagaagtagaaaagaattttgatagctttttaaacgaaagatatagaataattaaaattagcattccagttaaagataatgaaataatttacatagatttacctgtactccctcctgaaa

SEQ ID NO: 454727 - DNA, 568 bp, Homo sapiens
aaacttatattgttaacaaaccaaaggtcagaattgtaatataatcctgatatgggaggcagagtccacacatattttggatgtacctttaaagctgagaggccaggcgcagtggctcacgcctgtaatcccagcactttgggaggcctagaggggcagatcaccaggtcaggagatcgagaccatcctggctaacacggtgaaaccccrtctctagtaaaaaaatccaaaaaataaatagccgggcgtggtggcgggcacctgtagtcccagctgcttgggaggccttggcaggagaatggcgtgaacctgggaggcgaagcttgcagtgagcccgagatctcgccactgcactccagcctgggcaacagagcgagacttcatctcaaaaaaaaaaaaaaaaaaaaattaaagctgagaataagctatacttgaaagcagttctgtagagaagtagaaaagaattttgatagctttttaaacgaaagatatagaataattaaaattagcattccagttaaagataatgaaataatttacatagatttacctgtactccctcctgaaa

SEQ ID NO: 454728 - DNA, 568 bp, Homo sapiens
aaacttatattgttaacaaaccaaaggtcagaattgtaatataatcctgatatgggaggcagagtccacacatattttggatgtacctttaaagctgagaggccaggcgcagtggctcacgcctgtaatcccagcactttgggaggcctagaggggcagatcaccaggtcaggagatcgagaccatcctggctaacacggtgaaaccccatctctagtaaaaaaatccaaaaaataawtagccgggcgtggtggcgggcacctgtagtcccagctgcttgggaggccttggcaggagaatggcgtgaacctgggaggcgaagcttgcagtgagcccgagatctcgccactgcactccagcctgggcaacagagcgagacttcatctcaaaaaaaaaaaaaaaaaaaaattaaagctgagaataagctatacttgaaagcagttctgtagagaagtagaaaagaattttgatagctttttaaacgaaagatatagaataattaaaattagcattccagttaaagataatgaaataatttacatagatttacctgtactccctcctgaaa

SEQ ID NO: 454729 - DNA, 381 bp, Homo sapiens
caaatcagaactataaggtggatgcctaatgattttctattgataatctcagaaattacccctaatttcatgagaggaataagcaggagcattgtcrtggtggaatagtactctctggtgaagctttcatgggcatgtttctgctaaagctttgactaactttcttaaaacactgtaataatagggacatgttatccttctttggccctccagaaagtcaaaaagaaaaatgtcttgagcatcccccagaaatcttttttaatgactctattagtccattttcatgctgctgatgaggtcataactgagactgggcagtttacaaaagaaagagttttattggacttacagttccacatggctggggaggcctcacaatca

SEQ ID NO: 454730 - DNA, 602 bp, Homo sapiens
ctggcattgaaacaatgggctccatccaaaatttgaataaaagtcattgaggaaagagtcctggcacaacagaaaaatcccgagtcactagtttttggggttttgtctttttttttttttctggatattacttggtcaggagatgtgatggtyaatattgagtgtcaacttgattggaatgaaggatgcaaagtattgttcttgggtgtgtctatgagagtattgctaaaggaaattaacatttgagtcagtggactgtgagagacagacccaccctcaatctggctggcactatctaatcagctgtcagtgcagctagaataaatcaggcagaagaaagtggagtgaagagactgctcagtcttccagcattcatctttttcccatgctggctgcttcctgccctcaaacatcagactcagctcttggattcttggacttacaccagtgattttccaggggctctcaggccttcaaccacagactgcaggctgcactgtcggcttccctacttttgtggtttggggactcagactggcttccttgctgctcagcttgcagatggcctattgtggtacttcaccttgtgatagtgtgagtta

SEQ ID NO: 454731 - DNA, 607 bp, Homo sapiens
tcatataagggagacatctaccgtatccacatacaagaagataaaatatcacaaggatataaattagagttatccctacatatctctttgtggtgggcattggttccaaaattcccacacacaccaataccaaaatctgtggatacttaagtaatgcagttggcactacaaaaatccagtagaacccccacatatgaaaagtgtccccacacaaccctacatatagatttattataccacaagtatacatgttgtatttttggttggcattttgttggagatacagaacccaccaattgggagtacagaatgtatttattgaaaaaaaaatagcatttaagtggacctgcacagatcaaactcatgttgttcaagggtcaagtgtacttatacattttcagtaaaatcaatggaattcacattaatttctaatgastttttatgcaacttaataggatgcttgcatatgtagctaatttcaatatttatataaaagggcacagggcaaaaataaaacaacacaaccctgaagaagaagaacaatatgcagaacgtgacctatgctatacaaaatctcatcaaaaaaccaattaactctgtgtttgat

SEQ ID NO: 454732 - DNA, 603 bp, Homo sapiens
ttctggtttatttgcatagaggtttttatagtattctctgacggtagtttgtatatttgtgggattggtggtgatatcccctttatcattttttattgtgtctatttgattcttctctcttttcttctttattagtcttcctagtggtctatcaattttgttgatcttttcaaaaaaccagctgctggattcattgattttttgaagggtattcttaaagtgactacatgtcctccatgtctccatctccagcttctgttcagggactggtgctacttcaagtgacaccacaattttcctttctctctccagtctaggagtgctagatggtttcctgcagttcctaatatgtatgttcctttactgtgttctgactggtcctcagctccttctttaccatcttaaccaaatctttgatctgaattcacttaattgcaacactttctttccctgrttgtgccttgactgaaacagtcagtgtgcaactacatatactattatagctatttctgtcaacttattccaaattgtattctcttagcgagtgtacaggttaaaaagaaaaattctcaaatcgagtagaaggctgtggttttgtctgag

SEQ ID NO: 454733 - DNA, 506 bp, Homo sapiens
tgatgaggatgcagggaaattaaatcagtcatacacttctggtaggcatgtaaacaggtacagtcactctgtaaaacagtttgccaatttcttaaaaaactaaccatgcaactaccatatgatccagaaattgtactcctgggcattcaaacccagagaaatgaaaatttgtgttcacacaaccacctgtacacaatctttatggtagttttatttgtaatagcaaaaaaatactggaaaaaaaacctctaatatcatctgtagactattaytcaacaaataaatggaacaaactattaatagaagtgataacctagataaatattcagaaaattatgctaagtgaaaaaagcaaatcctaaaaggttacatattgtataattccatttatatactgtttttgaaattataaaattatagaaatcgagaacagaatagtgattgccagggtttaaggagagagctaggggtgggaggaaaatgattgtgactatgaaaggtcaaca

SEQ ID NO: 454734 - DNA, 506 bp, Homo sapiens
tgatgaggatgcagggaaattaaatcagtcatacacttctggtaggcatgtaaacaggtacagtcactctgtaaaacagtttgccaatttcttaaaaaactaaccatgcaactaccatatgatccagaaattgtactcctgggcattcaaacccagagaaatgaaaatttgtgttcacacaaccacctgtacacaatctttatggtagttttatttgtaatagcaaaaaaatactggaaaaaaaacctctaatatcatctgtagactattactcaacaaataaatggaacaaactattaatagaagtgataacctagataaatattcagaaaattatgctaagtgaaaaaagcaaatcytaaaaggttacatattgtataattccatttatatactgtttttgaaattataaaattatagaaatcgagaacagaatagtgattgccagggtttaaggagagagctaggggtgggaggaaaatgattgtgactatgaaaggtcaaca

SEQ ID NO: 454735 - DNA, 535 bp, Homo sapiens
ggtgggaggaaaatgattgtgactatgaaaggtcaacaggagggatcctcgtggtgataggaatgttttctttattagctttatcaatgtcaatatactggctgacattcyactatagtactgcataacattaccacctggggaaattggttaaagactatgttgaatctctgtatcatctcttacaattgtgtgtgaatcacaattatctcaaagtaaaaaagtttaatttaaaacaatattttaaaattaaatagacctaatttattcatttaaaaaaattatatattttttccagacttaaaatatagattatgaccaaattgttacatattgaccatttaacataggttgtaccatctctgttacattattatgtatgtatacaatatgactacatttcaatagtttttaaattttgttttctgaatttcatcacttctgaaattttaccacactgcctgatcatctttggaaatagggaaaaagagaaagtagattaggagtgagatgtgaaggcaatggatattattga

SEQ ID NO: 454736 - DNA, 589 bp, Homo sapiens
accattatttctctcctggaatgtgttttgctttgaatcttttatcttaatttatgtcaaacattgaactagtcattcatgtcaaaaatcttatttttctattcccattacttatttagtaccaagtgctttcactttgaacactgtcttaaaaatgtctcctcccaccaatctcagccaccttaatcagccctcagcaactctaattactcctgggtaatttaatgaggaaatagctgctaccagccactttttattttgtcttcttcagtccatttgtgtattgccactctacagagccttctagaataacagtctggtcatgttacagatttggtgaaaatcttacaacgctgctttatcaaatctgttctattgaaaaattgttctatcatcaaaaagatatggaaatttgtgttaaacaataaatarttttcttatattacaatgtttctaagaaatggaatatgttttctctttcctagagcaagacatacaatggtatacagagttttttgaatctattagatcctaaaacggtttatatgtatcctcccataaaacactacacagaaccagtgttccctag

SEQ ID NO: 454737 - DNA, 589 bp, Homo sapiens
accattatttctctcctggaatgtgttttgctttgaatcttttatcttaatttatgtcaaacattgaactagtcattcatgtcaaaaatcttatttttctattcccattacttatttagtaccaagtgctttcactttgaacactgtcttaaaaatgtctcctcccaccaatctcagccaccttaatcagccctcagcaactctaattactcctgggtaatttaatgaggaaatagctgctaccagccactttttattttgtcttcttcagtccatttgtgtattgccactctacagagccttctagaataacagtctggtcatgttacagatttggtgaaaatcttacaacgctgctttatcaaatctgttctattgaaaaattgttctatcatcaaaaagatatggaaatttgtgttaaacaataaataattttcttatattacaatgtttctaagaaatggaatatgttttctctttcctagagcaagacatacaatggtatacagagttttttgaatctattagatcctaaaamggtttatatgtatcctcccataaaacactacacagaaccagtgttccctag

SEQ ID NO: 454738 - DNA, 510 bp, Homo sapiens
aaggactgcttactgtccacatatgaaaaatgtgtatttatatgtttattcattcatggactctcagtaaacacttgactgtttctcattgcaaataagtgtgaatgatacgactatacttctgggtagttgcatcttatcactccttgtgctcagagcctgagagactgaaaaatagtcaaagctctcattatatgctgcatggataagtgaacaagtgattgaatcactatgactcctgacttcaagagcaacataatagcagtaaaatagtaaaatatgttactacaaaaaaagtcataagggaaaagggacaaaataagaagtgccaaattagwtgtgctgcattattggttgggaacttggaatcattgtcacccttttcaagaagaacctttctttgagttttctgccctttgtagttctgtgttagagtctgtcaatgaggcacttgtgcagtttggaaggcagaatagaaggagcagccgtaattcttgcagcttcaagcat

SEQ ID NO: 454739 - DNA, 545 bp, Homo sapiens
atcattgtcacccttttcaagaagaacctttctttgagttttctgccctttgtagttctgtgttagagtctgtcaatgaggcacttgtgcagtttggaaggcagaatagaaggagcagccgtaattcttgcagcttcaagcatatctatgggcaagctccttgaatcatccacttyagtactctaagtagctgagatagcaagatggtgcttcttaagaattacttctgttggtgttgcagactgaaataatctgtggtagcccctcatgagtcaaaaaattcccagtgacttctgggcaagcttttgaaacccaccagatgcagctgagatacctgactttcacttctccatcacttccatgacattcaatttttctgataaactaaattaaatttggcttaaatctgcctctgtacatagcaaactgtaacctaacctaatatgtaagcaaactgcaacttgagagtgtattcttgtaacaagtaacaaagtctaggccaaccatagcaacttagctttaagtcagtcacaggctgaaaacta

SEQ ID NO: 454740 - DNA, 359 bp, Homo sapiens
aacaaattttattagactaaacatctatgaaaccattttaattccatttaaccaagtacaaatgtgaagatgtttatttccctcagtgctctactgtaacagaatctaggactgtaactgtgcagagaaaagggtttaggactgtggaggtctgccattctaggactgactcaacttcagactcaacttcaagtgaagtatgtaattttaagatgattcattatttgtttacccattacacagttctgtttgtaggtagacagctcaatcaattttgtgatttaaaaaaaatattattttgaaaaatttatttaacttttattttaagttcagrggtacaggtgcagatttgttacacg

SEQ ID NO: 454741 - DNA, 359 bp, Homo sapiens
aacaaattttattagactaaacatctatgaaaccattttaattccatttaaccaagtacaaatgtgaagatgtttatttccctcagtgctctactgtaacagaatctaggactgtaactgtgcagagaaaagggtttaggactgtggaggtctgccattctaggactgactcaacttcagactcaacttcaagtgaagtatgtaattttaagatgattcattatttgtttacccattacacagttctgtttgtaggtagacagctcaatcaattttgtgatttaaaaaaaatattattttgaaaaatttatttaacttttattttaagttcaggggtacargtgcagatttgttacacg

SEQ ID NO: 454742 - DNA, 597 bp, Homo sapiens
gcctatattattacaaaatgyacagtcaaaatacattatgctcactaatcactagtttacacaaatttgctatcaaattttattttcaaggtacaagtaactgaactactagtagaaaatcaacagtggaagtcacagttgagctataaattctatagacctgtgtggaaaataaattcaacaaaaaaattatgacaatagagaaaaattgcataaatataattataagacagaagagtcttacacgtttataatgtgcaaggcaaaatttttgatactgctttgcttttgtgaataaaaatttccacccttatgcttttctaactcatctttgttcccttttctacttttctggtcctcccacctctttaatgctgtcaacatatccggagtttgaatttcaaattctcctctctctgtagcccttcctttgacaattatgatgctatattagacagggttaggttgaacctgacttggtaaacagttgctcacagaatactgctcacaggaggagtcctgaagaatctgtttttttcaagaatacccagataaaggcaaaactttgacaagagaaaattaactggggatgtcatt

SEQ ID NO: 454743 - DNA, 567 bp, Homo sapiens
attttgctacataacaaatgtgtacttatttgttattcatagcaagatgatgaatatgcttgcataaaaagttaaggacatcttctaaaataattccactgtactgccctgagcaccttgaataaaaggaactatgctctggatggctttttgttatttcctggctgaagtcaataggtgctaattgttagaattcatcatgaagaatccagaggcagaacaataaagtgaaaaggaaaagttaaagaggttttatagaagtcctagcctagaggctaagataaatttttttgtatatgtatattttcttttttcttaagttatcaaaaattgatgtgaaaaataaaaccattcattaatagtgtttaagatatactttcagaaccatcagtcacttcacagaaactaatttcagttctcatttattccttctgtgatttattttattttattttattttcagaaccagaatctcactctgtcacctaggctggagttcagtggcacaatcacggctcattgyagccttgacctcctgggctcaagtgattctcccacttcagccta

SEQ ID NO: 454744 - DNA, 616 bp, Homo sapiens
catatggctatccactgtactcaaatgaaggggttaatggtaaaacaagcctttaaagatgtaaatgattcctcccatgtggctgcaaaatagcttaagtgtttgccatctaaaattattaacatatagaaacattattatctctgcagttaatatgcacctcactgaaaatctcatggatgcaacaattaaggaaggcaccatccttaatgaagttataagacatatatcatttattaagcagcaaataatatctttaattttggctttaatatatctttaattttagctttaatgattatatgcaaaatgtcttccaaaacctcaggacaaattataccatagcagttgggcttgtttcttcaatccctcatcctctatgctgcccccagtgctgagcaagagttgtcatttacctgaggcttcctttctatgagcatgtgcttctctgaaatactgagataatcaaggccaggacaacactacatggatgttttttcattaagagtttatatctaattttgaaattttcttaytgattattatagagttttgaataatctagaatgaatgttatccatcacatttttattactaccctaaaatgctaaatagt

SEQ ID NO: 454745 - DNA, 632 bp, Homo sapiens
tctaaattcttcccatgtgtcctcatcattcctccctataccttgatttcaaggcaactcawactttgaataatacgtatcacattcctagacaccactcagtatacacagtgatttttcttattgtgtatgggaaagagaaaatattctcagacattaacagttaaattatcatttgtaaatcagctagtgataagagaagatgcctttggcatcatatatattttgcctgctgttttaggtcctgccatcaagcatgtagtaatattttcaaacaattctatcaaataacagttgattatagaaaattcagtacaacttagaaatcttgccaataataataatgatagtaatattacctcttaatttttatgagaagggtcatgatttttgaaatgatagccaagtccaacttagacttacaaaatactttatatatgcatacatgcaaaaaaaaagtggctagaagaaaaattcagcaccccctcttcattatatgcaaatagaattagtaaatacgaatgtactacgtactagtaatatgcatgtatatatgtatgtaaatatgaatgtatgaccatgctgttttatagcctatgtactatctgtgcaaaagaggacagtggttattt

SEQ ID NO: 454746 - DNA, 601 bp, Homo sapiens
ttctaaatggcatgcggattctgatgaattcttaccacttacattgttaccactctcttagcttgggttcttccagaagcagagcctgagtcaagaaatcaagtggaagtatttatttgggagataatcccaggaaacaccaataggagggtgggcaagtgaaacaggaaacaaaataaagcatgtgttaaaaagtcatgctaaaaattctaggagccaatgtaggacacacacctcaaagctatcctaccccagtggtcaggcagttggtgcatgaagggggcatcattcatcrtttgaaggctgctcacagaggcactagttcttttaacacatcctcctccaatgttgtcatctcttttgcccccttacttagttagatatagccatattttatcagaatacagccaacataactgacactctcacttcttgcagttaactcaaaggtccctccacagacaggccatttctgataatcctatttaaaatagtgtctctccaaaaacaaaaaaaaacaaacaaaaacaaaaatgcataaaatgctagaaatctttgccatatatcaatatattcagcaaattctacgagtggattttag

SEQ ID NO: 454747 - DNA, 572 bp, Homo sapiens
  misc_feature (1)...(572): n = A,T,C or G
tattaatcatttttgtgcataaaccttnattgcatgtgtcagtatttcttaagatagatttaagactattttctagatattgaacaccaatgtatatttccactgaaagagtatgacaagttccatgtctacccttggtgtatagtttaattttcttaaatatttttctttttatagagaagttacaattttattcttttaatttgcagtttaatgacttaatgragttaatatttttagtgcttataggtgatttatattttttcttctcccaatttttattattctttatgtttccattgaaaagctaatatgttccttactgatttggagaatttatacagtaaagacatttaattattaaaacatcttcttggttaataattttcgttttaattcatttatattttttaaatttagcagtggttgaattattgtggcaaaatacattgttttttcctttaatttttttctttcattaaaaaagaaatgattttacttattcaggaattagataaatatgtacccatttttaactttttttatatttagtactttaatgtagctgaaac

SEQ ID NO: 454748 - DNA, 611 bp, Homo sapiens
  misc_feature (1)...(611): n = A,T,C or G
acatgtatatatttggatacatatacacaatgtgtaatgatcaagtcagggtaatcaggatacccatcacttcaaatatttgttttttctttgtgttgggagcattacaattcttttagctattttaaaatatacaatagattgttttaactctaattttcctacttgagtactagaacttgttcctaacgtttaactgtattttggtacccagtaatcaacttctcttcatccccctcttccccattcccttcctagcctctggtaaccaccattctactctccacctccatgatatcaacatttttaactttcacatatgagtgagaacatgtgatatttgtctttctgtacctggcttatttcacttaacataatgacctccagttccatccatgttgctgcaggtgatgtgaanttattatttttatggctgaataatattctattstgtatatataacacattgtctttagccatttgtctgttgatgaatacttgggttaattccaaattttgggtattgtgaatagtgctgcaacgaacatgggagtgcagatacctttttgatctactgatttcctttcttctggggtgtactcagcagtggg

SEQ ID NO: 454749 - DNA, 587 bp, Homo sapiens
ttattttatttttgtagagaggaggtctcactatgttgcccaggctggtctcccactcctgggctcaaatgatcctcctgtctcagcctcccaaagttctaggagtacaggcttgagccagggcacctggtcaagaaataaatttctaaaaagtggcctcaaaaattcagagatactgctcctactttttaaaaactgttgaagcttttgtttgtgatttaggtgactcttgattataccagacttgaaactaccctctttgtggtatatgcaaaataaagattcttgtgtggttgcagaaaagagaaggtgggggtgaggtgrgaggggaagagggcatgacaaagtgagggagcacagcagaaagagatgagctttcatatgagctggacaggttcccatcccagctccatcacactctagctgtgtgatgctgtggaggtgtgtgctactctctgtgcatctatttcttctggaaagttaaaatattgccccccataggcttgttatgaggctataattaagtaatagatgttgaatattcggcacacaataagcactcaagaaatcctgactattactacttt

SEQ ID NO: 454750 - DNA, 571 bp, Homo sapiens
gcccttctacacatgcagttgattcattctttcatgttccaggccttgtgctgtgtactggaaaagatgagggagggggaacagcaagcagaaaataatacatcacagtaagttctttaaaagtatgaaaagtcttaggattgggaggctgatgtgtgaggattgcttgagcccaggtgtttgaaaccatcttgggcaacataaggagacccccatttctacaaataaataattagccatgcgtggtggctagcctgtagtcctggctactcaggaggctgagatgggaggaycgcttgagcccgagaaatcaaggctgtagtgagccataatcatgccactgcactctagcctgggtgacacagcaagacccggtctccaaaaaaagaaaaaaaaaaaattctgtgggagtggggagatgctagtgaaggcttggtgggggaggtgaccctgagtagggagtgaaccaggtagaaagtggaagaaggaacaatcagataatcagacccatgaaccacagaatcactctggctgttgggctcattaaagagtagtctcctagaattattct

SEQ ID NO: 454751 - DNA, 496 bp, Homo sapiens
gctgtgtatacaatcaagttctggggtgacctacttgtccttggtgctgtgtgagtgaggaggagggagggcagactgtgtgactgccatggtcacttctgtttatgacattccaaaaatctgtgattctctgagaatatytaagacccgggcctgagaatgctcttaaacctttccagggatgctcagtggatctaagacaaagtctaaagccctcaccatggcacacaaggtccttatgggtctagcctccccatgcactgcagcctcctctctccccacttgctccctggatctctgtgcccagctctggctggaccacctgtagtcctgtgttccctcctaccttctaccttatttccttctctgctgcctctgggtctctgcacctttggttttttctgtctaaactccaattccttcctgctttttcttttcctttttaaaatctcaagtaggtgccacaagtttacttaattgccctccttcttatgac

SEQ ID NO: 454752 - DNA, 452 bp, Homo sapiens
ctatcatgttataaaaattgtctgtcttcccctctagactatgaggttctgagaggggaggtcactgccaggtgtaattcctctccatgtctctggagtatgggacagggcctggcccagtgaaagwggccagggaatgtttgaggagtgactgactgagaatgaacatgaggtgagataaatgaggatagatgatgactcagaatgagtgttgtgattttgaagggccgaggggtcatgctggcatggggcagggtgagccaggcagagggctgggagatttatgactgaagagagcaagggagaaagcagagcatgagacaggaaagctagattcagagtctatggctgagccacaggcttgagtgagacctagagagagagattccccgcgacgttggggctttcgtctgctatctctcgttggaggagccaaccgtgaggtgcccagc

SEQ ID NO: 454753 - DNA, 525 bp, Homo sapiens
caaacacctggagttttatttgtgggaattaaaaarattatgaatgcaatttctttaaagacatagggctaattcagattttctatttcttcttgtgtcagtattggcaatttgtgtctttcaaaaaatgtgttcattgcacctaagttgttgaattaactagcataaaattgtacgtaatattctatcactttaatgtctgtagtgatgtcttttcttttatttctgatgttggcaatttgtgtcttctctttttttttccttgatcagtctagctagaggcatatcaattttattaatctcatcagagaatcagttttggtttaattggttttctttattatttattttctatttcagtaagttttactcatcgtcaacatttgtttccccttctttactcctctttttttatattcttaaaatggcaatttagatcatggattttaaattattcttatcttttaatataaacatttaaagtttaaaaatttcctatacaaataactttagctacattccaca

SEQ ID NO: 454754 - DNA, 525 bp, Homo sapiens
caaacacctggagttttatttgtgggaattaaaaaaattatgaatgcaatttctttaaagacatagggctaattcagattttctatttcttcttgtgtcagtattggcaatttgtgtctttcaaaaaatgtgttcattgcacctaagttgttgaattaactagcataaaattgtwcgtaatattctatcactttaatgtctgtagtgatgtcttttcttttatttctgatgttggcaatttgtgtcttctctttttttttccttgatcagtctagctagaggcatatcaattttattaatctcatcagagaatcagttttggtttaattggttttctttattatttattttctatttcagtaagttttactcatcgtcaacatttgtttccccttctttactcctctttttttatattcttaaaatggcaatttagatcatggattttaaattattcttatcttttaatataaacatttaaagtttaaaaatttcctatacaaataactttagctacattccaca

SEQ ID NO: 454755 - DNA, 597 bp, Homo sapiens
ccctgtcactagagatgtggaaatagaaagtgcccgcctccccgcccagccatcagcccctgcccaatcagggtactggggaaggcaagaattcagatcctggttgagaggttgaagtatacgacttttgccttcagacacagaaactgtaggattctaaaagaatcagaagcaacccccccccccccgccattaattgggtttggtgaaatctgggcccttgttctctacccagaatcttggagacgctctaccttgatacccctcctggggctgaggatagaggcaatgacaactgggctaatactgtgagaaatcattgggtgtactccgaccacaacccatgaggtcaggactgcttctcacccatatctgtctactttttccactgctttataggcaagaatttaaaaatctcgactcttaaacagcgactgtgtagccttgaacaagttattaccctctctgatcttcaatggtatcttgtgtaaaatggagataatgcctcatagggttgttrgcagaattaaatgaaagaattatgtaacatgcatagtgcagtgctgaacacattgaaagccctcaataaatgataat

SEQ ID NO: 454756 - DNA, 562 bp, Homo sapiens
gtgcacattttgggaaaaaataatgaaagcaaagaagctctataagccccacactcaagttcaatgaaaaagtattcaacatcaaaggagaaattgcaagccagccagaacccagatggcgggaaatccaagactggttcaagactctaaggcaagtgcaatggwtcatacacttattattttaacagagaacaaagaagaaataatgagtgacaaaaaaggcactaaactattaaactgggtcttgtaaatgctgtagagcaacaagaaacatggagaagatgctaggaagaggcgacctgatgtagaagaaaaaagaactagcattaggcaagtgaaactagctggggacgcccacaccagctaaaaatagatctagtaacagtaaaaggacgagggtggtaagaaacccttagcaatttagaatttattatcagggaaatataaaaataaccacctcagtatgtccgtagcacgaattcattaaggaataatcctcaaagaaagaatttaagatgtatcattgttaagtttttcaactcaaaaccaaccaatcaactca

SEQ ID NO: 454757 - DNA, 191 bp, Homo sapiens
ttccaaagggcaaagtggggatccactgaatgattttattttttttttattccacgaactttttgctaaccactgaaggatttgaaagagaagagtgacatggccaagtctgsactttttaaaaagactacactggcttgaagtggagtagagtggccaaaacctgaggcagagagaccagctgtgaggcc

SEQ ID NO: 454758 - DNA, 404 bp, Homo sapiens
ccatccatcccacatgctcttcttacaatgtgacaatgacagtcctccatcaacaggtggggtctgtattccttttccttgaaatgaggtgcatcttcagaagtgcttcgaccaaaagtgtatggtcagtcctgaaaggcaatatagcttctgcctggctctttctcttgggacacttgcctttggagatctcaagtcctscaagcagtctggcaaccctaaagctgccattccaagtgaccatgtggagagatcacacaaagatgagagagactcctgctgtgccctccctgcttagctccaggtgcccaaggagccaggcacctaaagtgccctacctgtttcagagtccagctgttcatgtcttcccagggcaggcacaatcacgcttttaggtgattcta

SEQ ID NO: 454759 - DNA, 342 bp, Homo sapiens
ttagaacgttttccttccccgcatttatttaattttcccatggtggttaacagtaaatccctaaaagactgatttagttcattcatttattccagcaacaaatatttgagaacacactgtgtcccagacactgttctaaggactggcagcgaagtccaagacaaacagtccctaccttcagcaagtttgcagtcaagcaggatgyggatgctgagcattacaagggaaatgattattctgagagaggaagtatggggtgctatgggaacatacaaccagggacctaattttatgggaaagggaccagcccagatccaacacttgctctcccagtttacctcc

SEQ ID NO: 454760 - DNA, 556 bp, Homo sapiens
gcccctctgtatacacagtgaattctcaggaaacatggacagtagactctctagggctaacagtgagttgactctggactgctatgtggtttggggctggggagttggatgtgatttggaaaatcaagtgtgtaaaaattgacatgaaatcctgagttcaaaataaatttattgaaatgttcaacacagacatgtgctttcagagagaatagaaaccctttttcacagtttatatacctcaagatagaaggctaactagttgaagtgtcctcagagccaatgatcastccttaaaaagctcccacacatcccggacttaacagactcccagaactggctgggactccaggaggtcatgtagtccatcccgctgcctctaggcaggtaagagaagagcaatatcttagaatttgtggtaataaatttgctgacctttctttgttaagagtttctcctgttcttgaagctgtaaggattgattttgaagcaaacctgttggaaaacacaaggaacttgtctatgctagcatatttactacaaaaagttttcttttcag

SEQ ID NO: 454761 - DNA, 502 bp, Homo sapiens
atcatttctctgaacagcatctcctattgagcataacagatccactagttaagaagccctgatggagtacccactctgggtagggaacaatgccaagcattaccatggaacatagtggacacatccctgctgtcaacatgctcacaacttcagtaggaagatggtttgctggccaaggtcatctcakcataccctggtttttgccaacattgttcctttccaggccagactaatgggccctctaagggttacacaatcttagaagattttaacctcacaaggcccatagacagcagaggtggcctggagaagccagggaaagcttcctggaccagatgaggctatagtcaagtgatttaatagaattggaatgacacaagaggaagtgagaagagtgggcacaacagccttgcagaagaaaagaggacagatatgtctgtgtgtgtgtcaagaagactggcctgtgtgcttggcatataataagctttcagtaaatatttga

SEQ ID NO: 454762 - DNA, 384 bp, Homo sapiens
agttatacacacacacacacactcatggaatgaggatgtgtggattccatgtgaatggaatggggaagctaactagcataaggcactattgtaagacctgagaaaattaggaacagctctcttccaaggaatacacctgtgattctcaaactggcagtgttgcaagttgaaccgtgtccccaaaaaagacatattaagtckctaatccctaaaacctcagaacatgattttatgtggaaatagatcattccagatataattacttaggtgaagacaaggttgcactggattcaggtgagcaacatgactagcatcattttaagaagaaggccacataaaggcagagacacacagggacaacaccttgtgatgacagaggcagag

SEQ ID NO: 454763 - DNA, 595 bp, Homo sapiens
ttccttttcactcaattactattaaatgtgataaatttaattccaaaaataaattatttcttgattaagctcatctaactaatgcttttgccttttataaaaataccttaacctactggtcaaacctaatagtctcaaatttggtcatagtgaaatgcctattaaagttatcttcctcttcacaaaacaccacaaaatttgatctatttatagaaataaatatatatagttttgtgctatattagatgccatcttgcactatattgtaatgaaaacaaatagtaggtatcaactgagaatatttaaagtttcccacattcttargaaaatttgattgttctgtagtcatgctaacctgaactagtagaaaacccagtggcttaatcaatgacaattcacctgttaagcttttagaagccaaccaatcagtgataggccctcacttctgagagtcaaccaatcaggaatgaactcatgccattaactgcatctcagagtgctaaccaatcaacaaatagtcatgcttctatagctgatgttagcccatttatgtctgggaaagtacaccagtccctgaccttcatgcatcctcgaa

SEQ ID NO: 454764 - DNA, 599 bp, Homo sapiens
  misc_feature (1)...(599): n = A,T,C or G
ctcagagtgctaaccaatcaacaaatagtcatgcttctatagctgatgttagcccatttatgtctgggaaagtacaccagtccctgaccttcatgcatcctcgaaaccctatatgagatcagcagcctgcttttcagagagattgagcagcaaagcttgcccttactataatgagcaataagtttaccattttttgttttattttagaccttaaatgggggactcatcattctttgacaattctgnaagctctactgtgattgttttaaagaccttcccttggcaatattccagggaacatgggaccaacaggtacacttactgggctccttgtgcccaagtgcatttgtcctttwgatctggtgcctggtgagaaaatctcaatgataacctgagatctgactggtttcattaagttctcattgcttctgtgatttacaagcaaacaggtctttgtataagatcattatgcctagttctttgtattacataattagaaaatttagtcaacaggtgcacattttagtaaacaattacacctagacccttgtaaaaggtcattaggcattttgtttgggaggtacaccattgagtaattg

SEQ ID NO: 454765 - DNA, 548 bp, Homo sapiens
gatatgataaaaatgaatcccacaaagcacaccataaaaaatctccacacttgctaccagtagattctatgttggttcatgatttttaatcagactttgtaaaaagagacacatgaccaattacaaagtcagtattcataaaaataaaatttaaccatttgcttaggaaaaacctagcttctcctcatactaaatcatatagagctctagggttacctaggaaacacaatatatggtaatgaataacattctcaacaatagctatcactcctcatttattgatactgttagagagaatttaaagcctttgaagcaccaaatcataaactttccccagcctatrgaagacataattcatcatttaaagtaaactttgatgacatacataagaataaggaaagaatttagaactattggtaaaatagtacaactgcactacttttaagaatcttataattagggtacttattactttgttttagtttataatgatttgtaaaccataagtcgtacctagtaacaaaaagactttcttttaaaagttaatt

SEQ ID NO: 454766 - DNA, 560 bp, Homo sapiens
actctgctaaagaggcttccagtggccctaatataagcagacattgggagctccatttgagtattactctggtgcattgytgtccttaaataaagaatgaatatagacacctgttgcacataggaagtaaaagaggtaagtatggacccttctctccctgtcttcagaagaaaaaaaaaagaaaagatatgctgttttttaaatatcaacatgtataacaaattggtcccttggacaatactcattatagcatttcttttacattttgtaattgttaattctctgtgtccacttgactgggccaagggttgcccagattcaacattattttgaggtgtgtctgtgagggtgcttctgagtgccattaatatttgaaccaatggactcagcaaagtagattgccctccccagaatatatattggtggggagcatccaatccattgaaggcctgaatagtatgaaagatgaaggaaggaggaattaaccccttttgcttcctgcctgcctgcttgaagtgtgacatcattcttctcctgctcttggactgaaagttaaacca

SEQ ID NO: 454767 - DNA, 560 bp, Homo sapiens
actctgctaaagaggcttccagtggccctaatataagcagacattgggagctccatttgagtattactctggtgcattgctgtccttaaataaagaatgaatatagacacctgttgcacataggaagtaaaagaggtaagtatggacccttctctccctgtcttcagaagaaaaaaaaaagaaaagatatgctgttttttaaatatcaacatgtataacaaattggtcccttggacaatactcattatagcatttcttttacattttgtaattgttaattctctgtgtccacttgactgggccaagggttgcccagattcaacattattttgaggtgtgtctgtgagggtgcttctgagtgccattartatttgaaccaatggactcagcaaagtagattgccctccccagaatatatattggtggggagcatccaatccattgaaggcctgaatagtatgaaagatgaaggaaggaggaattaaccccttttgcttcctgcctgcctgcttgaagtgtgacatcattcttctcctgctcttggactgaaagttaaacca

SEQ ID NO: 454768 - DNA, 605 bp, Homo sapiens
ctgcagtgagctgctgtggttgtgccactgccctccagcttttgtgacagagtgagagcttgtctctaaaacaaaatgaaaaaaaaaaaaaagggaaaaaatatagatgaatacttgaggaaaattaagcattaggcatactatatatctgaaaccgattttattgacagatactgcaaatgaagtaggaaaatgcagtttgctttctgatgagagctgtcctagatatatttggcttaagagcatctctctgcattggccaataattgtaggtgctttaatatccatgaaagcctgaacattacttgagtgagtatctgttgagatgtgtttgtgtctgttggttagggaaatattattctagtgttttattagtcagtataagacaactggttttgttgtttcacaatatattaagtgtatcagacagtatattagtctgttctcatgctgctataaggacatactcgagactgggtaatttataaagtaaagaggtctaattgactcagttccacaggrctaaggaggcctcaggaaacttacaatcatggcagaatgggaagcaaacacgtccttcttcacgtggcgggagaaaagagaag

SEQ ID NO: 454769 - DNA, 605 bp, Homo sapiens
tctacactgttttaaaacatgcaaaatcaaccaatctaaatctttcctcaccattactaaaggagcatatgtacactatttcttaaagactaaactgtaccttttggtacagatagagagtagattgttctcggtgtcacagcatggtgtttctcaattatggtgcagagttgtatttctatcttttgggatgtaggaatgtgagccagcacaatgtcttaaaaatcagtaagtcaacatggcaacattgtatcatttgaaagatttatgaacagaaacactaaatggttcaaatggtttaccttcggaatacctcattataagtaaaatgatgtattaaaatttgaacttatacttttctggaagttaggatttgtacatcttatacttggagatgcctcagtgttgcagaacttccaggacgaagtgaatgccctggctttaartgctgtctgctgacactcagattaatccatcccgccttatgctgtcccttgaatttttgccgttatgatatcttcacccccaagtcctccaaaccttttccttccctggccctgtatatcttgctggacggtaactcctttcttccagttgcttggcta

SEQ ID NO: 454770 - DNA, 568 bp, Homo sapiens
  misc_feature (1)...(568): n = A,T,C or G
taaatttcacagcaattatctgtacctttttagcaggatattttaactcccatttatgtcattttgcttgggtgggttttttttttgtttttttttttgttgtttttttgtttttgtttttgtttgttttttgttcgccaaatgatgaatctcagaagatttgtaacagagcataaactgacttgtgcagtgagttgtgacatacagcatgggggatctgagtccttgctactcaaaaggtggtccatgcacagcagtctcagcatcacagactctcacaccccaccccagacctgctgaatcaaaatttgcatttttaaaaggtccctaaataacacacgtgcatagnttatggaagaaatcacttttttcagatatttgcattaagcctttagtgttccattctcattctgttatgttggagctttttacaaaattgtgaaggtgggtgtttaatctctacagatgtaattttctctgagcatgacacattatttagtagaatgaagttttatagtactatggatgagtrattctgaccatagttaaaagtttagtgaatacctaa

SEQ ID NO: 454771 - DNA, 568 bp, Homo sapiens
  misc_feature (1)...(568): n = A,T,C or G
taaatttcacagcaattatctgtacctttttagcaggatattttaactcccatttatgtcattttgcttgggtgggttttttttttgtttttttttttgttgtttttttgtttttgtttttgtttgttttttgttcgccaaatgatgaatctcagaagatttgtaacagagcataaactgacttgtgcagtgagttgtgacatacagcatgggggatctgagtccttgctactcaaaaggtggtccatgcacagcagtctcagcatcacagactctcacaccccaccccagacctgctgaatcaaaatttgcatttttaaaaggtccctaaataacacacgtgcatagnttatggaagaaatcacttttttcagatatttgcattaagcctttagtgttccattctcattctgttatgttggagctttttacaaaattgtgaaggtgggtgtttaatctctacagatgtaattttctctgagcatgacacattatttagtagaatgaagttttatagtactatggatgagtaattctgaccrtagttaaaagtttagtgaatacctaa

SEQ ID NO: 454772 - DNA, 334 bp, Homo sapiens
gtgcaaacgtggctaatatttcagtatgtattttctaaggcttttcttttccacgctcaagaaaaggaatcccaaagcggttctttagtataagtggctgggttaggcaattgctgatatttatatctaaatctatgcctgtgtccgtatgtatgtcagtgtgtttgtcagtatctctctctattcattctgggcttctgatgcttccaaacacatcattagtcccatttggtcttggcttagtttccctacacaccagtacttggacatcrgttggaagtataaaatacaggcaaggcagtgttccaatctgcttgggaagggtcatgctgag

SEQ ID NO: 454773 - DNA, 561 bp, Homo sapiens
atttaaaagcagtattttataacaaacgcagatccttatctcagcgtaaaaagtttatttaaataaattatgaagaaatcaaagagaactataattagaaggaaatgaaaagccatctatactaagggcatagaatgctttggagagagaagtttcagttgttggttcatctcttcagagtgctgaaagtgactctttcaaaaggggagccatgttttaaaattttatctttaaattaacatacagtaaaatggactttttttgtggtatgaagttctgtgtgttaaaattcaargagttgttcacccaaaaaagcaactctagggtatgttaaaaaataaaatgaattttaacacatcaagagattcatgtaccaaccacaccatcaggatacagagcttccattatcgtaaaaactaaagggaagaaacgtcgttctgtttcgcaaacattcactgagcactcacttctgctgaccttgtgctggataccagggaggaaacactgaatgacaggatccccaccccagtgcaccattgctcttggaaaaaaggatcaggg

SEQ ID NO: 454774 - DNA, 466 bp, Homo sapiens
ggactgtgccaggtcaactcacgagtcagagttatttcattcactgaatatttaatgagcacttactatgtatgaggcacygttctgggagctgcagacagaaggcaaggcatagtccctggacaggatgacagaagtggactaagaactccatgtgacaggagatgacaggggtcaggaaagggcaacctcaagtagaaggaatgaaatttcaatttgcaaactgcccaggagggagagaccacaatctcagcaggcatatgtcaaccgcatgcacgtgacatgacaaccatgcaaacatttggggtagcccaagagtggagaagactaccgttgggggatctagaattcctttcctagtctagaagaattatactaggacttgaatgataaagcctaaagttctcaaaaccaaatgtggaatcaactactaagaagaaacttctaaaatgcagtggtttagcct

SEQ ID NO: 454775 - DNA, 505 bp, Homo sapiens
ccccaactataaaattagattcttctgttccatttctagattgcagtaatggagaggaagagaaaaactgaaaacatcaaaaacataaacttatattcacaattaaaaaawttttttctattcatgtagatactttctactttttttcccattgatgtacagctagcatataataaacacaaatattttacatattcagttttgattggtttcggatatcttttggtaattgtatacatctgtgtgaccaccacccaaaacaagatatcaaacatttctatcaacccagaaaatttgtgtcccttcccccaatttccaccactaggcaaccattttctaatttttattatgaaaaattagttttatatgttcttagatttcacatatgttcattttattattattattttagactgagcctcattctgtcatccaggctagagtgcagtggcaccatctctgctcactgcaacctccgcctcccgggttcaagtgattctcttga

SEQ ID NO: 454776 - DNA, 558 bp, Homo sapiens
tgggaagggttctagataggtttcatgggatatgtggtagaggaggcaaaaaaaaaaaaaaaagatgaataaagtaattgtctagattttgtgagagttcagctgagcttgaaaaagtgtgaattcagagagacagtagcttactaaycacaaccccagatactgtcttcttaatggcatctttatgactctagataggtatctcgttccctgaagaggtaataatgtataaaaaccaggagtggccaagaccctggaataagcctgcctgctcaaagagtacataaccaacaatatattgctttgtgtgagctgttacagataagccctccaataatccttagggattcatgttttatttcagatcatgagttttaaatcatgcacaatttctcaaaagacaattgtgctatctccttgaccagtgagtcacttacacacttttagctggttgacagcattttgtgactgaaatgtaagaaattaatgctatttagaaagataagataacttttattttccctctttaatacttatgaagcttagcttgccagggga

SEQ ID NO: 454777 - DNA, 558 bp, Homo sapiens
tgggaagggttctagataggtttcatgggatatgtggtagaggaggcaaaaaaaaaaaaaaaagatgaataaagtaattgtctagattttgtgagagttcagctgagcttgaaaaagtgtgaattcagagagacagtagcttactaaccacaacccsagatactgtcttcttaatggcatctttatgactctagataggtatctcgttccctgaagaggtaataatgtataaaaaccaggagtggccaagaccctggaataagcctgcctgctcaaagagtacataaccaacaatatattgctttgtgtgagctgttacagataagccctccaataatccttagggattcatgttttatttcagatcatgagttttaaatcatgcacaatttctcaaaagacaattgtgctatctccttgaccagtgagtcacttacacacttttagctggttgacagcattttgtgactgaaatgtaagaaattaatgctatttagaaagataagataacttttattttccctctttaatacttatgaagcttagcttgccagggga

SEQ ID NO: 454778 - DNA, 523 bp, Homo sapiens
tttggcaggtgagagaaaggcttttctgccactgggaaaatgttgcttctctttagagaaaaaaaaaaaatgttgccttatttacaattgtgtaacattgaaacagaattaaatttgtactatacattttctgccctaaggacttgtttttttaaaggtaagcrttgaaacgcatggcattagaaataagcaaaataaactttttaatattgattttatttaatatgctgtatttaaatattcatgacttgaaaacaaatgcaaatatatacaaaataaaaaactataaattgctggcaggctgacattggactaataatagcaatatcctacccatttagtttatttgatcatttgatcctcaaaataactttataaggtgaataggattctgtgtgttaaatttgaaaagattcaggattagtaaggcaaattaactttcccacatcaaaaatcagcagagactaaggaagaattcaaattcacactcttaacataaatatattgtgtatatgtatatatg

SEQ ID NO: 454779 - DNA, 615 bp, Homo sapiens
gaaatttatatatgagaaaatcagtcatttcttaccctgtattgttctgattttattattttttccacaagtgtatatatgtatatgtgtatattatatatgtgtatgtatttatactatatatgtatgcatatgtatatcctgtaaaatacaaagcccacaaaggaagcttcaaatgagagatcacttagagctacagagtactgtgctgatgatgtatcttgcaaaaataaaatacagagtctgttcccatatttttaggtcaataaatccactagtgamaatggatcagagattgttactatagaggactaactcatactaactaaaagtacaggaattcaatacactatcaagcacattatttttttatggtgacatgcaaatttaactgaagaatgggatgcttttgccaactttccagtgattcgtatctcttgaaaggttacaaggagatataaaattagcagtaatttaattaaatatttattgatcattttatcaataccaaatatttttatgtggcttgaaaagtttaaaacttgaacaaattaatgagattaattcagtagaggataatttatttaatgaatattttttgcaatactaaataat

SEQ ID NO: 454780 - DNA, 615 bp, Homo sapiens
gaaatttatatatgagaaaatcagtcatttcttaccctgtattgttctgattttattattttttccacaagtgtatatatgtatatgtgtatattatatatgtgtatgtatttatactatatatgtatgcatatgtatatcctgtaaaatacaaagcccacaaaggaagcttcaaatgagagatcacttagagctacagagtactgtgctgatgatgtatcttgcaaaaataaaatacagagtctgttcccatatttttaggtcaataaatccactagtgacaatggatcagagattgttactatagaggactaactcatactaactaaaagtacaggaattcaatacactatcaagcacattatttttttatggtgacatgcaaatttaactgaagaatgggatgcttttgccaactttccagtgattygtatctcttgaaaggttacaaggagatataaaattagcagtaatttaattaaatatttattgatcattttatcaataccaaatatttttatgtggcttgaaaagtttaaaacttgaacaaattaatgagattaattcagtagaggataatttatttaatgaatattttttgcaatactaaataat

SEQ ID NO: 454781 - DNA, 656 bp, Homo sapiens
aaaatttttacagtgaatgtatattccctaataggagaattcagagaaactagtaatagacagaggatgaaaatttattttctttttttatctggactctccataggcatcactcatattaaaccacataaacctctgtcctttgaaccttccccatgatgattgaggctgtgaatattttactctgaaaagaaagaaagatagcagtggtaatatgcatgacctcatgaggcaagaaagccacataaggcatttgactaatttgggagttaagcattatgaaggcacacttgtcatgagaggacactttcagctcctgtcctgaatcattcatatatcttcactgaagctaaatgctttaaaattctctgtgactttaacctctgattcatctcacttcaatatatgcgatcctatattctaatktatcctaaaatttcttcatacatttttttccaatctttaacatttaagtctgccatctgcttaatttgttttactgtgcgggatttagctggaagcacagtgaaaataaagcacttatggtgagtagctttcctgctgaaagtaacaaaaaataaaacaaggcctataaaataagcactttgttgaatattcttaaatagcaaatgtcagaagaggtaggtcagaggcaa

SEQ ID NO: 454782 - DNA, 564 bp, Homo sapiens
gaatgtctcctgtagcagtcagtcccttggggcaatctcccatatctcagcctttgcctaatattaacctttatctgccttatcttgttctttaaaggctttggccacatctaagagatagggctgtttggacaaaactaatataatttaccagttgtttggatgcataactttcctagaaaagaatttttttttttacactcaacttcagtgggcaatgtctgtcttactctaacgaaataaatttgatgtgaaatattacagatgacctggcaggtgtgagaaagataattttggtttatagggtcttcccaagcccrttaaatgctgtcaggtataaactatatacgtgcattgtaaattctggtcaactatatggtacatgcacagcaatcaaatagaattttcttcattactttattaataaactgaacatttcacatatgttgttattggcttcatgttaattttttaatatcttaggacaagacatttattgatgtgatgtttactatttaatgtaatttatcaattggaaactcattagttctaacagcaaaacaa

SEQ ID NO: 454783 - DNA, 546 bp, Homo sapiens
atttagagaggccatgttaaacttggaaagggggttacatatatttaggtaaaagagttaaaaaggtgattctctgcccctggagtaatagttcctaaaaaacttacagattagtaagtaattcagcctcacccacctggcttttttgtgccactgcccaggagttcttttaaacacaataaatgggcaggcaacttcattttttccaaatattactgtatatcaagaatcttgctgtgttctataacctcataattttctagctggaaaagcatgatagtttgatgagaagatcttcccactgaaccacggaggggctacttcttgctttcttccaaaaatatagaggatttggcttacaaaaaatgtcacttaatatgataattcagctgaggktaaacttatttttaattaatgattcaatacattttcttgccctcccctactcaagagcaattaacatagctctttcttcttctagcctaaagttttctaatagggctaaccacttctaacaaagaaattcatatctgaaagaaagaaggc

SEQ ID NO: 454784 - DNA, 544 bp, Homo sapiens
tcaagtcagtggatcttagcttgctgggctccatagtgataggatctgctgagctagaccatttggctccctggattcagccccctttccagggtagggaatggttctgtcttgctggcattccaggtgccactgggggtatgaaaaaaaaataaaaataaaaaaaaactcctgcagctagctcrgtgtcggcccaaaaggccacccagttttgtgtttgatacccagagccctggtggtgtaggcacctgagggaatcttctggtctgtgagttgtgaagaccatgggaaaagtgtaatatctgggctgggatgcactgttcctcacagcacagtccctcacagctttccatggctagaagagggagttccccaaccccttgtgctttccaggtgaggcaatgccccaccctgctttggctaaccctccatgggctgcacccactttctaaccagttccagtgagataaaaccgggtacctcagttggaaatgcataaatcacccaccttctgcattgatctcgctgggagctgcagaccaga

SEQ ID NO: 454785 - DNA, 647 bp, Homo sapiens
gagttgctgcaaaggcctgcattggtgggcttccagcsaggaggtgacactttcaagagagcactagctgtggtagtagtggtgggggttggggggataacgccaagcttgccctaagttggccagggtaagtattttggtttctcaggtgataggtggggccttaaagcccccaagagcttatatgtttgtattcagctaccagggcaggtagagaaataccatcaggtaggggcagggttaggctggtctggactcagactttttgtggcggggtttgctggtttgcaaagccactgtgagggatgtgggaggtggttctcaagccaatggggttatgttcaagagaggatcttggctgcctctgctgtgtcatatagttcaccagggaatgggaagatagctggtagcaagaggcctcaccaagttctcacacagctggggagtgtcctgctcagaccttgccccaggctgtgagcttccctgctgagaaaccaaacatggcttatggacctcacccctccccatctggtcactccattagtggtggctcctgtgctcatctctgcagcagcttctgctcatgtcctggactctgctcaggaaaatttgtgtccagtggaaactactaccaatttcagttggaa

SEQ ID NO: 454786 - DNA, 647 bp, Homo sapiens
gagttgctgcaaaggcctgcattggtgggcttccagccaggaggtgacactttcaagagagcactagctgtggtagtagtggygggggttggggggataacgccaagcttgccctaagttggccagggtaagtattttggtttctcaggtgataggtggggccttaaagcccccaagagcttatatgtttgtattcagctaccagggcaggtagagaaataccatcaggtaggggcagggttaggctggtctggactcagactttttgtggcggggtttgctggtttgcaaagccactgtgagggatgtgggaggtggttctcaagccaatggggttatgttcaagagaggatcttggctgcctctgctgtgtcatatagttcaccagggaatgggaagatagctggtagcaagaggcctcaccaagttctcacacagctggggagtgtcctgctcagaccttgccccaggctgtgagcttccctgctgagaaaccaaacatggcttatggacctcacccctccccatctggtcactccattagtggtggctcctgtgctcatctctgcagcagcttctgctcatgtcctggactctgctcaggaaaatttgtgtccagtggaaactactaccaatttcagttggaa

SEQ ID NO: 454787 - DNA, 600 bp, Homo sapiens
catggagaggtccatgtggcaatgaactgaacttgacctccagtcaataacttgcaaggaactgaatatagccaataactattgaattagcttagaagcagatacttctccagttgaatcttcaaatgagactgtactcatttggccaacacttttattacagtctcttgagaaaacaagaagaggggacttaagtaaagtgtagccaaattctttttattttattttattttattttattttattttaagttcctgggtacatgtgcaggatgttcaagtttgttacttagttaaaactgtgccraggtggtttgctgcacctatcaacccatcacttaggtattaagcccagcatgcattagctatttttcctttcacccattcaacaggccccagtgtgtgttgttcccctctctgtgactatatgctctcattgttcagcctcaacttatgagtgagaacatgtggtttttcattttctgttcttgcactagtttgctaaggataatgggttccagctccattcatgtccctgaaaagaacatgatctcattcgtttttttatggctgcatagtattccatggtgtatatatacca

SEQ ID NO: 454788 - DNA, 524 bp, Homo sapiens
taacttttgatttctcacatataaacaggttcctcccttaatcttctcgtctcagtatgtgtcaccaccatcccacctagtagttcaagctttaaactttggaatcttccttattatctcccttttcttcaccattagcctctctctccactgcaaaccatctgcatgccctgttgttttcatttcatttctggaatagatctgaaatttggctatttatttccattttcactgttagtaccctattccatgccaccatcatctgccacctgaactactcaatagcctaattaattttcctgtttctgcacttcccttctgcttcattttttccacagtagccatcatgatctttttcaagtatgtcatatcacgtctctcacgtgccttcactggcttcccatactcctgtaataaaatacaaatttcttaycatgttctataaagtccttcattatttgacacttatctacatctccagcctcatcaaatattccagttataattgcttgttaattctaccc

SEQ ID NO: 454789 - DNA, 623 bp, Homo sapiens
ctcagtagttttaaaagtttaactttagctttttaaacagatcagaataacatttttttttaaaaatcaataacttagttggaaatccactaagttggattttctgctagtgatgtaatcaggaaactagacaatcaccrttaggaacttcattgtcactttctcacattttatttcagaaattcatcttaatttgatatcatctgttttttggatttgactaagtatccattactggtgtagaactaaatggatacgttgacattttagctttgatttctaagtcagaatagagaaactgtacatattaaatcctcattctatgaagacatttcacacataggtcactgatcacagggcttatgaatacagaatatttaatgtgcctagagaataatttcatggctcatgtactattttctaatagatcacagtgccgttgttgcatataaagtatatagtataagaacaaaaaacttcttatagttctgtatgtgattatcttacttgaagcaacgaggaaaggagggagttgtcagtctgttatgcattacatttagcatactttttatctaccttctgtctaggaaaggtaactagaagataatgtttagatttacaga

SEQ ID NO: 454790 - DNA, 550 bp, Homo sapiens
gcactgatttattctaaatggtaaagaaattccatttcattgactctcctctaatttcattcaagttatacttttcttatacatctcaatctgttgattaacctgcctccagagtaatattttagtgattatattttaatgtggagatgttatacttggtactttttgatactatatcattgcattaagttttctattcctttttattaatttacttttttattacattttatatagtctaattgagattcttctattaactctaattcttgggcatcctaacactcttgctgttagagcgcttgtygtgtactgtcatgtactttacaaagctttaaaacaaggcttatcaaatttaaactccatggcatattgaacattgataaaatgggatttccattacattctgatgattctctttcatgatggtcctttttatgttttcattgagatggctgtcctaaaacaatctaaatggcaatttcttgactaaggttccctgaattaagtatacggtgtaaattctgaacccactcatgtgcatgaaaca

SEQ ID NO: 454791 - DNA, 596 bp, Homo sapiens
gcaaattattcatcttaagggcattaaagtaaattggtgaatattcttcttattattataattaaaccctatcttgggaagacttttattatctagaactaatgaccaaagtattatagtctaaaataacttcagaaggaacaattgtcccaaattcatgttataatttataccttatcaatacacattacraatattagtgcattgaatccttaaggtaatagtgttattaatcgcaacttccagatgacaaaaaaagtcagttcatataggttgtgactcaccaaccctcaaggacattgttcaacttgttttcaactccatattcctttaattgttgctgtttcatgtcccattaataatattagcttttactatgtaatagtgattaaaatgatcaaaatgagatgccttacacagttttttatttgatgtttgtattctgatttctgcaacagagccctccctttatccccaataataaataaaagtcatgtctttgatttcaggacctagatgtttgcttacatttcccctcagattgtccctctctactccatgaaatatttttcagcactattgttattgacattaaa

SEQ ID NO: 454792 - DNA, 478 bp, Homo sapiens
ctttgaacagctctgctgctgtggctcttcggggtacagcccctgaggctgctttcacaggctggcattgagtgtctgtggcttttccaggtgcatggtgcaagttgtcagtgtatctaccattctggggtctggaggacagtggccttcttctcacagccccactaggcagcctaatagtgggagctctgtgtgggggctccaacccacatttcccctctgcactgccctagtagaggttctacatgacagcttcacccctgcagcagcttctgcctggatattcagctgtttacmttcatccactgaaatctagtcagtggctcctcatatggtttggctgtgtctcccacttaagtctcatcttgaatctttttctttataaattacccagtttcaggtatgtcttcatcagcagtgtgaaaatgggctaatagagtaagttggtaccagtagagtggggcactgctgtaaagat

SEQ ID NO: 454793 - DNA, 569 bp, Homo sapiens
ctatcgtgatcaccattaaacaaatatattcattcattcattgtacaaacatttgtgacatgtttctgcatgtgccaaactgtaccagatagtggaaatatagcagtcaaccaaatggacaatagcccatgtgtactttttaataaaactttggttgctttaaaaaaaatgttttatctgaggattatttatttaacttttattttgagttcatgggtacacatgcaggtttgttatataggtaaactcatgtcatgggggtttgttgtacagattattttgtcacccaggtattaagcgtaataccaattagttattatttctgatcctctccctcttcctaccttccrccctctgataggtcctggtgtctgtcattcccctggatgtgtccatgttgttcttgtcatttagcttccacttcaaagtgagagcatgtggtatttggttttctgttcctgtgtaagtttgctaaggatattggccctcagctacatgtatgtttctgcaaaggacatgatgtcgtgcttttttatggctgcataatatttcgtggtgtatatgtgcca

SEQ ID NO: 454794 - DNA, 570 bp, Homo sapiens
actgtcttgggtatttgggctctgttttggttagacatgaattttaaaatagttttttttyctaattctttgaagaatgtcaatggtaatttaatgggaatagcattgaatctataaattgtttgggacagtatggctattttcaccatactgagtcttcctatccatgagcatggaatttttctccttttatgtcatctctggtttctttgaactgtggcttgagttctccttgaagaggtcctttactttccttgttagctgtattgataggtctttcattcttttttgtggcaattgtgaatgggagtttattcattatttggctctaagcttgcctattgttggtgtttagaaatgttagcaattattgcacaatattttgtatacttagtctttgttgaagttgcttatcagctgaagaagattttgagctgagacaatggggttttttagatatagtatcatgtcatctacaaacaaagacttcatctcctcctatttgaatgcccaggaccagatgggatcagagctgaattctagtggcacaaagaagagctggtaccactt

SEQ ID NO: 454795 - DNA, 499 bp, Homo sapiens
tccaatctttttctcatctttttgaaaccaacccagtttccctatagaactgatgtttatggttgtgtttgaataagtacagaaattgaccttcccagttttaaaactggaaacttgcattggacttacctgatttcctttctcaggaaactgaacctcaggcctcacagtatcaagaaactgaagcttaccagattaccacatccagaaaatgaaacaccagatccctcatttgttatgattgcttccttactcctctctaattcctgttttcccacacatagttgtatttctcccccactacattaacccacaattttagmtggttggggagatagatttgaaatttatgtcctgtctccccagccgacattactcatcccctttcttccctggccatactgattgtctcagtgatcagctttctgtgcatctagcaacaaaacctagactgaacctctggcatttcagtaacatttttgtcttattctgagccttc

SEQ ID NO: 454796 - DNA, 622 bp, Homo sapiens
ataggggctgggcatggtggcttgtgtcccagcactttgggaggccgaggcaggcagattacctgaggtaaggagttcaagaccagcctggcaaacatggtcccccccacagtataaaaaaaaaagtaggaattagccaggcatggtggtgcatgcctgtagccccagctacttgggaagctgaggcagaaaaattacttgaacctggtaggtggagtttgcaggtatccgagatcgcatcagtgcactccacctgggtgacagagtgagatgccaccttaaaaaaaaaagttacttattgggtacttcttctgggaatcacgtctccattaagttactaagggattcaggctctttctagcctgtgtcactgcccttcctcatcacagagcttctattgctatgataatagrcagaaaacaggacatgggaggattttttccatgttttaaattagcgcattatagttgtacatatgttggggatcatgttatgttttatatatgcatgcaatgtgtaatgatccaatcagggtaatcagaatatccattacctcaaacactcttctttatgttaggaatattcaaattcttagttattttgaaatatacaataaattatt

SEQ ID NO: 454797 - DNA, 581 bp, Homo sapiens
  misc_feature (1)...(581): n = A,T,C or G
agacttactcaccccttttccaatgtggagcatgaatctattcatgaaagatccactcccatgacccaaacatgtcccactaagtctcacctctaatactgggcatcaaatttcaacatgaggtttggaggggcaaatatccatactacagtactccataaggctgtggagaaggaagcaccatttaktggacctggaactctatccattgtctggctaaaagggtgctgagacaaatggctaaatcccacattgatgtggtaggtagggctttccatgtagacaaccatagtgaagtcttttaggtggttagaaagattactcaccaaaggggcttaatacattactggcttcaccagtgacagcctttaaaaactagagattttcccatagagggttagaaaaaccagctgtgattgagctatctagcattaaagacaacattcatcctagaagcaccattaatactggatttcttcttttaccctggtcatgaccctaatcaagctcaagtttaactatgtccctctgtctcccttctaaactntgaactgctctctatattttttctaatggatcat

SEQ ID NO: 454798 - DNA, 496 bp, Homo sapiens
atggctctgttaaaaaagagggtatattcatttgaagaagagatcaatcaaaaacacctttctttcttcattcatacattcattccttcatatttgggtcttaaatatgtgatttgtcacaaagcattttggagtcctacagtcctaaatcctagctcagctacctagagtattcgtccattttcatactgctatgaagaaatacccaagactagatgacttataaagaaaaagagttcaatggactcatagttccacacggctggggaggactcacaaacctggtggaaggcgaaggtggagcaagggcacattttgcatgatggcaagcaagagagtgtgtgaggggaactgccctttataaaacaatcagatctsatgagacttatacactatcatgagaacagcatgggaaaaacccacccccatgattcaatgacctcccactgggtccctcccatgacacatggggattatgggagctgcaattcaagat

SEQ ID NO: 454799 - DNA, 567 bp, Homo sapiens
tttgcaatccttgatcttctttgagagatctaccttataaaattgctgagtgactcaaaccccaggatactgtgacaagtgcttagtccttctgtgttctttctatacctttcaggaaaggtggaaataaaagaactcagaaccatgtaattcttatcttcaaagcaaggggacaagacagataaaaagagtgccttaagtaaacactgaaaatttgtttaaaagtatcatctaaaagacaagtcagaaaaaatgcttttacttccaggtttggcagatgttaagaagtttcgcagttatcaaattcagaaaaagcttcaattttgtattgataatcatgaaaaagccaagaatgtttaatattccaccactacattatgttgtttttatttattctacccatatactttatcccaacttctataaaggtttaagaacaataaaggaaaataggaagaagattcttgtgagacaggtctgaaaaaggttagcaaatagcctaaagtacawtaaattctcaataaaatgaccttcccttcctccgatagggcatcttgattctatctt

SEQ ID NO: 454800 - DNA, 564 bp, Homo sapiens
taggtattaagtattagtgtagactctgtgctaacagctgggaatatgacagtaacaatccgggttcctaccctgccctttggggcttacagtatggggtttgcttggtgactctgaaagtccatggcccagtgctccccagttctctttcaaaaccaaagccctgaaccaccctacatcacaaaggggctaaatgggaaggtggagcatttttctaaccagagcttaatttttcaaatagactggaagaaaagtttctacatgyactcactgcatgtttgacatacccctcctggttaatattcatagaaccttgaaggaatccctgttaatacccagatttgaaatctcagagccaagtgctacagccttggggcctgatttgcatccatgaatatgcagcagcacgagccctttgcttgggatttctgccctatgatgggtgtcactggtaagtgtatggctgtgcattttctctttctgaactgaatgtccaactcaggaaatgaaatctgagctgtacagcagaggataactcccttttctattttctttctacagcaa

SEQ ID NO: 454801 - DNA, 591 bp, Homo sapiens
gggaaggtggagcatttttctaaccagagcttaatttttcaaatagactggaagaaaagtttctacatgcactcactgcatgtttgacatacccctcctggttaatattcatagaaccttgaaggaatccctgttaatacccagatttgaaatctcagagccaagtgctacagccttggggcctgatttgcatccatgaatatgcagcagcacgagccctttgcttgggatttctgccctatgatgggtgtcactggtaagtgtatggctgtgcattttctctttctgaactgaatgtccaactcaggaaatgaaatctgagctgtacagcagaggataactcccttttctattttctttctacagcaaaaactcactctggcttcagcagcccctaaaatgttttcacttttgtataaattctgggagagatgatgtgattttttayggcttcctccagccctaaggtttgagggatggtgagtaagccatttaactgcagtcaagtgttctactaatataccacttagaccccaacaaacaaataagcaaacaaataaaaataagcaatcactgccatgtatgatgatc

SEQ ID NO: 454802 - DNA, 599 bp, Homo sapiens
gccctacttctggtaccagtgttctgtattacttagttcccacattgctattaaaatatctgagactgaaacttggtaatttataaagaaaagagatttaattggctcacagttccacaggctgtacaggaagcatggctggggaggcctcggggcacttacaattatggtggaaggtaaagggaaagcaggcatgtcttakattgcaggagtgggttgaggggtagcagcaggtgttacatactttttaaacaaccaaatctcacaacaactctcaatcacaagaacagaactgaagggaaataccgctcccatgatccaagcacctcccaccaggctcgacctccaacaatggggattacaatttgacacgagatttgagtggggacacagaaacaaaccatatcatataatcataagggctcttaaaattgggtaagggtagtacaataacaggtcagaaggatataatgtgaaaattccacctgccattgctggatttgaagatggcaaagaaaaacatcatgagcaagaagtacaggtagcctgtagaagttaaaaaaatgacaaggaaacagcgtattccctagagactccag

SEQ ID NO: 454803 - DNA, 599 bp, Homo sapiens
gccctacttctggtaccagtgttctgtattacttagttcccacattgctattaaaatatctgagactgaaacttggtaatttataaagaaaagagatttaattggctcacagttccacaggctgtacaggaagcatggctggggaggcctcggggcacttacaattatggtggaaggtaaagggaaagcaggcatgtcttagattgcaggagtgggttgaggggtagcagcaggtgttacatactttttaaacaaccaaatctcacaacaactctcaatcacaagaacagaactgaagggaaatmccgctcccatgatccaagcacctcccaccaggctcgacctccaacaatggggattacaatttgacacgagatttgagtggggacacagaaacaaaccatatcatataatcataagggctcttaaaattgggtaagggtagtacaataacaggtcagaaggatataatgtgaaaattccacctgccattgctggatttgaagatggcaaagaaaaacatcatgagcaagaagtacaggtagcctgtagaagttaaaaaaatgacaaggaaacagcgtattccctagagactccag

SEQ ID NO: 454804 - DNA, 616 bp, Homo sapiens
atgaatggtttagcaccatccatttggtgctgttcttgtgctattgtgtaaatgctcatgatatctggttgtttaaaagtgtgtggcaccctccctctctctcagtcttccttttgccatgtaaagtgcctgctcttgctttgtcttctaccatgagttgaagctacctgaggatttcccggaagcaaatgctattatgcttcctgtgcagcctgaagaaccatgagtcatttaaaattctttcttggaaattacccagtctcaggtatttctttatagcaatgcaggaatgaactaatacagcatattggtaccagaagtggggtattgctgtaaagataactgaaaaggtgaaagcaactttggaattagtagtaagttgagaytggaagattctgaagggctcagaagacaggaaatataagggaaagttttgaacttcttagaaaccggttaaatggttgtgaccaaaatgctgatagtgatatggacagtggacctgacagatgcctacagaactctcctgccaaaaacaaagggatatacattatactcatctacacatggcaaatactctaaaattaaccacacaatcctcagcaacttattaaaaaca

SEQ ID NO: 454805 - DNA, 542 bp, Homo sapiens
ctccttgtgtgtgtcagtgttctaaattttcctagcatgagatgacgaaccccaggtatacaacacagacaacgtagctgtttcatattggggacctcatccaggataccaagttacaacagtcatcaaaatggtgastagaggagtgaactccaactctgtcctttcattttggggctcttggactccattttaaaaccaaatcaaaccaaatactgggccacctttagccatttaaaaatgagtagcatggatgctagccttataagacttaggggacaggcttgctggggagaacatagagaatgccccagtacccgtgtgttgctgagcatgttggccatatttgtatcagcttcctttcatggaagacagccatcacttgaggctggaagaggttctggggcaactgaggatttctggctaccccccggtgttatccaaagacatctggactgacaccagcctccaactgccttatggggtgtcagcaacaagatctccaacttttctatcataatttcctcctttcctttccgcaa

SEQ ID NO: 454806 - DNA, 500 bp, Homo sapiens
ttaaaaatgagtagcatggatgctagccttataagacttaggggacaggcttgctggggagaacatagagaatgccccagtacccgtgtgttgctgagcatgttggccatatttgtatcagcttcctttcatggaagacagccatcacttgaggctggaagaggttctggggcaactgaggatttctggctaccccccggtgttatccaaagacatctggactgacaccagcctccaactgccttatggggtgtcagcaacaagatctccaacttttctatcataatttcctcctttcctttccgcaaccaccatatcgtctatcctctctgtgtatgcaatgtgtgggaagttttacggctcacggcagtaatcttgttaggcaagatcagggaatgcatagtaactggggaagggaaggcatctttctgattttcyacagagggtcccctccaccacagtgagcatcactctttgcccttggtctagagagcacaagt

SEQ ID NO: 454807 - DNA, 586 bp, Homo sapiens
atgatttatcaacctaatgcggaattgtcctacaatttcatagcactagacatatttaacatttgaagcttttattgcaggctgcaaaatgaaggcaaaagtagaagttatttccaattggaggttaagaattagttttgtgtaagttgacagcgtatgactcaaataacagaaaataaagcaaaagcaataaagacacaaaactttacttaaatctggactcatgaaatgactcatgtttgctgagcaaaagaaaaaaaataccattagtattaactaaacttacttaacactaaaccaaaatgtgattcctcatatcataaactttctcagcagtctcctgtctacttttatttagttagctgagcattaagcagcattaaagatctttggtacagtttgaataggaagaaaattctatagctaagaggtataccaagtataccacccaaaatcagcctcaggaagatgaaattgcagaagtttacaagcttaagggacttacttcattggctcataggttgctatgacaagtgaaatgatgcaatmaattatacaaacttaaaaccatattaaacattaccaa

SEQ ID NO: 454808 - DNA, 514 bp, Homo sapiens
taagtatagtaagtcctgaagttggatagtatcastcctccagctttattcttccccttccatactgtgttggctatttgtatcttttgcctttcatgtaaactttagatcagtttgtcaatatccacaaaataatttgcagggatttgcattggtattacactgaatctgtagataaaattgggaataacagacattctgacaatatggagtcttcctgtccatgaatatgtatctctcttcatttatttatatcttctttgatttctttttgagtttataatttttcagataaagatcatgtgtatatttagttagatttatacctaaagtattgatttttttggtgctaatgtaaatggtgttgtgtttttacttaaagtttcaatcgttgattgctggtatacagaaaaacaattggcttttgtatattaacctcatatcctacaatcttgctatagttgcttattaattccagtattttttgttactgttgcttctttgggattttcta

SEQ ID NO: 454809 - DNA, 558 bp, Homo sapiens
gcctggctactaaatgatggtcaaaactcaataatgtgtttctgacataagtgtgttcaattacctttttccatacttttatccatcattttccttctccttaaaatatgtttctcaggatcctaagaggagtttacagaaacaaatttctattgggaaaaatactgttttaaccagttgccttattctgtgagcccccagttttctggcatcaagtaaatcactatagtttcccacagcatagaaatctaccaagtgcagggggaggttgcaatgtcaagttcattcttctgggtctcctcaacaatyccaaaaccctcctccacagaagaggtgcctctcagcatcatccataattttgaaatctttaggcttcaaaattccatttagacagaaacctttatgttgggcaattcatgttcaccaatgttccaggctctcctacctgtccttactcccatgagcatgaccatgaccatgtcttgtttggcatggctgagggaaccaggcatctctgtgtagcaggctcttggagcggcatagccactgcagctgcac

SEQ ID NO: 454810 - DNA, 607 bp, Homo sapiens
taatgatatattagatcaatacagcatctaactcgtgagcttcagctagaaatctcaagtctgatggaaaactattttttagtatcttaagaaagtctcaaaactttggaaaaaattagtgtttttgaaatatggccaagttrtatcttcacacatgaaaaatgtactatatttttctaggagtttgaaaatcattttgagggctgagagtttttctaagcagtgttaaaaccacattgaattgctgttaaagggtaatagtcataccctttcatattgttttgagaattaaacagaatacagcacatggaacaaaaattaatataatatcttcgatcaaaaatataattctaaaataatattattcaaaaatataataatattcttggtagagtaaatgttggccctaaaaaagcatgtagttatcaaaattgtcctaaacaaaatatcattttctgttggctgtcattgctacaaccatgccactcttggaaactgatagaaccaacaaagtaaatggcaaaaagaaatgttgaggacaacaataatgctttcctgattcctccaaatcatttcctataaagggctgtacaatgagattgcttag

SEQ ID NO: 454811 - DNA, 609 bp, Homo sapiens
  misc_feature (1)...(609): n = A,T,C or G
tagcaatgtggaacaacatacattgaaagcaagaaagattagtgtaaggacaagtgcacatctcattcagagttcatggagataattgcttgcctcactgtttagggagagcacaaaaaagaaaatgtattccttcaatatctccaaccacaactctaccaggttacctttgtagccccccaaaaagtaagatccgagtttaaagtggcctcaagtttgtagtatcccagcttctttctgctttacagaagaaatacaaattctttctggaagaatgcaccttaaacccaagcttcatattaaaaaaaaaattataaggartatgtgctcccaaacaaaaagtcaccaaacacaaaaaagtgagaacccattagcaaaagccaagagaaaccacaaagtggagaatttcagacattggagttatcagacctagaatatgtaagtttgatctctaacatgctcaaggagttaaaagcatatagcaagtatagtagagttacataacattaaacagtgaaataataactgaaagtaggaactacattaatcatcggattagacttagctgaagagaggatttgggnnnnnnnnnnnnnnnnnnnnnnnnnn

SEQ ID NO: 454812 - DNA, 629 bp, Homo sapiens
gccactaggggtgcttacattatttaatgtcacagatggaaagacgctaactcttttgtctgtgttcccagttgcctttttttaaattgggataactatcttgttttatatagttaattgaatttattaactttttggttgaactgtggtctctttttttaatagattaacacgctcgcaagatagattactgagcaaagataaacattgagctatagatttatgatctttgtacggctcctatcttctgtcaataattctctatgtggattaactgcactggagaaaaccaggggaaaaatgaacagatggaaactggagggtggggtaggaagtaagttcatggggatctgaaatcaacagaaatccagatggacattcaagggaaattgaagagtgttaaaaaagaggaaaaaagtgcttgaaagtgaaaggaagaatggtgaaaggaaagataagtccaggaataaatgtaaaaagaacgaggaataagaagtcaatgtttgggggatataaaaaatataggaagaattcagtagctgtcaacatgacagtcataaaggawttggtttgagatggatttggaatcgatcaaaacggaaataaaaattctattagattgttattga

SEQ ID NO: 454813 - DNA, 572 bp, Homo sapiens
agtggctattgagaatctgcacggctctgtggttgggacccttggccgcagtgacatgggcttgctagtgggatcttctgatctgtgggttgcacagttccgtggaaaaagcatgttttcccaggctgggtagcatgctcactcactgcctcccttggctggggggtaggggctcccctgccccgtgtggttctcaagtgggccaacacaccacactgctcttcctwcttctctatgggttacaccagctgcctagtcagttttgatgacagaacctggatacctcagttgccagggcaagattcgtatgccattatagttcttttcgatgggagcctccaattgctgctgcttctagtcaaccatcttagccccctaaattggaacttttgactgagcttctatgatacaatggaaaattgcaaagtgaaataccagaacacaaaacagaaattccaaagatgtgctaacaaccagttagaaggctccaaaactctcaaagcatatgtaaatgccttctcactcaaaagagtgaggaggtggaattgaaaagaatacttgtgagaaggtat

SEQ ID NO: 454814 - DNA, 633 bp, Homo sapiens
ctaactcacatagtattcaatatgtgtcacttttcatatatttttatgcttcatttaatgcttacaacaactctgtgatatagggactattattatctctgttcaaaaaaatggagaaacaggcacagagaagtgcctcaggaataggctctatgaattggatgctccactgacactgagtttccagaasgaacagaacacagctagtaaagaggacagctaggattcatagccaggcagcctggccctcaagacacactatttacctccaggctattctgccctctcaaattagcaaacatttatggataactactatgtaccttatgctggatattcaacagtgggtaagtcagatattgtctttccatggagtaatttacattctagaaaggaaaaacaagtaataaacaagtaaattaataaatgcaagattgaaagaaataaacagggtattatgatgaaaagcataagcaaagaccagaggtgacacacaaacagacctgaagtgtgggaaggggtgaaccagccagaccaagaaggggattttagaaataaagcatttagatatatcacttatcttataaaatgtgacttaaatggaaagacggttgacaggttaaaatgtgacat

SEQ ID NO: 454815 - DNA, 555 bp, Homo sapiens
tcacaggggcttcctgaatgtggataacaatcacctctttcccaasaaaagctgaagtaactccctttgttaaagagttggaaatgggtttgttggtttgttatgtgtctgctgttttatattagaattggctctgtaagtttcacccctaccatgagattagtcaagtttgggcactcaggtagccagaagcatttaaaacatgctacaattggcctctgtcttgaaacaattctcttttgttttgcaagacaagcgtatgacctttccttcagccaggagccagtgggtaatggattacttgattgactgggtatgacactgctgttgagaaaagtactttgaacatatttggcaagttgaaagtggcacagctcattaggataccattatgttaatttgaaatgccactcaggtaaggaagcagttctgctataatggtacattgtaaagaactgcctggatccttcagatggaaatggccttacggtggtgaggccagctagatggtgtggatcccaggacaatgtaataggccgtgctacctgcccaact

SEQ ID NO: 454816 - DNA, 555 bp, Homo sapiens
tcacaggggcttcctgaatgtggataacaatcacctctttcccaagaaaagctgaagtaactccctttgttaaagagttggaaatgggtttgttggtttgttatgtgtctgctgttttatattagaattggctctgtaagtttcacccctaccatgagattagtcaagtttgggcactcaggtagccagaagcatttaaaacatgctacaattggcctctgtcttgaaacaattctcttttgttttgcaagacaagcgtatgacctttccttcagccaggagccagtgggtaatggattacttgattgactgggtatgacactgctgttgagaaaagtactttgaacatatttggcaagttgaaagtggcacmgctcattaggataccattatgttaatttgaaatgccactcaggtaaggaagcagttctgctataatggtacattgtaaagaactgcctggatccttcagatggaaatggccttacggtggtgaggccagctagatggtgtggatcccaggacaatgtaataggccgtgctacctgcccaact

SEQ ID NO: 454817 - DNA, 547 bp, Homo sapiens
gaaggctccactgattgttccccctacaggaaygccaaattttaacaactaactgcacacaaagaagcaccttcataggaaccaaaaatgaggtaagtaatcacagaacctagttttaacctcatactgctgaaagaggcactgaagacataggagagacagtcttgattcacagataacacctctccctcattcctcccagcaatggccgtgcagcacagacagacaatctgtgcacttgggggagggagagcacagtgactgagtgactttgcattgaactctgtgctaccctgtcacagcagaaagtaaaaccatgctgaactcagtcagtgcctgcccacagagggaccatttggaccagccctagccggaggagaatggcccattccagtgcttagaatttgagtttcagcaagcctcaccacaacaggctgaagcgtactagggtcccaagtgaacctgaaaggcagtctaggacataaagactgaaaatcttaggcaagtcctggtgctatgctggacttagagccaatggaatggggca

SEQ ID NO: 454818 - DNA, 572 bp, Homo sapiens
gggagcccactaccctaaagtgtgagtcccaggcctggcagtattcaccacagactgactgaagcacccttggaccttaagtgaacatcagcagtggcctggcagtgtgatctgcttatgggctagaggtggtagtggccacagggagaggctcttttgcctgtgtaaaggggagggaagagagaaggactttgccatataatctgagtgccaacttagccagaatagaagagaataccaggtaaatttctaaggtttttgactctgattcctggctgccagacagcatctctggacccgcccagggcctkggggaactcaccaacctgaaaggaagaatgcaaacctggctggcttcactacctgctgattgcagagccctaaagcattaagtgaacataggtggcagacaggtaatggttacatcaggcctttggaaagacccagtgttgtgctggcttccagtcagagccagggcaattctaggtgtgatggccacagtgtgcctgcatcaccccatccctacctccaggtagtttaacacagagagagagataccatttgtttgaaag

SEQ ID NO: 454819 - DNA, 572 bp, Homo sapiens
gggagcccactaccctaaagtgtgagtcccaggcctggcagtattcaccacagactgactgaagcacccttggaccttaagtgaacatcagcagtggcctggcagtgtgatctgcttatgggctagaggtggtagtggccacagggagaggctcttttgcctgtgtaaaggggagggaagagagaaggactttgccatataatctgagtgccaacttagccagaatagaagagaataccaggtaaatttctaaggtttttgactctgattcctggctgccagacagcatctctggacccgcccagggccttggggaactcaccaacctgaaaggaagaatgcaaacctggctggcttcactacctgctgattgcagagccctaaagcattaagtgaacataggtggcagacaggtaatggttacatcaggcctttggaaagacccagtgytgtgctggcttccagtcagagccagggcaattctaggtgtgatggccacagtgtgcctgcatcaccccatccctacctccaggtagtttaacacagagagagagataccatttgtttgaaag

SEQ ID NO: 454820 - DNA, 486 bp, Homo sapiens
atggattttgctatggtttgaatatttgtgtccctccaaaattcatgttgaaacttaatccccagtgcartagtattaagagatggggcccttaggaggtgattaggccatgagcactctgacctcctgaatgggattaatgcctttataaaggagcttgagggagtaagtttgtcctttctgcccttctgcccttcttcccttttgccaggagaagatgtagcaacaaggcaccatcctgggtagtagagtgagccctcactggacactgaatgtgcctgctggaaccttgatctctgacttctcagtttctaaaattgtgaaaaataaatttctattacttacaaattactcagccttaggtattttgttatagcagcttgagcagactaagagattttaataagatgaaggcttgaatagttgaaattacttgcgatgatctatttccgacctacttgatggattctctatggtcaatggtat

SEQ ID NO: 454821 - DNA, 503 bp, Homo sapiens
tgcagatttttgattgatggattttaatgggaagaaggcttgaaagttgaaatcacttggtatcatctacttcggacccccagagaccaattggctacgtgggaatggaggctgtacataggttggatagctagragtctccttcaggtcactcctaatggtccattctctctttctacccctcttccctgtttgcttggcaaatctgataaatatgctctagtttatagttgttctataagatttgctccaggccagagctggaccaagtgacttcctaaaggtttgcagctttggaattgggcagtcttaaatttctgtaaaagaatattgtcatcacatgagtagtccagaacctcatttttccccagatatgctttgggcaaagatcaccaaatgggcaagttcttcccactccctcatgtatcatccattcaatcccacctgttttgcacatcttggacaggttttgttcccagtctagactcttagagccaccactg

SEQ ID NO: 454822 - DNA, 539 bp, Homo sapiens
acctgtctttatgtggctacaagggctctgtgatgatctggtccctcacttgtcctttgaaaatcttatctcctattctcttcccttttccccattctatacttaactcactgtactctttttttttttttttttttttttacaaatcagacaaattcttgatcactgtacttacttttctctctgcttaggatatcccttttgctcagatatttgcacagtttgcttcttcccctcctagtcttctctcaaatatcactttctcaatgaggacctccttgatcactgwtattaaaactgtaaccatttcaacttccttcctagcaagtcttatccctcttccctattacatttttattcatagcactaatcagcatttggcaaacccaagcaatcaggtaaaaaacacattttacttatgtattgttggttgcatgtctccctccattaccatgtaagctacatgaagggttggattttcatctgtttagtttattcctgtaccccaagttcctaaaggagtgtttggtgcataatag

SEQ ID NO: 454823 - DNA, 432 bp, Homo sapiens
tctgttcttgcttctattggtttctccttcatcactcgtcaataagaaacaacaacaaaacccaggcatttggccaaatgacctttccacctgtcttatctttctgtctgatttcattctrtgatgacagaatggaaaatccttgaaggcaggtgctatacttattcataatttatattcaagaccaggcatcttttagatgtttattaaattttatataaaagcattaaaaaactttgatggaatgaccctggaaatactttatcttctctttttattttcttcttctcttttagtggctggtagaaaaaggaaaaggttggggggtaagtcatttagatggggaaagacatttctctaaatgtcaatacttatgaaacaccattttaaacctttataaatgattatcttcctcagtactgatgaggcagt

SEQ ID NO: 454824 - DNA, 572 bp, Homo sapiens
cttgggtttcatctccaagagaaccaccactcaaaatcaagtcaagagagaattatggaatgaatatacctcaggtcaagcaaagagttagcatttactgatttccccccatgttcaaagctctatactagaaccgataggaaccttcaaagggaatagaagtcttatgtgatcattagtgctgttgatgaaagacttctacactttccaggtatacagtaacatcacacttctctacccttggaagtcaggygtggcacaatgacttgcttcacagatgagcagagtcacttccaggtaaagtttcaagagccagtgtatgatttactatgctctccctttcactcttttctttctgtttttcagaggtgatccaaacagtagctgcttgggccccaaagtaaggcaaagtggaaaacagccctgactgacccatgctacatggatggtgttaagtaataataaaaaaagaaaaaaagtttttgctttaagccactgagtcttgagagttgtattagtcaacgtacaactgacccttggcaaacttaaatctctaaagatattttaaaaca

SEQ ID NO: 454825 - DNA, 574 bp, Homo sapiens
tgtctgcttttattactctaatttttgtctggtttccaagctcattccactatgcactgcgcaactgaattaaaattgggtgaagaaatagatttatattattatgtctgaaggctgaatggctagaagttacatttttaaaaagaattgaacagcgtaattttttgttgggggaaaagaggcagacatgggattccagctttatgtgtcagcactttttcttagtatgttatttgaaataatcactaaattaagaacggaatgaaggaaagygaatgaagagacagaatgagcgggaaaagggaaaaagtataaatgctagttacgatgaaacattgtaactgaaaccagcaaaaccagttccagtgatttgatttgccttacacatttaacccaaaacaacaataaaatgaaaattgctgacaatgcccactttaatttagtttgatttctagtccaaatttcagggggcaagagagttagtataaatttattaaagagcttgagtaaactctggtagctgacctgctgcatggataagccagaatccagctgatcatatgcctgctttctt

SEQ ID NO: 454826 - DNA, 605 bp, Homo sapiens
gcgtctgatgattgttacatatagctccctgagcagggtgaactgcccaggtaactatagaggcaactgtatctaaccttagagacaaggattatggcaggcaaaactgtttcaatagaagcttttacataattgtcatagtaaggctgatttctggctggaagtgctacatataacacgatagaattatttattagtgtgtatcatctctgcaagtctcttggatttcagaatcagagcaagacagcccacagaaaaggaatttgtttggaataattagatggagttcagtccagagctagggatatgatctccaggggatgaagtcttgaaccctctaccctgacatcttggtggtggaagaattgaattatrtactaaattagaaccccttgcatgactcatggaatatgatgataggttcataggtagagctcacatgaaagttaccatgtgcccttagcaaccgaaacatcctgagtaaaagttaacaaccagctaaacaacactgtgaattttaccctttctcacaagagagcagatatgattttttatccctcccctgaggccacccagagcagaatatttacctgccagggcccttc

SEQ ID NO: 454827 - DNA, 630 bp, Homo sapiens
gatggagccagctagttaattgtaatagcacatttttaaatgccaagacttcattagagtttaatatttgagtaagcactttgatttatcatattccccaatctgatctgcctcagacaaaagagcatggattcaagtacagactttactagctcaaggagggttctgtgggagaaaaggattccatctcattgactacagatgcagaaaatcttaaataaatattttacatgaagccagttgggacaggtctcctgatccccattgagtctcagagaacgacatgagtagaagaaaatacaatctgtatgacggcttacagataattcatggaattttatcttgaagataatttagagagtatctagtccaastgtggacttaaactaaacatctaaaacttaaaatgaataaatgaagccatttgaataggctctctgggaggcgcactataaggtttgctacaggactttaacgtctagctctccccacatcattcatttattttattacctgcccagcctctgaaactatttactgagctcctgagaaaaccagaaaattgagacctgcatctgttaagtaacttgctcaagatcacagagtgatagaattaatgaagacatgttt

SEQ ID NO: 454828 - DNA, 620 bp, Homo sapiens
tttactgagctcctgagaaaaccagaaaattgagacctgcatctgttaagtaacttgctcaagatcacagagtgatagaattaatgaagacatgtttgttgggmtaaggatggagatggatgaaaacaggactccatccaaattctgttagtccatgagccagatagatttgaggatgggaggtcatagactaagggaagaagcatttctctctctctttccttttctgtaccattccccctcaagcttccacaagccgatttacaccaaaatcctaaagttaatgcaaaaccaaaccagtctgtcacacccagagtttagcagaaattctgttggtgatgtgagagtcctcttttattttttttttgtaaagcggtatttttccattgcaaatatatttcttcacctctggactcctctttcatgttgaggtcaattaaggcataacataataaaactttctttttagccatggtcattatattagtttttacaacttagcttctttcccaatataggaaatattctgaatcatagattatattacagatttccaaactaaagatgaaaaacagatttaaaagaaattttattgtaagtacaaccttaatggaatttgc

SEQ ID NO: 454829 - DNA, 648 bp, Homo sapiens
aggctacgtgaccgattaccagctcttctggcagcatttcctgatttcaccaacagtttctcctaggcattgtttggaataggaatatggacccataaatgttacctttttcccactcctgaagtatttttctaatctacctacttatctgctgttctcggcccttaaagttatttaaaagtaataygcatttgtggatttcacattttgagagataatagctacttgaaaaggtctaaaaagaaaccaatagaaattataacataaaacttgaacatgtaagttcctattccctgcttttcttactgtatttcctttagtgaatggcactcatttcatggtgtgtccaagtcagaaaagtgagttatcccagacttccattttctaactttttctttctccttccttcttccttccctcatactttacccaatagttgtgcagtgctttgcccaattatatgcacttgatggatatttgttgaatcaacaccaggaacagcctcctacaattgtatagtactatatgtgccaggcactcttctaaacatttcatatgtattcactcatgtaatactgacaacttcatcattcccatttaacagattaggaaactgaggcataagagattaagtgacttgctcagagt

SEQ ID NO: 454830 - DNA, 648 bp, Homo sapiens
aggctacgtgaccgattaccagctcttctggcagcatttcctgatttcaccaacagtttctcctaggcattgtttggaataggaatatggacccataaatgttacctttttcccactcctgaagtatttttctaatctacctacttatctgctgttctcggcccttaaagttatttaaaagtaatacgcatttgtggatttcacattttgagagataatagctacttgaaaaggtctaaaaagaaaccaatagaaattataacataaaacttgaacatgtaagttcctattccctgcttttcttactgtatttcctttagtgaatggcaytcatttcatggtgtgtccaagtcagaaaagtgagttatcccagacttccattttctaactttttctttctccttccttcttccttccctcatactttacccaatagttgtgcagtgctttgcccaattatatgcacttgatggatatttgttgaatcaacaccaggaacagcctcctacaattgtatagtactatatgtgccaggcactcttctaaacatttcatatgtattcactcatgtaatactgacaacttcatcattcccatttaacagattaggaaactgaggcataagagattaagtgacttgctcagagt

SEQ ID NO: 454831 - DNA, 592 bp, Homo sapiens
catattgcttgacaggcttacactgcagcctgtgacataccagatttctccaattattagatgactacaaaacacactgccaagaccaaagcatatcagagaatcagttactaggctgatggtttgccataagaactgcttcacacttgtccaggatgaagcaaaaatcctcctttccagtctctccatcaaggtccctggataacagttaacacactttgagggtccctttgagtaattattggcccagttactaaaaaaggcttattgttaatttcctgcacagaggcctttactgcagcactttttttttcctccgcagcacattcaatttgacctttcaaaatmtaagacattagttagctgcaatgaaagggaaaataaacgactagttaaggagtcggaaccttgactcaatggcttcatatagctgagtgttcctcctgctatttccaagattttctgtttcctggctccaagacacccccacccttccatctttgatacattctgttttacttaaggccaattgctatgacgacgcaatttctcaacacattatgaaaatacttcatatggcctctctcctgtt

SEQ ID NO: 454832 - DNA, 585 bp, Homo sapiens
gctgctggctttgcagatgcaggaagtggacagtagcgaagaaatgcaaggaatgcagccctagaacctggaagagagaagggagctggttctcccctagagcctccagaaggagggcatcttgatttcagcttaatgtaactggttttggacttctaatctccagaactgtaagagaataaatgtgtttcgttttaagccatcaagtctgtgataatttgttacagyagactaatagagacagtaatatattacaactcataataagttataaaaaaataaggaatccatgagttcattctaatagtagataagtagatagacagatgatagatacataataacggaatgaaagaatacatgaatgtcaggtaggggagagggagggctcttccttacagtaaaagttgactaataaatgtggaagaaatggtggaaaatcatcattttgtaaccaatccttaggcaagaatcatcaatgaatgctaaatttagggggtaattgtgaggatcaagagaaatcataactgctgttcagttacacctttatcaagtggtcagaattagtatcaccaacaagagcag

SEQ ID NO: 454833 - DNA, 611 bp, Homo sapiens
tgttttgaatccaaatctttttcataggtaatggcagatgccttaatgtgaagcttatttataatagtagtaaacctaactggatttaggtgaagaagtcttaatactggaaaaaaaaaaatcagagttctagggcaaaaatcagaagcacgagtgcaggtgagatcgcatgggaggagaacactgcggggctcacaagagaatcagactggcccggcctagggatgtctccagctaagctgactctgggctcccaccataaccaagtcagactgagcatttgatccctgtttgtataccatgggaatagcagcataatgctacagctcatgctctctaacagaccatccttagcagctttcttcctgttttaatatctatgctaygcctatttttttgtaggatgttcacacattttgttgtctttttcattaagttctgactgtaaaacatgacccaaatggtgttgtaaacagatggcttgcctgaacatatgcttagaattaagattgtggtacctggtggaaaaagaaagcaagagttaaggctcaccattgcaagatactatcatgttgccatttgcttccatttgtatctgggcaggttacatg

SEQ ID NO: 454834 - DNA, 538 bp, Homo sapiens
acttcccaagtagctcggattacaggcacctgccaccatgcccagctaatttttgtgttttcagtagagacmgggtttcatcatgctggccaggttggtctcgaactctcaacctcaggcaatccacccgcctcggcctcccaaagggctgggattacaggcgtgagccaccacacctggccagtgttatcttattttaagatattgccacagacacctcaaacttcagcaaccaccaacctgatcagtcagtagtcatcaatgtcaaggcaaaaccctctgccaacaagagattacgacttgccaaaggctcagatgatcattagcatattttagtaataaggtatttcttaagtaatatatgtacatttttagatataatgttattgcacacttgatagactacattatagtgtaaacataacttttacatgcactaggaaaccacaaaattcatgtgacttgctttattatgacattcactttattgcggtgttgggaagcaaatctgtaatatctgtgaggtgtgcctgtagca

SEQ ID NO: 454835 - DNA, 538 bp, Homo sapiens
acttcccaagtagctcggattacaggcacctgccaccatgcccagctaatttttgtgttttcagtagagaccgggtttcatcatgctggccaggttggtctcgaactctcaacctcaggcaatccacccgcctcggcctcccaaagggctgggattacaggcgtgagccaccacacctggccagtgttatcttattttaagatattgccacagacacctcaaacttcagcaaccaccaacctgatcagtcagtagtcatcaatgtcaaggcaaaaccctctgccaacaagagattacgacttgccaaaggctcagatgatcattagcatattttagtaataaggtatttcttaaktaatatatgtacatttttagatataatgttattgcacacttgatagactacattatagtgtaaacataacttttacatgcactaggaaaccacaaaattcatgtgacttgctttattatgacattcactttattgcggtgttgggaagcaaatctgtaatatctgtgaggtgtgcctgtagca

SEQ ID NO: 454836 - DNA, 534 bp, Homo sapiens
ctctgtactatcatcactgctaactttccaaaaatccagtcatgctttcccggtttaaaaacctccattgttccttcagcatccaggctatcactttacaatttgaccctgtattatcttattcctgtcctgtacccctttccctcctctacctcgatgtcccttgtcattcactgaacacrgtatcaagcatctggcctcctggctgggaccctcgtgtcccttctccacccagggaaggcccactcatcctcccatgctcctggatgggaagccttcactgatttcctggagcattcacctctcctctgctgtgtgttcaccagcactaaggagatgaggaataaacataacagtattatttatttattgagtgctatgagccatgcaccatgctatcactaacctgatggatgttgtctcagtgagccctcattgtagccctctgagcccacctgctttacaagtgaagacacaactgctaacagctatgctctgtattctctgttgactttctggctccctattagattg

SEQ ID NO: 454837 - DNA, 539 bp, Homo sapiens
taccttctgaacacacctacccccatcactggccctggacctccaataacaaattaataagcatagttgacctatacttggcctcccatgggttaacatgacttgtttcctcaggatctgactcctctgggtgaccaaaggcaaagttaagagaatccaagctggcttcagatccatacctgtgcagcctccaggaaggtgtaaaattaccttgccccactcgagcatcccccaagctacacctaaacactttctctgcctctcaagctaccttaagtactataggagagtaatgcacgatgatttgacttccccattgtttctgycaacaggcagctcttggggcccaaaattgatctcctgctgggatctgtatatgtcttgttgccagctgcatgcaaggctggctggctcaccaagtttagtcttccttgcatcaaagcaacaaagaagctggcttctgatgaacaaataaatgactggttgggagaaattttccagactcccatccaacaatatgtggacaggagagagtcctg

SEQ ID NO: 454838 - DNA, 414 bp, Homo sapiens
atgttgactgccacctgcagttggtaggtgctgtataatgttgactgccacctgcagttggtaggtgctgtataatgttgactgccaccttgaaagtcatctgtccaacascctccccactgtgggagatttctccatggacatttcctgactaaatgccacaaaatggcagccaactctgtggccgccaatctggcatggtctaaaaagtggcaaagaggctgctgctcccagttctcttccccttcagctgttagagctttgcctccacctatgacctctccagcatcagtcaccatatattaggtgaaaatagtgaggccaattctccataaccaccaggcttaagccccttagcatatcaagcatagctgtttgtaaggtatcacctgcttccctcttcaggctttcatc

SEQ ID NO: 454839 - DNA, 545 bp, Homo sapiens
tggctggtccggaagcagttcctccaggggtattgggagaaggaagaaaggacctctctctccagtgtgatggccacagctgtggccacgaaaatggtcctcttgcatctctcttgatatgtacactgagtttggggcattggttctgactcttccaccccattcttctcgcatttctgacatgttctccaggaatgaggttggagacataaagagaagggtcttactagtgtccttcaagttgcccttaatacaaacacccacaatccaccagagaaatcttgaatttataaggagaaaggagtcaggtctgctgttctttgtttccccccaggaggcttctgtggccaagatmcacaatttcacacctcctccgtaaagattttttaaattaagaaatttcaatgtaaaataatttaaacataagaaaaagaatagaaaatcaagttatatttaagaattcaccacccagatttaaccaatattaatccattggcagatttgctctgattttgtttctgaaaggaataaaaattacagctacc

SEQ ID NO: 454840 - DNA, 543 bp, Homo sapiens
aggttttctgaatctcctgacacttctgaacagacttctgttatctggaggaattatcaaccttctgagctctttctaaccaagtatcatcctgggttctcccaagtagcaccttctaagtagcatcctgggttcttccctccactcctgcctggcctcctttatggaccatgctctgatcatcaaatgtgcccactagacytcacttagaaagtgagggatgtaaaacaatagtggagctagatatccatttttctagaaattatgcagtagaacagtggaagactttctcttatctggtccagaatttcaatggcttgaactgtacagggttgtcatggcttccaatataattgagtgctgttcctgactgcttagtgtataagcttaactctctggcctcctgtagattccatgagctgctaatatcctctaatgaatatgcttttgcctaaataactagaaaggcttctattgctcacagccaagaaccctgatacagagatattgctatactggcttttgtttgattaatatttgtct

SEQ ID NO: 454841 - DNA, 576 bp, Homo sapiens
tgtttttcatagccgctgcatcattttacattctcatcagcagagtacaagggctccaatttctccacatccttaccaacacttgtgattttctggcttttatcatcctaatgggtatgaggtgatatcttattgtggttttgatttgcatttccctaattattagtgacrttgagtatcttttcatattcatatttcatcttttcactttttggccatttgtatatcacctttggaggaatattcattcaagttctttacccatttttaaattgggttgttttctatcattgagttgtaaaacttctttacatatcaactggatgttagcccctaatcagatttatgatttgcaaatactttctcccattccataggttgccttttcactctgtcgattatatcctttgatgcacagaattttaaaattttgatttagcacaatttatctttttacttttgttgcctgtgcttctagtgttgtatcaagaaatcatttccaaatccaatatcattaaactcgtcctctgcattttcttctgagaactatagagttttatctcttacggttaggcc

SEQ ID NO: 454842 - DNA, 519 bp, Homo sapiens
taggttgttgatttgagattttctttttcttttttaatgtaagtgtttacactgatgaatttccccttggccactttttactgcattctataagttttggtaygttgtgtttttgttttcatttgtatcaagatatttttagattttccttgcaatttcctctttgacacaccagttgtttcgaaagataacttttgtaacatttgcatccacattgacaaaagttgttcaatgttttctagaatagtttgtatttgaagtaaaagcatatctgttcccaaactacatctgttcagtttaaataaactcactaactcttgttttaacacactattgttagcatgtaattcaaagagggtactgcataaattaaaagccaattataaatttattaatattaataaaatattcttacaatttatcttgtagttttgcagccaatttatataatgctggcatgtgtattgatacatgttagaaaaatgtgtaaaattattattattggtttgtattgtaaaa

SEQ ID NO: 454843 - DNA, 519 bp, Homo sapiens
taggttgttgatttgagattttctttttcttttttaatgtaagtgtttacactgatgaatttccccttggccactttttactgcattctataagttttggtacgttgtgtttttgttttcatttgtatcaagatatttttagattttccttgcaatttcctctttgacacaccagttgtttygaaagataacttttgtaacatttgcatccacattgacaaaagttgttcaatgttttctagaatagtttgtatttgaagtaaaagcatatctgttcccaaactacatctgttcagtttaaataaactcactaactcttgttttaacacactattgttagcatgtaattcaaagagggtactgcataaattaaaagccaattataaatttattaatattaataaaatattcttacaatttatcttgtagttttgcagccaatttatataatgctggcatgtgtattgatacatgttagaaaaatgtgtaaaattattattattggtttgtattgtaaaa

SEQ ID NO: 454844 - DNA, 583 bp, Homo sapiens
tggcttcaatttcagttttatttattttatagcattctcttcttcttcattatctacatagagggaacagctacagtttgtttggawatggtggaccataggcagcagacacctcttcctcactgaatgtgacaggggaacattctgctcatgggccccatgtctgcccccagtggctccctctgctcagtcatggaaacagcagtatagatggaaaaaaacacaggctgctcagatggtcctgggttcaaatctcaactctgcctcttatactgtaacaatgactgtgtttctaacttttgttgagtctcctttgtctcatctctaagatgcaggtgagaatacttgcttgtaggattgctatgaggattgaacccagcagagtatgtaaagcacctagaatacagcctatatacagtaagtgttcaataaatgatatttcccctactacatcatcactgtcttaaaattcagccaaattggtttgaatcttgcagagtctattataagagcctagaagcagggcctaaaacccaaagtaattctatccagtattgtttgttaaggcatttttctagataag

SEQ ID NO: 454845 - DNA, 375 bp, Homo sapiens
gagtggaaaggaaacagaagaaagcaagcaatgattaattgaggtgaattctttattgtacagttcctcartatttatgcaaaaacacgttttaaattagtctatttgcttgttcaatataaatattgtgttagactaacccataggactcatctggatggcaacagagcctttgtgagctgccagaaggaatttctctgctcattctgggtcttgggagaccttagaaacgaaatctcccaaagtaatcacatctacactattgtgaaatgtgtctacataagagtgtacatacagacatgtagaagtgatcaataaaatattaaagttaaacattttcttgtacacagctagtatatataggactggctacgt

SEQ ID NO: 454846 - DNA, 561 bp, Homo sapiens
gctatctctgggagagaaagtgttcccccttaagtttgaaattttattagaggtgacacaaacaatgtagaaattcttaatcacaaattttatattcctaaattgatagcttccttttatagtttcaccaaatcacagtagcaaccaccatcctaaaaccagaagcaagacaaaattcaaaacaagcaggccaacaccgacgcaggaattacatgaatactgcagatgaattctcttgcagtgtgctttcgtgagcgtgaaatgagaacattgtggctgttatatctctgcactttatttcagtttttgaaagatcaatatattttggcgtattggaaaggtttgataagaatactttataactgagttttgctaatccagttcaaggtatatgtcattcattttggggctgttggtagcagaagggaagattagatttctaatggagttgtyggaaatgaaattcagagagcttgtcttttgtccaaagattcaagcagcaatactacaaactatatccctaaatcatctctctctctttttgctctgctttgattaaca

SEQ ID NO: 454847 - DNA, 278 bp, Homo sapiens
agtggtgactacttttacacaggaatgtttcaaataaattgtttttttctkgtgccttttaaattttgtgatttgtcaatgagatgctgacatatttttaatgaagcatgccttgtaaaataataagtgaatgaaaactacacagtaatatttacatcaacaaagctagaagactgtatgtctcaagaggctccattatctacccagtggccacttgaccaaattaagatccaaataccaaaaagaaaagtaattaaaatttgtgttgtatgccttat

SEQ ID NO: 454848 - DNA, 278 bp, Homo sapiens
agtggtgactacttttacacaggaatgtttcaaataaattgtttttttcttgtgccttttaaattttgtgatttgtcaatgagatgctgacatatttttaatgaagcatgccttgtaaaataataagtgaatgaaaactacacagtaatattyacatcaacaaagctagaagactgtatgtctcaagaggctccattatctacccagtggccacttgaccaaattaagatccaaataccaaaaagaaaagtaattaaaatttgtgttgtatgccttat

SEQ ID NO: 454849 - DNA, 278 bp, Homo sapiens
agtggtgactacttttacacaggaatgtttcaaataaattgtttttttcttgtgccttttaaattttgtgatttgtcaatgagatgctgacatatttttaatgaagcatgccttgtaaaataataagtgaatgaaaactacacagtaatatttacatcaacaaagctagaagactgtatgtctcaagaggctccatyatctacccagtggccacttgaccaaattaagatccaaataccaaaaagaaaagtaattaaaatttgtgttgtatgccttat

SEQ ID NO: 454850 - DNA, 558 bp, Homo sapiens
cgaactctacaagtgtcgggatttttgtgtttttcacactgtattttgtacatctagaaacaatgtttggcacataataggaacacaataaatattgtacctacctgtaagaagtagtatttttgtctagagtcaattatttaaaaacaaataaacccactcaagctaggttaggcaaagggggatttaggttcaggaatacaggaaactttgcagacccccccaagtgacaggaaatacagccagactacacggatactaggaagtgttgaggcagatcatttgtttctgtctgtccctttggggccatgaggtctcycatacatggtgcgtctctgttcctaatttcttttctgcagatagaagcttcactgcaaagtttacagctcctctttcttcacataagcttgcacattaatttggtttgctgtaatagtaactctgccttcaatttcacagataccaggtaaaacgttgtttcccctgcccatttccataggcaattgggccaggtttccatcccagaccgtattagctgtgatcagtaggcggagtcat

SEQ ID NO: 454851 - DNA, 558 bp, Homo sapiens
cgaactctacaagtgtcgggatttttgtgtttttcacactgtattttgtacatctagaaacaatgtttggcacataataggaacacaataaatattgtacctacctgtaagaagtagtatttttgtctagagtcaattatttaaaaacaaataaacccactcaagctaggttaggcaaagggggatttaggttcaggaatacaggaaactttgcagacccccccaagtgacaggaaatacagccagactacacggatactaggaagtgttgaggcagatcatttgtttctgtctgtccctttggggccatgaggtctcccatacatggtgcgtctctgttcctaatttcttttctgcagatagaagcttcactgcaaagtttacagctcctctttcttcacataagcttgcacattaatttggtttgctgtaatagtaactctgccttcaatttcacagataccaggtaaaacgttgtttcccctgcccatttccayaggcaattgggccaggtttccatcccagaccgtattagctgtgatcagtaggcggagtcat

SEQ ID NO: 454852 - DNA, 558 bp, Homo sapiens
cgaactctacaagtgtcgggatttttgtgtttttcacactgtattttgtacatctagaaacaatgtttggcacataataggaacacaataaatattgtacctacctgtaagaagtagtatttttgtctagagtcaattatttaaaaacaaataaacccactcaagctaggttaggcaaagggggatttaggttcaggaatacaggaaactttgcagacccccccaagtgacaggaaatacagccagactacacggatactaggaagtgttgaggcagatcatttgtttctgtctgtccctttggggccatgaggtctcccatacatggtgcgtctctgttcctaatttcttttctgcagatagaagcttcactgcaaagtttacagctcctctttcttcacataagcttgcacattaatttggtttgctgtaatagtaactctgccttcaatttcacagataccaggtaaaacgttgtttcccctgcccatttccatwggcaattgggccaggtttccatcccagaccgtattagctgtgatcagtaggcggagtcat

SEQ ID NO: 454853 - DNA, 581 bp, Homo sapiens
aacctcaattagccaagatataggtgaaaatattagctgaactgctattatcgaagatataaggtcatcatggctaaagattgaactctggctcatctccaagaactaggaacaaagttatgatttgcataattcatatatttgcaagttgttttttctgaaatggacactaactgtaataatattttatttgtggccactgggactctggacatctaaataaattcagtctgtaaatgagatatttggctatagctttctttttattataaatcatcaaaactatatagcatgttacatgcattgcatgtatattaatttctggatttccatytttcctttgagctcttggccttaagctcaaattctcctagttgtggatactaacgttttcagacttcctattaaggaatttgcctatttgggtctcatgggggagaaaaagccaatgtatttgattcctgatgtaaaccattccaagggaaacaatggtctttggtttgccttggaaacaaatgtttctgattgtattatttatagacctggttattacgttgtccagaccttcatcttcaagtcac

SEQ ID NO: 454854 - DNA, 296 bp, Homo sapiens
acctggggtaagtgtattctaggcagcacttaagagtagatccaaattttttgaactcttgtatatatctttcctagcctaaactcasatatctagaattaactgctatgatgggttaactagaattaacaactattaccacatatctagaattaactactatgatgagtcaactagagcatccattcatttctctgttctcatcatcccatttaatcacttaagtatgcttaatattatataatatgctgtctaacattgtagatgtattagtttcatgtgacatacattcatta

SEQ ID NO: 454855 - DNA, 441 bp, Homo sapiens
tttcaacattactctctcaatagctgaaagaacaactatacatgaaaaaacaaccaccaggcgcggtggctgactcctgtaatcccagcacttcaggaggctgaggagggcagatcacctgaggtcgggagttcaagaccagcctgaccaacatggagaaaccccgtctctactaaaaatacaaaaaattagccrggtgtggtggcacatgcctgtaatcccagctaattgggaggctaaggcaggagaattgcttgaacccgggaagcagaggttgtggtgagcagagatcgcaccattgtactccagcctgggcaaaaagactgaaactctgtctccaaaaagaaaaaaaaggaaaagaaaaaacagtaaggatacacaaaatctgaacaacactatcaagttatggaagcttacagatttcttaaagcacatagttct

SEQ ID NO: 454856 - DNA, 522 bp, Homo sapiens
gcagacaaaaatataatctgtagacaaaatattaaaaacaactgtttgaaggctctgaagagccataaaaaagcaggcaaagtcttaagggaagttgatcattgaatgaagaaaaatttcacaacatagaatctggcttgttacagtttcgagctgggggcaaactctggcccacctcactccatgtgacttaaactcaagcagacagcaacagttttctcggctaaaaaggagtctgaggataggtttgggagctcacaaaatggctggaaagtgagagagaaaaccttgggaaaaatgaagtcatggagaagaaaaatgaaatttgtatattaattgcaggtgctttgctaagtcccaaacgatgtataagcaagacaacctctaaggaacacattagaacaaggcagttagaagtgtaagataataaagyaggtatttggcctgttggccaccacaacgcagctgaatttgaagtttgagtcaagccaaattaactgtctgctaagcaaaacaacagtt

SEQ ID NO: 454857 - DNA, 592 bp, Homo sapiens
cacccaccccattccccacttggcaaacaaaatactctccctagaaatccatgcaggactatgtagaaatgttttttcactgtcacataatgttcaaaaaaagaaaactgataaaattttaatcatttatgatagcaattgttttgtctgtcccttttctggcataaatagaaaccaagcctctattacatctcctgaccttttgtcaatgctctgtcagtacattctaattttaaaggagttttgatgtcaaaatggtttggcaaattttgcagtggaatgtatggcagggagtggcatctctaaatccaaattaggcaggaggattcaagcaaaacttgggtaaagtgatcacttcaaaaggatgaaggatacgccatatgtagagggagagcctgaatattcattcattcactgagcatttgctgtacacctactatgagacagacatgaagctgagggccaggcctacaataggaaacaagttggacatggttcccaccctcatgaagtctgtggtctggtgggagaacaagtaaaygattaaacaagcaacttgaatagaatgtgcataaattgcaggggaagtaca

SEQ ID NO: 454858 - DNA, 541 bp, Homo sapiens
ttcttttcctttattgcatgattactgctattcacccaggctttctgggaccatatccccaattaccacaccaatgtagtaaytagataaaaagactccattatgaaagcgttctggacatattaggatggggtttgaaggaagggatcttgctccttctctgtctcaagcctgtcctcacattcatgcctttcccatgacttgttggcccatttggccaaggaggtcttctctgataaataggcagctggatgctaacttgtgttcctagacaccccagtactcactgccccaacccaggaattaatgttgagagcagacagagcacctaactagaaaagacctgcagaaacacatggaggcagagaccaaaagatacagaacttagcatacatgggaagggaagcccacacaaattatacgaggggaaatgtacgatgtcaagaatcatttgttctaaacttcttcactaatttttttcaaaacttggcatcttaatggaaaatgacaataaacacattgggtagtgaagtcaaatcaa

SEQ ID NO: 454859 - DNA, 578 bp, Homo sapiens
ttctcaagcagtgaagaggggtgacattaatatgtgatgaatattttccgcagactcccattgaagcagctctgtgggcttgggcttccctgggctttgagacatttgtgtgtattcagtcttgccatctgatgagatggaagacagcatgatcttattgcacatcagtyactccttagcactcttttttcagattttgcagcatatttatcaagttctttgtgactttctacatggaccctttagctggtcacgtgtagaacaatggcggcagtgtggacttcaccccctgttccatggtgtttgggatagctgagccttagtgtgcaaggagagcaatgaggaaagggaagacagcagatgtgccatgaggaattagcaacggagaatctgttttgtgctgggcctgttctttaggtaaatcacaaaagatgcccttcttaagtaacatcccactgaggactgataaaatgtactatttcattacccgggatgtgtaaaatagagttcttcctattccttctcaagttcttatatttcattaaaattttcccccaacatctagtcttctgtaattt

SEQ ID NO: 454860 - DNA, 578 bp, Homo sapiens
ttctcaagcagtgaagaggggtgacattaatatgtgatgaatattttccgcagactcccattgaagcagctctgtgggcttgggcttccctgggctttgagacatttgtgtgtattcagtcttgccatctgatgagatggaagacagcatgatcttattgcacatcagttactccttagcactcttttttcagattttgcagcatatttatcmagttctttgtgactttctacatggaccctttagctggtcacgtgtagaacaatggcggcagtgtggacttcaccccctgttccatggtgtttgggatagctgagccttagtgtgcaaggagagcaatgaggaaagggaagacagcagatgtgccatgaggaattagcaacggagaatctgttttgtgctgggcctgttctttaggtaaatcacaaaagatgcccttcttaagtaacatcccactgaggactgataaaatgtactatttcattacccgggatgtgtaaaatagagttcttcctattccttctcaagttcttatatttcattaaaattttcccccaacatctagtcttctgtaattt

SEQ ID NO: 454861 - DNA, 578 bp, Homo sapiens
gggcctttttttttttttttttttcccactttagcacatcccacccaacatagcatctattagagttaactgcattaggcagatattcactaagagcttgttgaatgtaatcctctttttttttttttttaaactaagcattttctgtgtcttgtttgaagaaattaaatgactgaagtttctgaaraacattggtgagcatgcagtgactttgatcctggacaacaccttctcacccctcgccggtggaggcctgatgagtcttgtgccctttgcaagaggcatctttggtttcatcagtctctcagtgtaagggagactttctcatcagaagactttttagttttctctttctaacatttaacttccaagcaggaatcacatgtacccttaaccccaagttttatattttcgccagtgattttttttaaacttatagtcaacatgcttgaaattctgaaagttctttaaaaaacaaaaacaaatcccaaactcttgtaagagtagaaaaaacagcttgacaaagtaaaataatcaattgcaagttggtgaacctttaaagagcattaattcaattg

SEQ ID NO: 454862 - DNA, 474 bp, Homo sapiens
atatatgagtatgactttgtggcactaggaggcccaagcaaaagtaactcttttcccccactcattcagaaccagttgagacataggcacaaggatcaggcagattgaattcaaaaccttagctttttggtgtattttaactgataaaacttcactggggaaagcttttggcaaagtgggcttgctaatcgttcaccctgattaatctggcttatctacctggtcacagaggtcctacttcctctgcrtctaatgaagcagagactgttttgctaagtttatcatttggccaaaagatcgggtgagagtgcacctttgctatggataggcagaactcatgtgtacaatagagaagggtggggctgagcagagctgcacttgctcagtacctctctgaaactcaccagtcagtcttctttcaaggtagctgttaccaaccaaatcatgtcccctgaccctccttccaaattcata

SEQ ID NO: 454863 - DNA, 474 bp, Homo sapiens
atatatgagtatgactttgtggcactaggaggcccaagcaaaagtaactcttttcccccactcattcagaaccagttgagacataggcacaaggatcaggcagattgaattcaaaaccttagctttttggtgtattttaactgataaaacttcactggggaaagcttttggcaaagtgggcttgctaatcgttcaccctgattaatctggcttatctacctggtcacagaggtcctacttcctctgcgtctaatgaagcagagactgttttgctaagtttatcatttggccaaaagatcggrtgagagtgcacctttgctatggataggcagaactcatgtgtacaatagagaagggtggggctgagcagagctgcacttgctcagtacctctctgaaactcaccagtcagtcttctttcaaggtagctgttaccaaccaaatcatgtcccctgaccctccttccaaattcata

SEQ ID NO: 454864 - DNA, 526 bp, Homo sapiens
catgctgaaccactttgtattgtctcataaatcactgaggatctgtttgttttattctcaatatttttttctttctgtgcttcattttggatagttcctatttctgtcttaaagttcaacaattatttcttttttgatatctaaaccataaaatttttatttaaaatgttatgtttttctctctcaaagttttttggctcttttaaaatctaccttttctgttctagctgtgttaatgctttcctttaaatctttgagcatagtctataaattccataatgcctgtcagttctacttctgtttccactattgatgtttttcttctgaatgttggtcacattttcctgctttttggtgtgttctattaatttttgtttaaatactagacattgtaaatattgcattgttgagtgtttcattttgttgttgtctttcaaagttttgagctttgttttagcaagtgaagttacttgctgacctattaattaagttactygcagatgtatttaatttcttttaggtttaa

SEQ ID NO: 454865 - DNA, 499 bp, Homo sapiens
cattctaactgggataagatgatatctcattgtgtttttaatttgcatttccctgatgattagtgatgctgagcattttttcatatgccggtttaccatttgtatgtcttcttgtaagaaatgtttattgagattctttgcctactttttagcagaattttttttgttttttttgctgttgagttgcttgagttccctgtgtattctaraaattagtcccttctcagatgaatatgttgcagatattttctcccattcatcaggttgcctcttcgccctgttgattatttcctttagtttaatatagtcccatttgtctattttgttttttgttccttgtgcttttggggtcttagccatggccagaccagcatcctgaagagtttttctgttttcttctagtagttttatagttttggtttctacatttaagtctttaatctattttgagttgatttttgtatatggtgagagatagggctctagtttcattcttctg

SEQ ID NO: 454866 - DNA, 581 bp, Homo sapiens
aagctacttatccaccttctttcacttgcattattctagctgtgctagcagctagttggatggtgcccacctacagtgagggtgggtcttcatctcccagttcactgactccaatgtcagtcttctctggaagcacactcacagacacacccaggaacaatgcttcatcagccatctaggcatccctcaatcaagtcaagttgacacctaatattaaccttcacaaaatttatttttgacatragaaggatagaatggatactgaagaggaaaccagcaaatattccttgtgaccttcttcccttgttatttttcattaggatgaagggttcactttgaaaatcttgccaactctcttctattatcttctttttatagtctccaaattacctgctctggggatcaagcaatggaattgtttattttctctgggacttacatttacccccttaaaacatggagtatttttgttgttttgtccaaccgtcctccctttctctatcatgggccctagttacgcttcacccagttcttgtagattacaattcaattcttgtggattacaattacaacagatggac

SEQ ID NO: 454867 - DNA, 552 bp, Homo sapiens
tgtctgtgacagttctcagaacttctcaagaatagggctagggttcccagagatgggttgcaccctgtggtcaagtaggagtgtgtgtgtgtygtgtgtgtgtgtgtgtgtgtatgtgtgtgtgtgtgtctgcacacctctttaaaaactggagtagttatcagtctgtcagtccatatttggaggtgagttgcttagtcagtatctaagaggttgcaggaagaatagatagataggttgaagaaaaagcctgaaggactgaaagacaggctgaaaggtggtcttaaggacaaaggaagagaatgaaccaatggttggaaatagtaggacacagatgaggtatggatagatggatgtcagttaagctcagaaatcggttatgatactgagtaattcattgagggtcattcagtcaacaaatgcttattgataatttaatataatagttactattgattgagctcatgctttgtatcatgtactttactgagcactttattgatttaatccccacaatgatcttattatcccctcttacaaaaagaaaacaga

SEQ ID NO: 454868 - DNA, 609 bp, Homo sapiens
taaattctattatattttacataatgttatccagaaaatttgttccttgtggcattggggttgtaagataaaaaggagagattctgcaatttagatcaaaagaggactgatggagagaagaaaaaaaaagagagagaccactaagtgtgggtaccaactaaccaccaggyccacatgatctagtttttaggaagaaggttggggctaatgggccctggagaacttgggaaggcactgcaaatataggtttggaataaagtttattggtcctgacccagctctcattgtcagtgatgataaggttgcataagagcccaacaggttgaaagtggcactgtgtattgttagaatcagttttagcaagttatagggatgatcttaactccctacaccttgcatcttaaaaacagttttttaaaaagcttttcctcacctctttatagcagtgacgagcaaaattcggcttgtgaccatctaaatatatcaaattccctattgcattgtctaagtcttatttttatatcttagtaacgttggtgaaaaggaccaaagagtctacttactatctgcattactctattctgcacattaggcccttaaacaggagaa

SEQ ID NO: 454869 - DNA, 603 bp, Homo sapiens
ttgtcttatgtcataataaaaattaaatgtagtagaatatctttaacttcaccttttgtgtctcaaaggagtctgtggccagcttataccttacttactctaagacatgatggcaagtcaggcttacgagacacactatttctttttttctccatttgaacctttagtctcttatccagtgcctccctctatagtttcattttcagtaaattttggtcgcagtatctgctgaaatagtctactatttagtgccttatgttttactaactcattataattcatagaatcatccatagatgtttaccatccaggaaggaggagtttaagtctgagctgccagctttcctcagtggaaatcaagtgaagtcatcatctttcagttcacagatcctctttccacctggcatcttgttctsttgtgtaacactgtggctaatccttttcttggtgcagatcttgcattctcagaaaccacggtttctgtattgacctcctattactgaaacagagatgcacagctctgctttctagctcagtagaggattcttggaataaaaagtttaactcattccaagaaaaagttttaggagtgcagcacttaaa

SEQ ID NO: 454870 - DNA, 603 bp, Homo sapiens
ttgtcttatgtcataataaaaattaaatgtagtagaatatctttaacttcaccttttgtgtctcaaaggagtctgtggccagcttataccttacttactctaagacatgatggcaagtcaggcttacgagacacactatttctttttttctccatttgaacctttagtctcttatccagtgcctccctctatagtttcattttcagtaaattttggtcgcagtatctgctgaaatagtctactatttagtgccttatgttttactaactcattataattcatagaatcatccatagatgtttaccatccaggaaggaggagtttaagtctgagctgccagctttcctcagtggaaatcaagtgaagtcatcatctttcagttcacagatcctctttccacctggcatcttgttctcttgtgtaacactgtggctaatccttttcttggtgcagatcttgcattctcagaaaccacggtttctgtattgacctcctwttactgaaacagagatgcacagctctgctttctagctcagtagaggattcttggaataaaaagtttaactcattccaagaaaaagttttaggagtgcagcacttaaa

SEQ ID NO: 454871 - DNA, 408 bp, Homo sapiens
ttttaggagtgcagcacttaaaaatcaggtaatattcaggcaatttatcagagacaaatagtagattagtattttgaatttcaaaatttcagagccaagttgtgtgctatagagaagcattgyggtataatacagagatgggatggtcttaacttctccatgcaaacaaacgtgaagtaaggtaaaggagaaaatgcatttgatgtcttaacactcaaagtatgctgtgtttattttacttctgtgaagagtaaaagtcattccataattttctccttatttcctcattgagaaaaaggaaaatgaaaatcgaatactagattgattaataaatactcagagcttcttcttttagaattttcattaattgaaatcaggtaaatgtctgattttggttatgtaaccaag

SEQ ID NO: 454872 - DNA, 408 bp, Homo sapiens
ttttaggagtgcagcacttaaaaatcaggtaatattcaggcaatttatcagagacaaatagtagattagtattttgaatttcaaaatttcagagccaagttgtgtgctatagagaagcattgcggtataatacagagatgggatggtcttaacttctccatgcaaacaaacgtgaagtaaggtaaaggagaaawtgcatttgatgtcttaacactcaaagtatgctgtgtttattttacttctgtgaagagtaaaagtcattccataattttctccttatttcctcattgagaaaaaggaaaatgaaaatcgaatactagattgattaataaatactcagagcttcttcttttagaattttcattaattgaaatcaggtaaatgtctgattttggttatgtaaccaag

SEQ ID NO: 454873 - DNA, 408 bp, Homo sapiens
ttttaggagtgcagcacttaaaaatcaggtaatattcaggcaatttatcagagacaaatagtagattagtattttgaatttcaaaatttcagagccaagttgtgtgctatagagaagcattgcggtataatacagagatgggatggtcttaacttctccatgcaaacaaacgtgaagtaaggtaaaggagaaaatgcatttgatgtcttaacactcaaagtatgctgtgtttattttacttctgtgaagagtaaaagtcattccataattttctccttatttcctcattgagaaaaaggaaaatgaaaatcgaatactagattgattaataaatactcaragcttcttcttttagaattttcattaattgaaatcaggtaaatgtctgattttggttatgtaaccaag

SEQ ID NO: 454874 - DNA, 563 bp, Homo sapiens
acaatcccaccagcaatgtattagagttccagtttcttcacatctttgccaacacttgttatgtcttttttcatttagccattctagtgggtatgaagtggtattttgttgttttgtttccctaatgattagtgatgttgagcatcttttcatgtgcttattgggcacatggagaaatgcctactcaaatacattgcccattttaattggattacttgtctattattgagttgtaatagttctttgttctagatacaggtttcttaacagatatattatttgcaaatattttctcccattctgtgagttgtcttttcttgatgctgtccttgaagcacagaagcttgtaattttgatgaagtccaatttatctgtttttttcttttgtttgtgcttttgacgttatatccaagaaaccactgcttaaccaaaggtcagaaaacccacttctatgttttcttctaagaattgtagttttagctcttatatttatgtttctgatctatttatttattttttgagacygaattttgctcgtctcccaggctggagtgcaatggtgc

SEQ ID NO: 454875 - DNA, 630 bp, Homo sapiens
ttttttttaaggtgcagttttgttgagttttgttataaatattaaggtcatgtcatgaaaataatttagaaatttcccctactyttctatactttgcaatgttttaggtattctcaaagtccctgattttaaaaggtgtggaaaaatccctgtaagaaactatatgggactggcgcttttctgtgaggaaattctattacaaatttatttatttcttttgtagtcattgttttgtttaggctttttatccacattagggtcagttttgttaaatttataatgtgagccatttcatttaggcttttaggttgtttgcagagaattatacaaaatattgtttttaaaaatagactttatcatacttccccttgtcacttctgttttagtatatttgtcctctctgtcttttggctggcaaacaatgatctcatttgcttatttcttagttctatcattacaaaattttctaccttattaacttctgcttttatgttgatcaattccatttttttgcttctgtcctgttcaggataaaagtctgaaataagtctttggggctaaaaatcaaggtgttggcaggtggtgttccttttgtaggctttatgggagaatccatttctttgccttttc

SEQ ID NO: 454876 - DNA, 555 bp, Homo sapiens
acacacacacacacacacacacacacacacacacagcctgctcaaagtgagtctgccctggaacgtgggaagctggcctagctctgcacaagaagggaaccctgtataaactgacttagcrgagaaggtcatcccagaggaaatgaaccctgtgcgctgagctctgaagagcaggagggctggggtggtacaggggatggtggtgtttgtgggactgaaagtaagattatctggaattatctgggtgggtccaatctaatcccagaagcccttaaaagcaaagaacttagcctggaaggagaagacagttgcatgcatgtactacagtttggttatttacttcccagtagatggacatttgggttgcttctagtttggggctgctgtaaacacttttgcgcaaggctttttgtggacatgtgtttgcatttctgtagatgctgtggtgaaaaggaagaggtatgtataaatgttttaagaaacttgcaaacagtcttccaaaatggttgtatcattttacaccatacagtaatgtatgagaggtgctgttgcatt

SEQ ID NO: 454877 - DNA, 569 bp, Homo sapiens
catctgcaaaatcctttcagcaatgtaagcgaacatattcataattttcaaggattcagatctgatcattttgggagattattcttcagtctaccacaatgtgaaaatctctaaataattgcagcaatacttttgagagagaaatgtttagatagctgagatcatatcttagctagagaggcaagaactgataaaaccctggtttgttcaataaatatttatagagcgcctactttattcagagcctgtaatactgttgaagatacaaaaattaaaccttggacatggtcttggcctcattgagcatattttgtattaataatttttaaaactatcataataagttaagcaatgaagtgtgtgatactctatgattgtagaagctctggataccatggggtatttaccacagttaaagactcaggcctaaacgggaaggattagtagtacagataaatagggagagaaagattattctaastactgtgaacagcatatgtaaaggctcaggagtgagtaagaaagtacatatggagctaagggattatgaatattattagagcataagt

SEQ ID NO: 454878 - DNA, 558 bp, Homo sapiens
ctttaaggtgctcttaatttcttactatggattttagttamtaacaatgtcattttctctcagcctgatgacttcctttaatatttcttgtaagacaggtctgctaaccacaaaattctgtagcttttgcttatctgggcatgtctttatttcattttcatttgtagaggatagttttgctggatagagaattttgggtggaattttttttttctttcagtgcctctccattatcttctgatctccattgtttgtgatttaaagtcaggttaattgtattactcttctctttcacatgatgagtcatttttctcttgttgagaacaaatattgatttcagtatattatttgtggattttggctttctgaggtttaactataatgtatctagacatagatatctttgtgtttactgtgtttgagagatgttaagcttctaggttcttttgattaatctttttcacaactttgagaagtttggggccattattttttctttatctttctctcccttctctctttctgagactccaattttacacatgtgggtatacttga

SEQ ID NO: 454879 - DNA, 658 bp, Homo sapiens
tgggttgcttctagtttggggctgctgtaaacacttttgcgcaaggctttttgtggacatgtgtttgcatttctgtagatgctgtggtgaaaaggaagaggtatgtataaatgttttaagaaacttgcaaacagtcttccaaaatggttgtatcattttacaccatacagtaatgtatgagaggtgctgttgcattagcaatgattagcctttttcattttagcaattctggtaggtctgtattcgtgtcagggggcaattttgatctgcacttccttgatgattaatgacgctgggcatcttttaatgtgctgatctgccatatatcttattttgtaaattgtcagttcaaagcttttgtgcattttaaaatttggatgttagtctttttattattgaattgtagcaacttttagaaaatatattcttaacataagtcccttgacagatacatatgaatattttctgtcagtctgagatttgcctgtttcttaagaatgtcttttgatggtcagaagatttaaattttaatgaactcaaatttttcaaaacaatgtggccagtgctttctgtcarttccttaacaaatttatgtccacccccaaagtcataaagatattctcctagtttttcttctaaaagctttctagttttactt

SEQ ID NO: 454880 - DNA, 628 bp, Homo sapiens
aaaggcacaagaggccctagatttctatggggaagtaaggaccagagacaaaaagggagtaactattcccagtcagaggcgctatgtgtattactatagctacctggtaaagaatcatgtggattatagaccagtggcactgttgtttcacaagatgatgtttgaaactattccaatgttcagtgkcggaacttgcaatcctcagtttgtggtctgccagctaaaggtgaagatgtattcctccaattcaggacccacacgatgggaggacaagttcatgtattttgagttccctcagccgttacctgtgtgtggtgatatcaaagtagagttcttccacaaacagaacaagatgctaaaaaaggacaaaatgtttcacttttgggtaaatacattcttcataccaggaccagaggaaacctcagaaaaagtagaaaatggaagtctatgtgatcaagaaattgatagcatttgcagtatagagcgtgcagataatgacaaggagtatctagtacttactttaacaaaaaatgatcttgacaaagcaaataaagacaaagccaaccgatacttttctccaaattttaaggtgaagctgtacttcacaaaaacagtagaggagccgtca

SEQ ID NO: 454881 - DNA, 465 bp, Homo sapiens
ccaacactgctattaaatgtttacattctaccattacatttttaattatcaggagcttttattggcgagaggtgtggtcttctaaatggtttttacagtatcctgttctcatttcatgaatgcagtatcttctcttatttctctgagaatattaactcagtactttttctacattttaaaagttttcttcagctacctacaatgtctgtgtctattttcaaagtgacttttaatgttgcttttggcctgcctttcatgttggaagttttatacatgtttagggatgctgtgcgtcayctgtgagcatggtttgtaagttggctggcttcattgtagggtggttaggcagagaaagccttcttgatggcttatcgcctgtctctagtgctttctagtacatataatgggtttctctgtagaaagatctcatttctagccatttattcctgtttgagaaaagtcaca

SEQ ID NO: 454882 - DNA, 465 bp, Homo sapiens
ccaacactgctattaaatgtttacattctaccattacatttttaattatcaggagcttttattggcgagaggtgtggtcttctaaatggtttttacagtatcctgttctcatttcatgaatgcagtatcttctcttatttctctgagaatattaactcagtactttttctacattttaaaagttttcttcagctacctacaatgtctgtgtctattttcaaagtgacttttaatgttgcttttggcctgcctttcatgttggaagttttatacatgtttagggatgctgtgcgtcatctgtgagcatggtttgtaagttggctggcttcattgtagggtggttaggcagagaaagccttcttgatggcttatckcctgtctctagtgctttctagtacatataatgggtttctctgtagaaagatctcatttctagccatttattcctgtttgagaaaagtcaca

SEQ ID NO: 454883 - DNA, 272 bp, Homo sapiens
acactgctgcttgaagtttaagttgctgatgacttttcaagtggataatttggagataattaccacattttaaaaatgtatatgccctttacccatcaaytccattgtattaaaataccttcagaaaatagagatacatgcactttttttccccagcatttatgttaacaagaacccatagaatggtatgtggccattgaaggtggcaataggtggagaagtatgttgatatgtgaagatgcattttgttacagccagtgaggaaaaacaaa

SEQ ID NO: 454884 - DNA, 272 bp, Homo sapiens
acactgctgcttgaagtttaagttgctgatgacttttcaagtggataatttggagataattaccacattttaaaaatgtatatgccctttacccatcaattccattgtattaaaataccttcagaaaatasagatacatgcactttttttccccagcatttatgttaacaagaacccatagaatggtatgtggccattgaaggtggcaataggtggagaagtatgttgatatgtgaagatgcattttgttacagccagtgaggaaaaacaaa

SEQ ID NO: 454885 - DNA, 562 bp, Homo sapiens
ataactacatttgctttcccagtgcctggtttaggaatgagcatgtggtgtgacccagctaataaaatattacagaaagggctgagcacggtggctcatctctgtaatcccagcactttgggaggctgaggcaggcggatcacgaggtcaagagactgagaccattctggccaacatggtgaaaccctgtctctactaaaaatacaaaaattacctgggcatggtcgcatgtgcctgttgtcccagctcctygggaggctgaggcaggagaattgcttgaacctgggaggtgaaggctgcagtaatctgagatcatgccactggactccagactggtgatagagcgagactacatccccgaaggaaaaaaaaatttacaaaaagtcccctgcatgcttctgaattttctcccaatttaaaagacacatgtgaagaaaagcagcccttccagcctttagatactgtcttgtgagaacatggtgtttggagctgttgctaagtagccaaccatgaagggagacatgaacaagacactgccaacagcataactgaaagaggaaca

SEQ ID NO: 454886 - DNA, 580 bp, Homo sapiens
aaattggatacactttaccaatttcatatcttgcctgtcaggatagacataatacccatttacatgtactagcttatgtgtataagcatcttgggtgctcaagtgttcatcttgttaaattaccaccaaggctaaaaggcagggacaacaagcaaacttcgtgtcccattgggacatgaygtaatacaaattgctaatttatagtcctttgatggccaagaaactgtgctgaggtcacttatctaaagtgggcaaagatttaggtgaagattttcccattgctttcccattgctttgaattatattgtaattcaaagtcagctagggatcaaataaataagagctatctgcaggctgaaaacaacagcatcaacaacaacagcaacaactataataataataataataataatggtaatagtagtagttgtaaactgaaagttaaagtctacacttcataaaattaataaaatacaaaccccctttagctaatataagattacaggaccaaaaacaccaaattacaaataacagtctataagagaagatgaatcctactatatactgttttttgtgttgc

SEQ ID NO: 454887 - DNA, 512 bp, Homo sapiens
gtttccctcctgtaagaaagcaaaaacaatttataattcacaaaattacatatttctccactgaactaaaaatcttctataagatgctatgaacttaaacatgcaatatagagagaaagtaaatgcaaagcagtcccgtccctttcactcctctgtgctttcccacacactgccttgaaacacccctcctctgcctccccayattaacttcagtcatctccaaaactcactttatttaccagtccccaaaatccttgcttctatctcagcatttagcacagtccattgtaattatttcattgtttcccactgaaaccaagagattctcaagggcaagggctgtatcttttttctctataaccctaaaacctaagacatagtagcgaatgctttaagtttttaaaataaattaatgatctaaattattacctctagagaagtgtttcttaaactatatttcaaagagtagttgttttaccgaaagaactgtaccccaacaaaaagattccatg

SEQ ID NO: 454888 - DNA, 512 bp, Homo sapiens
gtttccctcctgtaagaaagcaaaaacaatttataattcacaaaattacatatttctccactgaactaaaaatcttctataagatgctatgaacttaaacatgcaatatagagagaaagtaaatgcaaagcagtcccgtccctttcactcctctgtgctttcccacacactgccttgaaacacccctcctctgcctccccacrttaacttcagtcatctccaaaactcactttatttaccagtccccaaaatccttgcttctatctcagcatttagcacagtccattgtaattatttcattgtttcccactgaaaccaagagattctcaagggcaagggctgtatcttttttctctataaccctaaaacctaagacatagtagcgaatgctttaagtttttaaaataaattaatgatctaaattattacctctagagaagtgtttcttaaactatatttcaaagagtagttgttttaccgaaagaactgtaccccaacaaaaagattccatg

SEQ ID NO: 454889 - DNA, 512 bp, Homo sapiens
gtttccctcctgtaagaaagcaaaaacaatttataattcacaaaattacatatttctccactgaactaaaaatcttctataagatgctatgaacttaaacatgcaatatagagagaaagtaaatgcaaagcagtcccgtccctttcactcctctgtgctttcccacacactgccttgaaacacccctcctctgcctccccacattaacttcrgtcatctccaaaactcactttatttaccagtccccaaaatccttgcttctatctcagcatttagcacagtccattgtaattatttcattgtttcccactgaaaccaagagattctcaagggcaagggctgtatcttttttctctataaccctaaaacctaagacatagtagcgaatgctttaagtttttaaaataaattaatgatctaaattattacctctagagaagtgtttcttaaactatatttcaaagagtagttgttttaccgaaagaactgtaccccaacaaaaagattccatg

SEQ ID NO: 454890 - DNA, 512 bp, Homo sapiens
gtttccctcctgtaagaaagcaaaaacaatttataattcacaaaattacatatttctccactgaactaaaaatcttctataagatgctatgaacttaaacatgcaatatagagagaaagtaaatgcaaagcagtcccgtccctttcactcctctgtgctttcccacacactgccttgaaacacccctcctctgcctccccacattaacttcagtcatctccaaaactcactttatttaccagtcccmaaaatccttgcttctatctcagcatttagcacagtccattgtaattatttcattgtttcccactgaaaccaagagattctcaagggcaagggctgtatcttttttctctataaccctaaaacctaagacatagtagcgaatgctttaagtttttaaaataaattaatgatctaaattattacctctagagaagtgtttcttaaactatatttcaaagagtagttgttttaccgaaagaactgtaccccaacaaaaagattccatg

SEQ ID NO: 454891 - DNA, 641 bp, Homo sapiens
agagcctgcacccaggtggtggcagaggggacggaggggtctcctccaacccttgttgattttatctaatgttccctgcttcagaatatgtttctgacaatgatattttgtgcagggcataaaactcattcataatattcacattggtgacgctgattaattaaagggtaatagaatgagaagcacctttcagaaaatatgcagacaaaagcaatgattctggtacatagaggacagaaaggctttatttcacagttaccaggagtaaccatttgagtgtgagagccaagccccaaagtggactcacctctcagattaagttcagacccgttcaccatcactaacacagtaaaatgttatatttgctgtttgttttccctgcaaacttagcccaactggcmctattctaccgggaaaaggggagcccaggctatttcctctggggctcactagagtcccctgccacccttttggttcctgtccagatttttcctagaccctctgttctgcttgcttcacccaccacctcccatcagaaaaaaaatcaataagatctttctcagtaagatataatgaagacttcagcttttacattctcacaaaggacaaaaccttataactgatgaaagctatgagaagga

SEQ ID NO: 454892 - DNA, 641 bp, Homo sapiens
agagcctgcacccaggtggtggcagaggggacggaggggtctcctccaacccttgttgattttatctaatgttccctgcttcagaatatgtttctgacaatgatattttgtgcagggcataaaactcattcataatattcacattggtgacgctgattaattaaagggtaatagaatgagaagcacctttcagaaaatatgcagacaaaagcaatgattctggtacatagaggacagaaaggctttatttcacagttaccaggagtaaccatttgagtgtgagagccaagccccaaagtggactcacctctcagattaagttcagacccgttcaccatcactaacacagtaaaatgttatatttgctgtttgttttccctgcaaacttagcccaactggccctattctaccgggaaaaggggagcccaggctatttcctctggggctcactagagtcccctgccacccttttggttcctgtccagatttttcctagaccctctgttctgcttgcttcacccaccacctcccatcagaaaaaaaatcaataagatctttctcagtaagatrtaatgaagacttcagcttttacattctcacaaaggacaaaaccttataactgatgaaagctatgagaagga

SEQ ID NO: 454893 - DNA, 368 bp, Homo sapiens
aagattttttttttttgagatgaagtctcactkttgtcaccccgactggagtgcaatggtgcgatctcggctcactgcaacctccaccctctgggttcaagcaatagtaggacatcctagtatttgtgacaatgtggatgaacgtggaagtcatgctaagtgaaataaataagccacacagagagataaatattacatggtctcacttatacatgggatctgaaaaagtcgaactcatggaaaccaaaagtagaagagtggttaccagcagtcagggggtgaggaaaatggagagatattggttcaagggtacaaatttttaaatataaaatgagtaactttctggaaacctaatgtagaacatagag

SEQ ID NO: 454894 - DNA, 503 bp, Homo sapiens
ttggctaactgaggtcttcttgtcatgttggagaaagggagcaagatggggattctgcrcaactcaagccccaacatgtggggacagactcaagtagatcaccactgaggctttttgtggtaatgtggatactgggaagcctgaggaaggctgtggccacaaacaggctcattgaatttaccccttgaaatctgcacagaacttggacagctcactccccgatgagccaccacatttatacctgcagctatgacctttctcttgagcctcagacccttatatcctcctgagcactggttatttctactttgatatttaaaaggcccctgaaaactaactcctctgaaactgttcatgtggacaattgacgtgtcagaaccaaaccttagacttctccaaacttactgtccctcagtacccctttgctgtgaaagcaacatcatcctgacaggtgttcagaatacagctttgtggtatttcttgacttattccctggttgtctc

SEQ ID NO: 454895 - DNA, 573 bp, Homo sapiens
acccatgaagtccaggctgagctggccactggttatctctctgatctaactccagagctgggccttcgctcactctgctccagtataaaaggtcaccttgctgctccttgaatgcacgaagatgcatctgccccagggcttggcatttgctcttccctctgccttgaattgctacccctgatacccaaatgatggtctctcttctgttccaatctctgctgaaatgtcaccttgtcaataatgtcttcccagatcacttgtagtgatcatccattaggaacagtgttgacacccacccccaaaccaccaccccctattaacttcctgccccatttctcttgcagccctcattatcattcagcatgccaaataccatccttatttgtgtatttstctccttcattgctagattgtaagtttgatgagggcaggatttttttccactttgtcactgctttatctccaatgactcttacagagtaagcacacagtaaatgcctgttaaaagaacgattgaattgcatgaggacaaagaaacttttattttactgtcgtaacgccatgacttcctcc

SEQ ID NO: 454896 - DNA, 573 bp, Homo sapiens
acccatgaagtccaggctgagctggccactggttatctctctgatctaactccagagctgggccttcgctcactctgctccagtataaaaggtcaccttgctgctccttgaatgcacgaagatgcatctgccccagggcttggcatttgctcttccctctgccttgaattgctacccctgatacccaaatgatggtctctcttctgttccaatctctgctgaaatgtcaccttgtcaataatgtcttcccagatcacttgtagtgatcatccattaggaacagtgttgacacccacccccaaaccaccaccccctattaacttcctgccccatttctcttgcagccctcattatcattcagcatgccaaataccatccttatttgtgtatttctctccttcattgctagattgtaagtttgatgagggcaggatttttttccactttgtcactgctttatctccaaygactcttacagagtaagcacacagtaaatgcctgttaaaagaacgattgaattgcatgaggacaaagaaacttttattttactgtcgtaacgccatgacttcctcc

SEQ ID NO: 454897 - DNA, 574 bp, Homo sapiens
cagttgtgtaattgactgaagcacaagcyggccagagcagtgtggagatggagatgccgtctgcgctcaagtctaatgatgtaaggaaaggaggagcttccttatgagagtactttccgttctcagcaactctgagcttaggttggtgatgggcaggagtgagcagagttcaagtttgaattctttgaaaggtaaaagaagcagggatgttctggagatggtgagcaaaatgagaaaagctcagaaacttggtgttgaaattggacatggccagggggctagagggaggaagcaaatggaaaccagagggaattgggaaaaaatgccaaagtggggcccatggagttgagaagacacatagagtaccttcgggttcagttcctggcatggccgctgagccaacttccccacagccatgagatccactgctcagagacccgctctccaccccgtatcccctctaatcactgatgggctcatacctaacatggctatacttggatagtgcatggtgcctgacagctttacaagagttgtcacgtaagcaacagtggtacattgcttttcatttatg

SEQ ID NO: 454898 - DNA, 520 bp, Homo sapiens
gagcacggggagggagggaggctgagctcggcctggcatcctgtctgactcggctcccactgggctctcctctctctggcttctgtttcagcaggctccgggcttagtgctgtcgtctctcaacatccgagcagggttatctgtaagagtggaacctctgtgaacatcgagtgccgttccctggactttcaggccacaactatgttttggtatcgtcagctccggaaacagagcctcatgctgatggcaacttccaatgagggstccgaggtcacatacgagcaaggcgtcaagaaggacaagtttcccatcaaccatccaaacctgaccttctccgctctgacagtgaccagtgcccatcctgaagacagcagcttctacatctgcagtgctagagacacagcgccaggaggggatcagagaccgcggcaagaacccctgcagctgctcctccaccccagcaggcccactgagtgctgagaagggaggcgtggagaatggaaaaccacagctttcctga

SEQ ID NO: 454899 - DNA, 604 bp, Homo sapiens
tttctaacaatctttatttaaagaatgggattctgtgcttttcacttggtaaagctgtgagttcagaaataagaataagcaaatcaactgtgtctttcaggyagaccctgatcatctgacccagcacatttccttgaactagagacagactctaaagggctttttgactgcttctcacagctcttcctgccatagaagtttagtaggaaccattagcaattcccaccctctggaatgttacaatcacaaaaatttttaaagcacctttattgagacataagatacatgtagaatacgtaggcaataaacatatgcaaccgatgcaacaaaacccaccctcattgtaagtgtatacttcaacaaattttaacacatttttatacccatgtaaccatgatgacaatcaagatacaaaacattttcatcatctcaaaaagtcccccacatctctttattgaggtctcgttaatttctctcagcattgctttgtagtttttattatacagatctcatacatattttcctaaattttattttaataaattataaatgtactcaataaaaatattctctgccaagatttcacatcagcctgactcagcct

SEQ ID NO: 454900 - DNA, 604 bp, Homo sapiens
tttctaacaatctttatttaaagaatgggattctgtgcttttcacttggtaaagctgtgagttcagaaataagaataagcaaatcaactgtgtctttcaggtagaccctgatcatctgacccagcacatttccttgaactagagacagactctaaagggctttttgactgcttctcacagctcttcctgccatagaagtttagtaggaaccattagcaattcccaccctctggaatgttacaatcacaaaaatttttaaagcacctttattgagacataagatacatgtagaatacgtaggcaataaacatatgcaaccgatgcaacaaaacccaccctcattgtaagtgtatacttcaacaaattttaacacatttttatacccatgtaaccatgatgayaatcaagatacaaaacattttcatcatctcaaaaagtcccccacatctctttattgaggtctcgttaatttctctcagcattgctttgtagtttttattatacagatctcatacatattttcctaaattttattttaataaattataaatgtactcaataaaaatattctctgccaagatttcacatcagcctgactcagcct

SEQ ID NO: 454901 - DNA, 574 bp, Homo sapiens
gaattagaatatcaggtccagaacgtaataatagcaaacacaaatatagtgtttcttatgtactaagaactgttctaaatgctttatttatgtaatgttcatcacaggtttgggggtagttacttattatctcaattttacaggtaaagtcagattgaagagaggctctgtaacttttacaaggttacgtagatgctaaatggcacagacaggactaaagcccatgccgtgtcccaagtccctgctctaatccattgtcacaaggggaggggcacttcagacgctttgctattcctaaaattacaggagtagcscctaccccatctctactgtattaattatttatagtaaatacagagagtgtcgagaattggttctttaaaaaaaaacaaccacaaaaaactaaacttccaaaccccttcttgtgttgagttgagcacaggtgcatggcactctgtgtatgactctgaccaggaaatgagggattggctcttctgaccatgcaggcaggcacttgtccatttagaagggatataaaaagcttctataagcagaagaggaggtgcatgtgact

SEQ ID NO: 454902 - DNA, 591 bp, Homo sapiens
atttacaaagggcacaatttcaaacaatatgaaatcacgttagcagtagcagttcccatttgggataatagggttcaactgtctatggaacaatcagataaaaactagaagtacgcaactgcatagacaagatgtgaaattgagatgccataaagctggactagaggttgagattctgcagattacagcatgtcaataattgaactgtggggacagaaaattccacccaaatatagatttagatcacagagataaaatgcatgggaattaagactgtrgtattctggttccttatggagaataaagaagcctgagagtgaggagtgattagaacatgggatgtaaaaacaaaagagggaaagagagagagtgagagttttgttttgtctgatatttctaagaaaattagggaaaaaaataaaggtaacccaggcagaagaagccacaaacacttcttgggtaacagggaatagtcggtaaaatgttatatgttagtttactgaggtgaacagaaccttttccattgaggttccatttggaaagacataagacttagctaagattccaagaaatcaccaaagtaggaaatga

SEQ ID NO: 454903 - DNA, 526 bp, Homo sapiens
tcagtctcacattatgtatttttctgaccacttagtattttaaagacttctacttgttataaaatcacaatttggaataaatgtggtaaattttagcaaaaaaatatttgatgtaatgtttccactggcaggtatttataatttactgtgaatatttttatgrgtaattagctcataatttacattttaagtctcaatgactatcatttggatataattctttccagtacaaagatacttttagctgtctgtgatttatgagtttgacattgaatccccattttcagactaatgaggggtggcagagttcacagagagtgggattgaagtttgtacgggacagagttgtaggagctgaggtcagggagggaggtagaggccatgttacctagggccttgaaggccgttggaattttattctgaggtaggaatccgttggaaggatttcaacaggcgactgaatatgtgaggaactcaggttgagttgagggtctaaggtgagtgaatagcgggctggatcaatctg

SEQ ID NO: 454904 - DNA, 526 bp, Homo sapiens
tcagtctcacattatgtatttttctgaccacttagtattttaaagacttctacttgttataaaatcacaatttggaataaatgtggtaaattttagcaaaaaaatatttgatgtaatgtttccactggcaggtatttataatttactgtgaatatttttatgagtaattagctcataatttacattttaagtctcaatgactatcatttggatataattctttccagtacaaagatacttttagctgtctgtgatttatgagtttgacattgaatccccattttcagactaatgaggggtggcagagttcacrgagagtgggattgaagtttgtacgggacagagttgtaggagctgaggtcagggagggaggtagaggccatgttacctagggccttgaaggccgttggaattttattctgaggtaggaatccgttggaaggatttcaacaggcgactgaatatgtgaggaactcaggttgagttgagggtctaaggtgagtgaatagcgggctggatcaatctg

SEQ ID NO: 454905 - DNA, 596 bp, Homo sapiens
gttaacttgtacagaaaggccatcatactgttctttgaaatgcacatgttttaggttaatttacaaactacttgaaaagttaggcattgccttcatcttcctttcatttaaaatatactgtaatggcgtagaaatactcagatctaatagagtatgtacatccaaaatggagagctcagaaaattatctggatcctaccatgggattttaaaaacagtttcactgagagataattcacatgtcagacagttcaaccatttaaaatgtacaactcagtgtctgttagtatattcacagtgctgtgtggtcatcagcataatcaatggtagaacattttcaccactctgaaaagyaaccctacatctcttagccatgactgcaaccccactccatgtctctccacctaccccagttgtaggcaaccaccatccacttttgtctccacagatttgcatggtctgcatatttaaatacatagagtcatacaatatgaagtcctttctgactggctctttcacttagcagaatgttttcagaattttatccatgttgtagcacatatcagtagtttattccttcttattgtcaaataatag

SEQ ID NO: 454906 - DNA, 565 bp, Homo sapiens
ttttcccctgatccagaagagaattatgagtctggcaccttttaaaagtttgattaagaaatacaatctattctctctgaagcctgctccctggaggcttcatctgcataataagaaccttggtccccacaacccagatacttctttatattgatttcaaatctttagacgataacttaactctttcaaccaactgccagtctgaaaaatctttgaatccacctatgacccggaagccccctctttgagttgtcccacctttccaaattgaaacaatgtacagcttacatgtattgattgatgtytgatgtctccaaaaaggtataaaaccaagctgtaggctgaccaccttggacacacgttcttaggcccttgagcctctgcctctggccatgctcactcatgtttggctcagaataaatctcttcaaatattttacagagtttggctctttttgtcaatacctgtgaggtaacttctcttatttgcggtgaggaattttgagggcaggcttttcctctttggtatgcacctttttttatgtggagaggatgtggcagctatg

SEQ ID NO: 454907 - DNA, 621 bp, Homo sapiens
tcttcccaaagaccactgctattactggtgtatctggggaaacatccttgcaagcctttccttcaaccactcaaatgccayagaggaaaaacctatttaaacatagcttcctatatatgcctgaatgtccaatacctttgttgggataagacttgctaacaaaattaaatgcacaagtaatttttcaccagaatgaatcaatattagagtgtctcctaaacaagcctgcaccctccaagttgccttattacaatgagaagaaagataccacctgaaatcctaaaagaggctctaaaaaaacaggcttgacttgacaaatcagtttttgaaatacccagacctgggaatgtttaccaatgtgaacagcttcatggatcagggtctctgaaaagccagataaacacctagtgacttaccagaaaatcttaaaacctgaggctttcccaccaggtatctctgcccaaaaggcagaacttattgccctcacacgagcttcacacctcaggacaaataaaaaggtaaccatttatatagaatccaaatatgtctttttggtagtgcatgtaaatggagccatataaaagacagagattcactaatctcttaaagaataaaattaaa

SEQ ID NO: 454908 - DNA, 635 bp, Homo sapiens
attaagcagtagtaagaaaatttgatccactgcttggccaaaactctgaaccatctcttgaatagttttgaattctaatttaatatatttgattgtatgctctctgaatttctattcctgactttcctggcatttgatctccattggtatggtaggcagaattccaagaatgacctccagtgactcatgcccatgtataatgtccttcactttcagcatgagtggaacctaaaaatatgatatgtcactccagcgattatgttacattatttgacaaaataaatactattcaggttggcctaacctaatyaccagagccctttaaatgcagagttttctgtcttgaagcagaagtgggtatcacaggattttaaacatgagacagatttgatgtgcatttgaagatcaaggggaccagaaagaaactgcaaggagctgacagccaataaaaaatggagaccctagacctgctgtcacaaggaaccaaattctaccagtactaggaataatctaggaggagtagccaatctcctgatgaaaatgcagacagctgaccccttgatttccaccttataagaccctgagaaaaatccagccatactttcctggacttcagacatacagaactgtgagat

SEQ ID NO: 454909 - DNA, 635 bp, Homo sapiens
attaagcagtagtaagaaaatttgatccactgcttggccaaaactctgaaccatctcttgaatagttttgaattctaatttaatatatttgattgtatgctctctgaatttctattcctgactttcctggcatttgatctccattggtatggtaggcagaattccaagaatgacctccagtgactcatgcccatgtataatgtccttcactttcagcatgagtggaacctaaaaatatgatatgtcactccagcgattatgttacattatttgacaaaataaatactattcaggttggcctaacctaatcaccagagccctttaaatgcagagttttctgtcttgaagcagaagtgggtatcacaggattttaaacatgagacagatttgatgtgcatttgaagatcaaggggaccagaaagaaactgcaaggagctgacagccaataaaaaatggagaccctagacctgctgtcacaaggaaccaaattctaccagtactaggaataatctaggaggagtagccaatctcctgatgaaaatrcagacagctgaccccttgatttccaccttataagaccctgagaaaaatccagccatactttcctggacttcagacatacagaactgtgagat

SEQ ID NO: 454910 - DNA, 618 bp, Homo sapiens
atgacctccagtgactcatgcccatgtataatgtccttcactttcagcatgagtggaacctaaaaatatgatatgtcactccagcgattatgttacattatttgacaaaataaatactattcaggttggcctaacctaatcaccagagccctttaaatgcagagttttctgtcttgaagcagaagtgggtatcacaggattttaaacatgagacagatttgatgtgcatttgaagatcaaggggaccagaaagaaactgcaaggagctgacagccaataaaaaatggagaccctagacctgctgtcacaaggaaccaaattctaccagtactaggaataatctaggaggagtagccaatctcctgatgaaaatgcagacagctsaccccttgatttccaccttataagaccctgagaaaaatccagccatactttcctggacttcagacatacagaactgtgagataagacaattgttactttaacctactgaatttgcagtaattggaaaactaatataggtgggtatcacccaacatgcatctttggggaactaagtaaatctgctgtatctctagcctatctattcaaagccatggatattgatcttaaaagtta

SEQ ID NO: 454911 - DNA, 462 bp, Homo sapiens
tctgcctgcctcggcttcccaaagctctatttccattcttatacattgtgagtgggaataaaaaatggtatagccagtctggaaaagtttggcagtttcttacaaagttaacatgtatttgtcttataacccagaaaccccacttcctagagaaatgaaaacttaatgctcacataaaaaccwgtgtataaatgttctattgataattctatgattatttgatgttttattcataattgctccaagcaaatgtccttcaacaggtgaatgaacaggtaaatgcataaagaagttgtggtatatccatacaatgaaatactactcagcagtagaaaggaatgaactatttacacatgcagcaactgagcactttccaaggcatgatgctggagggtgggggaaggaagtagtctcagaagtttacgtactgtatttctcatttttgagaagataaaatactga

SEQ ID NO: 454912 - DNA, 462 bp, Homo sapiens
tctgcctgcctcggcttcccaaagctctatttccattcttatacattgtgagtgggaataaaaaatggtatagccagtctggaaaagtttggcagtttcttacaaagttaacatgtatttgtcttataacccagaaaccccacttcctagagaaatgaaaacttaatgctcacataaaaacctgtgtataaatgttctattgataattctatgattatttgatgttttattcataattgctccaagcaaatgtccttcaacaggtgaatgaacaggtaaatgcataaagaagttgtggtatatccatacaatgaaatactactcagcagtagaaaggaatgaactatttacacatgcagcaactgagcactttccaaggcatgatgctggagggtgggggaaggaagtagtctcagaagtttaygtactgtatttctcatttttgagaagataaaatactga

SEQ ID NO: 454913 - DNA, 556 bp, Homo sapiens
acctgtcttctgcattgatcacgctgggaactgcagaccagagctgttcctattcggccattttggaatggaccaacaagatttatatgagaacatttatagtggcattattcataataggttamcaactggagcaatccaaatgtccaaaaattgatgagtggatacataaaatatgctatatccatagaatgaaaaaattttctgcaacaaatatgtagcaaataactaaaatatgctacaacatgaatgaacacctcaaatgttaggcaaacttaaaggagtcagaaacaaagactgcatattgtaatattctgtttttataaatttttcagaaaaatcaaatctatgggccgggcatggtggctcaagcctgtaatcccagcactttgggaggccgaagcaggcagatcatgaggtcaggagattgagaccatcctggctaacatagtgaaaccctgtctctactaaaaatacaaaaaaattagccaggtgtggtggtgggcacctgtagtcccagctacttgggaggttgaggcaggagaatggcgtgaac

SEQ ID NO: 454914 - DNA, 648 bp, Homo sapiens
tccagtagcatgatcacatttgtctacagttatccctcagtatcttggggaattggttccaagacctcccaaggataacaaaatctacaaatgcccaagtcccagataaaaaatgttatagtatttgcatataatctttgcatatactcccaaatactttaagtcatctgtaaataattcatagtaccaaatacaatacaawgttatgtaaatagttgttatactgtattgtttagaataatgacaaggaaaaaagtctgtatgtgttcagtatagacacaatttttgaaaaaaatatttttgatctgtggttggttgaatccagggatgtggaacttgtgaatacagagggccaactctctgatgcatatcacttttgcaagaaggccagaagggtaaggcatgaggctaagagttcagtaagcaagggtttttaatcttctaggtgtttgctaaggacacctgaccattggagatgagcctcccaagatagatgatggtgtctccaaaagaggacatggtattgggaggatgatgaactctctgttggggacaagttgagttgaggagcctatgaaatatagagatggaaatatctagtaggcagctagagaataagtttgaaactaatgagatatatacttcaag

SEQ ID NO: 454915 - DNA, 648 bp, Homo sapiens
actcaagtctttaatattcttataaaatattccattgcaactgttttataagctatgagcataaaaactacatagctttgaatgcctataatagcgggattttacctaattaaaaagattgggaaaggaagtggcatttgagttgagttctgaaggatgaacaggaatgaactctgcaaacccaagagagaagaacatgcagaagagagaaccagtgaacagcgtggcttgatcagacaaggagcaagagaacttgttagcattaaatggggcaatctatatagacacatgtaaagagcttggagcagtaactgggattcactgagtcctcagaaaatatggtgttattattgtgtgataataactttctcagtctcatttttcattgacttggtgttcakcctttatcagcttaatcaacttagcctttgcctaggatgattttagtccatctgccttttaatttcaccatcaatcatgacagaacagaaaatacaatccaatacatgctttggtaatactgctaaaaatggtttgggtgctgctgcggtaaacaatgtctaaaccaagtgtcattttccctccgccctttcccccatttcttcttaacagaaaagcctttggttttgattgtgaaatacaaagatt

SEQ ID NO: 454916 - DNA, 632 bp, Homo sapiens
aatctatatagacacatgtaaagagcttggagcagtaactgggattcactgagtcctcagaaaatatggtgttattattgtgtgataataactttctcagtctcatttttcattgacttggtgttcagcctttatcagcttaatcaacttagcctttgcctaggatgattttagtccatctgccttttaatttcaccatcaatcatgacagaacagaaaatacaatccaatacatgctttggtaatactgctaaaaatggtttgggtgctgctgcggtaaacaatgtctaaaccaagtgtcattttccctccgccctttcccccatttcttcttaacagaaaagcctttggttttgattgtgaaatacaaagattaatcccagaatttctcccagctttgtccacttcctttgccctagttcaytgagatttacagttggtatttactaaaatttttgttcacacgatgctgacatggggtttgggtttttatgattatatctctactatttgaacaccatgtcttcaagtctgtatgtacttacatataacacatgtgggcccctgctcactcttcctatgtcatgtgtcacgaaggaatgtaacagttttgatttaccaaaccctgaaat

SEQ ID NO: 454917 - DNA, 577 bp, Homo sapiens
tgacaaaactatagaaatggagaatagattcagtggttgtcagagatgaaggagggactgggggcaggagggaggtgggtgtagctagaaaaggaaaacttgagggggcttttgcagtgaaggtaatgcgtcttgactgcatcaatgctaatatcctggttgtgatattgcaatatagctttgcaagatattattgttgggagaaactgagtaaatggaatgcagatctgtgtaaataatatcttaaaattatttgtgaatctacaagtatctcaaaattaaaatttaacaatacatatgttctacctctatccactgaatattccaggraacaaaaatctagaagcaacaagcactcctgttgtctacattgtggactctaaatgtcacttccacctaaaaggaactagggatccttagagaaatggcttgttccctacctggtgcaggaaatgtaccagatgagcctggagcatcttgttataacagatgccaaggagccatcagggactactgggcacacgtgtaaagggtccagacgccaacatgaagaggctctcattggccaaatatggga

SEQ ID NO: 454918 - DNA, 441 bp, Homo sapiens
acaccacatttttttatcctgtctatcattgatggacatctgggttgattccatgtctttgctattgtgaatagtgctgcaatgaacatacaaatacatgtgtcttyataatacaataatttatatttaaacataaggtaattttaaatcagtttggggattaaaattatgtaatttggagaaatattaataatggataaacccaaattcagccaaaatacatctaaggaggttgattctgagccagtatggtgactgtggccctggattacccaatctcaagagctcttgagaatgcttcatgagacagtcacattacagtttggttttgtacatttccagcagacagagttgtagggaaaatcataaatcaatatgaggaagacatacattggctcagcctaaaagtgggacatcaaaaaggaggggctaacaagtcat

SEQ ID NO: 454919 - DNA, 441 bp, Homo sapiens
acaccacatttttttatcctgtctatcattgatggacatctgggttgattccatgtctttgctattgtgaatagtgctgcaatgaacatacaaatacatgtgtcttcataatacaataatttatatttaaacrtaaggtaattttaaatcagtttggggattaaaattatgtaatttggagaaatattaataatggataaacccaaattcagccaaaatacatctaaggaggttgattctgagccagtatggtgactgtggccctggattacccaatctcaagagctcttgagaatgcttcatgagacagtcacattacagtttggttttgtacatttccagcagacagagttgtagggaaaatcataaatcaatatgaggaagacatacattggctcagcctaaaagtgggacatcaaaaaggaggggctaacaagtcat

SEQ ID NO: 454920 - DNA, 441 bp, Homo sapiens
acaccacatttttttatcctgtctatcattgatggacatctgggttgattccatgtctttgctattgtgaatagtgctgcaatgaacatacaaatacatgtgtcttcataatacaataatttatatttaaacataaggtaattttaaatcagtttggggattaaaattatgtaatttggagaaatattaatratggataaacccaaattcagccaaaatacatctaaggaggttgattctgagccagtatggtgactgtggccctggattacccaatctcaagagctcttgagaatgcttcatgagacagtcacattacagtttggttttgtacatttccagcagacagagttgtagggaaaatcataaatcaatatgaggaagacatacattggctcagcctaaaagtgggacatcaaaaaggaggggctaacaagtcat

SEQ ID NO: 454921 - DNA, 572 bp, Homo sapiens
cccctgccccaatttaaccagagaagctctacttttctttttcatatattgagatctcatgaaatttatttgaacaaagaattctgctaaaaagtttgcaaattgatgatctattcaatgaagatcaaggcaaatatgtagtagggaattaagagggaaagccaattatgggtagtatattcagcccctagaaggacttgtgggaacaagtcaatcatgacctgcaagagatgagaatagggcagagaaaacatatttggggaactggaaatgtaaaaatgcttggaaaatggagtacagactaggaaactagtgtgggaaatggtctgacttcttttaatctaggtttacttaattgttacttgtaggcttagttttatctcaactctggggccaatgaaagaatattaagtataacaactattcacttgctcgggattaatgcaatattgttccaaytggatacccaaaaccatgtcccttttttgtcctctattatacttcatacatagttatgctgtatattttataataatcatcattctgctcaatgatgttcaaaacctttagaa

SEQ ID NO: 454922 - DNA, 571 bp, Homo sapiens
ggattgactttaattaatctagtttttgacctccttttttgggaggagactgagtggttcatatgctgacaataataaagttaatttaatttctgcaataggaatctgtcaagtaatatatgtcaattaggagcttcactgagaagtaatgccaggtgatatttcttacctttttctctacttagctgatcctccagtattggtttggctgggtatcacaagctgaattacagtcatgccaccatctatgrctaatttctgaatcttctatacccaatttttactaatttgatacaataatttctaagcatatctttttaaataacgtgacttttatttgtactcaccttggcgaacagcatcacttactactttttcttgttcctttaagagaaaccttgtttggtcaaaaataacagtggcaaatttccaattagcagtagggagggtacacaaggatacaaggttttttaagataggagaagctgctgcttcgaggaggcaaaatgcttggcactggctatctgcaaaaataaaagcattaatggcagtgttttaataaagatggtat

SEQ ID NO: 454923 - DNA, 571 bp, Homo sapiens
ggattgactttaattaatctagtttttgacctccttttttgggaggagactgagtggttcatatgctgacaataataaagttaatttaatttctgcaataggaatctgtcaagtaatatatgtcaattaggagcttcactgagaagtaatgccaggtgatatttcttacctttttctctacttagctgatcctccagtattggtttggctgggtatcacaagctgaattacagtcatgccaccatctatggctaatttctgaatcttctatacccaatttttactaatttgatacaataatttctaagcatatctttttaaataacgtgacttttatttgyactcaccttggcgaacagcatcacttactactttttcttgttcctttaagagaaaccttgtttggtcaaaaataacagtggcaaatttccaattagcagtagggagggtacacaaggatacaaggttttttaagataggagaagctgctgcttcgaggaggcaaaatgcttggcactggctatctgcaaaaataaaagcattaatggcagtgttttaataaagatggtat

SEQ ID NO: 454924 - DNA, 512 bp, Homo sapiens
ttaagcagatttataaaaggctgtcacatcttttggaaaaataaatatacccatcatgacattaagaactgaagatcttgtgtctattaatagtatatgagacagtaagacctaactgtctctaagtcacataaatatttttgtattctttaactgtgaaatgcggtaatactacctactttgattcctcaacaatgtttctaaacagatcaaawatgacaatagatgtaaaagtgctttataaagcataaagatacctgtatttatgataatattattaaccttatgaagaaagaaagaataggatttatcaaacaaattgatcattagaaaatatttctggtgtttctgaatgtaacaatatataaatatcaaaagtttccaatatccctagtcattaggttgcatcaatgtgtactggattttaggaataaacaatagcagccaataaaaaaaaatattgttgtatttatttcatcagggtaacctatgtcaaacttattctggaatgc

SEQ ID NO: 454925 - DNA, 512 bp, Homo sapiens
ttaagcagatttataaaaggctgtcacatcttttggaaaaataaatatacccatcatgacattaagaactgaagatcttgtgtctattaatagtatatgagacagtaagacctaactgtctctaagtcacataaatatttttgtattctttaactgtgaaatgcggtaatactacctactttgattcctcaacaatgtttctaaacagatcaaaaatgacaatagatgtaaaagtgctttataaagcataaagatacctgtatttatgataatattattaaccttatgaagaaagaaagaataggatttatcaaacaaattgatcattagaaaatatttctggtgtttctgaatgtaacaatatataaatatcaaaagtttccaatrtccctagtcattaggttgcatcaatgtgtactggattttaggaataaacaatagcagccaataaaaaaaaatattgttgtatttatttcatcagggtaacctatgtcaaacttattctggaatgc

SEQ ID NO: 454926 - DNA, 593 bp, Homo sapiens
tatgaatttgtaaggccatgttgtagaaagcaagttttacaaatagtggcttttgttataaattcaaatgcatttttagactttttgaaacatatgtatctgtatctaaatcatgcctatatatccatatctatctgtaaacaagaagttatcaagaatcaatgacattttccttgactacaaaaaataacataattttatctagaagaactttatctccttgccttctataataaattatgtacttagtccttgagcctaccatatctayggcaaaatattattaaattacttaccatgtttttcatcactgtttgtgacttcagtctttgaggtgcaagtcttatatttatttcgcagcataataaagtcgctcaaaaggtccaaatcattctcttgttttttgccatgttcaaaagatgcttttttaattattgaagaggaaggtgatttaatagatggtcctgtgcagtcaagttcaaagtgatcgttattttctttcttttggattattctgtttactggttcttggtcattctttggtttttcttcttttgctgctcctttatcagagaaatagtcatcagaaaaac

SEQ ID NO: 454927 - DNA, 596 bp, Homo sapiens
aatattccaaatcctttgttgtcattacaacaatgttcacagaatcttcaccagggacagattctatctcaagaaaccattttctttgcccatccrtaagaaacaactcctcatttgttcaagttttggcatgagattgcagcaattcaaccacaccttcaggctccacttctaattctagttttcttgctatttctaccacatctgtagttacatacttgcaccactaaagtcttgaacccttcaaaatcatccatgaaggttcaaatcaacttttttctatcttgctaatgttgatattttggcctcctcccaagaataaggaatgttcttaatggcatctagaatggtgaatcctttctcaaaagtatttcaattgactttgactagatccatcagaggaatcactatctatggcagctctggccttatgaaatgtatttcttaaataataacactagaaagtagaaatgactccttgatccatgggctgcagaatggatgttgtgttagcagacatgaaaacaacattaatcttcttgtatatctccatcagagctcttgaatgaccaggtatgctgtcaatgagcagtaat

SEQ ID NO: 454928 - DNA, 596 bp, Homo sapiens
aatattccaaatcctttgttgtcattacaacaatgttcacagaatcttcaccagggacagattctatctcaagaaaccattttctttgcccatccataagaaacaactcctcatttgttcaagttttggcatgagattgcagcaattcaaccacaccttcaggctccacttctaattctagttttcttgctatttcyaccacatctgtagttacatacttgcaccactaaagtcttgaacccttcaaaatcatccatgaaggttcaaatcaacttttttctatcttgctaatgttgatattttggcctcctcccaagaataaggaatgttcttaatggcatctagaatggtgaatcctttctcaaaagtatttcaattgactttgactagatccatcagaggaatcactatctatggcagctctggccttatgaaatgtatttcttaaataataacactagaaagtagaaatgactccttgatccatgggctgcagaatggatgttgtgttagcagacatgaaaacaacattaatcttcttgtatatctccatcagagctcttgaatgaccaggtatgctgtcaatgagcagtaat

SEQ ID NO: 454929 - DNA, 349 bp, Homo sapiens
atccatcagaggaatcactatctatggcagctctggccttatgaaatgtatttcttaaataataacactagaaagtagaaatgactccttgatccatgggctgcagaatggatgttgtgttagcagacatgaaaacaacattaatcttcttgtatatctccatcagagctcttgaatgaccaggtaygctgtcaatgagcagtaatattttgaaaggaatctttttttctgagtagtaggtctcaacagtggccttaaaatattgtaagccatgctgtaaacagatgtgctatcattctggctttgttgttccatttatagagcacagaaagtgtagacttatcataat

SEQ ID NO: 454930 - DNA, 596 bp, Homo sapiens
cggtaactcaggcaaaggagccaaatcacaatagctaatttgtgccacaggtcccttgggcacgaacctctagccagacttctgtcactgttgggataatcattttcagactctcccatttggggcagacagtgccctgaccatttgctagaggcaaggcaaacctgggcttaagatatcacctatagccaagaaaaaggcaatagtagtgaagatttgctaagaaaatatatccaataaaaaccaagacaagttgaatagaggaagctggaataaataaccaatccttcaatgcaaagacatagacatatacccacaagaaacaacactgaayagggaaatgtgacctctgcaaaaggacaaaggaaaaatccagtgaccgaccctaacaagacagtcatttgtgagctctctgaccaaaaattcaaaagagcagtttcaaggaaattcagtgatctctaaaataatacagaaaagcaattcagaaaattgctggagaaatttaacaaagagaatttgttaaatttttaaagttaactttaaaaactcaaacaaattttggaactgagaaatacgtttgctgagctgaacaacta

SEQ ID NO: 454931 - DNA, 570 bp, Homo sapiens
tgttttagggattattagtaaacaattcaatgtgctttcagcttgcagtcaggatagtgaggtttaggatcagtaattagccaagtagtaattaacatacctattatttttattttccttaattgggacaagttacctctgtcccctgcctggtacacagaagtgaaagagggaagggcaataagagggaaaagaaaataaagtctctgtcattaaccttggatttgtgccttttttcttgaatcttctttttttttcagtaggtgaatgccacgttctatcattgggattttgaagcctttaaccagctttgttattggttcaaatayagcccatagttaagtagttatttggacaaaacggtttgctttttatcaagtcatgcagacctatctgcagtggcatgttggcaaggccgagtggggatgtgtacatagccctgtcagaaaagatgagccaagtgctgtgaagagggcagggcattggtgatttacattcacttacaatgcatggagctcaatccccaaaatagcataaagaagaaaaccaaacaaactctgttctcttcta

SEQ ID NO: 454932 - DNA, 518 bp, Homo sapiens
ttcggctcactgcaacctctgcctcctgtttgtattttattctcatgccttttttttggggggagcttttttttctggcatgtgccaacacccctcactaatttttgtatttttagtcgaggtgggttttcaccacgttggccaagccagtctccaactcctgacctctggagatctgcctgccttggcatcccaaagtgctgggattacaggtatgagccaytgggcccggcctgcactcttttgtcttttttgatactttgtagacaacatggaagttgaaagaaaataatattgaaaagaagtaaatatctcaacttgggattctcctcgatgagttgaagctgatgctctgtagtatgttggtgagcagaccttggagtggcctgactggagtgagaaaattggaggaggaagatcttagtaaacaaaactgttttttggtctagcattccattacttttcatggcatagctgcaaaaagggactggtctaggattttctgaaatagtgaggtt

SEQ ID NO: 454933 - DNA, 514 bp, Homo sapiens
catcatgaaggaatgttaaactttatcaaatgctttttcagcatctgttgatattatgatataatttttgtccttcactgtgttgatgtgatgtatcacatttatagatttgtgtatgttgaacygtcctcatatccttaagataaatcctacttcattgtgtatgtgtatgtactgttggattcagttggatagtattttgttgataatttttgtgcctcaattcatcaaggacattggcctgtagttttcatttttatgttgggtccttgtctggttttggtatcagggtaatgttggccttatagaatgagttagggagaatccttccttcacaatttttttttttttttttggaatagtgtagagaattggtattaggtctcctttataagtttggtagaatttggcggtaaggccatctgatctgggcttttgctttcttgggagactttttatttctgattcaatctcttactcattattggtctgtgcaggtattctgtttcttcct

SEQ ID NO: 454934 - DNA, 507 bp, Homo sapiens
acaatcccatagcccagagctaactaaccactataaagaacccagcgtggttttaactaatggatcaaaagatgctcatcaaaggctctgagctttcctgagtgccaacaggaaacatccagcatcactggtctctccaaggctgcaggtgtctttgcccatagtgcctgttttgtgtcagggaaagaatcaacctgggagccaagcccaggaatcaggatgaccaagacatactgcacaaggagggaacaaagccatccraggacactcaaggacaaatcaagcaaatgaatttaagggagacgtgctcatggtctgctttgctgctcagcatggctgggaggcacagtggaagatcatgcatcctgcccctgggactcctctgccagagcctgagagctttctcctgcccacaggctaggggtaggacagttggaattgatccatgccttctagctagactgtgggtcccctcagtcttgggcatggtgacagcccagcatcaga

SEQ ID NO: 454935 - DNA, 463 bp, Homo sapiens
aatcaagcaaatgaatttaagggagacgtgctcatggtctgctttgctgctcagcatggctgggaggcacagtggaagatcatgcatcctgcccctgggactcctctgccagagcctgagagctttctcctgcccamaggctaggggtaggacagttggaattgatccatgccttctagctagactgtgggtcccctcagtcttgggcatggtgacagcccagcatcagacagaggtcagtatcaaactagaaaatttaataaatgctgtcagatttgtagacccaagaaaatataaactgccaatcacggaaggaaaaaaatctctcaatgatcttatctttatatgattcccttgctgcctggaaattgacatttccttggggataatctggtcataggattggtgaaggtggaagggaggcaacctccgaaggtggggccctctgctcatctgggacagg

SEQ ID NO: 454936 - DNA, 463 bp, Homo sapiens
aatcaagcaaatgaatttaagggagacgtgctcatggtctgctttgctgctcagcatggctgggaggcacagtggaagatcatgcatcctgcccctgggactcctctgccagagcctgagagctttctcctgcccacaggctaggggtaggrcagttggaattgatccatgccttctagctagactgtgggtcccctcagtcttgggcatggtgacagcccagcatcagacagaggtcagtatcaaactagaaaatttaataaatgctgtcagatttgtagacccaagaaaatataaactgccaatcacggaaggaaaaaaatctctcaatgatcttatctttatatgattcccttgctgcctggaaattgacatttccttggggataatctggtcataggattggtgaaggtggaagggaggcaacctccgaaggtggggccctctgctcatctgggacagg

SEQ ID NO: 454937 - DNA, 463 bp, Homo sapiens
aatcaagcaaatgaatttaagggagacgtgctcatggtctgctttgctgctcagcatggctgggaggcacagtggaagatcatgcatcctgcccctgggactcctctgccagagcctgagagctttctcctgcccacaggctaggggtaggacagttggaattgatccatgccttctagctagactgtgggtcccctcagtcttgggcatggtgacagcccagcatcagacagaggtcagtatcaaactagaaaatttaataaatrctgtcagatttgtagacccaagaaaatataaactgccaatcacggaaggaaaaaaatctctcaatgatcttatctttatatgattcccttgctgcctggaaattgacatttccttggggataatctggtcataggattggtgaaggtggaagggaggcaacctccgaaggtggggccctctgctcatctgggacagg

SEQ ID NO: 454938 - DNA, 392 bp, Homo sapiens
aaatttaataaatgctgtcagatttgtagacccaagaaaatataaactgccaatcacggaaggaaaaaaatctctcaatgatcttatctttatatgattcccttgctgcctggaaattgacatttccttggggataatctggtcataggattggtgaaggtggaagggaggcaacctccgaaggtggggccctctgctcayctgggacagggagggcctgaggtaggtgtctgtgtgggctggggaggaggatgggagcagtgcttctagatgtttccactttctcctcattagataataatgaatgggtgatttccctagtcactgcagtgtgaggaaatctacaaaattaatttcacaatacactttacaggataggtggagaaacacat

SEQ ID NO: 454939 - DNA, 546 bp, Homo sapiens
ttagaccagaaaagacagcacatttgaaggcctgaataagaaatattctggataagatattgtggctgctaccagaatggctcttgatgatctctacctcttggtatttatacccttatataatctctttcctatagtataagctggtcccaggtacttgtttctattgaatagaatagaacaaaagwaatgagatgccacttctgagattagattataagatactgtgaatttcatcttgtgccctctccctctctctctttctcttgccctctcatttgaatgaagccaactggcatgctgtcagtggcccagtgtaagtcctgttacaagaaattgatgattacctgtagccaaccctaagtgaagaactgaggtcctcagtcctacaaatggagagaaactgaatctagctaagaaccatgtgagtgagctgggaagaagatccacccttagttgaaatttaagatgacatattgagcagacatactgagacacactgaaagtaagagagcaggaggaaacaaaaccagggtcatacaaaga

SEQ ID NO: 454940 - DNA, 546 bp, Homo sapiens
ttagaccagaaaagacagcacatttgaaggcctgaataagaaatattctggataagatattgtggctgctaccagaatggctcttgatgatctctacctcttggtatttatacccttatataatctctttcctatagtataagctggtcccaggtacttgtttctattgaatagaatagaacaaaagtaatgagatgccacttctgagattagattataagatactgtgaatttcatcttgtgccctctccctctctctctttctcttgccctctcatttgaatgaagccaactggcatgctgtcagtggcccagtgtaagtcctgttacaagaaattgatgattacctgtagccaaccctaagtgaagaactgaggtcctcagtcctacaaatggagagaaactgaatctagctaagaaccatgtgagtgagctgggaagaagatccaccctyagttgaaatttaagatgacatattgagcagacatactgagacacactgaaagtaagagagcaggaggaaacaaaaccagggtcatacaaaga

SEQ ID NO: 454941 - DNA, 498 bp, Homo sapiens
caataatagcataaggccctaattaatattaaacttttatcattataatacataggatgtcttctgttttcctgatcaaattctgactactattaaaatataaagaattgtccagaaatatataaaaaaagaatcacacattgatcttctttaaatgaaaatataamaattgtatggactaggatgattacagttgttcagttctgactgttatttgaagaaaaaagcaataagaagcctcagcaacttaacagaaggagctgccatttactaggagaaaagattgtggatgagagtgtagcaaaggtcagaattctgtgaagcttgagatgtctattataatgaattatcttttatactcactacaatttcctaacaattttggggtttatatttttgaaagagatatacctttaattttctttctttgtactattgttaggtaactttaatgtgcagattatactacagcgaaagttgccaatgacaaggcaaagt

SEQ ID NO: 454942 - DNA, 472 bp, Homo sapiens
tgattacagttgttcagttctgactgttatttgaagaaaaaagcaataagaagcctcagcaacttaacagaaggagctgccatttactaggagaaaagattgtggatgagagtgtagcaaaggtcagaattctgtgaagcttgagatgtctattataatgaattatcttttatactcactacaatttcctaacaattttggggtttatatttttgaaagagatatacctttaattttctttctttgtactattgttaggtaactttaatgtgcagattatactacagcgaaagttgccaatgacaaggcaaagtcacttacatcagacccaaagcaaagtggagccrggtcatgaaaaaggggatcttgtgtgtgtgtccatgataagcactatcacaaggactttctataaactcacaagaaatttctgcccacccagcacactctgtttgtccagctcatcctgtaggtg

SEQ ID NO: 454943 - DNA, 508 bp, Homo sapiens
catgagttgatagagccatgattttctaatactgttccaaagggattaaagtacctctgagaagcaggggaggggaggatcaaactctccctaccttccactccactccctaccttgcccctccacctctgcccactttctatttcctcaggcacagcagcttctaccttatggattacaaattctggtcatccatctatggttgcattargaaaagagtactgctactttcattttcttttctaaccactgccctagaagaataacacctcacattctctggtagactgaagcctgcagctgcaaggatgctcagaaaaccagacttctattcattggccacttgctgcactttctgtccctcgatccttgcaatgtacctttgaggtaggcataaaaatccccatttataagtgagaaaaccaaggcaaaagaggttcagtttatttcaggctcaaatgtgcttccaatagcttatagcctctacagctagtgtttgaacccaggt

SEQ ID NO: 454944 - DNA, 508 bp, Homo sapiens
catgagttgatagagccatgattttctaatactgttccaaagggattaaagtacctctgagaagcaggggaggggaggatcaaactctccctaccttccactccactccctaccttgcccctccacctctgcccactttctatttcctcaggcacagcagcttctaccttatggattacaaattctggtcatccatctatggttgcattaggaaaagagtactgctactttcattttcttttctaaccactgccctagaagaataacacctcacattctctggtagactgaagcctgcagctgcaaggatgctcagaaaaccagacttctattcattggccacttgctgcactttctgtccctcgatccttgcaaygtacctttgaggtaggcataaaaatccccatttataagtgagaaaaccaaggcaaaagaggttcagtttatttcaggctcaaatgtgcttccaatagcttatagcctctacagctagtgtttgaacccaggt

SEQ ID NO: 454945 - DNA, 508 bp, Homo sapiens
catgagttgatagagccatgattttctaatactgttccaaagggattaaagtacctctgagaagcaggggaggggaggatcaaactctccctaccttccactccactccctaccttgcccctccacctctgcccactttctatttcctcaggcacagcagcttctaccttatggattacaaattctggtcatccatctatggttgcattaggaaaagagtactgctactttcattttcttttctaaccactgccctagaagaataacacctcacattctctggtagactgaagcctgcagctgcaaggatgctcagaaaaccagacttctattcattggccacttgctgcactttctgtccctcgatccttgcaatgtacctttgaggtaggcataaaaatccccatttayaagtgagaaaaccaaggcaaaagaggttcagtttatttcaggctcaaatgtgcttccaatagcttatagcctctacagctagtgtttgaacccaggt

SEQ ID NO: 454946 - DNA, 508 bp, Homo sapiens
acatcagcattccttttctcattgcctctcctctctctttttaaagctggcratgtcacatttctctgaccattctttcattgtcacatctctctctggactcagctaagaaaggttctccatttttaagaactcatgtgattagactgggcccatctggataacccaggaagatctctccatctcggtttgcatccttaatcacatctgataagcctttattgcattcagtgtaacatattcacaggttccagggttaggcatgggcatctttgagggccattattctccctaccacattatttgcctagcatctttcattacattgtccatctatttacttactgatttctaatgacatccaaatcagttacaacattttatgtaagcattgtttttatttttatgttattccactagtctatttttctactcatgaattatggtacatgagtttatttttgcaactttaagctcaataacatgttttaagatttcctcaactttc

SEQ ID NO: 454947 - DNA, 568 bp, Homo sapiens
gcggctagggtagaatccatatcctggccttttctatcttctagagaacatcagcattccttttctcattgcctctcctctctctttttaaagctggcaatgtcacatttctctgaccattctttcattgtcacatctctctctggactcagctaagaaaggttctccatttttaagaactcatgtgattagactgggcccatctggrtaacccaggaagatctctccatctcggtttgcatccttaatcacatctgataagcctttattgcattcagtgtaacatattcacaggttccagggttaggcatgggcatctttgagggccattattctccctaccacattatttgcctagcatctttcattacattgtccatctatttacttactgatttctaatgacatccaaatcagttacaacattttatgtaagcattgtttttatttttatgttattccactagtctatttttctactcatgaattatggtacatgagtttatttttgcaactttaagctcaataacatgttttaagatttcctcaactttctttttccacttct

SEQ ID NO: 454948 - DNA, 504 bp, Homo sapiens
tagcacaatgtgcagagacaagacggtaaatgttccttatccagtaatctctgatgaaaggccagtgctcacatcattagtaatgtccagaamtaataatatcagtagtagcaatactcacaatgtaaataagtagctctcatgttttgattgccaatagtgctagcaactttacatgtatcactctctaccccagccctgttaattggtactatgatgaagaaagagactcgaagaaaataaatgactcactcgcgtatttttacacagctagaattgctacagaaaggattaaagccaagtctatccaactccacagtctatgtccctccctccctccctccctcccttccttccttccttccttgctccttccttccctccctttctgcctccctccctttctgcctccctccctctctccctccctccctccctatctcaaacatctattgagtgtctaccatgtgccaggcactgtgtcaggctcttgggatacagaaa

SEQ ID NO: 454949 - DNA, 522 bp, Homo sapiens
aagattaatcctttcactaaattgggaaaacaggagaaagtgttgttggataaagaaggaactttagcacaatgtgcagagacaagacggtaaatgttccttatccagtaatctctgatgaaaggccagtgctcacatcattagtaatgtccagaactaataatatcagtagtagcaatactcacaatgtaaataagtagctctcatgttttgattgccaatagtgctagcaactttacatgtatcactctctaccccagccctgttaattggtactatgatgaagaaagagactcgaagaraataaatgactcactcgcgtatttttacacagctagaattgctacagaaaggattaaagccaagtctatccaactccacagtctatgtccctccctccctccctccctcccttccttccttccttccttgctccttccttccctccctttctgcctccctccctttctgcctccctccctctctccctccctccctccctatctcaaacatctattgagt

SEQ ID NO: 454950 - DNA, 504 bp, Homo sapiens
tagcacaatgtgcagagacaagacggtaaatgttccttatccagtaatctctgatgaaaggccagtgctcacatcattagtaatgtccagaactaataatatcagtagtagcaatactcacaatgtaaataagtagctctcatgttttgattgccaatagtgctagcaactttacatgtatcactctctaccccagccctgttaattggtactatgatgaagaaagagactcgaagaaaataaatgactcactcgcgtatttttacacagctagaattgctacagaaaggattaaagccaagtctatccaamtccacagtctatgtccctccctccctccctccctcccttccttccttccttccttgctccttccttccctccctttctgcctccctccctttctgcctccctccctctctccctccctccctccctatctcaaacatctattgagtgtctaccatgtgccaggcactgtgtcaggctcttgggatacagaaa

SEQ ID NO: 454951 - DNA, 521 bp, Homo sapiens
atccttctctgaaatgcagctgagaactggtcaagcctcactcccttgctgagaccaatagcaatccctgatgatctcgccacaggtccagcaggtgccccatccacactttgtccccagcccctacctggaagctccaaacacctacctgaggggccaactctgattcccaaggaggtgacacctcctgccycttgttgatagaacattgataaggaaataggactgagttttaagcttctttccatgtcaaatatttaaaggcaatataatgttcaagtttaaataatatttcatgtgtaattaaacaatcccttattgttaaatagatgggttccaattttgaactgctataatctgtgtatgtgtccttgattaaatccttaagagaaatccctagaaacattatcttagggtcaaatggcttggatattctgtaaactgctgataattatgggaaattgccttccaggaaggttataacaatttgcctgatccccagcagcaacagactttacaaa

SEQ ID NO: 454952 - DNA, 521 bp, Homo sapiens
atccttctctgaaatgcagctgagaactggtcaagcctcactcccttgctgagaccaatagcaatccctgatgatctcgccacaggtccagcaggtgccccatccacactttgtccccagcccctacctggaagctccaaacacctacctgaggggccaactctgattcccaaggaggtgacacctcctgccccttgttgatagaacattgataaggaaataggactgagttttaagcttctttccatgtcaaatatttaaaggcaatataatgttcamgtttaaataatatttcatgtgtaattaaacaatcccttattgttaaatagatgggttccaattttgaactgctataatctgtgtatgtgtccttgattaaatccttaagagaaatccctagaaacattatcttagggtcaaatggcttggatattctgtaaactgctgataattatgggaaattgccttccaggaaggttataacaatttgcctgatccccagcagcaacagactttacaaa

SEQ ID NO: 454953 - DNA, 607 bp, Homo sapiens
ctacctgaggggccaactctgattcccaaggaggtgacacctcctgccccttgttgatagaacattgataaggaaataggactgagttttaagcttctttccatgtcaaatatttaaaggcaatataatgttcaagtttaaataatatttcatgtgtaattaaacaatcccttattgttaaatagatgggttccaattttgaactgctataatctgtgtatgtgtccttgattaaatccttaagagaaatccctagaaacattatcttagggtcaaatggcttggatattctgtaaactgctgataattatgggaaattgccttccaggaaggttataacaatttgcctgatccccagcagcaacagactttacaaagtactcagtatctaatatttaactatgataaagataagcttctcccttctttttcacttaaaatgctgtgtcccacctcacttttcagtgtctcttcacactgacwagacggttggctaatacttcagagcttgcagagcatctttatacacttttaatcctcctaacatccgtgagagatggagcttactattatcatccgtgtttgcaaatgaggccctgagaagttg

SEQ ID NO: 454954 - DNA, 607 bp, Homo sapiens
ctacctgaggggccaactctgattcccaaggaggtgacacctcctgccccttgttgatagaacattgataaggaaataggactgagttttaagcttctttccatgtcaaatatttaaaggcaatataatgttcaagtttaaataatatttcatgtgtaattaaacaatcccttattgttaaatagatgggttccaattttgaactgctataatctgtgtatgtgtccttgattaaatccttaagagaaatccctagaaacattatcttagggtcaaatggcttggatattctgtaaactgctgataattatgggaaattgccttccaggaaggttataacaatttgcctgatccccagcagcaacagactttacaaagtactcagtatctaatatttaactatgataaagataagcttctcccttctttttcacttaaaatgctgtgtcccacctcacttttcagtgtctcttcacactgacaagacggttggctaatacttcagagcttgcagagcatctttatacacttttaatcctcctaacawccgtgagagatggagcttactattatcatccgtgtttgcaaatgaggccctgagaagttg

SEQ ID NO: 454955 - DNA, 607 bp, Homo sapiens
ctacctgaggggccaactctgattcccaaggaggtgacacctcctgccccttgttgatagaacattgataaggaaataggactgagttttaagcttctttccatgtcaaatatttaaaggcaatataatgttcaagtttaaataatatttcatgtgtaattaaacaatcccttattgttaaatagatgggttccaattttgaactgctataatctgtgtatgtgtccttgattaaatccttaagagaaatccctagaaacattatcttagggtcaaatggcttggatattctgtaaactgctgataattatgggaaattgccttccaggaaggttataacaatttgcctgatccccagcagcaacagactttacaaagtactcagtatctaatatttaactatgataaagataagcttctcccttctttttcacttaaaatgctgtgtcccacctcacttttcagtgtctcttcacactgacaagacggttggctaatacttcagagcttgcagagcatctttatacacttttaatcctcctaacatccrtgagagatggagcttactattatcatccgtgtttgcaaatgaggccctgagaagttg

SEQ ID NO: 454956 - DNA, 561 bp, Homo sapiens
cttctcccttctttttcacttaaaatgctgtgtcccacctcacttttcagtgtctcttcacactgacaagacggttggctaatacttcagagcttgcagagcatctttatacacttttaatcctcctaacatccgtgagagatggagcttactattatcatccgtgtttgcaaatgaggccctgagaagttgagtgatttctgtaaggtctcagagccaatagacactggtaatgaaataaaatgcaasgccccttatctttggagcccagtgttccttccacataggtggttctccacccaggctgcccaggagaatgtggaatctccagcagttctgacttaactggcctggtgtggatgtctgtgatgggtgaacattcccagacccttttaagaacctgatagaagtggtggacccacttcccagaaaaagggacgcacaacaaaataattgtcctgagtgggtctgacagaatcaagtgaaccctttaaatctggatctagaggtcagagactgagaatgtcagagatgcaaaagagattcagtgcaagagaaatc

SEQ ID NO: 454957 - DNA, 321 bp, Homo sapiens
gtaatgttcccaaagcctcgtggctagtaattcaaacctaatttctgcctactccaaagtctatttttcctyatgatactatactgcttctccatggataaagacagagatcacatattaataaaatttgcacaaagtcggcaaattgttgaaagggaaggctaagatgattaataaaatcaagagccagatgatctcaacaacctgaaataactggctgacaaccaatttgaataactccctgcgggtgaagttcaaagtactatttggggtttttttttaaagtttggctgggtgcagcggctcacgcctgtaatccaa

SEQ ID NO: 454958 - DNA, 321 bp, Homo sapiens
gtaatgttcccaaagcctcgtggctagtaattcaaacctaatttctgcctactccaaagtctatttttcctcatgatactmtactgcttctccatggataaagacagagatcacatattaataaaatttgcacaaagtcggcaaattgttgaaagggaaggctaagatgattaataaaatcaagagccagatgatctcaacaacctgaaataactggctgacaaccaatttgaataactccctgcgggtgaagttcaaagtactatttggggtttttttttaaagtttggctgggtgcagcggctcacgcctgtaatccaa

SEQ ID NO: 454959 - DNA, 321 bp, Homo sapiens
gtaatgttcccaaagcctcgtggctagtaattcaaacctaatttctgcctactccaaagtctatttttcctcatgatactatactgcytctccatggataaagacagagatcacatattaataaaatttgcacaaagtcggcaaattgttgaaagggaaggctaagatgattaataaaatcaagagccagatgatctcaacaacctgaaataactggctgacaaccaatttgaataactccctgcgggtgaagttcaaagtactatttggggtttttttttaaagtttggctgggtgcagcggctcacgcctgtaatccaa

SEQ ID NO: 454960 - DNA, 504 bp, Homo sapiens
gaccaaactcaactagaatctaggaagcagagaacctgagtgtygcattcagcagaagtcagcttcctagggaatcttgcaggaagggtgaaggtagagaatctggtggggaagcaagcaaatgcccatcacatgcactttcctccaacagagcgactcagatgctataaaacttgctaacgcagtctcagggtctgatcacagtaacatacaatccaggttttaatcatcagaaatcacagtcctattgtcttctgcacagacccaaacacacttggaggtcatgttcaatatgaatacctcacagagaaggaaatttacacacgagaagtacatctgcagaaagccagctggcatgtcaaccattcaaaaactcagggtgttcgggataaagaagactcaggaagacaagtatgaagcataatctgtgacattccatgcggcagacgttagacacatacaagagagttgttggaaagcggaatttatcttcatataaacaac

SEQ ID NO: 454961 - DNA, 559 bp, Homo sapiens
tctgccaaggcctcccatggaccaaactcaactagaatctaggaagcagagaacctgagtgttgcattcagcagaagtcagcttcctagggaatcttgcaggaagggtgaaggtagagaatctggtggggaagcaagcaaatgcccatcacatgcactttcctccaacagagcgactcagatgctataaaacttgctaacrcagtctcagggtctgatcacagtaacatacaatccaggttttaatcatcagaaatcacagtcctattgtcttctgcacagacccaaacacacttggaggtcatgttcaatatgaatacctcacagagaaggaaatttacacacgagaagtacatctgcagaaagccagctggcatgtcaaccattcaaaaactcagggtgttcgggataaagaagactcaggaagacaagtatgaagcataatctgtgacattccatgcggcagacgttagacacatacaagagagttgttggaaagcggaatttatcttcatataaacaacactgagctaaatctcaatatttcagatctctagaac

SEQ ID NO: 454962 - DNA, 559 bp, Homo sapiens
tctgccaaggcctcccatggaccaaactcaactagaatctaggaagcagagaacctgagtgttgcattcagcagaagtcagcttcctagggaatcttgcaggaagggtgaaggtagagaatctggtggggaagcaagcaaatgcccatcacatgcactttcctccaacagagcgactcagatgctataaaacttgctaacgcagtctcagggtctgatcacagtaacatacaatccaggttttaatcatcagaaatcacagtcctattgtcttctgcacagacccaaacacacttggaggtcatgttcaatatgaatacctcacagagaaggaaatttacacwcgagaagtacatctgcagaaagccagctggcatgtcaaccattcaaaaactcagggtgttcgggataaagaagactcaggaagacaagtatgaagcataatctgtgacattccatgcggcagacgttagacacatacaagagagttgttggaaagcggaatttatcttcatataaacaacactgagctaaatctcaatatttcagatctctagaac

SEQ ID NO: 454963 - DNA, 504 bp, Homo sapiens
gaccaaactcaactagaatctaggaagcagagaacctgagtgttgcattcagcagaagtcagcttcctagggaatcttgcaggaagggtgaaggtagagaatctggtggggaagcaagcaaatgcccatcacatgcactttcctccaacagagcgactcagatgctataaaacttgctaacgcagtctcagggtctgatcacagtaacatacaatccaggttttaatcatcagaaatcacagtcctattgtcttctgcacagacccaaacacacttggaggtcatgttcaatatgaatacctcacagagaaggaaatttacacacgagaagtacatctgcagaaagccagctggcatgtcaaccattcraaaactcagggtgttcgggataaagaagactcaggaagacaagtatgaagcataatctgtgacattccatgcggcagacgttagacacatacaagagagttgttggaaagcggaatttatcttcatataaacaac

SEQ ID NO: 454964 - DNA, 559 bp, Homo sapiens
tctgccaaggcctcccatggaccaaactcaactagaatctaggaagcagagaacctgagtgttgcattcagcagaagtcagcttcctagggaatcttgcaggaagggtgaaggtagagaatctggtggggaagcaagcaaatgcccatcacatgcactttcctccaacagagcgactcagatgctataaaacttgctaacgcagtctcagggtctgatcacagtaacatacaatccaggttttaatcatcagaaatcacagtcctattgtcttctgcacagacccaaacacacttggaggtcatgttcaatatgaatacctcacagagaaggaaatttacacacgagaagtacatctgcagaaagccagctggcatgtcaaccattcaaaaactcagggtgttckggataaagaagactcaggaagacaagtatgaagcataatctgtgacattccatgcggcagacgttagacacatacaagagagttgttggaaagcggaatttatcttcatataaacaacactgagctaaatctcaatatttcagatctctagaac

SEQ ID NO: 454965 - DNA, 504 bp, Homo sapiens
gaccaaactcaactagaatctaggaagcagagaacctgagtgttgcattcagcagaagtcagcttcctagggaatcttgcaggaagggtgaaggtagagaatctggtggggaagcaagcaaatgcccatcacatgcactttcctccaacagagcgactcagatgctataaaacttgctaacgcagtctcagggtctgatcacagtaacatacaatccaggttttaatcatcagaaatcacagtcctattgtcttctgcacagacccaaacacacttggaggtcatgttcaatatgaatacctcacagagaaggaaatttacacacgagaagtacatctgcagaaagccagctggcatgtcaaccattcaaaaactcagggtgttcgggataaagaagactcaggaagacaagtatgaagcataatctgtgacattccatgcrgcagacgttagacacatacaagagagttgttggaaagcggaatttatcttcatataaacaac

SEQ ID NO: 454966 - DNA, 559 bp, Homo sapiens
tctgccaaggcctcccatggaccaaactcaactagaatctaggaagcagagaacctgagtgttgcattcagcagaagtcagcttcctagggaatcttgcaggaagggtgaaggtagagaatctggtggggaagcaagcaaatgcccatcacatgcactttcctccaacagagcgactcagatgctataaaacttgctaacgcagtctcagggtctgatcacagtaacatacaatccaggttttaatcatcagaaatcacagtcctattgtcttctgcacagacccaaacacacttggaggtcatgttcaatatgaatacctcacagagaaggaaatttacacacgagaagtacatctgcagaaagccagctggcatgtcaaccattcaaaaactcagggtgttcgggataaagaagactcaggaagacaagtatgaagcataatctgtgacattccatgcggcagacrttagacacatacaagagagttgttggaaagcggaatttatcttcatataaacaacactgagctaaatctcaatatttcagatctctagaac

SEQ ID NO: 454967 - DNA, 473 bp, Homo sapiens
ctatccatcagtgaaatggattgcaaatagaaagagtmataccatgtcacttaagaatacaatcatggatgaggctgccacctgctgttgggggccactgcagaagaaattccagaacactggactggagagcacctcactttccttacagctctaagtttctgactcagtgacctgattcagtaccatatacacaaagacccacttacacaaatgactgttcttcacactaggcccatggagacagggataaaatcctgaatttgctcagataccttctccgctactgacatctaggcattacacaattcatccttcatatttaacctttgaagtttgctacttctcagagagactaatgagtagtgagcaaatatcctgaagctgagaatgcttctacctcctctcaaaacaacggaatattcatcaaaacacagcagttctgcacttaactttaggccttttctaacacc

SEQ ID NO: 454968 - DNA, 590 bp, Homo sapiens
aaacacagcagttctgcacttaactttaggccttttctaacaccttgtttcttggcagtaactgtggccagaatagctctttccacagataaaggaccttttgaaaggatagggtctctagatagaaaagcaaatgcctcattccagaaggtcttcaagaagaaaatgttgtggtgataacaaacataactgattataatctattctatgaaaaaagcttatgaaacagtagatgtgtgtatctagtacataagagctgaatgtcaatatatatagatatatacacacactcaaataaataatagttatctctaactagagaaattctagttgccttatattttcttctttttccttactatattttctacaataaacatgtgtttttaacaagaaaagtcttttctggtgtgctttttaattttctttgtttaagtgagagtgaggctacataactacayggctaggtagacttttagaaaacttggctgctctagaaaattgacatatcctgatttcttccatagcttggatcttgacctagagggaaatataaaaatgttgacttgaacctgaggggtgccattttc

SEQ ID NO: 454969 - DNA, 590 bp, Homo sapiens
aaacacagcagttctgcacttaactttaggccttttctaacaccttgtttcttggcagtaactgtggccagaatagctctttccacagataaaggaccttttgaaaggatagggtctctagatagaaaagcaaatgcctcattccagaaggtcttcaagaagaaaatgttgtggtgataacaaacataactgattataatctattctatgaaaaaagcttatgaaacagtagatgtgtgtatctagtacataagagctgaatgtcaatatatatagatatatacacacactcaaataaataatagttatctctaactagagaaattctagttgccttatattttcttctttttccttactatattttctacaataaacatgtgtttttaacaagaaaagtcttttctggtgtgctttttaattttctttgtttaagtgagagtgaggctacataactacatggctaggtagactttyagaaaacttggctgctctagaaaattgacatatcctgatttcttccatagcttggatcttgacctagagggaaatataaaaatgttgacttgaacctgaggggtgccattttc

SEQ ID NO: 454970 - DNA, 560 bp, Homo sapiens
agaaaatgttgtggtgataacaaacataactgattataatctattctatgaaaaaagcttatgaaacagtagatgtgtgtatctagtacataagagctgaatgtcaatatatatagatatatacacacactcaaataaataatagttatctctaactagagaaattctagttgccttatattttcttctttttccttactatattttctacaataaacatgtgtttttaacaagaaaagtcttttctggtgtgctttttaattttctttgtttaagtgagagtgaggctacataactacatggctaggtagacttttagaaaacttggctgctctagaaaattgacatatcctgatttcttccatagcttggatcttgacctrgagggaaatataaaaatgttgacttgaacctgaggggtgccattttcactgctgaagtagtttcatggatcatgaattggagaaatgacttcagcaacacgggtgttaaaaacagaaagcacaagtgacccacaatagatgatggagaacaaagagcaagctgggaaaagcagtggc

SEQ ID NO: 454971 - DNA, 560 bp, Homo sapiens
agaaaatgttgtggtgataacaaacataactgattataatctattctatgaaaaaagcttatgaaacagtagatgtgtgtatctagtacataagagctgaatgtcaatatatatagatatatacacacactcaaataaataatagttatctctaactagagaaattctagttgccttatattttcttctttttccttactatattttctacaataaacatgtgtttttaacaagaaaagtcttttctggtgtgctttttaattttctttgtttaagtgagagtgaggctacataactacatggctaggtagacttttagaaaacttggctgctctagaaaattgacatatcctgatttcttccatagcttggatcttgacctagagggaaatataaaaatgttgacttgaacctgaggggtgccattttcactgctgaagtagtttcatggatcatgaattggagaaatgacttcagcaacacgggtgttaaaaacagaaagcacaagtgaccyacaatagatgatggagaacaaagagcaagctgggaaaagcagtggc

SEQ ID NO: 454972 - DNA, 586 bp, Homo sapiens
gctgctcccaaaactccaggtatttttaaccttataaacctccagaataatgagaccactgggttcagtaaattgctttgttttgaagcastattagacaaagtgggagactagaagatatatctgtcaatgacatgtcctttaagactacttagattttgttgaatttgtggatcattccttactttagcaaatggtaaattaactctctcttttctctctctctctagctggcacactttttccagtagccattctacttggtatgcttacttatcagctgtcctccaggggcctcacattagatgtttctcttgactaaccaaacatgacacacagctgaagtcagaaaaaccagattgataatttcactcaaactattttccttcattctaacaatttactggagtacacaattgtgactatttttagccataggaactcatagaaagaccaacttcattagacctacaaaatcgaattgtgtaacagtatatgcagtatgtgtaggaataaaaagcatttctcaaatatgcagtactggattttgcaaaagcaccttacacttagctataaaggagtggaa

SEQ ID NO: 454973 - DNA, 569 bp, Homo sapiens
agcttcagtctctgtgtgttcacaggtgctgtaaacacacgcatcactactaatatcccacttcagtgctattgctgctcccaaaactccaggtatttttaaccttataaacctccagaataatgagaccactgggttcagtaaattgctttgttttgaagcagtattagacaaagtgggagactagaagatawatctgtcaatgacatgtcctttaagactacttagattttgttgaatttgtggatcattccttactttagcaaatggtaaattaactctctcttttctctctctctctagctggcacactttttccagtagccattctacttggtatgcttacttatcagctgtcctccaggggcctcacattagatgtttctcttgactaaccaaacatgacacacagctgaagtcagaaaaaccagattgataatttcactcaaactattttccttcattctaacaatttactggagtacacaattgtgactatttttagccataggaactcatagaaagaccaacttcattagacctacaaaatcgaattgtgtaacagtata

SEQ ID NO: 454974 - DNA, 569 bp, Homo sapiens
agcttcagtctctgtgtgttcacaggtgctgtaaacacacgcatcactactaatatcccacttcagtgctattgctgctcccaaaactccaggtatttttaaccttataaacctccagaataatgagaccactgggttcagtaaattgctttgttttgaagcagtattagacaaagtgggagactagaagatatatctgtcaatgacatgtcctttaagactacttagattttgttgaatttgtggatcattccttacttkagcaaatggtaaattaactctctcttttctctctctctctagctggcacactttttccagtagccattctacttggtatgcttacttatcagctgtcctccaggggcctcacattagatgtttctcttgactaaccaaacatgacacacagctgaagtcagaaaaaccagattgataatttcactcaaactattttccttcattctaacaatttactggagtacacaattgtgactatttttagccataggaactcatagaaagaccaacttcattagacctacaaaatcgaattgtgtaacagtata

SEQ ID NO: 454975 - DNA, 547 bp, Homo sapiens
gcacagggcaatgggcatgtaatgtcctatgattaagacctacagtatgtacaatattactgcaacagacactgagactcacttagcattgtttcatagcatccgagttgccctgttggaggaaagtgcatgtgatgggcattcatttgcttctgccatcagacagattctctacctttgtccttcctacaagattccctaggaaggcagggytcagtggctcacgcctgtaatcccagcaatttgggagtccgaggcagtcagatcacaaggtcaggagttcaagactagcttggccaacatggtgaaaccccgtctctactaaaaatacaaaaattagctgggcatggtgtcacatgcctgtaatcccagctactcaggaggctgaggcaggagaattgcttgaacagggacctgggaggcagaggttgcagtgagccaagatcgcaccactgcactccagcctgggctacagagtgagactctgtctcataaataaataataaataaataaatgattctctaggaagctgactcccactgaatg

SEQ ID NO: 454976 - DNA, 549 bp, Homo sapiens
gagaacagcctgggtaagtaacatagggagaccctgtgtctacaaaaaataaaaattagcagggcatggtagcatgtacctgtagtcccagttacctgggaggctgggatgggaggatcacttcagcccaggaggatgargctgcagtgagctgtggtggcaccactgtactccagcctgggcgacagagcaataccttgcctcacaaaaagaaaaaaaaaaaatcaccagggtaaagcataacagcataaacaggagagggtgccatcaatggaccagaacatttcagaagccccagaaaggtaggaaatagattagattagacaattaaatggatatatatatatatacatgaaccccacaggccatgacacttgtagagtaagcataggtcttccctagtgagcctcagagaagcatcaaacccaagagttaatatatgcctattcccctgctacaactgaggaatgcaaatatacagggcaataaaataatctgggcaattcattaaagaaatgcgttcagaaagagctagatatcctaacctcc

SEQ ID NO: 454977 - DNA, 549 bp, Homo sapiens
gagaacagcctgggtaagtaacatagggagaccctgtgtctacaaaaaataaaaattagcagggcatggtagcatgtacctgtagtcccagttacctgggaggctgggatgggaggatcacttcagcccaggaggatgaagctgcagtgagctgtggtggcaccactgtactccagcctgggcgacagagcaataccttgcctcacaaaaagaaaaaaaaaaaatcamcagggtaaagcataacagcataaacaggagagggtgccatcaatggaccagaacatttcagaagccccagaaaggtaggaaatagattagattagacaattaaatggatatatatatatatacatgaaccccacaggccatgacacttgtagagtaagcataggtcttccctagtgagcctcagagaagcatcaaacccaagagttaatatatgcctattcccctgctacaactgaggaatgcaaatatacagggcaataaaataatctgggcaattcattaaagaaatgcgttcagaaagagctagatatcctaacctcc

SEQ ID NO: 454978 - DNA, 640 bp, Homo sapiens
tgttttgagctttagaaacaatagttgtcaaaagtcttgcacagtatagctggcacagtatatatagatgcttaattgacaacgyggcatgaaacactgtttctgctaaagggatattagaatatggagaacaggtcagagggaaaatttggagagctcttcctgtacctaaagttacatttctgagggctttttacagttactctgattaatttgatgaaaatattgaaacaaacagcatagccatgtatttgtaaattctttttttggtacctaggtcccgaacctcctaggctctgagggaattgtatttatggagaaagccgagaatatttttccttagcttctagaaccttctaatgacattgaaggtttttttgttcaggttttttctaaccacctcaggcactctgccacttttttgaagtgtgaattgcctgctgtcagcctggagttctcacctccgcaatcctggctgcaggcatatttgcatattggatgctgtgttccttaaccccctgaggtttgaatccacttggagtctgtgtgtgaaagctggctactttcaaacccatgaacagtttcagctttgtggtctccagaaaaacagaaaacccccaacaatagttccattcacttt

SEQ ID NO: 454979 - DNA, 614 bp, Homo sapiens
aacataaatcctacaagagaaatactgtctttttggccataagaccaagaaaatgcagccttgtgaatataagagtgtgaaatgaatctttgtttatattttcttatatgcatttatttttacgttctccatgcagtggtgtggtggcaaaaaagccaaaaccctgagagtgaaaagwatatttctggcctgaagaatcaggaaaagaagacatgaggtctaaagagggagggaatgatcatcaattttttaactctgctctttctcttgacatgtttctccactggtggccctgatattccttttcatagccagaaagagaaagtgtagggaaattcttgtaaagggaaaaactagagaagaggatctcctaactctgtgtatgaactaacacaagacccaagctgactcatgtgctgtgtatgtgtggaacagaaccgaagtaacaccaaaagtttgaaaactgaattcaaattagaactactgtacacagaagacaagacagaatttgtattctgaacatgaatggattgattgtctactggaacaacaatagcaacaaacacaacctcttccaaagtatattaatgggatgcagagtcttacaatataat

SEQ ID NO: 454980 - DNA, 614 bp, Homo sapiens
aacataaatcctacaagagaaatactgtctttttggccataagaccaagaaaatgcagccttgtgaatataagagtgtgaaatgaatctttgtttatattttcttatatgcatttatttttacgttctccatgcagtggtgtggtggcaaaaaagccaaaaccctgagagtgaaaagaatatttctggcctgaagaatcaggaaaagaagacatgaggtctaaagagggagggaatgatcatcawttttttaactctgctctttctcttgacatgtttctccactggtggccctgatattccttttcatagccagaaagagaaagtgtagggaaattcttgtaaagggaaaaactagagaagaggatctcctaactctgtgtatgaactaacacaagacccaagctgactcatgtgctgtgtatgtgtggaacagaaccgaagtaacaccaaaagtttgaaaactgaattcaaattagaactactgtacacagaagacaagacagaatttgtattctgaacatgaatggattgattgtctactggaacaacaatagcaacaaacacaacctcttccaaagtatattaatgggatgcagagtcttacaatataat

SEQ ID NO: 454981 - DNA, 614 bp, Homo sapiens
aacataaatcctacaagagaaatactgtctttttggccataagaccaagaaaatgcagccttgtgaatataagagtgtgaaatgaatctttgtttatattttcttatatgcatttatttttacgttctccatgcagtggtgtggtggcaaaaaagccaaaaccctgagagtgaaaagaatatttctggcctgaagaatcaggaaaagaagacatgaggtctaaagagggagggaatgatcatcaattttttaactctgctctttctcttgacatgtttctccactggtggccctgatattccttttcatagccagaaagagaaagtgtagggaaattcttgtaaagggaaaaactrgagaagaggatctcctaactctgtgtatgaactaacacaagacccaagctgactcatgtgctgtgtatgtgtggaacagaaccgaagtaacaccaaaagtttgaaaactgaattcaaattagaactactgtacacagaagacaagacagaatttgtattctgaacatgaatggattgattgtctactggaacaacaatagcaacaaacacaacctcttccaaagtatattaatgggatgcagagtcttacaatataat

SEQ ID NO: 454982 - DNA, 614 bp, Homo sapiens
aacataaatcctacaagagaaatactgtctttttggccataagaccaagaaaatgcagccttgtgaatataagagtgtgaaatgaatctttgtttatattttcttatatgcatttatttttacgttctccatgcagtggtgtggtggcaaaaaagccaaaaccctgagagtgaaaagaatatttctggcctgaagaatcaggaaaagaagacatgaggtctaaagagggagggaatgatcatcaattttttaactctgctctttctcttgacatgtttctccactggtggccctgatattccttttcatagccagaaagagaaagtgtagggaaattcttgtaaagggaaaaactagagaagaggatctcctaactctgtgtatgaactaacacaagacccaagctgactcatgtgctrtgtatgtgtggaacagaaccgaagtaacaccaaaagtttgaaaactgaattcaaattagaactactgtacacagaagacaagacagaatttgtattctgaacatgaatggattgattgtctactggaacaacaatagcaacaaacacaacctcttccaaagtatattaatgggatgcagagtcttacaatataat

SEQ ID NO: 454983 - DNA, 511 bp, Homo sapiens
agaatatacctgggttcttatataactaagtaattgttggtgtgcacaaggcagcataccatagaggtgacacacctgcattcaggcacacttggctgaaatccagatcgtatcattaatagtcataagcccttgaatgaattacttaaccattgggagcctcagtcaccacacctttaaactgggtactgtaagaatactgacctttgtgagactagaaagtaacatatgaaggagtttagcatagcatctgrcatatgataagagatcaataaaattggagctatcattttaacttaggtagtatatgtgacaaacagctgtggcttattctgtgtaatcatagcaaaacacatgggcccactttttgcaatatgaaaagattggataatagatgttagaaagcttcaaggtcaataagcctttaatagccactctatgctactgattccttttattagaaataaaatcacttatggataggaatttgaaatgtatcaaatggcctgaa

SEQ ID NO: 454984 - DNA, 501 bp, Homo sapiens
attacttaaccattgggagcctcagtcaccacacctttaaactgggtactgtaagaatactgacctttgtgagactagaaagtaacatatgaaggagtttagcatagcatctgacatatgataagagatcaataaaattggagctatcattttaacttaggtagtatatgtgacaaacagctgtggcttattctgtgtaatcatagcaaaacacatgggcccactttttgcaatatgaaaagattggataatagatgttagaaagcttcaaggtcaataagcctttaatagccactctatgctactgattccttttattagaaataaaatcacttatggataggaatttraaatgtatcaaatggcctgaaatcagcaatgattcatttttttttttgagtaaggctgaatagtttataattagcagttactaagttaacaactcattacatttaaggacctcaggggaaattaactatttcaaactgggaaagagccata

SEQ ID NO: 454985 - DNA, 592 bp, Homo sapiens
gatccatatattcaatacaaattcaatgtaaatccaaatgctagaagagtttttatagacattgacaagctaaatctatgctttatgtggaaatgcgagatctaaaataaccaaagctatcttgaaaaataaaccaaagttggaagattacctcatgacatcatgaggtaatataaagctacactaattaagacagtgcagtagtggcataagtattggcacaaaagtttgatgtaacaaaatagaaagttaaaacatacatacgcatttatatactgtcatacataaatatttatatagtatcatttgacttatgaacagacaatcaaattaaagggagaaagaaaaggtttttctttcaacacgttgtgctatagaaaaatgtatattcatggtgaaaaaaagaaaaagagaagtctgacccttaccttacattaagcaaaacaattgtttagatatagaatgtagactaaaagataaaagaartgagtataggacttttagagaaaagaagaaggaaatattttttatgacttgggagacaagctttttcaccaattcacagagagcaataacttttgaataatatata

SEQ ID NO: 454986 - DNA, 592 bp, Homo sapiens
gatccatatattcaatacaaattcaatgtaaatccaaatgctagaagagtttttatagacattgacaagctaaatctatgctttatgtggaaatgcgagatctaaaataaccaaagctatcttgaaaaataaaccaaagttggaagattacctcatgacatcatgaggtaatataaagctacactaattaagacagtgcagtagtggcataagtattggcacaaaagtttgatgtaacaaaatagaaagttaaaacatacatacgcatttatatactgtcatacataaatatttatatagtatcatttgacttatgaacagacaatcaaattaaagggagaaagaaaaggtttttctttcaacacgttgtgctatagaaaaatgtatattcatggtgaaaaaaagaaaaagagaagtctgacccttaccttacattaagcaaaacaattgtttagatatagaatgtagactaaaagataaaagaagtgagtataggacttttagagaaaagwagaaggaaatattttttatgacttgggagacaagctttttcaccaattcacagagagcaataacttttgaataatatata

SEQ ID NO: 454987 - DNA, 527 bp, Homo sapiens
aaaggttctggctatgtggtttcycttcaaggctcaggaaaaaaacctgtgaagctttcggtgcttgactcgggctgagcaggagtttgggggtgctcctcagtcttccgccgcactcggctttaaagcaggggagagggcgaggagtgaacccccggtgtgacttatatggtaaacaaaggagctgcagccacgccgtggtgctggggaatgtggccgtttttagccttttatgcatttggggaaaatggagatctcgggggcatctgggtgcatataagtgaggccttagctctccggcacttaaagtagggtaacgaaggaaggagagtgatcaatgttctaccgatcgattacattctgcgtcgttttcattctctgtcaagaaacagaaacacttttatccgtgttgcccgacccaggctagtgattcctagttcgcctggcaaccgagattccaatgaagccaatgaagccaatgacccggtttgctacttggttaaatcactgggattcactgcacaact

SEQ ID NO: 454988 - DNA, 616 bp, Homo sapiens
ttgtggttgcatatacattttagaatattttttcagtttctgtgaagaatgtcattggtattttgaaagagattgcattgaatttttagatttctttgggtagtatgaacattttaccagtattgattcttccaatccatgaaaatgaaatatctgtccatttttggtgtcctttttaatttttttcatcagtgttttatagtctaaattgtagagatctttcatttccttggttatttcataggtatttatttttatgtgtggctattgtaaatgggattactttttatttctttgtcagattgtttactgttggcatatagaaatgctaccaatttttgtacattaattttgtatcttgcaagtttattgaatttgtttatcaattctaatagttttatggtggaatctttargtactatgttgaataagagttatgaaagcgggcatccttgtcatgttccagatcttagtagaaacactttcaattcttccccatttctatgatactagatgtgggtttgtcatatattgcttttatcatgtgaaggtatattgtttctatatgcagttttttgagagtttttatcatgaaggatgttgaattttattaaat

SEQ ID NO: 454989 - DNA, 596 bp, Homo sapiens
tatccattcagccatactgtgtcttttgattgaaaagcttattctatttacattcaaggttgttattgataaatagagacttactctacagccatgtgaccctgaattcacccaatctyatctgatcttggaagctaaacagggtcaggcttggttaatacttggatgggagacttactcctaccattttgttgttttctgattgctttgtggccttctcttccttttttactgtcttctttccatgaaggtagttttctatggtgttatgatttaagtttttggtttgtattttcagggtatctgttgtgtgattttcaattcgaagttaccatgaggcttgcaaatattatcttataatctggtattttaaattgatgacaatactgattgcataaacaaacacacaaaaggaaaattaataaaaactccacacttagctttattcctctgctttttaactttctattgtttccctttatgtcatattatactgtctacataacaattgcagtgttatggtattctgtgttttactgtgtgcttactattaccagtgagtttttatctttagatgattcttttcttgatcatca

SEQ ID NO: 454990 - DNA, 505 bp, Homo sapiens
tgagtttttatctttagatgattcttttcttgatcatcaacaccattttcttttagattgaagaactttctttaacatttcttgtagaacaggtctggtattgatgaaatccctcagcttttgtttgtctgggaaagtctttacttatccttcatgtttgaaggatagttttgctggatatactattctaggataattttatttttcgttcggcactgtaaatatgtcatgccactctctcagcctgtaaggttttcactgaaaagtctgctgccagacatactgggactcacatgtatgttatttgtttcttttctcttgctgcttttaggataatttctttatccttgacctttggraattcaatattaaatgtttcaaggtagttgtctttggcttaaatctgctaggtgttctataaccttttacttgaatgttgatatctttctctaggattgggaaattcttggatattacccctttgaatatactttctatccctatc

SEQ ID NO: 454991 - DNA, 583 bp, Homo sapiens
gggctgtagtgggacctcagcaagtctcttgtcacatctggagaaaaagataatcaagcctgcttaacagctgtagggtaccatctgcaggactttaggcatattatctatacycaagatagttttgaaggaagagaagatgttgagaatctcttaaactcagccccaaaagatcacctcatttctacttcatagacctacaaaagcatgttagttcttaattctttcaaacttcagtgctttctttactccccacataccttttatatttgacagaaaggcattattccactttttcttcatgagtactgatgaccaggaccaccttctcacagatttccctggtctgcttgaagttgttcttgataataatttcagtaaccttttgatcatctcctaactaggcttgcgtttctccagatgatgggatgagggtgtgtgtgtgtcatattggagagacctactttgctccgattctggtcttctcagtggaaacttcaagctcacttctgtctgcaacttgattttccctctatctatgtgctcttacaagcatcaaaaatgattatgaatgaagaaataa

SEQ ID NO: 454992 - DNA, 583 bp, Homo sapiens
gggctgtagtgggacctcagcaagtctcttgtcacatctggagaaaaagataatcaagcctgcttaacagctgtagggtaccatctgcaggactttaggcatattatctatacccaagatagttttgaaggaagagaagatgttgagaatctcttaaactcagccccaaaagatcacctcatttctacttcrtagacctacaaaagcatgttagttcttaattctttcaaacttcagtgctttctttactccccacataccttttatatttgacagaaaggcattattccactttttcttcatgagtactgatgaccaggaccaccttctcacagatttccctggtctgcttgaagttgttcttgataataatttcagtaaccttttgatcatctcctaactaggcttgcgtttctccagatgatgggatgagggtgtgtgtgtgtcatattggagagacctactttgctccgattctggtcttctcagtggaaacttcaagctcacttctgtctgcaacttgattttccctctatctatgtgctcttacaagcatcaaaaatgattatgaatgaagaaataa

SEQ ID NO: 454993 - DNA, 583 bp, Homo sapiens
gcttcatttttaaagaaactgttttttagagcagttagttgtaacattttgcatacctgctaacaatgcatgaatgatttagtctgttcacctcctcaccagcatttagtgtcattactatatcttattttagccatttttatagtagtgatatctcattgtggcattattttgtatttctacaatggctaatgatgttaaacatcttttcatgtgcttatttgtcatctatagatcacctttcagtaaagcttctctttctgttttttgaatattttctaattgtttttatttagtgttaaagttttatatttctttatgcatcctagatattagctrtttattagatatgggatttgtacatgttttcaagtctgtagcttgtcatttcatcctcttaactagaaatgtttaaattttaatgaaatctaacattgatatttgttcttttacaccacttttatttttaaaaaggaaaaggtaaggaaccgagaaaacaaggatttacccaaatttttgcaggaaagaaaatcaggtttttgcttcattaattgcttatagtgaggtgttcaatagatgggta

SEQ ID NO: 454994 - DNA, 541 bp, Homo sapiens
aaatgctataatttgcatacagagctacaaaggagtttygtagggatggataggtgtgctggcggagcgggctgcaggaacagagcaaataacatattgtctgtaatgcaatttgaaaatattagagtatctatgcttttaacgttattgaataaattcatattctcatatcatgtaaattccttgttttgaaatttaaagtattctacacaagtacagaagggagaccctctaatatttgaaaatcctatcctcattgctattgttttgatcttgccattaagtgctaccacatgtgcagggctctattttcgtctcttaccacaagtataaacctattatccttcgcataatttagaatataaaagagaaagaaagaattcacctttgacatatatgccccaatttctagtcttgttatttctcaaatttcattgaagctgggcctcatcttgaccattgggatttcctttaattattattattttcagctttagctactttcctgtactctacttgttacaaacattgttctctgaca

SEQ ID NO: 454995 - DNA, 541 bp, Homo sapiens
aaatgctataatttgcatacagagctacaaaggagttttgtagggatggataggtgtgctggcggagcgggctgcaggaacagagcaaataacatattgtctgtaatgcaatttgaaaatattagagtatctatgcttttaacrttattgaataaattcatattctcatatcatgtaaattccttgttttgaaatttaaagtattctacacaagtacagaagggagaccctctaatatttgaaaatcctatcctcattgctattgttttgatcttgccattaagtgctaccacatgtgcagggctctattttcgtctcttaccacaagtataaacctattatccttcgcataatttagaatataaaagagaaagaaagaattcacctttgacatatatgccccaatttctagtcttgttatttctcaaatttcattgaagctgggcctcatcttgaccattgggatttcctttaattattattattttcagctttagctactttcctgtactctacttgttacaaacattgttctctgaca

SEQ ID NO: 454996 - DNA, 597 bp, Homo sapiens
ttccacttgggatttaaatttatgcttggtaagactatgttatccatcagatctttctgtgactcagactcccaaaactgttttcttctcagaagaattgttctgctagtgtccagtcctctcatcatataagatctcggcacattattgtaaacacctctcctgaccttttaaaatggagtcagacagccaaagagagcaaatgaataagcattgggaaagagcctaaatctagaattcaaccttagcatcctcctccttgcccattccaactattgggtctgcttttcatttgtccagtctttcatttgtggaytcatattccagttactgatacccgtctcagatccagttactgatatccatctcagatcctcaccctcgtgctggcaaccaatgatgccgtttctctgtgtccctgatttttgttggtctcactccctcctcagacccctcttaaagatttatttgttcactttctctgtttcacctcagctctacttccagctaggagacggtgctcactctgctcacccaaattaaatccaacccagccagaccagccacggtctttctgtcacagtcttaaacagaatc

SEQ ID NO: 454997 - DNA, 602 bp, Homo sapiens
tgttaacacttaagccatccgcggtcagcagagctaaaagagcactgtaaaaaacgccctttggggttttggggatcgcaggcaccatcccccgcccccgaaagtgccgcggggcctgcagggagttcgctggctggttccagcgcccctgtactccagttcccgtcttgtttgcttgtgtgctccctcctgtgaggagttgagagcaatgggcttggtaaaggaggcacacctgtcacgaatcccgtgaatgagtcagagaaacatcctgcttcagtgtcagggcctgagtgtgggcatctcaggaccttctccattctccttgtgctgcaagctgctgcctccagtgtcctggtctccagatggaagaatgcatgtggcaattcctrtaactatttctggctgaagaaagacatctatgaagtcaggaagctcagcctaagggtactccaaaactgccctttcctagggattccagatcccacatccatctttttggagctgggaataagtattttcacctgggcatctgggagggcagatactgtacaggtggctgaaggtacaaccacccctaaattactaatccagaaaagatcatt

SEQ ID NO: 454998 - DNA, 488 bp, Homo sapiens
tctactgtggtatgatttatggattactgtggtggagaaagtcacagatatcataaggagagaggtcttgtggggaggttggggtcatttttcccagtcttgtccttagattcagaagatttatttaaagagtgagttttgggagtaaggtagtaatggaagtgactgattgaactactgtctgtcacatccttcaaaccactcctcaaatcaacaaatacacattacatatrtcaacttttgatttcagccaaaagtagagaaaatcttctacaaaaatgcagtggtcttttggaagtagataaatctttcagagtgggttttggtgtcctagaatagggtcctcctctgtggcactagtggtggtatggggtgtgactgctggctgttatcccctaccctcatgcttagagcttggggtatatgtaccttcttcttcatgcagaggcaaggaagagcaggagaaaaagggcaaaacaaaacacagc

SEQ ID NO: 454999 - DNA, 558 bp, Homo sapiens
aatgaaaacaagtaatatgatcactttctaaattttaatcttgtgtaatttgtgacagcttgttctaaccacatatgtgaaggtagaaaatacagcttcatctgtaaaggactattgctcggatttcctctatttcagattgagtgaaaattgcacagtgattacaggaggcccttgaaaatgccttgggatttttttatagagtatgaatctatattagtttaggtgttaactgaattaatacgtagagaaagtcaagaaacaacagattgagaaactggtcctaaattagaaataattacttttrtagttattttaaagttcttattaatcttcagaaatgaatgtagtgtgacattctgagcttaggaacgatcatacacgtttatacacataacacatacaggactggcagctccaaggtgaatgatctttctaggatcccatcaaccaatgtatagtagatttaggaatggcaatctagttaggaagttccatatcccagataataaaaccactatgttgttcatactcctcatttcaagagacaatacgaat

SEQ ID NO: 455000 - DNA, 571 bp, Homo sapiens
agttaacaatgttgtatcgtatatttcaaagtagctggaagaaggctggatgtggtgcctcacgcctataatcccagcactttgggaggccgaggtgggcagatcacttgaggtcagcagtttgagacagcctggcaaacatagtgaaacccatctctattaaaaatacaagaattaggtggatgtggtggacacctcctgtaatcccagctactcaggaggctgaggcaggagaatcgcttgaacccaggaggcagaggttgcagtgagccgagatctagccaccgcactccagcctgggcaatagagtaggactctgcctcaaagaaaaaaaaamgtagctagaagagaggactagaattgttctccacacatagaaatcatagatactcaaagtatctattgttttgaacaataccctgaatcaaataaataccttgactttatcattatacagtctatacatagaacaaaatagcacatgtactccagaaatgtgtaaaagattatgtcaatttaaaaaactttaggttcaagcatctcctttaatactcagtggcttcaaaaatat

SEQ ID NO: 455001 - DNA, 654 bp, Homo sapiens
ggttgtgtggggggtaatgttttaatcctgctaatgttctctttcaaaagcaaattagtctcagttcaaaagaaaaaaaacataaaagtgaaagaactagaggcatggcagaggcttttacattttgattatacaacagttatcaagtccaaaattcccctgtgcttatcctcatcaggctcctccttgctccagtgacccctggaactgcactcagggtgcctgaactgtctctgcactttttcttaaccttcttagaacccattctctcaaaccagactcggggggaaaggtaatgatataagaatttctggaaaacagatggccacagcattggatacaaatttacaaaatatcactcctattattccttttttatatagcaagtttataaaacaaaccacggcaacattttcagtagtgtctctgaatgaccatgacacatgacaagctcatgaactcttaaatgagttttaaatgatggtggtggtaaggaatttaggaggactaggatgayggtagtgaagaaaaagagagtgtaacaccatcaatactgacctgacttattcatttatttggttgaacagtcaataattcatttaaagaacaatggatgaagacattagatgctgggtgttcagtctagattcctta

SEQ ID NO: 455002 - DNA, 630 bp, Homo sapiens
tacaatcagaaaaatagtagtcaaaattttgattatcaaagatgagaaattcttgaatgaagcaagagaaaaatgactcataccttactgagaggggaaaggaagaaacgagtcaggcaggcagttagggtggatccttggaagaattctttcaaaccaaagaatagccaacaggcacagataaggtaacttgcacagggrggtttgcctaggatatgcccacagccacaatataaaaaaggctacacaagtgatttgcccagacatgcccactatggaaaattccgtcccctgacacatgcacattaagaggaacaaggcaacatggagtagctcaagctaagggcccacatattcattaggaggatggagtggagctataagaaatttgcaccttatgcaaatgagatgcccaggcttcatccatttcctgtaaaagctttgcattcaactgtaaagcagcaaccctctttcagggccccctcttcaccacagggagcttttttctttcacttattaaatttttgctccagcctcaccctttgtgttcatgctccttaatactcttggttgtgagacaaagaactcctggtgatatcacacaataaaagactgctacattgtggtgca

SEQ ID NO: 455003 - DNA, 574 bp, Homo sapiens
actatatgccttatacagggaacatactttagatagaaaaaatataaattgaatgaaagcaaaagtatagaataataatacagtatgtaaaaagcaactacaaaaaatgggagtgtctgtactaatttatacaaaatgggctttaaaacaaaaaatgttcctagagataatgagggatattttatgattatgaaagagtcaatctatcagaaagatataacaattatacacatatatgtgcctaaaagcaaagcatataatacatgaaataaaactaatataggggagaaattggcaattccacaatagtagttggagattttaatgctgcattgtcaatagtagaacaatagagagaagataagcaagaaaacgattcttgagcaactctataaaacaccaaattayataacttagatgaaatggacaaaatcctacaggcacaaactactgactgccttaaaaagaaataaatactctgaatagagctgtaacaagtgaagagattaaaatagtaatttaaaaaactcactaagaaaagcctaattcagagatcttcatgaataaattctac

SEQ ID NO: 455004 - DNA, 593 bp, Homo sapiens
gcttaaatacccttaatgtctttagagttttcttaaaataaagtccaatgaagttgaatgatttctagatctggccattacttaattttacagtcacatttcttcactgtacccttttatattctatgctccaagtaacactgtgctctctttttcccttaggctggttcctctctctgaaatgtttctcttacccactcttaacctgaagattatctttctggtttctgcttagtcacagatcttccttgacacatcaacccaacccctccagcaagcttccataacgtcctgttcttacttttctcaaagrcctttgcacttactgtgttccctattcaaagtactctttccatagcattcttgtttgtgtcattcaaggatcagctaaaaaataaccttttagtgagttcttgtctgaattttaaaactaacacagacacccaaacagccagttgttagtacatcaaaccagttttttaccttagttaaaaaacctaaaatttttagattttattttattattgaagactacctgaggcactgttgacctcagtctctagaatgtcaattgcgtgaggaaagagtccatt

SEQ ID NO: 455005 - DNA, 593 bp, Homo sapiens
gcttaaatacccttaatgtctttagagttttcttaaaataaagtccaatgaagttgaatgatttctagatctggccattacttaattttacagtcacatttcttcactgtacccttttatattctatgctccaagtaacactgtgctctctttttcccttaggctggttcctctctctgaaatgtttctcttacccactcttaacctgaagattatctttctggtttctgcttagtcacagatcttccttgacacatcaacccaacccctccagcaagcttccataacgtcctgttcttacttttctcaaaggcctttgcacttactgtgttccctattcaaagtactctttccatagcattcttgtttgtgtcattcaaggatcagctaaaaaataaccttttagtgagttcttgtctgaattttaaaactaacacagacacccaaayagccagttgttagtacatcaaaccagttttttaccttagttaaaaaacctaaaatttttagattttattttattattgaagactacctgaggcactgttgacctcagtctctagaatgtcaattgcgtgaggaaagagtccatt

SEQ ID NO: 455006 - DNA, 585 bp, Homo sapiens
tttacagtctgattttatatttgaagatgttatattcataacattcttacattttactatgagaagtaagtaaattatrttgtatattaaacgatggtaaatgctttgcaaaaagtagagcagatgacgtcaggtgatattaaagatggagaatgtctgtttgtgctgctataacaaaatatcacagacttggtaaattataaataatataaatttatttctcacagttctggaggctggaaggcccaagatcaagatgccagcaggttcagttgtctggtgagcactgttctttgcttgcatccaagatggcacctcatttctgcagccttcaagggaacaaacgttgtatcttcacatggcagaagggacagaaaggagtacttactcccttatgcccgttataagggcattaatcccattcaagaggattctgccctcatgacttattcacttcctaaagcctcacctcaatattaacacactggccattaagattctacagatgaattttggggaacacattcagactataatagagagcaatgtttaataaaaatattttcatttaactttgtcacttaa

SEQ ID NO: 455007 - DNA, 585 bp, Homo sapiens
tttacagtctgattttatatttgaagatgttatattcataacattcttacattttactatgagaagtaagtaaattatattgtatattaaacgatgrtaaatgctttgcaaaaagtagagcagatgacgtcaggtgatattaaagatggagaatgtctgtttgtgctgctataacaaaatatcacagacttggtaaattataaataatataaatttatttctcacagttctggaggctggaaggcccaagatcaagatgccagcaggttcagttgtctggtgagcactgttctttgcttgcatccaagatggcacctcatttctgcagccttcaagggaacaaacgttgtatcttcacatggcagaagggacagaaaggagtacttactcccttatgcccgttataagggcattaatcccattcaagaggattctgccctcatgacttattcacttcctaaagcctcacctcaatattaacacactggccattaagattctacagatgaattttggggaacacattcagactataatagagagcaatgtttaataaaaatattttcatttaactttgtcacttaa

SEQ ID NO: 455008 - DNA, 585 bp, Homo sapiens
tttacagtctgattttatatttgaagatgttatattcataacattcttacattttactatgagaagtaagtaaattatattgtatattaaacgatggtaaatgctttgcaaaaagtagagcagatgacrtcaggtgatattaaagatggagaatgtctgtttgtgctgctataacaaaatatcacagacttggtaaattataaataatataaatttatttctcacagttctggaggctggaaggcccaagatcaagatgccagcaggttcagttgtctggtgagcactgttctttgcttgcatccaagatggcacctcatttctgcagccttcaagggaacaaacgttgtatcttcacatggcagaagggacagaaaggagtacttactcccttatgcccgttataagggcattaatcccattcaagaggattctgccctcatgacttattcacttcctaaagcctcacctcaatattaacacactggccattaagattctacagatgaattttggggaacacattcagactataatagagagcaatgtttaataaaaatattttcatttaactttgtcacttaa

SEQ ID NO: 455009 - DNA, 626 bp, Homo sapiens
ttttttttagcttcagtttaaaaaaatttaaacagaaaacatgtttgctatcaagtccacagaatctgttagggagggccagtgagtggaagtttgtaaactaaacaaaaattaaatagttgctaagatttatgttacatattttatgaccatggcaaaacattgcataaaacattgggtgagtctattttcctgaaagttgtactcaaatagtaaatgtaacagattaagtattcctcatataacacttttagtggttcttcaatgtagatggcaagttgatggccaagttttcaaaacacagtctggcctagttataatgtgtaaaacagccaaataggaaaaataaaatctccaaggcagtttttctcagtttgttctatgaaaaaccatgatcttgtgatttcttcagtagaacaggtggtctttggaggttaacaacacacatttatgtgttaattayagcgtgaagccctgacataatgcaactggtctaattttgtttaacttaaaattttccagacttgtttaactatgaaacttattttcctggtggcacctcatattgtcccacagaagtagaattttaggaaaatcactttgggaaacattctacagtggggttg

SEQ ID NO: 455010 - DNA, 561 bp, Homo sapiens
attgttaatttaatgcctgctatgtaccagtcactatggttagttcttgggatacacattatggtgaacataaatgaccttaaaagaatgtgcagtctggcaaaggatacaaacaggcacacagataactgtcttatgaaagtcttcatcaacgatgtgtatagctctggccatccatgttcttcattaaatactggacaaatcaatgtatttctaaaaacacaggagtttcgctctctttcatctgcaaattccttgctgccacagcctatttcctgagaatgcccttgcagmggggatgacatatgtaaactgacttagttttggagaagtacagcttccaggttgtcatatctgaaaaggtctttccacctctgaaggaactgtcactttgctggctactccatgaagtgtagcagaatgaggttttatgataaaaaggattttaaccatttgatgcccacatagtaatagacattactggcacatggagtattcagtagtgcaccttacattttgtctttatggactcctttctgtgcctcaataacagcacaccag

SEQ ID NO: 455011 - DNA, 496 bp, Homo sapiens
tcttgcttcttttttggtgattagtgggaaattaaattctgaaactggggcaggggaaggcatgtttttatattcataggagacagcaatttttccagcagagaagcagaagacaacaactgcaacgaaggtgctactaccacaatcaggtagttcaaagctgccatgacagaggagcacttagaatgttcctgtggtccaaaggcatgttttaggcrtatattcatagaaaggaaaacatggctcgggggctaaaaattgaggctgtgaggttaagacgtctgtgcaaaataatgacgatgaaacagatgctgattgaccaggtttgttaattttacaaaggaaaattggacatcaagtaaaatattgaccaggatcaccaacttcctttgtatttatctttaccttttgtgagggattcacttgtaggttcattgtttgatgagggacaactcagtgagagtttcatttgggaatatgaaattatagaacaagg

SEQ ID NO: 455012 - DNA, 496 bp, Homo sapiens
tcttgcttcttttttggtgattagtgggaaattaaattctgaaactggggcaggggaaggcatgtttttatattcataggagacagcaatttttccagcagagaagcagaagacaacaactgcaacgaaggtgctactaccacaatcaggtagttcaaagctgccatgacagaggagcacttagaatgttcctgtggtccaaaggcatgttttaggcgtatattcatagaaaggaaaacatggctcgggggctaaaaattgaggctgtgaggttaagacgtctgtgcaaaataatgacgatgaaacagatgctgattgaccaggtttgttaattytacaaaggaaaattggacatcaagtaaaatattgaccaggatcaccaacttcctttgtatttatctttaccttttgtgagggattcacttgtaggttcattgtttgatgagggacaactcagtgagagtttcatttgggaatatgaaattatagaacaagg

SEQ ID NO: 455013 - DNA, 476 bp, Homo sapiens
aagtaacatttagcagatgaaaattcatcttaaataatctcaatcaatgcagctcatgaatgctgtagaactcaccaagttaaagagtcatcagtgagaccaggcatggtggctcatgcttgcaatcccaatactttgtaaggccaaggtgggaggattgcttaagcccaagagtttgagacgagcctaggtgacaaagtacaccccatctctacaaaaatttaagaaagaattagcgaggtgtgctggtktgtacctgtggtcatagctacttgggaggctgaggcaggaggatcacttgattctcggagtttgaggctgcagtgagacatgatcatgcccctgcactgaaggttgggtgacagaataagtccctgtctcaagaaacaaagaaataaaaacaaatagaaaaccagaagaaaaggagttatcagtgaaacaaaaagacaagaaatacaatacagatgtggtactta

SEQ ID NO: 455014 - DNA, 578 bp, Homo sapiens
gcagaacagagtgagagtgcaagagggaaatgccagacacttataaaaccatcagatcacctgagaactcactcactatcacaaaaataccatggggaaaaccacccccatgattcaattacctccacctggtcccacccttgacacgtggggatttatgaagacaacaattgcaggcgagatatgggtggagacacaaagccaaaccataccattctccttctyctccttctcttctgtgtcctaactcccatcctcctcctcttttctcttttttcttctctctttttttcctcatttgcaaattctttattttcttggttgatgctccaatgttctttcagattcctgcctccctcccttggaaacctcttccagggctgtaaacttagctgtaattacagtcatggccataagggagcagcagaatgcaaaggagcatcgctggagcctggagaaagctcaataggagagcccagctaaagcacgagcctgggccaccagctcctctgagaagtccctgacatctcagaagccactgtgggacagtggcaaatgaacagttattaaagttagaa

SEQ ID NO: 455015 - DNA, 578 bp, Homo sapiens
gcagaacagagtgagagtgcaagagggaaatgccagacacttataaaaccatcagatcacctgagaactcactcactatcacaaaaataccatggggaaaaccacccccatgattcaattacctccacctggtcccacccttgacacgtggggatttatgaagacaacaattgcaggcgagatatgggtggagacacaaagccaaaccataccattctccttcttctccttctcttctgtgtcctaactcccatcctcctcctcttttctcttttttcttctctctttttttcctcatttgcaaattctttattttcttggttgatgctccaatgttctttcagattcctgcctccctcccttggaaacctcttccagggctgtaaacttagctgtaattacagtcatggccataagggagcagcagaatgcaaagragcatcgctggagcctggagaaagctcaataggagagcccagctaaagcacgagcctgggccaccagctcctctgagaagtccctgacatctcagaagccactgtgggacagtggcaaatgaacagttattaaagttagaa

SEQ ID NO: 455016 - DNA, 560 bp, Homo sapiens
atgttgagtctttcaatccaggaatataatatatcctctgacaaaggagaaaagtcataagattatctccacagatgcaggaaatgcatttaataaaaactaacatccacttataattttaaaatgtkagcaaacaggaaatagaaagaaactatttaatctgatagagtacccacaaataatctccaacaaacatctatttagaccttctttaatttctcttaacatttttacttttctgagaagagagatcacaaatttttcttagctatatttcaagatagttggtgtttttgaaaactgaatattttttgttttctaattagttattagtgatatgtacaatgtataattaattttgtgtattgatcttgtacttgacaatctcagtatattcaattattcattttaataatttatctatgtgttattttggactttctatgaataataaggggtatatttttatttctccttttataagcaatttgttattgttttaattgcatggctagccaggctcttcagtaaaatgtcagacagaaaatggtaatagtaga

SEQ ID NO: 455017 - DNA, 560 bp, Homo sapiens
atgttgagtctttcaatccaggaatataatatatcctctgacaaaggagaaaagtcataagattatctccacagatgcaggaaatgcatttaataaaaactaacatccacttataattttaaaatgttagcaaacaggaaatagaaagaaactatttaatctgatagagtacccacaaataatctccaacaaacatctatttagaccttctttaatttctcttaacatttttacttttctgagaagagagatcacaaatttttcttagctatatttcaagatagttggtgtttttgaaaactgaatattttttgttttctaattagttattagtgatatgtacaatgtataattaattttgtgtattgatcttgtacttgacaatctcagtatattcaatwattcattttaataatttatctatgtgttattttggactttctatgaataataaggggtatatttttatttctccttttataagcaatttgttattgttttaattgcatggctagccaggctcttcagtaaaatgtcagacagaaaatggtaatagtaga

SEQ ID NO: 455018 - DNA, 632 bp, Homo sapiens
ttatgaaggccttataaaatctgttaggttggagaatgctttataccatatgcaggagccaacagtcaccaagccaggacagcctgacaacctgggcctgagcaagcaacaccmcagcccttgggcaaaactattgtcaagccaactgttagtagtgagcacctggccagataggtgctgtgggctagggatgtgggcaagggagttggctggtacatagactgctgagcatgcacgcagacattttctctctccccatctgtacaaaaagtgcctcacaaccttcagaatcacagttttgaccctcgtatcccaggatttattttgtcacagaatccagcaaagttgcaattcttcgtgttccagccctgagtggagtaagaaacttccagcagagttgataaaaatgacaaactcaaaaactttcccaggttatctgccaaattgtcgctgaatttagtgctgtatccactgcaaacctcatttagcaaatctccaagttatttcatgttggtcaaaacaaagactgcctctttaattatgggagaatgtaggctgtggcccagcagaggggaggccatctctgtagttagcatgctgtagcaaagatctgctgtgaaaactgtaaaatt

SEQ ID NO: 455019 - DNA, 632 bp, Homo sapiens
ttatgaaggccttataaaatctgttaggttggagaatgctttataccatatgcaggagccaacagtcaccaagccaggacagcctgacaacctgggcctgagcaagcaacaccacagcccttgggcaaaactattgtcaagycaactgttagtagtgagcacctggccagataggtgctgtgggctagggatgtgggcaagggagttggctggtacatagactgctgagcatgcacgcagacattttctctctccccatctgtacaaaaagtgcctcacaaccttcagaatcacagttttgaccctcgtatcccaggatttattttgtcacagaatccagcaaagttgcaattcttcgtgttccagccctgagtggagtaagaaacttccagcagagttgataaaaatgacaaactcaaaaactttcccaggttatctgccaaattgtcgctgaatttagtgctgtatccactgcaaacctcatttagcaaatctccaagttatttcatgttggtcaaaacaaagactgcctctttaattatgggagaatgtaggctgtggcccagcagaggggaggccatctctgtagttagcatgctgtagcaaagatctgctgtgaaaactgtaaaatt

SEQ ID NO: 455020 - DNA, 514 bp, Homo sapiens
ctgaactcatgttcagtagataaccaaaatgagaatctctagagaatataggaataaagtctctcttctataaaaatgtctcaccactatactttattagagtgaagaaaatagaatgttatagttcatcatttaaaaattgcaaacagtgaaatttaactggatactcatgcagatgaattgctaaattcataatgctccttagatgtcttctagaagcagcactaaatttatatatcaaggatgtttttaaatttgttcaaaataratgacctcagaattttatatagaatattactgaaaaaatatgcctagtgttaatatcttgcatatttaagcattgtggtgtcttatctaaaaatcaagtaaattagttgttataaatgactgcctacctaaaagcagaaagagacatttattattaaggaaacattcatgtctcgttcagttaatggaattggaaattacacctcaaatttacacatcagtaaattattttatggctttcaatgaa

SEQ ID NO: 455021 - DNA, 514 bp, Homo sapiens
ctgaactcatgttcagtagataaccaaaatgagaatctctagagaatataggaataaagtctctcttctataaaaatgtctcaccactatactttattagagtgaagaaaatagaatgttatagttcatcatttaaaaattgcaaacagtgaaatttaactggatactcatgcagatgaattgctaaattcataatgctccttagatgtcttctagaagcagcactaaatttatatatcaaggatgtttttaaatttgttcaaaatagatgacctcagaattttatatagaatattactgaaaaaatatgcctagtgttaatatcttgcatatttaagcattgtggtgtcttatctaaaaatcaagtaaattagttgttataaatgactgcctacctaaaagcagaaagagacatttattattaaggaaacattcatgtctcgttcmgttaatggaattggaaattacacctcaaatttacacatcagtaaattattttatggctttcaatgaa

SEQ ID NO: 455022 - DNA, 573 bp, Homo sapiens
cattctaaactagctcttttagatcaagagatgcattagcttttctgacagctcttcccatggaagctttttcatggaagaaaggaaactggaacttaaatcgattatcttcatggtttgctgaacccttatgagctacttaaagcgcatctgaagtcaccaagcatttctgttgccctytgaatagcttcatggcctccatatgaagctacgactctcagtcaaaatgaaaatctacaccaaaagcaagagctgctgaaattctcaagcttgactggacaaatttaattcgaaagaagagtaactagtgcttaggacaagaagattcaaacagtccaatgaggccacagggaaaggagacagtgcaatggaaggacaggcattagggcaacagaggtaggtggcatgaaggtctgagtcccctgtctatgagatttgctctgtacttgctggagttccatcctgaatatatcattttcattttacataaagttgtgctgtgcctgctgaatcttatgatttggtggatataacgataccaagctcatgatggggagctctaagcgcagagtc

SEQ ID NO: 455023 - DNA, 551 bp, Homo sapiens
caagagagagagggctgcttctgccatcccagagggttaagggtaccctgagaagtcaggattccagggttttctgtttaaatcatgggctaaytgtgtcttaaccaaggtatacaataatcatcataaataattgcactactcgggacccataggctagacatatgaggctactatgagtgtttcaaagtcatggatccagttgtttgaagagctataagtgcctcaaatgagaattggagggaaatgtttttaacttctcatttttctgagatttaaccactgtctccatcctagttctgtaggctcatcctctctctcaatactcacagctgtctgtggccaccatcaccactatgccatgatgtccttagatgtgaggatatgactaaacatggacaaatctcttccctgtggttcaataagatagatgtatagttttcctaatggcaatcagatttttagaggactgagatagtttgattatttgtcccctccaaatctcatgttgggatttgattcctgatgttggaggtagggcctgatgagac

SEQ ID NO: 455024 - DNA, 560 bp, Homo sapiens
ttattattactgactttgggaatgtgggagttaagaggccagccttttaacagacaccttccacttggggtcactcatagaagtcacaaagggactatataaatcagtattatctacatggggattgaaaattaaggatgattttgacattactaaaacgtggaagaatttttgctgatacactaggtgtgacatttctattgctcagaaacagaagtcttcttgggaagtaagcaaaaggatcctggcagaattctaacatttcctaatttggagagctgagggcagatcattcagctaatggcaaagactcaatgcttgaattctctttccgtggtgaaaacagcagtctttaaaagcagcagcactggtagaccccagaatgtgtgaaccaaattctcttgaattctctttccttggtgaaaaaamagcagtctttaaaagcagcagcactggtagaccccagaatgtgtgaaccagactcagcagacagcaggcagtatgaatgagctggccccgctgtgggggccatagaactaagaagaacgccgaggtcaacc

SEQ ID NO: 455025 - DNA, 360 bp, Homo sapiens
tacattctgattctcagatgcggatacttccacaaaggttcaaagtaggaattgtactaaatttaaagctatggctgtgactggtcactttgggctsaacatgccaggacagcaggcaaaaacaagacttggtctattggcagaggtaattgacccccatcatcatgaggaagtagggttgctgccaagtcatgggggcagacaggaaaatggtttgcagtccagcgatccactggggtatcccttccctgtcaattctaacaggcaatgggcaattataggaatgctgatctgttaaaggcatggtaaccaggggctcagattcttcagggatgagatgagaaccctctgccagtggcc

SEQ ID NO: 455026 - DNA, 333 bp, Homo sapiens
tttagtttcacattatttagcatacaactgggtacagaagaggtgacatataaattcctgaatgcctctgtaaggctttatatagcattttgtgttttctcataatgtttcaacacagatgtttaaaaactcatcttctgtttaacatttattgagtgtaattttcatgccaaagcctgcacctgctgctgtggacacagagatgagtaaagtggggtccttatcttccaggtgcttacataccaaccataaaatstaatataactggtgcgttatccggaaggattgcccttgggccttattttgatcactggtattggatttgtgcagatg

SEQ ID NO: 455027 - DNA, 577 bp, Homo sapiens
agtggggacaggggaggagaaatagcttaggcatccaaaagcctgaagggttctgaagcgccttgaataggcgagtaggcgagaggtgacagggcatcattagatgacgttagtgcagcagccatcttgacctttgcctccctgattctgccattggcctgttattcaccctcctcttggttctgggtggatggggagaggaaggcctgggtgtggcgaaggtggcctggctcaggagtttttagtattaatgtgccacctgtcttgactctggggttttgtccctgattatgttttgtctttgacatctcttaaaatatgacatagcaggacctacagaaagctatcagcaaggccctggtgtccctcacaatgtcccctcctacctttagttgaagactgaaacaatgattgggcttatttactggatgtcaggcattttcttggtstactacacacgtcctattaagctgttctcagacatgtacagaattgctttatctgagtctttctaagatagcacctcaccaagtgtgggaagccaagtttggccatggggggcagggacagcaaagtc

SEQ ID NO: 455028 - DNA, 387 bp, Homo sapiens
atgttcattcagctccttgaatcagccaggaatctttggttgcaagcaacagaaactgaccttggctaacataacatggaaagtttactggtcagacatgggtagctcaaagaacggaaagaaaggcagaagaactgggcattagggaatatagaatagctcagaagatctaggtggctcgtgctaaagggtgttctcttttgggcattggtcccggaattaatctgcaccaactgttttctgttactggctcctcctctaaaagaacaccagttcattcattcatkcatcacatatttatttatttttaataatgtcagcttttattttagattcagagtgtacttgtgcaagtttgttacatgggtatatggcatgatgctgagt

SEQ ID NO: 455029 - DNA, 385 bp, Homo sapiens
tctccaaggttctaagaggaaagtaaacaaactatggtccatggccaaattcagccccacacctgttttgtaaataaatttttactggaacacagctgcatccatttatttacattttgtctatgcctgattttgctatgatgccagacttgagtagtcgtgcagagaccacatagcccaaaaagctgaatatatttgtgatctggctctttacagagaaagcttgccaattcctgctcagagagattatctggctttcacaaagtcacattttggtaattttcctaaaggcratgacacttaaaaatttccgagaggcagtcaaataatgtctttggtcaaataatggctctttcctttctgccacactgcctccctgtgtgct

SEQ ID NO: 455030 - DNA, 552 bp, Homo sapiens
aggaggacaggtcaaatcatagttctagagcatcacacagaggaagcacccaggactgtacaggacagactataaaatgaacagaaagtgtctaccccattctattgcaaatctcttccttgcaaggagtaggaaacatgcacacctccaaggctcttcaaattgttacccacaaccttgggccatgggcttcaggsacgtttgcttgtagtccaacccttgaagaagagatctctccaggtgttctcagacatgccattacacattccgttcttagaactttcagggttggtgtttggtgtttttactattgttgctagtattgttgtggtttgatttggttgggttttgtggcttttaagcctatttagtaagtatcatgctattgtcatagaaagctagtggctgcttatttaatatctagatgatcttcaaaagtggagaaagccaactgaaattgaaaactacttttgtaaaagtcctaaatgcctattatgcgtgtagtagtcctaaagtttggagattgtacgtgtgtttgagtggggggggggg

SEQ ID NO: 455031 - DNA, 552 bp, Homo sapiens
aggaggacaggtcaaatcatagttctagagcatcacacagaggaagcacccaggactgtacaggacagactataaaatgaacagaaagtgtctaccccattctattgcaaatctcttccttgcaaggagtaggaaacatgcacacctccaaggctcttcaaattgttacccacaaccttgggccatgggcttcagggacgtttgcttgtagtccaacccttgaagaagmgatctctccaggtgttctcagacatgccattacacattccgttcttagaactttcagggttggtgtttggtgtttttactattgttgctagtattgttgtggtttgatttggttgggttttgtggcttttaagcctatttagtaagtatcatgctattgtcatagaaagctagtggctgcttatttaatatctagatgatcttcaaaagtggagaaagccaactgaaattgaaaactacttttgtaaaagtcctaaatgcctattatgcgtgtagtagtcctaaagtttggagattgtacgtgtgtttgagtggggggggggg

SEQ ID NO: 455032 - DNA, 529 bp, Homo sapiens
taattttaaatgaaaaaatgtacagccaacaragattctttcctgatatatttttttgctagcagcaaagttgttcacctctgattttcattgtcctttttcaagaagtgaatctcttgcaggcccattcttactgagtcgtcatttcttcatagcgagctacaaagctggtgttacggaaattctaaggggctcagtaataagcctgaagtgaggggaaggagctggaagcctctatgaataatgagaaaaccaaacagggggaaggaacagtgacaacagatagcgttgtcttgtgtaaattaggtttgtccagaatcaacagaagcttgaataaagtcaaagtgaaataccatcttgagactcatgttaccttcaaaagcaactgaaaaagctaaaaagtaacctaaaccgctttctaatcaggaatgttctttccaggtaacgttgccagcagaagcaaaatcctaagtggctccctttttatttatttgtttatttatattgtcaaatgataattgtgaatatt

SEQ ID NO: 455033 - DNA, 529 bp, Homo sapiens
taattttaaatgaaaaaatgtacagccaacagagattctttcctgatatatttttttgctagcagcaaagttgttcacctctgattttcattgtcctttttcaagaagtgaatctcttgcaggcccattcttactgagtcgtcatttcttcatagcragctacaaagctggtgttacggaaattctaaggggctcagtaataagcctgaagtgaggggaaggagctggaagcctctatgaataatgagaaaaccaaacagggggaaggaacagtgacaacagatagcgttgtcttgtgtaaattaggtttgtccagaatcaacagaagcttgaataaagtcaaagtgaaataccatcttgagactcatgttaccttcaaaagcaactgaaaaagctaaaaagtaacctaaaccgctttctaatcaggaatgttctttccaggtaacgttgccagcagaagcaaaatcctaagtggctccctttttatttatttgtttatttatattgtcaaatgataattgtgaatatt

SEQ ID NO: 455034 - DNA, 529 bp, Homo sapiens
taattttaaatgaaaaaatgtacagccaacagagattctttcctgatatatttttttgctagcagcaaagttgttcacctctgattttcattgtcctttttcaagaagtgaatctcttgcaggcccattcttactgagtcgtcatttcttcatagcgagctacaaagctggtgttacggaaattctaaggggctcagtaataagcctgaagtgaggggaaggagctggaagcctctatgaataatgagaaaaccaaacagggggaaggaacagtgacaacagatagcgttgtcttgtgtaaattaggtttgtccagaatcaacagaagcttgaataaagtcaaagtgaaataccatcttgagactcatgttaccttcaaaagcaactgaaaaarctaaaaagtaacctaaaccgctttctaatcaggaatgttctttccaggtaacgttgccagcagaagcaaaatcctaagtggctccctttttatttatttgtttatttatattgtcaaatgataattgtgaatatt

SEQ ID NO: 455035 - DNA, 650 bp, Homo sapiens
ggctttgtttcatgggtacacacataggtttgcccaccgcccccttgttcttcagtgacttcgctagagagacgatccatagtattttgctatttctttggcagaccctatgtgctctytgcttctcacatctttgaataaacatcacactttaaaactgacagcccttgggtttcacttcgcactcaggaggcacagctctgtcagattttaagtgaaaggatatagtttgtttaagcccttttcaggataagttggaaggagagatggtttctaggtgctcagaatgacttatttttcttttgataagctctgagaagcactttcattggttgacatatttcctgaccccagccccttcccaccaaattaggtctagaggtggcaaggcatgagggaagaagtgtggtttttagaatcagatgggcttgggttgtaatctccgcaatgccaaaccccagctatttaatcatgggagactactaattgtccctaagtaatcatttccccttccttcttttgaaaatggaatgggacacttgactgtccaggttgagaccatgttttccaccccttgaatctagtgttgacaagtcagtgagttctcttaaactaaatgtgagtggatgtgatatatgaaatatcagtat

SEQ ID NO: 455036 - DNA, 600 bp, Homo sapiens
tccccttccttcttttgaaaatggaatgggacacttgactgtccaggttgagaccatgttttccaccccttgaatctagtgttgacaagtcagtgagttctcttaaactaaatgtgagtggatgtgatatatgaaatatcagtatacctccttaaagaaaattgctatcccttccccactgatctttacttggtcttatggttgggaacgctgatgtggcactggagagttagcttgcaccaagtggataaggactgaaatgtygaggatggtggagcaacatggaaggaacctgggtccctgaatgatcacatggaacagagctactcactgtcctagcccacctgcctatctctatactgttaattaagagacaatagaattatgttatttttaagtcacagtattgtttggtctctttgttatagaagtgtagcttatgttctaattaaaaagttgacttttagaaagttacttaaccttttgcccccaagttttctcatctgcaaaaagaggaaaatatattgttcatcttcttgataagcttattgtcaggattacaccacgaaatgaatattagtgtatttattgagtgttcta

SEQ ID NO: 455037 - DNA, 589 bp, Homo sapiens
tttttggagttcaaagagagagacatagcccatgacttattcactctgtgttgggccacataatcaaagtagctgacatgttttttccttcaaggtttaagttccgggtacatgtgcaggatatgtaggtttgttacaaaagtaaacgtgtgccayggcggtttgctgcacagaccaaaccatcacctaggtattaagcccagaatccattagcataatcttatttgagattttgaatttaaccatgaattccttatggaaaactgatctaaattcataatgttgtcaaagatttttttcctgcattctgctcatatatgtatgtaatttctattcggttggaataatcttggtataataataaaaaggttctgaatccatttaatagccatgtgtaagaaataaccatatttctcctgtcagcaaaatgcttattttttttcccagtgacctagatatacccaaagcctctgagagttactctgaatttattttgcaaaaatcaatatcagtttcccttccatatttctatagggaatattttctctttgctttccacctgtccacagtagaaactttagtcagagat

SEQ ID NO: 455038 - DNA, 601 bp, Homo sapiens
atctccatatttttgttttctttaaaaaagttagaaacaacatttccagtctgtagtttacattcattttattactctctacttttgtggggaagtgtttgggaggaggatattttgagatctctaagattattctctttcaccattatattaatcttttcataagaaaactaattcagaacaatcaaaaaaaatttggcacatatggacttcaaaaaaaaatttacagaagccaaaaaaaaaaagtcaattaacagaaaaaaagtccaagaccattttacacacactggggcttatcagagggtggaaggtaggagaagggagagcatcagaaaaaataattggtactaggtttaatacctgagtgatgaaataatctgtacaacaaacccccatgacacaatttcacctacataacaaacctgcacatggacccctaaacttaaaagttaaaaaaagaacattaagtaaaaataagatcattgtgttcacttaaatgtacaaagttctttgcytaaaattaacctttaaatttattttcttttacatctttttccccttctgttttataccatatttttatctcttccttttctgtaga

SEQ ID NO: 455039 - DNA, 610 bp, Homo sapiens
ctacctttttaggtttagctcattttacatcttccaatgcaatatgcttctatctaaacgagtaggttttccttgtgaatcagcattaacactctcacgtctgtgattctagcagttcgttcttgcactgctacacagaaatgactcagagtgggtaatttataaagaaaagaggcttaattgactcatgattctgcatgttctacaggaagcatggcagcttctgaaaaggtcttaggaaacttttaatcatggcagagggggaaggggaagcaggaaactttcaatcatggccagaacaggaggaggagagagggggtgtataagccacacacttttaaacaaccggatctcctgagaactctattagataacagcaccaaagggggaaatacaccaccatgatccaatcaccttcgacaaggccccacctccgacgttgggatttacaattcgacatgagttttaggcagggatgcaaatccaaactgtatcagtgaccttgctcaagctttactctcctttctcagtgacttctgtcaagccrtgctatacttttaaggcacagcttgatttttacttcctataaaaagctcataaattataaata

SEQ ID NO: 455040 - DNA, 569 bp, Homo sapiens
aatgtttcagttatacaagataaatacattttggggatctactatacagcctagtgcttagagcaagcaatactgtatcctgtatttccaattttctaaaagatattatgctaagtgttcttaccacacagacaaaaataacttaaaaaagagttggaaggaaattttgagaggtgatgagtacgtctgccgtcttggttgtggtgatggtttgatgggtrtatttttatccctaaactcattgaaacatatatatatatatatatatatatatatatatatatatatatatatatgtttgtatacatatatatttgtgtgtatatatgtgtgtgtgtgtgtgtgtgtgtgtgtgtgtgtgtgtgtgtgtattcaacatgcacagctttaacaaataaaattcagccagaattgtgaatgagggctaaagaacattttgttgatgtactttaactgattatgagttaaattatggttcctataaatgaaagggttctggggtttaattcacacacagagaaaggtgatgagaggtcagaactatacagggaacagagctgaaataatgt

SEQ ID NO: 455041 - DNA, 609 bp, Homo sapiens
cccacaatttagcctaaatatttgccctgacatgcttatcctattccaagcaagtattaggtcatagcctgttcctcttctttatttgaaggtgtttttacctttatcagcattccacaagttacttctccttcctttgttctcctctgcctttgcctcttttaaaaagttctaagttgctagccaatcgggacatatacagaatgtgaggtcccgttccagccaatggaaactggatacagcagtagggtggatgcgtcaggttataaatgaccctgtctcctttgttcggtatactctcctggcaaaactgctggygaatgtaccatttctgcagaaagtataaaaatggccttgctgagaaattaaatttatgttcaagtgctatttctttacggcaccagggaacaagcatttcaaacatgaggatcatttaatcagctcactaatttgcaggtttcagctgaactgggataggcttagctaatgttaggctcactcatacatctgggagtcagctggctgtggctgatctagaattttcggggcagaaatgactggaattactcagctgtgttccatgcatgtcatcctttatcaggatatcct

SEQ ID NO: 455042 - DNA, 651 bp, Homo sapiens
cattttgacagtttcttcatgagaaggttagataaatagcaaacaaaggtgtggagagctcagcccagtaaagaaagaaaatggcctgagagaagtctgtgatatgcagtgatcaatgcactggtttataacttctaggagccgaaaggtgatatctaatgcatcttttatcttccacagcacccaatacacgttaactgctacattcttatttaaatagggatttaaatagcaaatttaatatatgaacatgtgtatgaacatattgaggagaaagagagattttatttggaaagtactgagttgaccacatataaattagaagaatgattgtaaggatgagatgtaaggcgggataatattggtgagtacatgatgtagaatagaaacggctaaaatatgacaacataaacgttaattctctgaaggattagcaacatgaaagttactttacctcatgtgttctatcaatcgccattttctaacaatttttttcctaaatatattttaatctattacctactgcctattcctactcttaatattttagttttggccrggcgcggtggctcatgcctgtaatcccagcactttgggaggccaaggtgggcggatcacctgaggtcgggagctcgagaccagcctgaccaa

SEQ ID NO: 455043 - DNA, 588 bp, Homo sapiens
ataaaacagatattaaaccaataaaaattaagaagaacagggaagggcatttcataatgataaagagggtaatcaaacaagaagacaactatcctaaatatatatacacccaacataggggcacctgaattcataagacaggttcgttatggcctatgaaaagacttaggcaaccacccaataatagagggaaacttcaacaccccactgacagcattaaacagacctttgagaaaaaaaactactaacatagaaaatgtggatttaaacccaacagttgaccaattgtacctaataggcatccacagaacaatcctttctaaaaccgcagaatatacattcttctcatttgcacaagaatatattgtacgatttaccacatactcaatcatagagcaagtctcaataaattaaaaaaaaactgaattcataccaagcacacacaaggagcacagtgcaataacaatagaaatcaatatcaagaagatctctcacaactatacaaatacatggaaattaaacaactkgcttctcaataactactgggtgaacatcaaaattaaagcagaaataaaaaaaatatttaaa

SEQ ID NO: 455044 - DNA, 460 bp, Homo sapiens
tctggccgggtgcagtggctcatgcctgtaatcccattctgggaggccaaggtgagaggattscttgagcccaggagttcaagactagactgggccatgtagtgggaccctatcaacaacaactacaacaactaaaactacaacaacttagccaagaattgtggcacgcatttgtaagtgccagcaacttgggaggctgaagctgaaggatcacttgagcctggaaggtcgaggctgcagtgagaatatgccactgcacgccacctacgtgaaagagcaagaccctgtctcaaaacaaaaaaaaaaaaaaaaagaaggttcaaaactctgccagaaattgtgataaatgggtcattaatatgaatactgaaattttctaagattatggcagaaattgtgaatttctgccataattgtatgattgtgaatcacacaatcacttggtattgtaatgtaatct

SEQ ID NO: 455045 - DNA, 596 bp, Homo sapiens
taggtccggttagcagaaagcacagttcaagttgatgtagggtatttatggtctcttactcaagttctagataaaattcatttcacagaattcaagctatttgtttatggagaaagccagctctcttcaagaaacattcctcaatgcagccacaagtgaatttttttwaaataatttctctcagagagactagcagcatttatgagagtaagtgtatagcagagaaagagtaaaactcagcccttggattttttatacgctggctttagactgatactaatgctcagagacttgagataaactggagattgcggcttatcaagatcagaagacaaatggaatcttgccccaagccaaactcatggtgattattttctcagtcacagattaaacagtgaaaatagttatatttaataaataacaaaatatattatttccatgactagtagaatgtggactactatggtagaaataacctagtagaatcgactggaacatcctacctcccccttacatactgaaggcaatattataatcctaaggaaatgttagagattagcttcatcatcaaagatttgaaaaaaacaggaataatg

SEQ ID NO: 455046 - DNA, 388 bp, Homo sapiens
agaaggggagggaagggaagcgaaggaagaagccagtggtgaacgaataattttttctatgttgaaaacctaatcgccaatctgatggcattaggaggtgggaccttcgagaggtgctatgttttgaatatttctcctccaaaattcaggtgttgccaatgtgatggtaagaggtagggcttttaagaggcgattaggccatactaattaatgagggcttctccctcattaatgggattaaggaaaagrcttcattcaatgtttgactagcttgctgctcacccctctatcatccatcatgtgaagatgcaacaagaaggccctcatcaggcaccagatgctggcatattgatcatcaactttctggcctccagaactgtgagaaata

SEQ ID NO: 455047 - DNA, 547 bp, Homo sapiens
tctttaattgatttttcataatgtaygaggtaggaatccatatacgttttgttttgccttataatggactcagcaccatttattgaaaagattattcattcttcagagaaccacagtgtcacctttgtcataaatcaggtgaacatttataagtgggtctatttcttaactttttattctattctcatggtaaactagtctattgttgtgtcagtatcccactgatcaaattactacaactttattttagatattgatatgtgaagtgagtttaactttgtttgctttcttcaggattgctttgagtatttttatcaccttttgttttcatatggatgttaggatctgtccatttacaaacacacacacatgcacacacactcctttgctggtattttaattgaaaatgcacttaatctataaatcaatttaggaggaattgacatctttataattttgaatttccaaaccatggacatttattttaaatcttttttttaaatctctctcctactcttttctactttttaaactagagttattgcat

SEQ ID NO: 455048 - DNA, 515 bp, Homo sapiens
agaaaatcaacaaagaaacacccagacagaaaatcaacacagaaactttagacttaatgtgaactatagaacaaatgaacctattaaatatttacaaagcatttcatgcaatggctgaaaaataccattcttcttctcagcacatggatcattctcaagggcagaccatatgttagaccacaaaacaagacttaaaaaattcaagaaaattaaaattatatctatttatgttattatatgttgtttatgtcttagaaagttttatagttattagttctgatagattcatattttaatctttctacgcaagttatgagtagtttacacaccacaattactgtgttatactattctgtattttgtctgtgtatttactattaccagtgagttttgtacmttcaaatgattttttttattgcttcttaagttctttttctttcagatttaagaattccctttagcatttcttgtaggacagttatggtggtgacaatattcctcagcttttgtttgcc

SEQ ID NO: 455049 - DNA, 512 bp, Homo sapiens
attcagtatgatattgggtgtgggtttgtcatagatagctcttattattttgagatacgtcccatcaatacctaatttattgagagtttttagcatgagacaagtttctatactccagaatgtcttagagcctgggctgttcaaatacacgttataaatctcctagagggagctgcagaacaggcagcatttgccaaacgtatttgcctgtgggatctatttttcagtcaaattrgtagaatctccctaagaaaaaaacaattaaggatttgctgttgtagcagttgtagtagttgtagcagttgtagtagttgtagctgttgtagtagctgttgtagctgttttagtagttgtagtgagcttctgtgactaaattaaagctcagccataggaatattttaatcaatccatactaatagggatacaactcagaggaaaatgcatttcattaatgtttattagatcctatcattagatctaaaaggatctaataagtagctttattaaatttt

SEQ ID NO: 455050 - DNA, 627 bp, Homo sapiens
aagcctttgtgattacttaaaaatattcacagaaataattgaatttcacctttttagcatgatttcatacagttagttaataaaatgctgaaaactatactaaaygacattttgaaacaaaaagtaatggaatttctgtatggacacctactgcatatttggaaacctaattgagatattaaaagttgatcactaactgcaatagaaagactagaaagtcatctctggttagtaagtagattggttttctaaaggagtttgatgttataatttgctcttatactagaaataataaattacaagtttcaaacgacaccatttaagaaataaacgttagaattttggataactattttaaagatgagacagaaaacaaaatttgcttctgatttgtcaaaagttgcaaaatccaaagaaatgaatcaggctaaatcgtgtctctaacctgcaatctaaggcttgatgagaagcatctgagtgatgattactaggaagagatgacaccaaatgaaatggaaacgtatgaaaatactcaggctcacaccgcaaggtgcatatgtaaattctactggaatccttgaaagcttatgattaagtgctcaaccagcacagtagcaaatgttttcc

SEQ ID NO: 455051 - DNA, 627 bp, Homo sapiens
aagcctttgtgattacttaaaaatattcacagaaataattgaatttcacctttttagcatgatttcatacagttagttaataaaatgctgaaaactatactaaacgacattttgaaacaaaaagtaatggaatttctgtatggacacctaytgcatatttggaaacctaattgagatattaaaagttgatcactaactgcaatagaaagactagaaagtcatctctggttagtaagtagattggttttctaaaggagtttgatgttataatttgctcttatactagaaataataaattacaagtttcaaacgacaccatttaagaaataaacgttagaattttggataactattttaaagatgagacagaaaacaaaatttgcttctgatttgtcaaaagttgcaaaatccaaagaaatgaatcaggctaaatcgtgtctctaacctgcaatctaaggcttgatgagaagcatctgagtgatgattactaggaagagatgacaccaaatgaaatggaaacgtatgaaaatactcaggctcacaccgcaaggtgcatatgtaaattctactggaatccttgaaagcttatgattaagtgctcaaccagcacagtagcaaatgttttcc

SEQ ID NO: 455052 - DNA, 627 bp, Homo sapiens
aagcctttgtgattacttaaaaatattcacagaaataattgaatttcacctttttagcatgatttcatacagttagttaataaaatgctgaaaactatactaaacgacattttgaaacaaaaagtaatggaatttctgtatggacacctactgcatatttggaaacctaattgagatattaaaagttgatcactaactgcaatagaaagactagaaagtcatctctggttagtaagtagattggttttctaaaggagtttgatrttataatttgctcttatactagaaataataaattacaagtttcaaacgacaccatttaagaaataaacgttagaattttggataactattttaaagatgagacagaaaacaaaatttgcttctgatttgtcaaaagttgcaaaatccaaagaaatgaatcaggctaaatcgtgtctctaacctgcaatctaaggcttgatgagaagcatctgagtgatgattactaggaagagatgacaccaaatgaaatggaaacgtatgaaaatactcaggctcacaccgcaaggtgcatatgtaaattctactggaatccttgaaagcttatgattaagtgctcaaccagcacagtagcaaatgttttcc

SEQ ID NO: 455053 - DNA, 598 bp, Homo sapiens
tgggagacaagatcttaaatacaaaattgatacattaggttttaatttaataagcaattggtatgaatatttggcaaacagctgatcagcctatctattctcttcaaagccaccctaccaaattgtctctaaatatgacttgaaacattatgatcttgattggaatcctttttaatattctgaagggcaaaggtccaaggcaaattcagataacaaagcactctgtagggtttattctttgtgtttacatttaataagtgtatcatagagagttttggggggattagaaaagactcttcaaacaaaataaggagagaaggaaataggttattttgagtggttttagagccggtaatccagcaccttgagaatactggaaaatatggtcagataatcaatcaccttggaaaccacagaaaaggcataaactttttgctctccatccyacctaagtggaacccaagctgtctacaacttgttcccaacagcgcaacaattcccttaatttgttcatattaaaatctcagcacacatttgttaaatggaattaagttgtgcctctagttctgtaatggattcttcagtgtgactgaaagag

SEQ ID NO: 455054 - DNA, 564 bp, Homo sapiens
tgtcaatatgcttttcttaggtactatccaaaggaataaaacataccaacattctaatacaatttttaagtcattcatgtcaagatctacgtttcattcrtctttgtattctgccttacccaggtgcataagacagtactttggatattagaagtactattttctaagtgcttactatggtctaggcattctccttcatgcttcatatatggtgaagtttaatgcaaagcctggtcaatggggggccatgctttttcctctataacacacttcattttttggtgtcattgtttgtgttgtggtgttgttcttcttgttattcctttactattaaccacaagttacatttaaaaatatatttctcagaaaaacttacttgactatgcaagaatctacaatggtgctataaagtgttactatgagaagccctattattttcaacataaaaaacgtagtaaggcatacccggttctctcatttttaagcaaaattttaaaaatatatatgcataatattttagtctgacttactttaattagcaactacatatttctgaaaagctga

SEQ ID NO: 455055 - DNA, 472 bp, Homo sapiens
aagccaatttctaccctttcccatttagcttggtccacaaactacacggttcaggaggattagcaaaatgccagccaggaggtaagcattgtctgaaaagcctgtggcccgtggagcttgtgaaccacaaaacatcaatattgacatcagctggaggagatctgatgggaatcaggcatggcatgactgcaggctgcgtaggggctaggcactctatctgcagrccctggagctcattcggatcagaggatgacttccatctgttctccacacccaccggggcagaacaaaaaggatggggttataatccagcaggaggtatatgggttagttgagctccagaggtctctttaagctctaattcaatgaagactgtctttcttatctctgagaagaggtagcattttaaaaaactgagtttgcttttgaaaaaaattgcattgtgaagtatttgttgaaacttcataaatat

SEQ ID NO: 455056 - DNA, 593 bp, Homo sapiens
tgttgtttcactcgtaaacttattgagggtagctccataggctataaaactgcatcatctttgccagaataaaatgtccatgttatctataagagttaaatcacgttactggaaggtagtctataagaaacacctgactcacaggtgaagcctccaaggcccataggtagtccctttaaacttgaatgtaggcaaatgtctgtcagctgaagaactaggaaaaaaaatgctgccaagaataccataggaaaattctcagcatgtgtcttcaacttgtgcaaattcctatttacagagaaaaggtcatttggaaaatatagccatttttggaagactgagcagccaaggttcttaagtataggagattgggacaaaacaaaaaaaaggtaaatttgttcatcaatctacttggtacatgtttggaactagagactcaaatagggaaaatttgctcttgggcctccccttcccctctatcagataagtaaggctaacagaaacttcaatctgtaaggtacagtacagtgagattagtgctataactgayactgatctaagcattccagaagatctgcttacagataccagggaac

SEQ ID NO: 455057 - DNA, 576 bp, Homo sapiens
atataagggtctaatttctttcttctgcatgtggatatctgattttcccacatttactgaagagggtatcctttctgcaccgcatgtttttggcacctttgtcaaaaatcagttcactgtaaatatgtgaatttatttttggtttctctattytgttacattgttctatgtgtctgtttttatgtgaacactaagcttttttggttactatagatctgtaatatattttgaagtcagtgagatccttccagctttgttctttttggtcaggatttctttggctatttggacccgttttggttccatacaaatttcaagatagttctatttctgggaaaaaatgacattggtattttgatagggagtgtactaaatctgtagttttcattgttattattgccattttaataacgttaattcctctgatccatgagtacagggtgtctttccatttgtgtcctcttcaactatttttatttttcagacttttgctgtttttcttgtagagacctttcacctctttagttaaatttattcctaggtatttgtatatgtgtgtcgattgtaaatggaatt

SEQ ID NO: 455058 - DNA, 576 bp, Homo sapiens
atataagggtctaatttctttcttctgcatgtggatatctgattttcccacatttactgaagagggtatcctttctgcaccgcatgtttttggcacctttgtcaaaaatcagttcactgtaaatatgtgaatttatttttggtttctctattctgttacattgktctatgtgtctgtttttatgtgaacactaagcttttttggttactatagatctgtaatatattttgaagtcagtgagatccttccagctttgttctttttggtcaggatttctttggctatttggacccgttttggttccatacaaatttcaagatagttctatttctgggaaaaaatgacattggtattttgatagggagtgtactaaatctgtagttttcattgttattattgccattttaataacgttaattcctctgatccatgagtacagggtgtctttccatttgtgtcctcttcaactatttttatttttcagacttttgctgtttttcttgtagagacctttcacctctttagttaaatttattcctaggtatttgtatatgtgtgtcgattgtaaatggaatt

SEQ ID NO: 455059 - DNA, 576 bp, Homo sapiens
atataagggtctaatttctttcttctgcatgtggatatctgattttcccacatttactgaagagggtatcctttctgcaccgcatgtttttggcacctttgtcaaaaatcagttcactgtaaatatgtgaatttatttttggtttctctattctgttacattgttctatgtgtctgtttttatgtgaacactaagcttttttggttactatagatctgtaatatattttgaagtcagtgagatccttccagctttgttctttttggtcaggatttctttggctatttggacccgttttggttccatacaaatttcaagatagttctatttctgggaaaaaatgacattggtattttgatagggagtgtactaaatctgtagttttcattgttattattgccattttaataacgttaattcctctgatccatgagtacagggtgtctttccatttgtgtcctcttcaactatttttatttttcagacttttgcwgtttttcttgtagagacctttcacctctttagttaaatttattcctaggtatttgtatatgtgtgtcgattgtaaatggaatt

SEQ ID NO: 455060 - DNA, 625 bp, Homo sapiens
gggatcccttgtgtggtgcctttctgtttcgtttccttcaccagggaagtcacagtattgctgctccctgggagtccaggccctgagccccagagaatattcacctccacctatgtcctrcatccccagtccttagtgtttgtctaattattaaccttattcctgaataattaatcctaataacattttcattggtaagtaagggatatatatatgtgtgcgtgtctgtgtctgtgtgtgtgtgtgtatgtgtgtgtgtaagagttctgctgtaaaatttcagaggaccaaaaaactctgtgataaagataaatagtatttaatttaatatatttaaaaaattaaacttaatgcaaaaaacccatgattcatagaatatcaaaatctgaaataaagacaggattagactttaggataagggtgctgttcccactagtgaaccaggcttccaagtggaatgcctttcttcccattttcatttgtctcccgcgagtttgctcaattagctctttcttttctctcctaaattttcagcttctagctctgtataggcattcatttcccaaagcctacaaacttgctaaagttccaaccacctttgaaacaaaaacaaaaggaagaactg

SEQ ID NO: 455061 - DNA, 625 bp, Homo sapiens
gggatcccttgtgtggtgcctttctgtttcgtttccttcaccagggaagtcacagtattgctgctccctgggagtccaggccctgagccccagagaatattcacctccacctatgtcctgcatccccagtccttagtgtttgtctaattattaaccttattcctgaataattaatcctaataacattttcattggtaagtaagggatatatatatgtgtgcgtgtstgtgtctgtgtgtgtgtgtgtatgtgtgtgtgtaagagttctgctgtaaaatttcagaggaccaaaaaactctgtgataaagataaatagtatttaatttaatatatttaaaaaattaaacttaatgcaaaaaacccatgattcatagaatatcaaaatctgaaataaagacaggattagactttaggataagggtgctgttcccactagtgaaccaggcttccaagtggaatgcctttcttcccattttcatttgtctcccgcgagtttgctcaattagctctttcttttctctcctaaattttcagcttctagctctgtataggcattcatttcccaaagcctacaaacttgctaaagttccaaccacctttgaaacaaaaacaaaaggaagaactg

SEQ ID NO: 455062 - DNA, 370 bp, Homo sapiens
acactttacatgtagatttaacactgaaattaaacactcatgttaaataatcattttaaataaaattagcccctagaattgttaaaattgacttaagtgaactaaagaaatttgttagaaatgttgacaagataaaagygttttgttaatttaatcttgttaaaaaataaccttagtaagcaaattaaatgaaagcattacttatttaaagaaaattgatagcatatataaaaatatttaaatacaaaaatgcataaaactaagtagatgtaactactatgtttgaatgagtccattaaacaaggcaaacttatgactggcctgaaaagaagactatatcagagtttagaaaaaaaaaatacatgcgctt

SEQ ID NO: 455063 - DNA, 560 bp, Homo sapiens
aggcaaagttatcaatctgccaaactaaattaatgtcttttgtccagttyacacacgtctttttcttaaatgtagtaatgtatgaaccaagtaattaaaattaaatttgtatttacaatgttcacattaaatatggcttcaaatttaatattattcaccataagacaaaattcaaatatactaaaagatgtatctaaattgcacttacatctttgtttggaatcactatgctgcaaggcaagtagttattagttataaataatatatagttttgtaactcaccagaatcagctttgtttctatacagccaaccagatgttagtgatttttgtcttcttgttttcttcatgtttctatgttttttcatatgttcatggcacattatcaaggataataggaaacatctccctggttaaaaacaaaacaaaacaaaacaaaacaaaacaaaacaaaacaaaacatgtcttagaaacagccagaaggtgggctctgtacaataattagacacacccacaaaaatgtaaatagaattgcctgataaaattatattgaaaataaaa

SEQ ID NO: 455064 - DNA, 558 bp, Homo sapiens
aaagtaattgtacttgtaggtgtcaagtcagtcactgttcttgcagatgtcaagttagttcttggctttttcttgattggatgaagtgacgttatcctaaatctyttcaggtcacccagtcattatctgagcctggggcagctgtttttgatgggaacaagtaatataggttggtgatgtgatggataggagtaatttaggtggccagtgttttgcacacttctgcaaagcagcaagcgagtagtagaatggagtggtagactggtcactccctcctatcttagtgtaagaaagcaggagctctggtacccgctgaaatcttgttttactttgagtcctgttaaagttggcaaattcttgttttctaccaaatgtatagttgcgggcttcaagtcacttgtgagttgggtaaaagagtttgtagcttagatatctcttcccatagataagtataaatagtagaaattagtctattgtaattgtatgatactttggctgtgctacgaatcaattgactttgggatgcttgtgaattaaccaacttggtctcatttgaaa

SEQ ID NO: 455065 - DNA, 558 bp, Homo sapiens
aaagtaattgtacttgtaggtgtcaagtcagtcactgttcttgcagatgtcaagttagttcttggctttttcttgattggatgaagtgacgttatcctaaatcttttcaggtcacccagtcattatctgagcctggggcagctgtttttgatgggaacaagtaatataggttggtgatgtgatggataggagtaatttaggtggccagtgttttgcacacttctgcaaagcagcaagcgagtagtagaatggagtggtagactggtcactccctcctatcttagtgtaagaaagcaggagctctggtacccgctgaaatcttgttttactttgagtcctgttaaagttggcaaattcttgttttctaccaaatgtatagttgcgggcttcaagtcacttgtgakttgggtaaaagagtttgtagcttagatatctcttcccatagataagtataaatagtagaaattagtctattgtaattgtatgatactttggctgtgctacgaatcaattgactttgggatgcttgtgaattaaccaacttggtctcatttgaaa

SEQ ID NO: 455066 - DNA, 592 bp, Homo sapiens
ggggtactaggcaggatgaaacgacggggcccacgacgctccaaaaggaagccttctggacatatttcctgcctaagtgctcgctctggggtggcagaggggtccacccaaaatcagacagagctaggctaggctgagcccttcaggagctcacagtctcctgtagtttccaaaccctaacacaattaaccaaggaatgtaaatgtctatagcagttgttttagaagttccttgagaacaaaaagggaagttattaaatctgaaggagtggatctggaaaggtaaaaggaaagctgcataggttttcactaggcaggaaacagtggcagggcattcatttaaaaggcattccattccaggcaggagcaaggccaagaaagcatagaggtgaagaaactttaaggtcacataacaaagggccttgaactgaaaccatgcaaaagagtttgttgtgtaaacccaaggtcaagctrcaaggcaaacaccgttttctcaacacatcaatataccctctttaaaaatgagcttttccttggaactattcctttaagatatctgtcttctgattatatggaggtggtgtaggccaaga

SEQ ID NO: 455067 - DNA, 592 bp, Homo sapiens
ggggtactaggcaggatgaaacgacggggcccacgacgctccaaaaggaagccttctggacatatttcctgcctaagtgctcgctctggggtggcagaggggtccacccaaaatcagacagagctaggctaggctgagcccttcaggagctcacagtctcctgtagtttccaaaccctaacacaattaaccaaggaatgtaaatgtctatagcagttgttttagaagttccttgagaacaaaaagggaagttattaaatctgaaggagtggatctggaaaggtaaaaggaaagctgcataggttttcactaggcaggaaacagtggcagggcattcatttaaaaggcattccattccaggcaggagcaaggccaagaaagcatagaggtgaagaaactttaaggtcacataacaaagggccttgaactgaaaccatgcaaaagagtttgttgtgtaaacccaaggtcaagctacaaggcraacaccgttttctcaacacatcaatataccctctttaaaaatgagcttttccttggaactattcctttaagatatctgtcttctgattatatggaggtggtgtaggccaaga

SEQ ID NO: 455068 - DNA, 544 bp, Homo sapiens
  misc_feature (1)...(544): n = A,T,C or G
ctaacattttcataacttttanaattgaatcataatactcatacagacttacggggtatatagttatattttgatacatgcatacaatgtgtattaatcaaatcagggtattttatatgacctcaaacatttatcatttctttgtgttgggaacatttcaaatgttctcttctggctattttgaaatagatgttaaattcttgttaattatagtcacccaccatgttattaaacrctagaacttatcccttctatctcactgtgttacattggatatcttcttttaaagtacatatgtcaattatcttaatattaatattagttaatattgaaaataagataaaagtgtaacattcctaaggaaaccacagctggttagattattattacacctcttttcatcaaaaaaataaactttttggaaggaccgggggcaccttatgcttattactgcttatttcccattctaccttcggtcttgattctatttcctattttgaccaaaaggtcatctaataggttatcagtgtcctgagtcactaag

SEQ ID NO: 455069 - DNA, 568 bp, Homo sapiens
accgaccctctttacatgagaacactctgttatatgttactaaaagatgtttaacacagcagtgggccagcatgatttgcagcctttctcttccataattgttccctggctccagtttttcctgtgaccactaacaactcaggccaaggtgttctcctggtggctggtgtgactccccaggcaacttcatatggtacaccacagtctctcccactccctccaaaaggaaaggaaaaggagacagaagtcagacagggcctagactagactgaggtaagtagagtccaggkcatagcatttaaggaagcaaccattctcaggatcatgcgcatgcaggattgacacacaaaagtgagtgcctccttaaactttgtgcccgggtgcatcccttgctttgctctaggccagggcctgatcaccagtgtcacaaacatcttagaatgtttgtaaacatttactgaggatctgtttctcattatagtctctggttgtggctttaattaagtttggatatttgttccttgtcgagactgtgccagtttttcatagcgtatgccatgctagtaca

SEQ ID NO: 455070 - DNA, 568 bp, Homo sapiens
accgaccctctttacatgagaacactctgttatatgttactaaaagatgtttaacacagcagtgggccagcatgatttgcagcctttctcttccataattgttccctggctccagtttttcctgtgaccactaacaactcaggccaaggtgttctcctggtggctggtgtgactccccaggcaacttcatatggtacaccacagtctctcccactccctccaaaaggaaaggaaaaggagacagaagtcagacagggcctagactagactgaggtaagtagagtccaggtcatagcatttaaggaagcaaccattctcaggatcatgcrcatgcaggattgacacacaaaagtgagtgcctccttaaactttgtgcccgggtgcatcccttgctttgctctaggccagggcctgatcaccagtgtcacaaacatcttagaatgtttgtaaacatttactgaggatctgtttctcattatagtctctggttgtggctttaattaagtttggatatttgttccttgtcgagactgtgccagtttttcatagcgtatgccatgctagtaca

SEQ ID NO: 455071 - DNA, 619 bp, Homo sapiens
gggaaagattttgtttgtcagctgatggagtctctgttgtaggaaacttttctgttttttatttcccctaggtgatggcactttcctctcgatcctgartcatctgttcatcatctatttactttattcctcatccccctggatctactttttcaaacataatgtgcataggaatcacctggggatcttgttaaactgtagattctgatttagagggaacctgacattccacatttccaacaagcttcccagtaatggcagtgccgctgtacatggaccacacttcgtgtagcaaagctctcttgctattcaattgaacgtcctgcaacgaaggaagcgctctataatctgctccgtccaatatcgtagccactagccacatgtgcctatggagcacttgatatgtggctagtgtgactaaggaactgaattttaaattcaattcaattttacttaatttaaatttaaatagctgcatgtggctagcgggaactgtgttggatacctcactctggagtgggaacaaaccagcaaactttttatgtaaaaggccaaatagtaaatattttaggctttgcggccacacggactctgctacgagtacccaccctgccactgc

SEQ ID NO: 455072 - DNA, 624 bp, Homo sapiens
gtctctcttctgtagccaccacaacagggaatgtgcttactcacatctgaagcgagcatgtcttctagtctcatctgaggcccacagtaagtactrcctggctaccaaaggtcactattcagggctgaagggctctttaatcagcaggtgatgagtcctgccagtactgggttcttcccttcaatgcagtgggttcccatctggctcagagtatatctagaaatgtcaatcaaaagctagggctcaggactctgcctggtgccctaccctactatggctgagctgacatacaaggtgcaagacaaagtcctctagtcttccctcccttctccacaagcaagaggaaggggactctcacctcagcagagttatgctgcttggagttcagggaggggtggagaagcactcctttggctgccccagctgatgtctcactaggttgaatgcaccccacttccactggttttgagcccagcacagctccatgacttacccaggaattacaatcctgtgacctagactgaagttcaggtttatttagaaccacagagcactttagttcacaggttctgactgctgggatgagtgattcctatctggctagggttggtctaaatgctccct

SEQ ID NO: 455073 - DNA, 585 bp, Homo sapiens
ctcttttattccctttaaatctttccaactgacctccagaaagctgacataatagttttaagcagattatgccttgctgtcctaatatcaggcagtattatattggcattgtttaccagttttgagaatgtagcccaaacactttcattcaggcctctccatgacaagtaacatatttgcgagattgctacctacagttgaggggttagcttgtgattctagaacaaggggaacatgtaagatttaaatgcagtggtttggcattaggagcatgatgttctaaccaactctttgaatttaattttaagcttccaggaaccatattataggatgacataaaatgttggctataaataaagatctttgaggtcatctactccaaaagaaacaagaaagcacagtcccagagtggagtcagagacttggttttaatggcagagttggaactgaagctaaagttgccttattttcratgtagtatttcttattctgtttccattgaattattttcactttaagtacaggaccacctcctttctctatgcctatttctggacaaattgtcactgaatcaggcaaattatc

SEQ ID NO: 455074 - DNA, 530 bp, Homo sapiens
actggcttccttgctcctcagcttgcagacagcctattgtgggacttcaccttaccatcatgcaagtcgatactcctcaataagctccccttcatatatacatctattctattagttctgtccctctggagaaccctaatacacaaactaacagtaggttgttragtagaatgtaaaacttctgacttttacagaatattgttttcacttagaagctgctttatcagaaataaaatagctctctcaccctataaactctgaaattttcaacaaaaaatgcacagaatgacaagagcagcaataataaaatcctaaacaagacaacactcaaaaatatctctgtgaaaagattggaataaaataaaatatcaaaacaaaaaaaccccacaaagcagccacagaatatcacaaccagtctatagtgatgacagttatcactatgacagttatcattgccttcctatgtttctttccatctgataccaagggtaacatttcaagcacaggtaacaaacaggtaactcaaattc

SEQ ID NO: 455075 - DNA, 640 bp, Homo sapiens
ctcagaactaacagaagtgtagtttctctccctctgccttagtagaagatgtgaaagtgccrtgactatctgacgtcgagagcaaaaggccacgaaagggccagtagtgatgttatcaataaggtattctgtggagatggggaaggattcaatataatacttcctgaaacactgaagaacatcctaaattcatctctttctaaaataagggtccttgttctgtggccataaatgggagtgaatctgtggcagggtgttaatattattttttagggtatgttttcccacatgggtttttgttctgataatctgttcttgttctgctctgggaatctatcattatgaataaatacttaaaaatcttcctttttcagtttcattatttacatctggacattggatctcatttacatttgtttatgtcaaaaagacctaaaattcctgaatttggaatatgataatttcagcttcaaatgttatcagaaccatagaaaagtttcaccccttcagagatgagggcaagttagagaaaggagtgcactgaaatgtcaacccagactttggactatgcgaggatagcctgctgcatgtgctgttttccaggtttgtccctcaatctgaacctgtgttttgaattatt

SEQ ID NO: 455076 - DNA, 640 bp, Homo sapiens
ctcagaactaacagaagtgtagtttctctccctctgccttagtagaagatgtgaaagtgccgtgactatctgacgtcgagagcaaaaggccacgaaagggccagtagtgatgttatcaataaggtattctgtggagatggggaaggattcaatataatacttcctgaaacactgaagaacatcctaaattcatctctttctaaaataagggtccttgttctgtggccataaatgggagtgaatctgtggcagggtgttaatattattttttagggtatgttttcccacatgggtttttgttctgataatctgttcttgttctgctctgggaatctatcattatgaataaatacttaaaaatcttcctttttcagtttcattatttacatctggacattggatctcatttacatttgtttatgtcaaaargacctaaaattcctgaatttggaatatgataatttcagcttcaaatgttatcagaaccatagaaaagtttcaccccttcagagatgagggcaagttagagaaaggagtgcactgaaatgtcaacccagactttggactatgcgaggatagcctgctgcatgtgctgttttccaggtttgtccctcaatctgaacctgtgttttgaattatt

SEQ ID NO: 455077 - DNA, 580 bp, Homo sapiens
cagaattcattaagaccctgtttactcccttgctgaggtctctgagacagagctggacagggcttggggtcagactgtgcattccctctcttccatgcagcccccaaaactctctctgacccatgtaaatgaggatctaatctcctccaagatttccctatggaatgtgatttcttaggttttcttatagcayaaaactcaagtggaaaatggaaaagataataacaacaatatgtttctctttgctgcctgagaataaagcactcaacaaacaattattaattcagcacgtgtccagaccttggctaagtagcatgagtgatataaagaaggaaaagctttagtgccctctcgaggaagttatcatctagtttagaggaggaagcatacacacacacacacacacacacacacacacacacctactcctgaaacaatgaaaggacaaagcaccatgcacaaatacactgacttgagagatgcagaacagaattgcccaaagagtgaaaaatagccacatggattataaagctcaggaaatatttggcagaggagagattatctcccaagcatttattta

SEQ ID NO: 455078 - DNA, 580 bp, Homo sapiens
cagaattcattaagaccctgtttactcccttgctgaggtctctgagacagagctggacagggcttggggtcagactgtgcattccctctcttccatgcagcccccaaaactctctctgacccatgtaaatgaggatctaatctcctccaagatttccctatggaatgtgatttcttaggttttcttatagcacaaaactcaagtggaaaatggaaaagataataacaacaatatgtttctctttgctgcctgagaataaagcactcaacaaacaattattaattcagcacgtgtccagaccttggctaagtagcatgagtgatataaagaaggaaaagctttagtgccctctcgaggaagttatcatctagtttagaggaggaagcatacacacacacacacacacacacacacacacacmcctactcctgaaacaatgaaaggacaaagcaccatgcacaaatacactgacttgagagatgcagaacagaattgcccaaagagtgaaaaatagccacatggattataaagctcaggaaatatttggcagaggagagattatctcccaagcatttattta

SEQ ID NO: 455079 - DNA, 572 bp, Homo sapiens
atttttgttctgctgcagatatttactgggcatatactatatggaagaaattctcctaggagaaagggagtatatacaaatcttatgccatcactaagcttttagctgacaagaaacaaagaatatcactatacagtgtgataggagctagcatgacttttcattgcgggttgcttttccagatactaaaagtccacaragtaagacgtgatctgcatgggttactagattcacaattaatttattgattcgttcattcacttacttatcctaagcatttactctgtgcaatacattaggctagatgttatgtaaacatgaagaattggacttggaccctgacttcacaattttagtctcacatggacaaatatacctgaaaatgcatagtgcaaagtagaaactgattgccatatttttatctggcttacatttcagttagccacagaagcctaagagagcaattcaaaaacatatttgttatatggaaagaaggttttcattaaaagtgctggcaagaagtgagaccatcttggggacttaggaaggaacctggctttactctgtgagga

SEQ ID NO: 455080 - DNA, 612 bp, Homo sapiens
caaagaatatcactatacagtgtgataggagctagcatgacttttcattgcgggttgcttttccagatactaaaagtccacagagtaagacgtgatctgcatgggttactagattcacaattaatttattgattcgttcattcacttacttrtcctaagcatttactctgtgcaatacattaggctagatgttatgtaaacatgaagaattggacttggaccctgacttcacaattttagtctcacatggacaaatatacctgaaaatgcatagtgcaaagtagaaactgattgccatatttttatctggcttacatttcagttagccacagaagcctaagagagcaattcaaaaacatatttgttatatggaaagaaggttttcattaaaagtgctggcaagaagtgagaccatcttggggacttaggaaggaacctggctttactctgtgaggaggagaatgcaagtatttgaaatgtctgaatagcatgattaatattcaggaaagtaaaacagcaacagtaacaggagtaacagcttatgcatttgggacttactctaggtcaagctcttcaaattggagaatctcatttaatcttcccaatagtccc

SEQ ID NO: 455081 - DNA, 547 bp, Homo sapiens
tactttgaacaatagcccaaggcagtgtttattaaccttaagtccacattaaaaatactcgggagcttaaaaatatctttgtcataatctaacatgatgagaatcttgggatgtgggtctcaggcatcggattttctggaggctccccaggtgatcctagcagccagccaaaaaccaaatatctttaggtcttctgcagagcaaaagagaaaaacaaatattctaaaaacaaacaataattttatgtctatttatacagatacttcctgacttacaatagggttacatcccakaaactcatcataagttgaaaatatcataagttgaaaatgcacttaatacatgtaacttatcaaacattatagcttagcttagcctagcctactttaaacatgcccacaacacttacattagcctatagttgggcaaaatgatctaacacaaagcccattttataataaagtgttgaatatctcatgtatgagtatagtaacacatatagctagccctggaaaagtacaaaactcaaaattctaagtatggtttt

SEQ ID NO: 455082 - DNA, 547 bp, Homo sapiens
tactttgaacaatagcccaaggcagtgtttattaaccttaagtccacattaaaaatactcgggagcttaaaaatatctttgtcataatctaacatgatgagaatcttgggatgtgggtctcaggcatcggattttctggaggctccccaggtgatcctagcagccagccaaaaaccaaatatctttaggtcttctgcagagcaaaagagaaaaacaaatattctaaaaacaaacaataattttatgtctatttatacagatacttcctgacttacaatagggttacatcccataaactcatcataagttgaaaatatcataagttgaaaatgcacttaatacatgtaacttatcaaacattatagcttagcttagcctagcctaytttaaacatgcccacaacacttacattagcctatagttgggcaaaatgatctaacacaaagcccattttataataaagtgttgaatatctcatgtatgagtatagtaacacatatagctagccctggaaaagtacaaaactcaaaattctaagtatggtttt

SEQ ID NO: 455083 - DNA, 553 bp, Homo sapiens
ttgttttcatggaaactacayattttaataaaacctgaaaataaatttaatattttaaaagatgtcaattaattcattccagtgaattacaggtttttagatcccacgccaaaggttttgcttgacaattgaaactggtttatggagtattattgtaggccagctaaatctaatgacctttcctccctccaagtttcaagccacagatttcaggaacagagaccaatgaaatgtgtatcttacattccagccagcaaaagtagcaaggagcttttcctgtggctagtaaagaacatgtttcttaatacgaaaatgacggttttagcacggtaacacataaagtcatttcctggcttgtgttttacatgtggctttctattattacctgatacactgaatttgcatccttgatacttctgaccttcaccttcacccatattttaaatcttttcttaacctttcctccaataatggatttagctctttgcttctcaattctgaccaaagtgaatgttgaaagaaaatggaagatgtgggtcatgggagaaaatct

SEQ ID NO: 455084 - DNA, 631 bp, Homo sapiens
ggaaattgaaatatgtcactcatactttattttttctcagggctctaatattaatttctgtgccaccaagttgtcaattgtcattactttttgtttacaaattgtagcatcccaaagttgaaccactcctttatttcctgccacccatcctttacacttaagyctaccatttctcaacatataatctccagcattgctctcctatgaagtaaaatggttcagaaacggagtaaatgagtggacattggatgaagtagagttaatatattgtatatattctctcttgcactcttttctttaccagcttttagtttgacttctgtcttcttaaacatcttggctttattcctccaaagagatgacgagtttatatttatttacagtttataaacgggcacatagcactgaagataattagtaagggccatcataaccaactgaaatcttaatttacacagaaatggctgaacttagattttacttcacatatatcctttaattaatacatcattttacttgatgctatggtagttactgtgggatgtaacaataaataggagcatggtacacaaagagtttacagtgttatggctagagttgggtaataaaattacaacttaaatattatgta

SEQ ID NO: 455085 - DNA, 568 bp, Homo sapiens
tattcttctaaaatgcaaatgycgttccgataccccccttaggaggacgaaaatctttgatgtcttttgctttcaggataaagatccaatttcttgctatgccttaaaaagcattgtccttagtcaactatgtagtcttatgcccaccctcccaatcacccttccaactcctttgacctccatgcactgcatgttcagcacaattttattctttcaggtcctagtgcctgtcagttcttacttacctctggactttcttatgggctttttcctttatctggaatactctttcccctttatcttggataattcttcctcaaatattaagtccaaatgagaccacattttcttcattaactgccccttgcggtagatcttgccatgctagacaagggccactgctatgtacaccagcaatattctggacatgccttacaatagcatttaatagctttttcttgtatttttatcagttgctttcagtagcagctcaccataatgttgttagggcctcgcatcctacatttctgggtgactattaaatatttactaaatgaataaataaatg

SEQ ID NO: 455086 - DNA, 590 bp, Homo sapiens
ttcttcattaactgccccttgcggtagatcttgccatgctagacaagggccactgctatgtacaccagcaatattctggacatgccttacaatagcatttaatagctttttcttgtatttttatcagttgctttcagtagcagctcaccataatgttgttagggcctcgcatcctacatttctgggtgactattaaatatttactaaatgaataaataaatgaaattcactgaatctgtaagcaagaaataccaatgatggttcactttgtcccagcacaattcccrtatgaagacaaatgatataaaacattaaaaaaattaagaaaaaattatcatgaaaaaatagggtaatagtaaataaatttggccttcagctaaacagagagagaaaattctatttaacacaaattgcatttcatagtgaaataattcccaattatcctacattttaaagcttgtactatcacacctgaggaaattctatttatttctgaattggcatataaacctgtgcataaataatctattacatttctgtttattacatgatattcacagtgatatattaaaatgtgatgattttaaata

SEQ ID NO: 455087 - DNA, 590 bp, Homo sapiens
ttcttcattaactgccccttgcggtagatcttgccatgctagacaagggccactgctatgtacaccagcaatattctggacatgccttacaatagcatttaatagctttttcttgtatttttatcagttgctttcagtagcagctcaccataatgttgttagggcctcgcatcctacatttctgggtgactattaaatatttactaaatgaataaataaatgaaattcactgaatctgtaagcaagaaataccaatgatggttcactttgtcccagcacaattcccgtatgaagacaaatgatataaaacattaaaaaaattaagaaaaaattatcatgaaaaaatagggtaatagtaaataaatttggccttcagctaaacagagagagaaaattctatttaacacaaaytgcatttcatagtgaaataattcccaattatcctacattttaaagcttgtactatcacacctgaggaaattctatttatttctgaattggcatataaacctgtgcataaataatctattacatttctgtttattacatgatattcacagtgatatattaaaatgtgatgattttaaata

SEQ ID NO: 455088 - DNA, 648 bp, Homo sapiens
cttgccatgctagacaagggccactgctatgtacaccagcaatattctggacatgccttacaatagcatttaatagctttttcttgtatttttatcagttgctttcagtagcagctcaccataatgttgttagggcctcgcatcctacatttctgggtgactattaaatatttactaaatgaataaataaatgaaattcactgaatctgtaagcaagaaataccaatgatggttcactttgtcccagcacaattcccgtatgaagacaaatgatataaaacattaaaaaaattaagaaaaaattatcatgaaaaaatagggtaatagtaaataaatttggccttcagctaaacagagagagaaaattctatttaacacaaattgcatttmatagtgaaataattcccaattatcctacattttaaagcttgtactatcacacctgaggaaattctatttatttctgaattggcatataaacctgtgcataaataatctattacatttctgtttattacatgatattcacagtgatatattaaaatgtgatgattttaaatatattggttatttgggaattttgacccacaaatctatagctatgctgagaaagccctaaagtagaattttgctttatttcaaaaagtt

SEQ ID NO: 455089 - DNA, 463 bp, Homo sapiens
tgtacccaatctgtaatattttatctctcatccccctcccctcctttccctcaagtccccaaagtccatttcctcattcttacgcctttgcatcctcatagcttagcttccacttatgagtgagaacatatgatgtttggttttctattcctgagttatttcrtttagaataatggtctccaattccatccaggtttctgcaaatgccaattgtttcctttcttttttgtggctgagtagtattcaatggtgtgtgtgtatatatatatatatatatatatatatacacaccacaatttctttattcaattgttgattgttgggcatttgggctcgttccatatttttgaatttgtgaattgtgctgctataaacatgagtgtgtaagtatctttttttgtgtaattacttcttttcctctgggtagacaaccagcagagggattgccggatcaaatggtagt

SEQ ID NO: 455090 - DNA, 587 bp, Homo sapiens
aatggtgtgtgtgtatatatatatatatatatatatatatacacaccacaatttctttattcaattgttgattgttgggcatttgggctcgttccatatttttgaatttgtgaattgtgctgctataaacatgagtgtgtaagtatctttttttgtgtaattacttcttttcctctgggtagacaaccagcagagggattgccggatcaaatggtagttctacttttagtgctttgaggaatgtctacactgttttccacagtggttgtaatagtttagattcccaccagcagtgtaaaagtgttcccttttcaccacatccacaccaacatctattttttttttatttttggatcatggccattcttgcaagagtaaagtggtattgcattgtggttttgatttgcattaccctgatcattagtcatgtggagcatttttcatatgtttkttggccatgtgtatatcttaagaactgactattcatgtccttagcacactgtttgatgggattgtttgtttttctattactgagttgcttgagtttcttgtagattctggatattagttctttgccagatgtatat

SEQ ID NO: 455091 - DNA, 476 bp, Homo sapiens
gaattctactttactgatttggatgccttttatttctttttcttgtctgattgctctggctaggacttccagtactatgatgaatagaagtkgtgagagtgggcatctttgtctttttctagttcctagggaaaatgctttcaactttccctccttcagtattatgttggctgttggtttgttatagatggcttttattactttgaggtatgttccttttatgccgattttgttgagggctttaatcataaaatgatgctggattttgtaatgcttttctgcatctattgagatgatcatgtgatttttgtttttaattctgtttatgtggtgtatcatatgttaaacttgcatatgttaaaccatccctgcatccctggtatgaaacctacttcatcatggtggattatcttcttgatatgctgttggattcagttagttaggattttaggatttctttgatgattttttcacta

SEQ ID NO: 455092 - DNA, 476 bp, Homo sapiens
gaattctactttactgatttggatgccttttatttctttttcttgtctgattgctctggctaggacttccagtactatgatgaatagaagttgtgagagtgggcatctttgtctttttctagttcctagggaaaatgctttcaactttccctccttcagtattatgttggctgttggtttgttatagatggcttttattactttgaggtatgttccttttatgccgattttgytgagggctttaatcataaaatgatgctggattttgtaatgcttttctgcatctattgagatgatcatgtgatttttgtttttaattctgtttatgtggtgtatcatatgttaaacttgcatatgttaaaccatccctgcatccctggtatgaaacctacttcatcatggtggattatcttcttgatatgctgttggattcagttagttaggattttaggatttctttgatgattttttcacta

SEQ ID NO: 455093 - DNA, 528 bp, Homo sapiens
catggtttacaacatgcaaaatttctacatgcctaaagacttgttagccaagtgatatatcagcccaagatttgaatgtggaatttctatttgtattggttargactactttaattgcaaataaaaggaaacaaaacacaaactggtataataaacaaccaaaaaataatttattaacttatataactcagtagccaagatagaggatgcatatgtgacttggcacagtgagtataaactgctaggcatctaatttcttttctgtctctttgctctaacttctgtagtactagccaactagtggtctttttcagctccacatagtggctcctggatctttttttatgatgactgctgttctgcacctcatattatcccatcagttcatccagaggaagaaaaaggctatttctcagtggcctgaaaactgaactgggttctgggtcagcattaaataaaataccaaagccatggggatgagagaaattgaccagattaaattaatgtaatctattctgttccaggcta

SEQ ID NO: 455094 - DNA, 528 bp, Homo sapiens
catggtttacaacatgcaaaatttctacatgcctaaagacttgttagccaagtgatatatcagcccaagatttgaatgtggaatttctatttgtattggttaggactactttaattgcaaataaaaggaaacaaaacacaaactggtataatmaacaaccaaaaaataatttattaacttatataactcagtagccaagatagaggatgcatatgtgacttggcacagtgagtataaactgctaggcatctaatttcttttctgtctctttgctctaacttctgtagtactagccaactagtggtctttttcagctccacatagtggctcctggatctttttttatgatgactgctgttctgcacctcatattatcccatcagttcatccagaggaagaaaaaggctatttctcagtggcctgaaaactgaactgggttctgggtcagcattaaataaaataccaaagccatggggatgagagaaattgaccagattaaattaatgtaatctattctgttccaggcta

SEQ ID NO: 455095 - DNA, 528 bp, Homo sapiens
catggtttacaacatgcaaaatttctacatgcctaaagacttgttagccaagtgatatatcagcccaagatttgaatgtggaatttctatttgtattggttaggactactttaattgcaaataaaaggaaacaaaacacaaactggtataataaacaaccaaaaaakaatttattaacttatataactcagtagccaagatagaggatgcatatgtgacttggcacagtgagtataaactgctaggcatctaatttcttttctgtctctttgctctaacttctgtagtactagccaactagtggtctttttcagctccacatagtggctcctggatctttttttatgatgactgctgttctgcacctcatattatcccatcagttcatccagaggaagaaaaaggctatttctcagtggcctgaaaactgaactgggttctgggtcagcattaaataaaataccaaagccatggggatgagagaaattgaccagattaaattaatgtaatctattctgttccaggcta

SEQ ID NO: 455096 - DNA, 504 bp, Homo sapiens
attaactcatctctctgccttcacctggcaaccagcaracttgctgaagattctttttttgcctggctgattatggaccactcccatcaacaagcaaggagggagaaatagcaaattatggtccatatattgtttagagaaaaggtatatattaagttattgatttgttgttgttgaagaaaactgataaatgaaaagagaatgtgatagaaaggagtgtcatgtgcacagcatttatatacaatctcactggctctttttagaagtttcaatgagatagtatatattacattttcatggatattgcttggcaaatgacagacaacttttaaaaaatttactttactacttagtacagtacttatcattatcaatattagtttgaatgaataagtccttataaccttattgggagaccagggtaggtaagtggtctatccattttatgagcaagggtaagaaatctcacaaaatacattttattaatatttcatagtatgagtg

SEQ ID NO: 455097 - DNA, 504 bp, Homo sapiens
attaactcatctctctgccttcacctggcaaccagcaaacttgctgaagattctttttttgcctggctgattatggaccactcccatcaacaagcaaggagggagaaatagcaarttatggtccatatattgtttagagaaaaggtatatattaagttattgatttgttgttgttgaagaaaactgataaatgaaaagagaatgtgatagaaaggagtgtcatgtgcacagcatttatatacaatctcactggctctttttagaagtttcaatgagatagtatatattacattttcatggatattgcttggcaaatgacagacaacttttaaaaaatttactttactacttagtacagtacttatcattatcaatattagtttgaatgaataagtccttataaccttattgggagaccagggtaggtaagtggtctatccattttatgagcaagggtaagaaatctcacaaaatacattttattaatatttcatagtatgagtg

SEQ ID NO: 455098 - DNA, 504 bp, Homo sapiens
attaactcatctctctgccttcacctggcaaccagcaaacttgctgaagattctttttttgcctggctgattatggaccactcccatcaacaagcaaggagggagaaatagcaaattatggtccatatattgtttagagaaaaggtatatattaagttattgatttgttgttgttgargaaaactgataaatgaaaagagaatgtgatagaaaggagtgtcatgtgcacagcatttatatacaatctcactggctctttttagaagtttcaatgagatagtatatattacattttcatggatattgcttggcaaatgacagacaacttttaaaaaatttactttactacttagtacagtacttatcattatcaatattagtttgaatgaataagtccttataaccttattgggagaccagggtaggtaagtggtctatccattttatgagcaagggtaagaaatctcacaaaatacattttattaatatttcatagtatgagtg

SEQ ID NO: 455099 - DNA, 504 bp, Homo sapiens
attaactcatctctctgccttcacctggcaaccagcaaacttgctgaagattctttttttgcctggctgattatggaccactcccatcaacaagcaaggagggagaaatagcaaattatggtccatatattgtttagagaaaaggtatatattaagttattgatttgttgttgttgaagaaaaytgataaatgaaaagagaatgtgatagaaaggagtgtcatgtgcacagcatttatatacaatctcactggctctttttagaagtttcaatgagatagtatatattacattttcatggatattgcttggcaaatgacagacaacttttaaaaaatttactttactacttagtacagtacttatcattatcaatattagtttgaatgaataagtccttataaccttattgggagaccagggtaggtaagtggtctatccattttatgagcaagggtaagaaatctcacaaaatacattttattaatatttcatagtatgagtg

SEQ ID NO: 455100 - DNA, 645 bp, Homo sapiens
ctgaacatcagaattcccttctttaaaataaaaacaaatttggtggctcagaaaatgatgttggatttgtcaaatgtaggtaygttcaatattctacaccatttgcattaatgaaattcatgatgtgcataatacaaataaatagcaaatctgtatacatgtgcatagttataacaatgatgatgaaaataaataaataactacataggaaactacatcagccagtgtagccatatttatgcagcatattgtcttaagctgtgagcgtggaagagcaaaatcatctctcccctttgagagcatgcctggtgcccaaattagccctctacaatgtgctcatgctcaaacttggtgcttgtaggagtagcatcattcagtgtttgtatgattgtgtattcacaggtgtacgttactatatatatgtcaagatcatgggagatctccaagctgtggatgaagtggatatacataaaacaaggcagaagtgagtccagctggtggagaaagagtggagtgaaacaaggcaaggagaggaacaatttccactaaaaataaaattattcaaaaccagtcttcaaacccttcaggaaattctggtgagaaaagaagataaacaggagactagagagatggatatccagacac

SEQ ID NO: 455101 - DNA, 645 bp, Homo sapiens
ctgaacatcagaattcccttctttaaaataaaaacaaatttggtggctcagaaaatgatgttggatttgtcaaatgtaggtacgttcaatattctacaccatttgcattaatgaaattcatgatgtgcataatacaaataaatagcaaatctgtatacatgtgcatagttataacaatgatgatgaaaataaataaataactacataggaaactacatcagccagtgtagccatatttatgcagcatattgtcttaagctgtgagygtggaagagcaaaatcatctctcccctttgagagcatgcctggtgcccaaattagccctctacaatgtgctcatgctcaaacttggtgcttgtaggagtagcatcattcagtgtttgtatgattgtgtattcacaggtgtacgttactatatatatgtcaagatcatgggagatctccaagctgtggatgaagtggatatacataaaacaaggcagaagtgagtccagctggtggagaaagagtggagtgaaacaaggcaaggagaggaacaatttccactaaaaataaaattattcaaaaccagtcttcaaacccttcaggaaattctggtgagaaaagaagataaacaggagactagagagatggatatccagacac

SEQ ID NO: 455102 - DNA, 564 bp, Homo sapiens
aaggagggcataaaagccactctcaggtgaaatcattcatctcccctgagcattataggtaagaaaataggcaccggatttttactacctttgatgctcagagagagtgaagggaccaatttttaagcaaaattgccattttttttctttttcttgcaagaacacttcagtgaagaacatagtgaccactagtacagttgggagctactaycttaatttgtgctaaggtactagcaattctacacatcactgcgtctgcaccatccatgccaaagtcaacccagtgctttcatgagattaaaaaaaaaatgaaattcaacaacattactcaatactttgaatatttcagtgccccttgtatttgctaccaaacattcacataaaacaacataaaacaagatctttgtggctgcttagtcagtgctgaaatcaaatgaatagaagcaaatgagctagactagccacatctgcagatttatccatttgtaaggtaaaaagtccagttctgcaaacaagatattatcttactcttcatgtttgcaacataatatttaattcaataag

SEQ ID NO: 455103 - DNA, 525 bp, Homo sapiens
agttgttaagaatattaatcccaaaatggcaaaaattatttttttcatattcaactgtaattaagatgatagagtcagaatgaaagcaagatactttcaggtgtaacatcgtaatcactgaatggtcaagccatgaacattckagtttggaaggaaccttacttgttgggattcataaaagatactgcaaaatagtattctgttctcaagctgctaataaagacatacccgagactgggtaatttaaaaaggaaagagatttaattgactcacagttcagcatggctggggaggcctcacaatcatggctgaagttgaaggaagagcaaagtcatatcttacgtggtggcaggcaagagagcatgtgcaggggaaatgccctttataaaaccaccagatcttgtgagacttacaagatcttactcacaagaacagcacaggaaaaacccaccctcatgattcaattacctcccactgggtccctctcatgaaacgtggggattatgggagctacaattcaagata

SEQ ID NO: 455104 - DNA, 525 bp, Homo sapiens
agttgttaagaatattaatcccaaaatggcaaaaattatttttttcatattcaactgtaattaagatgatagagtcagaatgaaagcaagatactttcaggtgtaacatcgtaatcactgaatggtcaagccatgaacattctagtttggaaggaaccttacttgttgggattcataaaagatactgcaaaatagtattctgttctcargctgctaataaagacatacccgagactgggtaatttaaaaaggaaagagatttaattgactcacagttcagcatggctggggaggcctcacaatcatggctgaagttgaaggaagagcaaagtcatatcttacgtggtggcaggcaagagagcatgtgcaggggaaatgccctttataaaaccaccagatcttgtgagacttacaagatcttactcacaagaacagcacaggaaaaacccaccctcatgattcaattacctcccactgggtccctctcatgaaacgtggggattatgggagctacaattcaagata

SEQ ID NO: 455105 - DNA, 525 bp, Homo sapiens
agttgttaagaatattaatcccaaaatggcaaaaattatttttttcatattcaactgtaattaagatgatagagtcagaatgaaagcaagatactttcaggtgtaacatcgtaatcactgaatggtcaagccatgaacattctagtttggaaggaaccttacttgttgggattcataaaagatactgcaaaatagtattctgttctcaagctgctaataaagacayacccgagactgggtaatttaaaaaggaaagagatttaattgactcacagttcagcatggctggggaggcctcacaatcatggctgaagttgaaggaagagcaaagtcatatcttacgtggtggcaggcaagagagcatgtgcaggggaaatgccctttataaaaccaccagatcttgtgagacttacaagatcttactcacaagaacagcacaggaaaaacccaccctcatgattcaattacctcccactgggtccctctcatgaaacgtggggattatgggagctacaattcaagata

SEQ ID NO: 455106 - DNA, 525 bp, Homo sapiens
agttgttaagaatattaatcccaaaatggcaaaaattatttttttcatattcaactgtaattaagatgatagagtcagaatgaaagcaagatactttcaggtgtaacatcgtaatcactgaatggtcaagccatgaacattctagtttggaaggaaccttacttgttgggattcataaaagatactgcaaaatagtattctgttctcaagctgctaataaagacatacccragactgggtaatttaaaaaggaaagagatttaattgactcacagttcagcatggctggggaggcctcacaatcatggctgaagttgaaggaagagcaaagtcatatcttacgtggtggcaggcaagagagcatgtgcaggggaaatgccctttataaaaccaccagatcttgtgagacttacaagatcttactcacaagaacagcacaggaaaaacccaccctcatgattcaattacctcccactgggtccctctcatgaaacgtggggattatgggagctacaattcaagata

SEQ ID NO: 455107 - DNA, 615 bp, Homo sapiens
gaaggctaatgaactacaagtagaataaatacaaataaaatgcctccacatgtgaaaaaaaaatctgctaaaacaccaaagtggaagaaagaatgttgggaaaagtcaggaaaaaaaatgattggaaagattgtagtttttacaccmgacacaaggaaggccagaagaccatggatcaaatctttaaagcacagaaagaaaaaaaaaagctgtcaagaaaaaaacgtagtctgacaaaaatatgcttcaagaatgaaggtgaaataaaggaatttggggttaacaaaaacaaaataaacaacaaacaacaaatcaccagcagatatgcacttcaaggaaggtcttcaagctgaaaggaagtgataccagaggtaagcataaatcttaaatgaatgaaaagcattagaaatgacaaatgtttcagtgtatataaaggacactttattttaatttctttaaatacaaacgtttaaaacaagttacaacactgttctgtgaggcatagaatgcatggtggcataataaatatgacaagtatatatataaaaagaagggtttgggtaataaatagccacactctattctaaggtttctgtatttagtcgtaaaatttta

SEQ ID NO: 455108 - DNA, 615 bp, Homo sapiens
gaaggctaatgaactacaagtagaataaatacaaataaaatgcctccacatgtgaaaaaaaaatctgctaaaacaccaaagtggaagaaagaatgttgggaaaagtcaggaaaaaaaatgattggaaagattgtagtttttacaccagacacaaggaaggccagaagaccatggatcaaatctttaaagcacagaaagaaaaaaaaaagctgtcaagaaaaaaacgtagtctgacaaaaatatgcttcaagaatgaaggtgaaataaaggaatttggggttaacaaaaacaaaataaacaacaaacaacaaatcaccagcagatatgcacttcaaggaaggtcttcaagctgaaaggaagtgataccagaggtaagcataaatcttaaatgaatgaaaagcattagaaatgacaaatgtttcagtgtatataaaggacactttattttaatttctttaaatacaaacrtttaaaacaagttacaacactgttctgtgaggcatagaatgcatggtggcataataaatatgacaagtatatatataaaaagaagggtttgggtaataaatagccacactctattctaaggtttctgtatttagtcgtaaaatttta

SEQ ID NO: 455109 - DNA, 553 bp, Homo sapiens
tttctatatattatcctacctctgataacggtaacatagtgtcattgctcccattctagaagtaaaaacaaaacaaagcaagacaaagagttaccaaaaatgtggataacttggattaaggacttggttatatgcatgaaataaattattgaaaagtagactggcagtggaatctagatttcccaatttctggttccayacacattctttttgacagtagtctctttctagattatttcatgagcacaaattataatagtgggacttctgttttaagaatgtaacctgtcataaggtttaattgtttgaccaaaaaataatgatttactgtcttgctatgttcaaaatatttaggattgggattatgtctatatgagactccattttcctatttaaatatgcttttatttgccccagtgacctccctcttaatttgtatggccctattcactctatatggtttctttcaaaaaggacatctgggtgtggggctttaggctagatactgaggcctatatgaaataattacagttgttggtaggtgtactaatcc

SEQ ID NO: 455110 - DNA, 555 bp, Homo sapiens
cccatctttacttaaaacacaaaaattagctgggtatggtgtcacacacctgtagtcccagctactcaggtagctgaggcagaggaattgcttgaacccaggaggcagaggttgcagtgagctgagatggcacctctgcactccagcctgggtgacagagtgagattctgtctcaaaaaaaaaaaaaaaaaaaaaaaagagaaatacccaagactgggtaatttataaagaaaagaggtttaattgattcacagttccacatggctggggaggcctcaggaaagttacaatcatkgtggaaggggaagcaggcacatcttacatggtggcaggcgagagagagagagactgtgtaagcagcggaaatgccagatgcttataaaaccatcaaatctcatgagaactcactcactaccacaagaacggcatgggggaaaccatccacatgatccaatcacctcccaccaggatcctccctcacatatggggattattaggattacaatttgagataagatttgggtggggacatagccaaaccatatcagtaggcat

SEQ ID NO: 455111 - DNA, 570 bp, Homo sapiens
ccactagcttcttgccaacctggtggcctctcaggcaggacagctgcacctggaagccttactaacactgaccgttacttatttctcctgtgctctgcttcccattctttccatagacccctcatccaataagatgagttcatgtgtctccctaggaagataygaatggatcaggctgctgcctccacactattgattatcagagggatatgtggacatcagtcaacatgcatcaggaggcatcttgagtacctgatgagattaatgaagatgccataggctttacaaaaaagaatccttttggttcttaggcttcacagagtttaatccataaaacagagtccccaaagcagactccaggcttaagaagtggttagaatggaaacaggaaaacaatgatgaaagaagcagtttatcatccacttttgccctaaagacttctcgggccaaaaagctgagatagacagaatggaatccacagctagaaaagataataatactttttagttgcaaacaatttacaggttaccaagtgcttccatatagcatgacctcatttgagcctcacaa

SEQ ID NO: 455112 - DNA, 570 bp, Homo sapiens
ccactagcttcttgccaacctggtggcctctcaggcaggacagctgcacctggaagccttactaacactgaccgttacttatttctcctgtgctctgcttcccattctttccatagacccctcatccaataagatgagttcatgtgtctccctaggaagatacgaatggatcaggctgctgcctccacactatygattatcagagggatatgtggacatcagtcaacatgcatcaggaggcatcttgagtacctgatgagattaatgaagatgccataggctttacaaaaaagaatccttttggttcttaggcttcacagagtttaatccataaaacagagtccccaaagcagactccaggcttaagaagtggttagaatggaaacaggaaaacaatgatgaaagaagcagtttatcatccacttttgccctaaagacttctcgggccaaaaagctgagatagacagaatggaatccacagctagaaaagataataatactttttagttgcaaacaatttacaggttaccaagtgcttccatatagcatgacctcatttgagcctcacaa

SEQ ID NO: 455113 - DNA, 570 bp, Homo sapiens
ccactagcttcttgccaacctggtggcctctcaggcaggacagctgcacctggaagccttactaacactgaccgttacttatttctcctgtgctctgcttcccattctttccatagacccctcatccaataagatgagttcatgtgtctccctaggaagatacgaatggatcaggctgctgcctccacactattgattatcagagggatatgtggacatcagtcaacatgcatcaggaggcatcttgagtacctgatgagattaatgaagatgccataggctttacaaaaaagaatccttttggttcttaggcttcacagagtttaatccataaaacagagtccccaaagcagactccaggcttaagaagtggttagaatggaaacaggaaaacaatgatgaaagaagcagtttatcatccacttttgccctaaagacttctcgggccaaaaagctgagatagacagaatggaatccacagctagaaaagataataatactttttagttgcaaacaatttacagsttaccaagtgcttccatatagcatgacctcatttgagcctcacaa

SEQ ID NO: 455114 - DNA, 443 bp, Homo sapiens
ctattgtttaccctaagccaacaaactgaattattctagttccccctaaatgtcatttttttctttttttggcctytgtatctggctcatgttgtccctacctacattgccttcctcctttcccagctccaaaaagccaaatcatactcatcttttaagacccacgaacctctcagttaccctctcttattttttccagagatatgcacctcccttaaagcatcaaccacctctgccttataatcagattatttgtttatatttgttatatgctgtttgaaggataaatctgttgcttatctgtttttgtgtgctggactctgtttagcatggtttttgccaggactcagtgacaacttactggcttcaacctcaaactcaacatgtctgagctcatgatctgtttcctccactcccaccgcaacctctccctcttgaatttc

SEQ ID NO: 455115 - DNA, 567 bp, Homo sapiens
atatctgagccccaagaaaaatttcatttaaaaagacaggtttcagtaatttttattttttaatgtgagaaccattgacacctcagtacagactctatcttcctcttgatcccagtaaggtgttcatactatgtcctccaagtgcagagaagagaaccaccagatgcccacatctatgttttctgttccagccaggattacctctgatccaaatggagacctgtccatttcctgttggcatttcctgttggcatttcccrtatgttctcaggggagctaaggtatggctgattcttggcagaatgtccccactgtctctgccctaccctttcccctcctctcaccaggtcgcacctgtaagatgcctctgggtgttaatagcatggccacataaattctttccttttgctgcactccctctgccccatctcatctcacaatacacacacattagtctattaattccaaagactccaaagaacagaacttactcagcagaactaataagattgcaacaatgtcagacagtaccttgctatgcatgatttttaaataaagaaggcaccc

SEQ ID NO: 455116 - DNA, 599 bp, Homo sapiens
ctgaatttcgtgtttttggttaccaacatggttttgacctccctttatcttttctccagccttgctctctcttcccgaggagtccttcctatgatcacccccgctctgctgggtatcactattggagcaagcatgttatcacacgatttatgttagctgtgacctacctctctgtcttccccaagaaaatgtgtttcctatgggtcctgaaccacatgtgtgtgactcaactctctgtccttcactggagccagcaagtgcttcaaatatagtaaatgctcagtagatatggcctggagttttgaagttgaactaaactagaccttgccagtgtcaatttataattaaaacaagatttggccccagcacggtggctcatgtctgtaatcccagaactttgagaggccgaggtgggaggatcaccttaggtcaggagctcaagaccagcctggtcaacatggtgaaaccyatctccactaaaaatacaaaaatcagccaggcatggtggcatgcacctgtaatcccagctactcaggaagctgaggcatgagaatcccttgaacccgggaggcagagtttgcagtgagccaggataacac

SEQ ID NO: 455117 - DNA, 599 bp, Homo sapiens
ctgaatttcgtgtttttggttaccaacatggttttgacctccctttatcttttctccagccttgctctctcttcccgaggagtccttcctatgatcacccccgctctgctgggtatcactattggagcaagcatgttatcacacgatttatgttagctgtgacctacctctctgtcttccccaagaaaatgtgtttcctatgggtcctgaaccacatgtgtgtgactcaactctctgtccttcactggagccagcaagtgcttcaaatatagtaaatgctcagtagatatggcctggagttttgaagttgaactaaactagaccttgccagtgtcaatttataattaaaacaagatttggccccagcacggtggctcatgtctgtaatcccagaactttgagaggccgaggtgggaggatcaccttaggtcaggagctcaagaccagcctggtcaacatggtgaaacccrtctccactaaaaatacaaaaatcagccaggcatggtggcatgcacctgtaatcccagctactcaggaagctgaggcatgagaatcccttgaacccgggaggcagagtttgcagtgagccaggataacac

SEQ ID NO: 455118 - DNA, 599 bp, Homo sapiens
ctgaatttcgtgtttttggttaccaacatggttttgacctccctttatcttttctccagccttgctctctcttcccgaggagtccttcctatgatcacccccgctctgctgggtatcactattggagcaagcatgttatcacacgatttatgttagctgtgacctacctctctgtcttccccaagaaaatgtgtttcctatgggtcctgaaccacatgtgtgtgactcaactctctgtccttcactggagccagcaagtgcttcaaatatagtaaatgctcagtagatatggcctggagttttgaagttgaactaaactagaccttgccagtgtcaatttataattaaaacaagatttggccccagcacggtggctcatgtctgtaatcccagaactttgagaggccgaggtgggaggatcaccttaggtcaggagctcaagaccagcctggtcaacatggtgaaacccatctccactaaaaatacaaaaatcagccaggcatggtggcatgcacctgtaatcccagctactcaggaagctgaggcatgagaatcccttgaacccgggagscagagtttgcagtgagccaggataacac

SEQ ID NO: 455119 - DNA, 501 bp, Homo sapiens
agtcatctctgcagctctcagtggagagggtactcctctctgcagctgctcatcctgtccrtagtctctttgacctttttgccctctagccaccctctggcctgttctggctgagcccagggcttttatggacctcagaggaaggaagtgcctgcagattggtccatgggtggccatgggcaggcccggaagagcaccatgagtccccactccagcccgcaggactggcagcttggccccccaaccttcaggccctccctggcctgaaggtggggccttactgggaacccccagccccttccacccaggactctgtctgcctccagctgccattcatggttccagggcttggccccaaccctgctctgagatcggagtgggtgcggggagcagagagaggccaggcagtgggagcagacacccctgagcctgcagggatgggggtggggtccttcctggggcacctgagggtgcaggctgcgcagatacctcggtcctgca

SEQ ID NO: 455120 - DNA, 573 bp, Homo sapiens
gggaggcgccggctgaggcggggagaactttggcgctcggagcagagccaccctttgctggccagtcgcgttgctcctccgaggaagcaagcggcggtggcgactcggtggaaaaataacgaaagaaaggcagagaggaagtagcgagagaagagagaaaatgaagtcggcgctgggggagcctgcaggagggtggccaacagtggaggaaggtggatttggcttcttttccgcaccccgggcgtgaaagccctctccaacgcgaccccaggaaataagtgggtctcgcctgggcagaaaaggaaaagaatccaggcgagagcgcgtcgctcctctgtcactgctgcccccgaggaactccggctgcttctyatcccggccgcctcgcggggccggacgcagtgcccgaggcgccctgcagatggggcgggcagggaacgggcgctccagctgcgggtgacaggcgccggcccgcccgcctgcctgctcagcgcagtgaccgggcgggcagaggatgccaggcggagggacctgggagcgggatctgagactgccggaggcgcgctacgctcc

SEQ ID NO: 455121 - DNA, 561 bp, Homo sapiens
cagccctggaccaccgccccccgcgcggccagccgcgctccggacgacagccgagcaggagcccagagggatgagccggagccagggactaggcggtccccggcgccctcgccgggcgcacgctggttggggagcaccctgcatggccgggggccgccgggctcccgtaagcccggggagggcgccagggcggaggccctgtggccacgggacgccctcctatttgccgtggacaacctgaaccgcgtggaagggctgctaccctacaacctgtctttggaagtagtgatggccatcgaggcaggcctgggcgatctgccacttttgcccttctcctcccctagttcgccatggagcagtgaccctttctccttcctgcaaagtgtgtgccataccgtggtggtgcaaggggtgtcggcgctgctcgccttcccccagagccagggcgaaatgatggagctcgacttggtcagcttagtcctgcacattccagtgatcagcatcgtgcgccacgagtttccrcgggagagtcaggtgagaggagcctggtgcgtggagtgg

SEQ ID NO: 455122 - DNA, 585 bp, Homo sapiens
tacatacttttggaaaacatatgtatattataactgcataataaaagcttaataaaacattaaacataggatggggtcaaagcagttttccatcaaaagaattctgacttcactacaacactcaaaccccacttgaggctaacccattttattaaaatgattacttctttgttctaaattctattcttataaccttcaaataatgatgctgaatatgaacctaattccatttacacctaaattaaattcctgcagttatactttctttctctctccttcctacatgactttttcttctacaggttttgtgtagtttcttcaaagttaactccctaaagtttacctgctgaagtagtgacaagtacacattttttwaaaaaaatatacacctcaccttaacttcatattggttctattaggcagagttaatgatgtaatataattggcttagatccaaatccatgcaattcaaaagtgactgcacagccaggcatggtggcacctacatgtagtctcagctgcttgggaggctgaggcaggaggactgcttgagcccaagagttccagactaccctgggtgacata

SEQ ID NO: 455123 - DNA, 591 bp, Homo sapiens
  misc_feature (1)...(591): n = A,T,C or G
nnnnnnnnnnnnnnnnnnnnnnnnnnnnnnnnnnnnctccacctgcggacttggtcttgctctagtaaccagggctagtctaaaatgtaggctggaatgaagatattggtctcaaatctaaaactcaaaaattacatcaccattccttttagactggctcaaactgggggccttatttcttgtctgctactgtcttattcctaatctattcctcaatttgtttcttggtgctgataatactgccmcctagattttaaaatcctgaaagaaaagaccgtattgattattttcactactgtagtctcagcaatcagtagccagtgcctgacacaaaataggtactcaagtgcttgttaaatgaactgaatgcaccaccactctagctcttgcacatcaggtctcttagtgtaaacttcctaatctcaacatggtcaccatcattataaactaacactttctgggtatgactgtactgatgctttgcatacatgctattcaatctttacaaaagttataaggtaaacagtaccattttcattacgcaaaagaggaaaatggttttcacaaggtctcacatatataattggtaaa

SEQ ID NO: 455124 - DNA, 591 bp, Homo sapiens
ctcaaactcatgacctcaggtgatctaccacctcagcctcccaaagcactggaattaaaggcatgagccactacacctggcccaagctctatttcttagtagctgtgccaccttgggaaaattactcactttttctgaaccttgattttgtcttctattaamgggggatgatcattgcagtcacctcatgaggccattgtgaggatgaaataaaataatatgcataaggcactagggacatcagtaggtattagctcttcatttgtataattattattaaattacaatttctgggcagggactacaccttatgcttgtctgtgtccttaatgtaaccataagaatagttaatttatttaaaagcctgggctgctaaaggaacaatctttaattttcagaagaaaaagtcttctgtataatataggtcaaatgagatgtgagataatgagaaacagaaaacctcctgcagcctctttggctgaggagaagcgatagctgtgtagaaagcctgttctgagcctctcaaatgtatttagtaatcagcagacggatgaaaggaaggaaatttcatctctggtaaaagcagtggaa

SEQ ID NO: 455125 - DNA, 591 bp, Homo sapiens
ctcaaactcatgacctcaggtgatctaccacctcagcctcccaaagcactggaattaaaggcatgagccactacacctggcccaagctctatttcttagtagctgtgccaccttgggaaaattactcactttttctgaaccttgattttgtcttctattaaagggggatgatcattgcagtcacctcatgaggccattgtgaggatgaaataaaataatatgcataakgcactagggacatcagtaggtattagctcttcatttgtataattattattaaattacaatttctgggcagggactacaccttatgcttgtctgtgtccttaatgtaaccataagaatagttaatttatttaaaagcctgggctgctaaaggaacaatctttaattttcagaagaaaaagtcttctgtataatataggtcaaatgagatgtgagataatgagaaacagaaaacctcctgcagcctctttggctgaggagaagcgatagctgtgtagaaagcctgttctgagcctctcaaatgtatttagtaatcagcagacggatgaaaggaaggaaatttcatctctggtaaaagcagtggaa

SEQ ID NO: 455126 - DNA, 274 bp, Homo sapiens
cagtcagtcacttccaacagtgactaaactctgtaagtcaattgtaacaactactacttatgggccctcactctgcgccaggcactttccatgcattctcacattcttacatttaattctcaaaatgaatccataagttaggaagtagcattgtcytcattttagagatgagggaggtatgactcagagatactaaatgactaacaaaaggccacatggtgcataaatcatggagacagaactaaagcataggttgccctgactactaaggtct

SEQ ID NO: 455127 - DNA, 594 bp, Homo sapiens
cgacttgggcttcaggtttgtgtggcatttcttaattctaaatcttgatcttccatctaagcaaacaaaagaaagaagtggcagaagagatggaggacaacagatatgagcttatgaaacaggagtgagcttattttggtgtggtagggctgagtacctgraagagttccaaatctgaatcctcaaaacttgtgaatatgttattttttatggccaaaaggactttgaagatgtggttatgttaagcatcttgagatagaaagggtatcttggattatccaggtgtactcaatgtcatcacaaggattcttataagaaggaggcagaagaagtcaaggtcagaggacaaggcgatgtgacaatgtgataaaggaagcggagactggagtgacacacattgaagatggagaagaggccataagtcaacaaatacaggcagtcactagaaactcaaaggcaagaaaatgggttttcccctcagaggctccagaaagaatgccacccttgactttagcccagcaaaacatatttcagactatgacctctagtcacaagtaataagagaataagtgtgtgttgttttaaatcactaag

SEQ ID NO: 455128 - DNA, 687 bp, Homo sapiens
agttcaactaattgtgatgtaatatgccttttatatatattggtttatcacttcagaataatttcataattattaaatcagctttactgtataatggcttatttcatttgagaattcaaacactttttattgattcacattcattgcttgctacctgacattgacgagcttaacactagaaatagtattagtatracattaagcagtatctcaatacatttctattttaacaccttatttcaaaacttgtgatctattaattatgattacactttgctgcaatgacattttatttcactttaattgtggaatacatcagtatagttaactctttgtacctttcaaatcatggttgaaagtaaagagacattgagaatgttgaatttagttcttaaagtctttggtcacagaggcaatactttcccatgaattagtaatcaaactcaaaggctcttcaagcagctctgatgacctcaggcccaggaccatgaatcctaaatgaacaggtctgtgtctttcaggaaggtctacgtgagcattgttacggaataagaaatgaaaaaaatgtctggttggctacttttcaaatataacatttgggtttcatctggcccttgttgtaaactcacttgtcaaatcattgcctgcatccactgaagcccagtataatcacaaagggcagaaata

SEQ ID NO: 455129 - DNA, 576 bp, Homo sapiens
tactgaacatttggggcagtagcaagcactttgatggcagtacaacctgcatgcaatctatgggtgtttttggacagaaggcctcaaccagaagccaaacagaagttgtgttaatactccccagattaaaaagaaaagtttttgttttcgtaaagttcaacattcagcatgtctttgtctaacagaatcacaatctggcttagttgtggagtgctattttttcagtcccaaccagacattcttaaacagagattcctttaaacaaataatttgcttctayatattgtaaatgtaataatgggagcaaatatatacacagatccacacacagagagatgttattgtgttgctgatacaggaggagttaatttgagtcttttcacacattgtgttatacacataaagaaatgcttcaatgtgacctgaacatgaatgataaatctagatccgaatttatctagtgtgccttcacctggccacagacacagagagccatctagtggtctccaaaatacagctttaggctgaagcatcctaggaatccagtctcacaagacaagaaaggattccaagcag

SEQ ID NO: 455130 - DNA, 578 bp, Homo sapiens
atctattgatcttaagaccttttaaactcatgtgtatattacctcacagtttgcaaaactcattcatatgcattgtcttaatctccacagtagcaatgaagtattttattagttagctactgctgcataacaaactagcagaaaacgtcaatggcataaaacagtaatcacctatctttsgttacaaattgatatcattggctgcacagttcagctgagctcaacagggtttattcacacatctttgatcagtttcaggtcatctaggtagttttgattaccttaactggactctctcacatgtcttgggcattaactggacaacatgtgctatcttgactctgttccacatggcccctccccttgtttgggaatttcttatgataaaggcagaggaggaaaggaatgagcaggtatgctttttcatgtgtcagactgcatcaaatttgctactgtcccacttgccaaagcaaataacatggccaacccagagttacagtacacagaaaaagatgttgctatagaaacaccattaattatggtcattgatacaatcaatctaccacagtttgtgctat

SEQ ID NO: 455131 - DNA, 578 bp, Homo sapiens
atctattgatcttaagaccttttaaactcatgtgtatattacctcacagtttgcaaaactcattcatatgcattgtcttaatctccacagtagcaatgaagtattttattagttagctactgctgcataacaaactagcagaaaacgtcaatggcataaaacagtaatcacctatctttggttacaaattgatatcattggctgcacagttcagctgagctcaacagggtttattcacacatctttgatcagtttcaggtcatctaggtagttttgattaccttaacwggactctctcacatgtcttgggcattaactggacaacatgtgctatcttgactctgttccacatggcccctccccttgtttgggaatttcttatgataaaggcagaggaggaaaggaatgagcaggtatgctttttcatgtgtcagactgcatcaaatttgctactgtcccacttgccaaagcaaataacatggccaacccagagttacagtacacagaaaaagatgttgctatagaaacaccattaattatggtcattgatacaatcaatctaccacagtttgtgctat

SEQ ID NO: 455132 - DNA, 547 bp, Homo sapiens
tcattggctgcacagttcagctgagctcaacagggtttattcacacatctttgatcagtttcaggtcatctaggtagttttgattaccttaactggactctctcacatgtcttgggcattaactggacaacatgkgctatcttgactctgttccacatggcccctccccttgtttgggaatttcttatgataaaggcagaggaggaaaggaatgagcaggtatgctttttcatgtgtcagactgcatcaaatttgctactgtcccacttgccaaagcaaataacatggccaacccagagttacagtacacagaaaaagatgttgctatagaaacaccattaattatggtcattgatacaatcaatctaccacagtttgtgctattagttttgttatttttacagatgagaaaatcaagacttgaggttaaataagttccccagagtgaatcagccaagtgagtgcaccagaagctcagatattctgactctaaacatgttctttcctccaaccgtgtctggcatgttcattcatattcacagatgct

SEQ ID NO: 455133 - DNA, 547 bp, Homo sapiens
tcattggctgcacagttcagctgagctcaacagggtttattcacacatctttgatcagtttcaggtcatctaggtagttttgattaccttaactggactctctcacatgtcttgggcattaactggacaacatgtgctatcttgactctgttccacatggcccctccccttgtttgggaatttcttatgataaaggcagaggaggaaaggaatgagcaggtatrctttttcatgtgtcagactgcatcaaatttgctactgtcccacttgccaaagcaaataacatggccaacccagagttacagtacacagaaaaagatgttgctatagaaacaccattaattatggtcattgatacaatcaatctaccacagtttgtgctattagttttgttatttttacagatgagaaaatcaagacttgaggttaaataagttccccagagtgaatcagccaagtgagtgcaccagaagctcagatattctgactctaaacatgttctttcctccaaccgtgtctggcatgttcattcatattcacagatgct

SEQ ID NO: 455134 - DNA, 547 bp, Homo sapiens
tcattggctgcacagttcagctgagctcaacagggtttattcacacatctttgatcagtttcaggtcatctaggtagttttgattaccttaactggactctctcacatgtcttgggcattaactggacaacatgtgctatcttgactctgttccacatggcccctccccttgtttgggaatttcttatgataaaggcagaggaggaaaggaatgagcaggtatgctttttcatgtgtcagactgcatcaaatttgctacwgtcccacttgccaaagcaaataacatggccaacccagagttacagtacacagaaaaagatgttgctatagaaacaccattaattatggtcattgatacaatcaatctaccacagtttgtgctattagttttgttatttttacagatgagaaaatcaagacttgaggttaaataagttccccagagtgaatcagccaagtgagtgcaccagaagctcagatattctgactctaaacatgttctttcctccaaccgtgtctggcatgttcattcatattcacagatgct

SEQ ID NO: 455135 - DNA, 531 bp, Homo sapiens
aagggaagaggagatcgtttgctacaactagataatacacatccaaatatctggatagatggagcaagcctgtaacattttggcaaattgttgaatagyagacgggaagggcaaaattaaattggatttttgtcatatctattttccaagcacacaagacgtgctgggaactgaatattgtttgtataaaatgtacttttaagtaggcttcaggatatataaaattttaattgacttccatcaaagtatatatatttccctgtttactaattattttgggtagatatgtcttattttcccacttagatttcaattagagacagtattaagtactattttgtatccatctagcaaaacattacacagtgacacataaacaacttagtagattcatatgaatttaataaataaaaaaattaatgaaactttaaaaaccctataacgtgtcatgaaaatcgcctgttgagaccagtattctattctggagaaaagcattttgttttcttatgtggtatgggtctcaaaaggtaa

SEQ ID NO: 455136 - DNA, 472 bp, Homo sapiens
tgtaaatgcctgcaagtgacacacacatttttagatggagatttcgggatttccccagtgaawgtgataagctatccagatggtgccttgataccactcagcagagtcctttaacgataacaattaacagctaattatatttaataccttgaaaggagtccagtcgcatttgtttgatcagaaatcaatccctgggtagatccagaagagagaaaagacttccagcacagccatctggatactcttttccctgccacttttgccactgaagagggtttagggatgtccatggctcctcttggaatatatattctgcgtctggaagctgtttaaagaatgggccttgctgaattaaaaagagaaaaattggtttttgtcccatcaaagacaagagtcaagttggataaaaattctgtttagatggagaggacaagagaaaaagcttagaaaacctgccctagacatttgtggt

SEQ ID NO: 455137 - DNA, 542 bp, Homo sapiens
tacccacaaaaataaaaaactttttaaaaatttaaatttaaatttaaaataaataaattttaaaaayataaattttaaaaatttttaaataaaatatttttttaattttaaataaaaatttttaaatgggaacatatgggtagtgacttctatattggacaacatagatatagaacattttcatttccataggaagttctattggattgttatgtcaaaggatgttctgttgcaaaggaagagaaactcccaccatgaagctcaaaagcagggaatttgtgctgaaatcttacaggaaaatgacatgaaatagaaatgcatgaagtatagctgagctgtaccaccagaaggtgtttgggtagcacctctctttttcccttgctctggggcccaatggctcttctctcagtttctcacttcacatctgctacaaactcctctcgggataccagctgattcttctgccttgccatagcttctccatggatgtggttcttatgataggacttagcctgactctatatgactttacaactctaatc

SEQ ID NO: 455138 - DNA, 466 bp, Homo sapiens
cttacctttgtaccttgtcagatgcaggggaggaattaataaacacagaggaaggaattgcctgctgggtgcttttactgtttaagagcttccagtaattgtcacacttctgtctttacttcattcttgtacagagtgtaccttttattctctaatcatcttctgtcagtgattatacacctgtggtctcagggccacactttgccaacaggaggtatacaaggaagcagagagaatatctcactgacttaggtgtagtgtttctttactgtttctactcatgaatgcctctgcttcaaattctctaagctgttggattctgtacctcctttgaccttcaagatgctgttgatctctccagccttgcctaaaaccacggaattaacccattttctcctctctcctgamctcagatttgttttaggattctcaatttgcaggacttgttgggttcctgacccattgc

SEQ ID NO: 455139 - DNA, 631 bp, Homo sapiens
aacaaactctgcatcccaaaactcctggttaccaagattggctcattctcttctttgttgttaggcccagtcagtctcataattatcactggcaaggctgtttctggcctgaaggatccagaatacattcctaatgcttgatttcctaggacttcgaaggtattcagaggcagtcrgcttacagactgctcagtgtggtgaaaatattccctttgattgttaattagttctttgactgcattaacaacgtcaatctagcaaatgtcaatgccgtattgagaacataaccctatttcacttatgcacttgttggcaattttagaagcatataatggtcactgctgtcttggtctgtgagtgaaatgctgtcctcattaggaaccagacaatgcatttaaaacagcaggaagaaaactaagattcgtcccccaagcacttttgctgtggaggcaagttgctttccttgttctgatcagagggtctcataggccttgcccacatgggtctgcactgtgctgcttctccatcagcatccctccattgagctctctcctgtttagttacggtcattgttgtctcctctgaacccagacttagagtcacacagctttttcctttcacagattgtttg

SEQ ID NO: 455140 - DNA, 543 bp, Homo sapiens
gatactctgctgcttccttttgaaggttttctgtttaatacgcatgtggattggggcctgatattatcatatccttcttctccacttgagtgttttgttctttgttgtatagcatggctcttcacatgtgtagcttttttgggtctcagctgagtgattgtggtgcttagcaaggtctctccattctgtctgggcyagaattccaaaattcccagcactgtataacatctgccatctcagttcagcattaggtcccagagccactatttctcttaggccttacagaattttgccttgcacatatgcagcccagcttctcctaaagacccttggggaaacccgtgcctatttctttatgtagctccttcctttctaaagccctgctcaggaaattccagccacctcagcaccctaatctccaaattctgctttctcagcttagcaagaccattgctttctgctggggtttcaactccctgcttcaccactgggaaattttccctgagggagaaagccaggaaaaatgtgggattctccacatgt

SEQ ID NO: 455141 - DNA, 585 bp, Homo sapiens
aactccaactaaaattcccctcagccagggccacaactaccctaatatctccaggcaagaggcagagtgggatggaaggaatcagagggtagacagaagtcttcactgactatttttacaatattttacttttgaaagttttacagaaattgaggatcatgtaaatacsgtgttggtttcttgtccagactttggaagggatttgtgcaaaagacgggcccttaaattgcattagcttcatggctggggagctggggtgcatgcttcttttatcatctgctgaccaaggatttctgcctttgctacttgccatgtttgtgaagtctcctaccctttgtccagattctgaatctggaactttcttggttccaaacaactgaatattttctcacatatttttgatacatcgtttttagtcgttttcttcccccaaatgaccaaagccagcttctgatatctttttaaaacagtaattcaggtagatgataaactatcacacaaatcctttgtcttacttttccaaacagatctctgagagtccagctacctcagaatagaagagccttgtgctgttgctgggaaccc

SEQ ID NO: 455142 - DNA, 498 bp, Homo sapiens
ggggcagggcctgggacctgcagcctgccatgcctgagcctcccacaccctcagtgggctcctgtgcggcccgagcctcctcgacgaacgccaccccctgctccatggcgcccagtcccatcgaccacccaagggctgaggagtgcgggcgcacagcgtgggamtggcaggcagctccacctgcagccccggtgcaggatccactgggtgaagccagctgggctcctgagtctggtggggacgtggagaacctttatgtctagctcagggattgtaaatacaccaataagcaccccgtgtctagctcagggtttgtgaatgcaccaatggacactctgtatctagctactctggtgggaccttggagaacctttatgtctagtccagggattgtaaatacaccaatcggcactctgtatctagctcaaggtttgtaaacacaccaatcagcacccagtgtctagctcagggtttgtgaatgcaccaatcgacactctg

SEQ ID NO: 455143 - DNA, 647 bp, Homo sapiens
gccttgtcatattgtagcttttccctaaatacctgatactatcttgggaagagtaactgggaaataaaagctagcaagagattagacacactttatttagaaaatactgaaagttacccaaagagactattcatattgttagccattttaaagtttaaaatgaataggaataaaagtcataattaccattgttattttcactacggttggggccttagataaacaatgaattagttaaaaatttcatatttctatgtattcaagttgaaatatgagttataattgcaaatgtattacacatttatccctaatttaattcgaagttggtacaacayaggaccatccaaaacctaacaggtgcctgtcctgtcccacaaatttattttttgcttttgatattttatctagtgtaatatcgattgtacatgtaacaagccatctatagatgcattattttattaatgttttattaatctgcttgcaaatccctctaaattttgtacatttaccaacagctccctttaacacatgaatgtcagagaagtataatagcatctttaaggaccacaatactcccacttataccaaaaaagtaaaaaggagaattgtgtcaattatctcaattatttaggaaagccatcattttg

SEQ ID NO: 455144 - DNA, 626 bp, Homo sapiens
gtgttctgtttttctctgaaatgtatcctgggaggctacataattgaaattttctgactctcaaatgagcgcagaacataaattttgacgaggccttgcctagcatgaattcttgggattgtacccttcaggccttgagggaaaattaaatggagggcttcgggttccattaggaagcaattttcctctggctgagtaagtcaggataatcctgctgtgacagtaggaaccttgccagccaccccagtggcaccatgaaaagataacccgagcttttgggcttctttttcggatgctgtacccctgactaaattaggaatggggccagcraccccacaatatttgctagacagtattatgtttcatcctgacgcttctcatgaggtctgtgcgatgaactgaatgttaagaatggggtggagtaagagatggattatatattattacagactttgctttagaaataagctaattcacagtattaacaatgtagaggcataaataatcaactgtcctttcataaacctggacacttttgggaaagatggagtgagagcatatctgtaaactctcatacattaaataaaattatcaaaaagaatgaatgatatgaaagaaaacacaca

SEQ ID NO: 455145 - DNA, 584 bp, Homo sapiens
ctgctgtgacagtaggaaccttgccagccaccccagtggcaccatgaaaagataacccgagcttttgggcttctttttcggatgctgtacccctgactaaattaggaatggggccagcgaccccacaatatttgctagacagtattatgtttcatcctgacgcttctcatgaggtctgtgcgatgaactgaatgttaagaatggggtggagtaagagatggattatatattattacagactttgctttagaaataagctaattcacrgtattaacaatgtagaggcataaataatcaactgtcctttcataaacctggacacttttgggaaagatggagtgagagcatatctgtaaactctcatacattaaataaaattatcaaaaagaatgaatgatatgaaagaaaacacacataacactgaaactagagatttctccaatgaaaaatattttaagactgtcaggtacaatataccttagaacattctcaaagatgaccataggaagcacaacacttaccttttttggcagatgctgttggtgcctgacccagatacccttcactgagcaggtgcaatcttc

SEQ ID NO: 455146 - DNA, 584 bp, Homo sapiens
ctgctgtgacagtaggaaccttgccagccaccccagtggcaccatgaaaagataacccgagcttttgggcttctttttcggatgctgtacccctgactaaattaggaatggggccagcgaccccacaatatttgctagacagtattatgtttcatcctgacgcttctcatgaggtctgtgcgatgaactgaatgttaagaatggggtggagtaagagatggattatatattattacagactttgctttagaaataagctaattcacagtattaacaatgtagaggcataaataatcaactgtcctttcataaacctggacacttttgggaaagatggagtgagagcatatctgtaaactctcatacattaaataaaattatcaaaamgaatgaatgatatgaaagaaaacacacataacactgaaactagagatttctccaatgaaaaatattttaagactgtcaggtacaatataccttagaacattctcaaagatgaccataggaagcacaacacttaccttttttggcagatgctgttggtgcctgacccagatacccttcactgagcaggtgcaatcttc

SEQ ID NO: 455147 - DNA, 591 bp, Homo sapiens
ggcctattctgatggggttattgtatttcaaagactgaaaagagctgtagaagcctgtagaggttcagggacacattccctaaaagggaaaatagacttagggttgcttctcagtcataaaatatgttagagaagggtggaacagtgttttggagaaaaataagttctccctcagtaagaacttttttttcaatttaaaagctgatcacctctgcaactttcaaggagaaaaaaatcaaaaatttttgtagacatattccaaataatcaaggggaaaaccaaaataatgaaytcataaaatggggaaattgagatataaaaggactaaatagttacctgttttaaatccattttcacaacaaattacatctaaaatatatggccttacagaagtatacaaagctatgcataccaagaggttcatatgtgactattttaaatcaaaacaacctatttagcactatttctcattctgttattattcatttagatttaactatgtattttataagaacaattgcaccatcgtattgtcttgttttcatatttatcttgaagtctctcattctgaatcgttggaagtttggatat

SEQ ID NO: 455148 - DNA, 567 bp, Homo sapiens
tattccaagcatatgcacatgttgttctcactgcttggcataccattttcccttgtgtctgcctgaaattcaatcttcatcctttgctcttctgtgcatggtacactggccactctctccctaccatgattracaactttcacttctatgtgacttttctacggtcatctttctagatctgtcatacagttatgtaattatttgttaacatgtgtctctctcctcctctctcactagaccaaaccctgtgctcctcacacaatgtctggctcataatagatgctcaatgactattggttaaactgaattaatggtccactttcattcattctagtgtaactgctaaatcacacctgtggaaaacccaccatatgtcaaggtatggtgatgggaacctaaaagagtgcaaggccctgtgaaagagggtcctcattcactgcggtggacagaactcctgaccacctagaatttaccatgttataagatgtagaacaaagctggaaaagtaaggccttggggaaattgattttgtaataaatagaaaacctgtttctactaccctattaa

SEQ ID NO: 455149 - DNA, 639 bp, Homo sapiens
gtcccaaataatacagtagggagtagtgatatcgtatgtcactgaagagtgcctggcctttctacagcagccagccagctactactcagctgcaaccagctgttactcacagggaacattgccagatattctgacttttcaagggaagccagactggatttttttaatgtaaaaatccccttaaatgttgacaacttactcactttttaaaaaacaaactgcatgcctgctagtgctggagggtcaccagttcaacaccttctggactaggaaatatcaagggatttgtaaagcagacaagtattagccagaaacgcctcactgcctggctgagtaatggaagatggcataggataggcctgtaatcataacargtacagttcctttaaggtacagctagaaagagctagaataagtatataatgtaaaggacaggtggataccctcatgtgaaagcaagagacaagaaagaaaaaaggctctaaaagataatgaatataatccattctattcataacatgcccataaatgaagtttagaaaaccttactcataaaatagaaataatgagataatgataactactcatagtgtttgaggtattaattaaatagaatagcttatatcaagtggattaatg

SEQ ID NO: 455150 - DNA, 639 bp, Homo sapiens
gtcccaaataatacagtagggagtagtgatatcgtatgtcactgaagagtgcctggcctttctacagcagccagccagctactactcagctgcaaccagctgttactcacagggaacattgccagatattctgacttttcaagggaagccagactggatttttttaatgtaaaaatccccttaaatgttgacaacttactcactttttaaaaaacaaactgcatgcctgctagtgctggagggtcaccagttcaacaccttctggactaggaaatatcaagggatttgtaaagcagacaagtattagccagaaacgcctcactgcctggctgagtaatggaagatggcataggataggcctgtaatcataacaastacagttcctttaaggtacagctagaaagagctagaataagtatataatgtaaaggacaggtggataccctcatgtgaaagcaagagacaagaaagaaaaaaggctctaaaagataatgaatataatccattctattcataacatgcccataaatgaagtttagaaaaccttactcataaaatagaaataatgagataatgataactactcatagtgtttgaggtattaattaaatagaatagcttatatcaagtggattaatg

SEQ ID NO: 455151 - DNA, 579 bp, Homo sapiens
tctgtttttacagtacaatttaggaaaattacatgatttactaactgtgttaataacacaaagttgagtttttaagttatgagagctaatatttgtgcatacatcaaatcaagattactttgaagatgatgctccaatttaggcaccaaacttaataaacaaatgtaaagacatattaaattgcataaaattttacactaccttggaaactaatttttgcatgctttcgtttatttatttatttttattatagtagatgaattgatactatatgtgttagtccactttgtgttgttataaaggaatatttgaagctaggtaatttataaagaaaagaggtttatttggcttataattcttcaggctgtataagcagggcacctcacctgcttggctgctggtgaggcctcagcaagcttacaatcatggtggaagkcaaagggggaaccggtgtatcacatggtaagagagggagcaagagagagggaggaggtgcctggctttttaaacaactagttctcagatgaactaacagaatgaaaatgcactgatcagcaagtggaacggcaccaaaccatt

SEQ ID NO: 455152 - DNA, 524 bp, Homo sapiens
  misc_feature (1)...(524): n = A,T,C or G
gacaaatacagcagcatcaggcaaacttcttatatatctgttcctctatcaggggatttnataatcattcctccctaccccattcaccactagcataatgataatttcatatatgtatacataatatacatattattattatattattcttgcattactatgttctttctttttaaaattgttttcttttaaaatatttatttttaattgacaatagttgtgtatatttattgaagcataatgtgatgttttgatctacgtagaaagatgcatcattatagaaagagtcagtcaagctaattaacatatccctcacctcaccaacttagtttttttatggcaggaaaagtcaatctcatagaaacagagcatagaaaggtggttcccagcggctgtgggaaagagggagggatggggagagatgcagatcaaagcgtctacagtttcatttagackgcaggaataagttattgcacagcacggtgatcattgttaataataatgaattgtgtatttcaaaattg

SEQ ID NO: 455153 - DNA, 584 bp, Homo sapiens
tgtaattttttgattttaaaaaacagccattctgacttgtgtgagatgggtatctcactgtagttttgatttgcatttctgtaataattastgacgttgagcattttttcatatgcttgttgactgccattgctctttttaaatcgcctttttaaaaaacataaaatctgtatgtgcagtgatttacacatttatacatttttcattctgaaattataacatagtaatgaatacttctatagatttactatgtgccaagtactatttcaagcactttatacatatcaaactcatttaatatttaaaattaccgttatcaggtaggtaatattgtcttcattttacagatgagataactgaactatggagaaattaagtgatttgtaaaaggttaccaaatactattaagtgaaagtcacatagcattctaattattgtatattagtgcattaaatctattcaatcattgatgacattgaccctccttggttgacgtggttctgggtacagaattcagtaacaatgaaagatgtttttttctacagtttcttcttcatttctctgaactcatttccccattgaaa

SEQ ID NO: 455154 - DNA, 538 bp, Homo sapiens
aaaacaacagttatgcaatctataacattcctggaaatttaaaaacaataaacattcattgtttttatgaaatagaactcatttggtcattccctctttgtcctaattgtttctatcatacatttacaggatcattttcaaaggcaatcagggaaataaaaatgattttgtagccccccactaggagacatctcattttagccttgattcaattataatgtgagtcaaataatttgcttkttttttcatagtttatgttgtagctttcataatataatgtaaaaagcctccaaatgcttggctgggttcttcactatgatgtcatatttgtagtccagaggcaatattactattaatgacaatgatagttaatatttattgactacttactatatgcctattactctctatagaatacatatacagacacacacacacacacacacgcatattgtgtcagaaaaacgctattaaagaaatttagtgcttgactgttttgagttagtattgagttagtaatctgaaaaataccctctac

SEQ ID NO: 455155 - DNA, 558 bp, Homo sapiens
ttttagcatttaccatttgtaagttctccttttaacttatatatgttggttttaatagaaattattatgatctctttaaaaggccaactaattctttttttttttttgagatggagtcttgctctcttgccaggctggagtgcagtggcgtgatctccrctccctgcaatctctgcctactgggttcaagtgattctcctgcctcagcctcccaggtagctgggattacaggtgtgcaccaccatgcccagttaatttttgtgtttttagtagagacggggtttcaccatgttggccaggatggtcttgacctcttagtctcgagatctgcctgcttcggcctcccaaagtgctgggattagaggcatgagccaccgtgcctggccaaggccgactaattgtttcatccaactacaacttgggagccagagttaactggtgcatagtgacagtaccagcattttctctagtatataaagaaaaatagtacaaatgccagaagtctacatgattctctggtctctccaaaggataatgggttctagcagtttgctagaa

SEQ ID NO: 455156 - DNA, 573 bp, Homo sapiens
cctctctgactacaggtggtcctttttcagaagaaagtctaagccctaatgaaatatcctttaaggatattccccctttcccgggaatcaccaaaaccatttccatatgatgtgttgttctctattttaaatggacattttcgttctagtttctgaatcatattgaggaaccggagcagaaatgtatttaatttaaaaataaacaaatataattatgaatgtataaacaaataaataatattttatatatatataatactcttatggaactcttagttctattaatgtatcctgtttgtctactaccaatctatcatctattatctctatctatctatcaatcatcaatcacaatgattctatgggtaataggatctactcttatatccattttacataaatgaatrtagaacaaaggaaattaaggctcagagaagttaagtaacttgattaagtcactcaagtagtaagtggcagtgctaaacttcaagttcagacggtctgaacttgagttcaagagtctttgcctttactactctatactgtcttaagcatcaaggccagggaggaggg

SEQ ID NO: 455157 - DNA, 492 bp, Homo sapiens
tccagcacagtgactgacatatttccacacacacacatacccacacacgtatatacatatatatttttgaagtatgtgggtggagctggaatatcctgcagggaatgcaccttctatctgaggaactgttgtgtgactgtgctcaggggacatgttttacagtaaggtgaaagtttgcctggctcakggtctagggagatgcatggagcagaggggttgcgggtcttgtcagcagctcgcatggattatggtcaaaagagggcagcagagggtcacagacgagaggtgattttaagtggtgcagaagagtgggtggaagagaatacaaaatcaggagtgagagttttgggtgccagggataagggtggtgctctttatagaagctaatcctgttggggggaggtttagtaaggagagagctggggaatccccaggtgtaaagaggatgcttaaaggaaaactagaatattaaaaccaaggaatgaagcaacc

SEQ ID NO: 455158 - DNA, 621 bp, Homo sapiens
tggggaggcagggagagcaatttcaattctaaacaagaactctttacttctctagtcttgtctcatgctactctcctcctttgtgaactctgctgtagtcattactggcttcctttcacttccttaaacawttttctgttacttcactattagcatggttggatttttgtcatccttcagatcttgatgtaaatgctatttctgaagagagtttttttctaactatcctttgctcttcactctaaacacccattaccgtttatatttacggtttttctcttgtttatcgtctgcctcctcctggagagtaaggaacatgtgtgttgtactctccagggaatatccagcatctagtatcatatccaacttgtgatagtggtttcataagtattttctggacaaatatactgaacaagttgcccttggagggaggaagttgcctgtgatggaaggtatttaatatggactggacatgcagttgtcaagatgctgtataatattcaaggatcagatagattgttactgaaatgacatttaaagttgctttctgtcattccattctattattccaacaaatgaagagtataaaattaatgactctaaaatggaggcaataatggc

SEQ ID NO: 455159 - DNA, 601 bp, Homo sapiens
tcctcctggagagtaaggaacatgtgtgttgtactctccarggaatatccagcatctagtatcatatccaacttgtgatagtggtttcataagtattttctggacaaatatactgaacaagttgcccttggagggaggaagttgcctgtgatggaaggtatttaatatggactggacatgcagttgtcaagatgctgtataatattcaaggatcagatagattgttactgaaatgacatttaaagttgctttctgtcattccattctattattccaacaaatgaagagtataaaattaatgactctaaaatggaggcaataatggctccattgctcatcaatatgaacagaaaagagaataaatgtggctaattagaaggtaatgaagatcttacctactcattaataaaagtagaaagtgtaatttgtaaggaatctgaaccttaaataaatcagtagacttgggtaactttctagggaaatatttaggtgctaatccaaaagcagatttgaaaatagctaccttattctcttcgtatttttaataactagcacattatctggcacataataaatgaacctaggattaaaatggtaacta

SEQ ID NO: 455160 - DNA, 601 bp, Homo sapiens
tcctcctggagagtaaggaacatgtgtgttgtactctccagggaatatccagcatctagtatcatatccaacttgtgakagtggtttcataagtattttctggacaaatatactgaacaagttgcccttggagggaggaagttgcctgtgatggaaggtatttaatatggactggacatgcagttgtcaagatgctgtataatattcaaggatcagatagattgttactgaaatgacatttaaagttgctttctgtcattccattctattattccaacaaatgaagagtataaaattaatgactctaaaatggaggcaataatggctccattgctcatcaatatgaacagaaaagagaataaatgtggctaattagaaggtaatgaagatcttacctactcattaataaaagtagaaagtgtaatttgtaaggaatctgaaccttaaataaatcagtagacttgggtaactttctagggaaatatttaggtgctaatccaaaagcagatttgaaaatagctaccttattctcttcgtatttttaataactagcacattatctggcacataataaatgaacctaggattaaaatggtaacta

SEQ ID NO: 455161 - DNA, 621 bp, Homo sapiens
tggggaggcagggagagcaatttcaattctaaacaagaactctttacttctctagtcttgtctcatgctactctcctcctttgtgaactctgctgtagtcattactggcttcctttcacttccttaaacaattttctgttacttcactattagcatggttggatttttgtcatccttcagatcttgatgtaaatgctatttctgaagagagtttttttctaactatcctttgctcttcactctaaacacccattaccgtttatatttacggtttttctcttgtttatcgtctgcctcctcctggagagtaaggaacatgtgtgttgtactctccagggaatatccagcatctagtatcatatccaacttgtgatagtggtttcataagtattttctggacaaatatactgaacaagttgcccttggagggaggaagttgcctgtgatggaaggyatttaatatggactggacatgcagttgtcaagatgctgtataatattcaaggatcagatagattgttactgaaatgacatttaaagttgctttctgtcattccattctattattccaacaaatgaagagtataaaattaatgactctaaaatggaggcaataatggc

SEQ ID NO: 455162 - DNA, 586 bp, Homo sapiens
ggaaatatatcccacagaaccgaaagcagagtcttgaagagatatttgcccccacatgtttatagcagcacctattcacaaaagccgagtggtataagcagcccaaatgtccatcagtggatgagtacataaacaaaatccagcatatacatacactgaaataatattcagcattaaaaaggaaggaaatcctgtcatgtgctacaacgtcaatgaatcttgaagacattatgctaagtgaaataagccaggcacaaaaagacaaatagtttaggcttctctttatatgagatgtctaaagtagtcaaattcatagaaacagaaagtagaataatagttctcagaggctggagagaggaggaaaatagaaattgtagtgtaatggacayggagcttcaggtttgcgagatgaaaacgttctgaagatctgttttacaacaatgtaaatatatttaacactaccaaactgtacacttaaaaatagctaagacggtaaattttatgttatatgattttttttaccacaataaaaaattcatcacttaaatgtttattcagagaggctgatttcagattccagattcac

SEQ ID NO: 455163 - DNA, 299 bp, Homo sapiens
atatagtattcagtagcacaacaggaagactatagttaatactaatctattgtatattttaaagtaactaaaagatgggaattgacatgttcctaacacaaagatatgataaatgttgaggtgatggataccccaattaccctaacttgatcactacacactgtatgtctgtattgaaacatcacatgtaccctatamatgtgtacaagtattatgtatctgaaatggtttggctgtgcccccacccaaatattaacttgaattatatctccctgaattcccacatgttgtggaagaga

SEQ ID NO: 455164 - DNA, 534 bp, Homo sapiens
agcccctcccatcacaggcctgcaggcccaggcagaaaaagtggtttcatgggccgagcccagggttcccatgctgtgtggagcctaggractcggtgccctgtgctccagcagctccagcagtgattgaaaggggccaacatacagccgggactgtggcttcacagggtgtaagccccaatccttgacagcttccatgtggtgttgagcctgcaggtgcacagaagtcaagaattggggtttgggaacctccgcctagatttcagaagatgtatggaaatgcctggatgcccaggcaaaagtttgtggcaggagaggggccctcatggagaacttctgctagggcagtggggaagggaaatgtggggttagagcccccacacagagtccctactggggcattgcctagtggagctgtgaggagagagacaccatcctccagaccccagagtgatagatcctcctacagacttgcactgtgtgcctggaaaagctgtggacactcaacgccaggctgtgaaagcagctaggagg

SEQ ID NO: 455165 - DNA, 594 bp, Homo sapiens
cctgataggaggtgactggatcatggggatggggttctcatgaatggtttagcaccatcccctcggtgcctttctcatgatagtgagtaggtgagttatcatgagatctggttgttttaaaagtgtgtagcttctcctccctctctcttccttcttctccagccatgtaagatgcctgctttcccttcatcttccaccatgagtgtaagtctcctgagacattcccagtagcagaagctgctttgcttcctgtacagcctgcagaattgtgagccaactaaacctgttttctttataaattatccagtcttagttatttctttataggagcaagagaatggactaaaacattggcaataatagatgttcttttttatgtactcttgttctttccttttttccctacttctgtaactggacttcaggwgtggtgacttgttttgaatagaataattgaaacaactttagctcctggagcttcaatgcaagaaaacatcttttcatatccatgagccaatgtgccaagtttgaaatttcctgctctttctgttttttgttcttttcaacacatttacctgggtgacaaaataatct

SEQ ID NO: 455166 - DNA, 594 bp, Homo sapiens
cctgataggaggtgactggatcatggggatggggttctcatgaatggtttagcaccatcccctcggtgcctttctcatgatagtgagtaggtgagttatcatgagatctggttgttttaaaagtgtgtagcttctcctccctctctcttccttcttctccagccatgtaagatgcctgctttcccttcatcttccaccatgagtgtaagtctcctgagacattcccagtagcagaagctgctttgcttcctgtacagcctgcagaattgtgagccaactaaacctgttttctttataaattatccagtcttagttatttctttataggagcaagagaatggactaaaacattggcaataatagatgttcttttttatgtactcttgttctttccttttttccctacttctgtaactggacttcaggtgtggtgacttgttttgaatagaataattgaaacaactttagctcctggagcttcaatgcargaaaacatcttttcatatccatgagccaatgtgccaagtttgaaatttcctgctctttctgttttttgttcttttcaacacatttacctgggtgacaaaataatct

SEQ ID NO: 455167 - DNA, 575 bp, Homo sapiens
gaaatagtcttccaatgaatacatttgttaattgttgtcctcaagagcaagcatctgacatcctgacaatgtttagcacaatgtcttatatacgttaggggcacaataaatattgatggaattaactatgtttattwtgggaactattggattgcttttaagagcttgctgaacattcaataatatgcattaagaaatgaggaagcctttctcagtaaaatctcaagcccttgtatgaaacgaagaagtgtggcctgtccctacgtaccaaaaaatgtgtaacaggaaatagaatttatgctgcactttaaactctctgaaggatttaaatgactttgatacatgtagaataaaaagtgaggactccacagaggtttacaggaggaaaactatgactgtagctactcatgatggtaggtaggatggagtcttaaaatttattcttaaaatttgttctgagaatttgtcttttgtctttccaaattaagcttttgagcaaagcttgtaatgataaaaacagagcgttggaaaaatcatcactgggaagcattcaacagggatggggaattagaagc

SEQ ID NO: 455168 - DNA, 609 bp, Homo sapiens
ctaagtgtgtagtgcaatgttaaaggcttgattacttttctgtatcttctgaacctggattcttgctgtgaaaagtgaaatctgtgccattaaacacacttatgtaacttgtatcacaattttatctacttgtggaattcacaaacttcatggaagaagagaaacttatttgaaaagtcacaaattagcagtcatataattgaagtggaaatagtcttccaatgaatacatttgttaattgttgtcctcaagagcaagcatctgacatcctgacaatgtttagcacaatgtcttatatacgttaggggcacaataaatattgatggaattaactatgtttattatgggaactattggattgcttttaagagcttgctgaacattcaataatatgcattaagaaatgaggaagcctttctcagtaaaatctcaagcccttgtatgaaacraagaagtgtggcctgtccctacgtaccaaaaaatgtgtaacaggaaatagaatttatgctgcactttaaactctctgaaggatttaaatgactttgatacatgtagaataaaaagtgaggactccacagaggtttacaggaggaaaactatgactgtagc

SEQ ID NO: 455169 - DNA, 549 bp, Homo sapiens
tgtggtagattgattgtatcaatgaccataattaatggtgtttctatagcaacatctttttctgtgtactgtaactctgggttggccatgttatttgctttggcaagtgggacagtagcaaatttgatgcagtctgacacatgaaaaagyatacctgctcattcctttcctcctctgcctttatcataagaaattcccaaacaaggggaggggccatgtggaacagagtcaagatagcccatgttgtccagttaatgcccaagacatgtgagagagtcctgttaaggtaatcaaaactacctagatgacctgaaactgatcaaagatgtgtgaataaaccctgttgagctcagctgaactgtgcagccaatgatatcaatttgtaacgaaagataggtgattactgttttatgccattgaggttttctgctagtttgttatgcagcagtagctaactaataaaatacttcattgctactgtggagattaagacaatgcatatgaatgagttttgcaaactgtgaggtaatatacacatgagtttaaaag

SEQ ID NO: 455170 - DNA, 549 bp, Homo sapiens
tgtggtagattgattgtatcaatgaccataattaatggtgtttctatagcaacatctttttctgtgtactgtaactctgggttggccatgttatttgctttggcaagtgggacagtagcaaatttgatgcagtctgacacatgaaaaagtatacctgctcattcctttcctcctctgcctttatcataagaaattcccaaacaaggggaggggccatgtggaacagagtcaagatagcmcatgttgtccagttaatgcccaagacatgtgagagagtcctgttaaggtaatcaaaactacctagatgacctgaaactgatcaaagatgtgtgaataaaccctgttgagctcagctgaactgtgcagccaatgatatcaatttgtaacgaaagataggtgattactgttttatgccattgaggttttctgctagtttgttatgcagcagtagctaactaataaaatacttcattgctactgtggagattaagacaatgcatatgaatgagttttgcaaactgtgaggtaatatacacatgagtttaaaag

SEQ ID NO: 455171 - DNA, 549 bp, Homo sapiens
tgtggtagattgattgtatcaatgaccataattaatggtgtttctatagcaacatctttttctgtgtactgtaactctgggttggccatgttatttgctttggcaagtgggacagtagcaaatttgatgcagtctgacacatgaaaaagtatacctgctcattcctttcctcctctgcctttatcataagaaattcccaaacaaggggaggggccatgtggaacagagtcaagatagcccatgttgtccagttaatgcccaagacatgtgagagagtccwgttaaggtaatcaaaactacctagatgacctgaaactgatcaaagatgtgtgaataaaccctgttgagctcagctgaactgtgcagccaatgatatcaatttgtaacgaaagataggtgattactgttttatgccattgaggttttctgctagtttgttatgcagcagtagctaactaataaaatacttcattgctactgtggagattaagacaatgcatatgaatgagttttgcaaactgtgaggtaatatacacatgagtttaaaag

SEQ ID NO: 455172 - DNA, 549 bp, Homo sapiens
tgtggtagattgattgtatcaatgaccataattaatggtgtttctatagcaacatctttttctgtgtactgtaactctgggttggccatgttatttgctttggcaagtgggacagtagcaaatttgatgcagtctgacacatgaaaaagtatacctgctcattcctttcctcctctgcctttatcataagaaattcccaaacaaggggaggggccatgtggaacagagtcaagatagcccatgttgtccagttaatgcccaagacatgtgagagagtcctgttaaggtaatcaaaactacctagatgacctgaaactgatcaaagatgtgtgaataaaccctgttgagctcagctgaactgtgcagccaatgatatcaatttgtaacgaaagataggtgattactgttttatgccattgasgttttctgctagtttgttatgcagcagtagctaactaataaaatacttcattgctactgtggagattaagacaatgcatatgaatgagttttgcaaactgtgaggtaatatacacatgagtttaaaag

SEQ ID NO: 455173 - DNA, 584 bp, Homo sapiens
atgcatatgaatgagttttgcaaactgtgaggtaatatacacatgagtttaaaaggtcttaagatcaatagattatttgttggagatgaggacatagaacagtcacaagatgtagatttcagttacttctaggatccagctaagtgtccaaattgttctgtcaatgtttattttgttatacttgttcaaagtgatatatatttattgygttgacctatctgacttatctatttgttcaagtgccttagaagttcttatcacttataaatgattactgaaaaaaaaaaaagaaaaggaacagtagagaaaacactagagctaaaaacatggtgtggaagaaggtcactagattgtgttcacttaaatcatttaagtacagaaaattttcattagcaggcagtcaagaatttttcctaccaagttattaatagtttggcctgaccaaagccaaaattgagaaccccccaaaaaattatgtattttatactatttaacattaatttatggaatattttcatactgttggattacaaaaattagatactgcaaacctaagtaaaaaggtaaacttctatttctgagta

SEQ ID NO: 455174 - DNA, 584 bp, Homo sapiens
atgcatatgaatgagttttgcaaactgtgaggtaatatacacatgagtttaaaaggtcttaagatcaatagattatttgttggagatgaggacatagaacagtcacaagatgtagatttcagttacttctaggatccagctaagtgtccaaattgttctgtcaatgtttattttgttatacttgttcaaagtgatatatatttattgcgttgacctatctgacttatctatttgttcaagtgccttagaagttcttatcacttataaatgattactgaaaaaaaaaaaagaaaaggaacagtagagaaaacactagagctaaaaacatggtgtggaagaaggtcactagattgtgttcacttaaatcatttaagtacagaaaattttcattagcaggcagtcaagaatttttcctaccaagttattaatagtttggcctgaccaaagccaaaattgagaaccccccaaaaaattatgtattttatactatttaacattaatttatggaatattttcatactgttggattayaaaaattagatactgcaaacctaagtaaaaaggtaaacttctatttctgagta

SEQ ID NO: 455175 - DNA, 526 bp, Homo sapiens
ctagctctcatttcagagtggcttagttcccagaagatacagcatacccatgagatttttttccagcacctagaaatggcaagtcagtttagcaaaagctcacacttcatgatataaagtatgtccaagctcatttttgagtaaactagcttataccatgcaaactcttcaatcctttgatacagataaaagtctgtcaattagagtatgtaaataagaggcttcagtcyaccttacagagagtaagggctcccctagaattgaactttttccagtgagaacattccagaagcactatcacaaatcatgcagattttcacatattaaaatatttcttcatatcctgagtatgtggttgctgcacagagaccctaaggaaaataataaattatgagatcatattgtcaatgacattaaactgtagccaaggtaggagccatcacagatgaaatgaacaaatgacatctggctgtatgttttgtggccctataagaaaatagaaaatgatgatgattcatgcctattt

SEQ ID NO: 455176 - DNA, 628 bp, Homo sapiens
acatgagaaccaacgtggctgccttgaagacctacaatacttttggtagtaaatagttccaggtgtgtaactgaaggactctgagaatgatgcacaagccaagtcatattttaaaactcatttagacatcttgatgagggcaatgagggacatgtcttgtttttctgggattatgatttcattgctttgcatgagtaaagacctatttctttccttttcacttcagttaatttgctctgcaaataggcatcaacagagatatacttaataaagtgtgaaacataaaaatggaaaacttcctatttgtttcaaccaaatatatgggagagaaacagtgcactcactagcgttggccatgcattcgtcaaggtgcagtgtcaaagtcaatgtgtgttacagtgaaggatgttgcattcaaaggmtggccttgctatataaagcaggacatatgaaagcccaatataccatctaggctatgaattacctttcccttttctatttgccacctccttcccttttatttttaatgataatgaaattgaattaggtattacatgtcaacctgagccatgtgtcttcagtgtccttgcatttatcatcaaatacagtgcatgccacctcagtacac

SEQ ID NO: 455177 - DNA, 354 bp, Homo sapiens
aggtctatttctggactctctattcggttccaaagatttatgtgtctagcctttcaaaaataccacattatcttgaatactttagatttttagtaagccaaaatcaagtagtatttctgggaaattgccttaaytcttctcatagatatgcaaataaatagatacaacccgtgaaaaaaaaaactgtgtttaaagacacaaactttcttcagcatttcctatagtgtaagtctgcttgtcacagattctttcatgttttgcattcttttgcttttgcttttgacatctttttttggtggacatagaatgccaggttgataattatttttcttttggtactttaaaaattctact

SEQ ID NO: 455178 - DNA, 633 bp, Homo sapiens
acatacaacaacatacttaagtacatagcacacagacccaataaagcaatcacactattgaaactacaaagaaatcagttaacaacttcatgatagaattaaaatctcaaatatcaatattaatcttgaaggtaaatggtctaaacaccccacttaaaaggcacagggttgcaagttagataaaaaataaataaataaataacacccatccatctgccaccttcaagaaacccatctcacacataacaacacccataggttcaaagtaaaaggttagagaaagatccytcatgcaaataaaaaaacagaaaagaacagaggtcactatttttatatcaaataaaacaaactttaagccaacaacactaaaaaaggacaaagaagatattacacaatgataaagacttcaatgaaacaagaagacttaaccatcccaaatatattaatatatggacccaacattggagcacccagattcataaaacaactatgtctagaactaagaaaagacttagatacacacacaacgaatattggagtacttcaacaccccattggcagcattagacagatcattgaggcagaaaactaacaaagaaattctaggcttgaattcaacacttgaccaattgg

SEQ ID NO: 455179 - DNA, 598 bp, Homo sapiens
actggcctgttggtggttagtgactgcattggtcctcttccattttgggagggccaggggttattactcgtagaaacagatgcctctactggctatggtattgccctttttgctcacaaagccagagccggcactatcttggggatctggggttttacagagtccatgattcccagccatggaatcccacacaacatagtgtctgacagggaactcactgcacagtgaaggaggtatcagagtagactcatgatyctggtttccactggtcaaattatttactgcaccatctagaagcagtcagactcatgtagcactggaactgtctgttgaaaatgtgactgaagtgctagcttagaagcaatactttgtagggattacattccaggatgcactatatacacctaattaaagaatctcaatatggtgctgttttcaataagaagaatatgtgactcagagcaccaaagagtagaagctcaagtggcctcaattaacatccctactaaagacccactgatgcactttgtgcttcacatacatataactctatgttagaatttctggtcttcaaaggagcccactcttgctaaggtac

SEQ ID NO: 455180 - DNA, 535 bp, Homo sapiens
ctctaaaatttctacttttctcatgtttatttacttacctcaaaataaataatttaattccaaagacatggtattatctctaaattaaatttaaaataatatataactagaattgtgttggtcttataaattaaaggtatattcttggcaacagaaaccagtgagttggctggtggaaagaaataataaattcttcattcccttgttttgtcttaattccttccttcctctatcaaaaatcacaatgcattctaaaaaaaaaaaaaaaaaaaaaaaaaaraaaaaaaaaaaggactctgagtcagagagaccctgactctccagctttcattctgtgtacaccagtattgggaaatgactcagttcaatgccagggccctgcctgcttgtctattaacctaattgacagtgcctgtgacacgtgtcaggctgacttctctcagaacagcttacagatttgagcaaattggaaagagtgaaggcaggaaaacctaaccactattgctccttcatctccaggagaacaaagtgccag

SEQ ID NO: 455181 - DNA, 587 bp, Homo sapiens
agctatactaatttaagacaaagcaaactttggaccagggaagattgttgtagataaagaagggtaccacatgatgataaagcaatcaattctctaagaagaaataagaatcttaatatgtatgcacctaacaagaccacaataaaataccttaggcaaaaactggtagaactaaaaagagaaattagacaaatccactaatatagttggagacttcgcacacccttgtcagttttgacagctcaagcaattgaaatatcagtaaggatatagaagacctgaatagcactattagataatttgatctaaatatcacttatagaatattccatccaagaacaacagaatacacatcattttcaagttcacagaaaatatttccaagacagaccacattcttggccataaaacacaacaaatttagaagaagaaaaatcactccaaatgcattatcaggccacaatgaaattaaataatcagtaacagaaaaatagagggaaatatccaaatatttgaagattaaacaaaatactwttaaataatgtgtcaatgaagaagtctcaaggaaaactaagaaacattttata

SEQ ID NO: 455182 - DNA, 579 bp, Homo sapiens
ctcaaaaaaatatctgatagtgtaaaaggagcaaggtcctttcacatgcttcatcagtactgccaatttacgattttttttttttttggtacttgatttcatttctacttaacaaagaaaaaatctttttttaatattagcatgccaaccaccatgatattctatttgttcttggtctatctagtctcaaacaaatatataaaaatggttaagaaaaaaagtattaaaaatgacccctagacacattactgttaattcaaactccaaaagcaaagacactcttactggcccatgagcaaactgtacatgttcatcttaccccttccaaatctacaggaaataataaaaatcctcaaaagaccataaatgttaaccagaaaatcataattactagtttcagttccaatatttttttcttcycttcacttttccaatgttttgctcttctgagagagaatgagactttctgtcctgaaattatgtagtctggttggagcatgaatccaaaccgactaagttaggaaaaaaaaaaaaaaaatacaacctgcagttctactggccaaactggaaataatgtca

SEQ ID NO: 455183 - DNA, 480 bp, Homo sapiens
tattttttaaggcagtgagatgattttaagaaaggatagatctcgaggccacttgtttcatctactgttactacaaaactcttttgggtgaatgaaaaagtggccattggacataatttatctctcccactcagtaagaagcccagtcgaatatcctattgatttcactgaactacctaccacaaagatatttagtgaagttggtagtcagagaggacaagccacaggatgtgtgccatagaccaaatacctccagtacaacattgtgtcagctctgcctcyatcatgagatgatctatttcaatcgcatgtgagaaacaatggatcttgcaggtaatagataactccaaagtaataacatccaacaaaagcagaacagaaatcacttgagtaccaacttctagtccctaggattgaaaatgagctttcatgggagcctaaacctaaaaaggatacattcttgtactccagcatacttat

SEQ ID NO: 455184 - DNA, 669 bp, Homo sapiens
tgataggggtgaagacgtttgcccaaactttgatggcatgaggcctgtccccagcccagcacgtaactagcagagctaaaattctaactcattcagcaatcagctagctgacaggctcctaaagtcagcagcggcagtcagctgagtcctgaacaaaataaagcatgatagaatagtgctttcaatggagaatgagtgatttctactgtcatctatcttttaaaccagttagcatgcctccmaagaagttgcctaggtctcaacaaaaactagagaaaggataagagaaaagtgtgaactgtgttgacacgaaatccaaaaagaatatttaaatgaactttgaaaaataacctttaatcctatccaagtaaattatatctatccttactgaatgtgacttttgctgcccagtgatgagaatagaaaaatatgtgtgtgtgtgtgtgtatatatataatatatatatatatatatgacaatttgaaataaagtaaaatgtgacatgaccatcagcacatacaatctttgttttcaatatagaattacataattttaatcaacacaaaatcagtttctaccaaacaccgccagttgaatgatattttttaaatgtcagttgagagaagttccaaattatttggaaagcaaatgatagtttcaatatcttgc

SEQ ID NO: 455185 - DNA, 669 bp, Homo sapiens
tgataggggtgaagacgtttgcccaaactttgatggcatgaggcctgtccccagcccagcacgtaactagcagagctaaaattctaactcattcagcaatcagctagctgacaggctcctaaagtcagcagcggcagtcagctgagtcctgaacaaaataaagcatgatagaatagtgctttcaatggagaatgagtgatttctactgtcatctatcttttaaaccagttagcatgcctccaaagaagttgcctaggtctcaacaaaaactagagaaaggataagagaaaagtgtgaactgtgttgacacraaatccaaaaagaatatttaaatgaactttgaaaaataacctttaatcctatccaagtaaattatatctatccttactgaatgtgacttttgctgcccagtgatgagaatagaaaaatatgtgtgtgtgtgtgtgtatatatataatatatatatatatatatgacaatttgaaataaagtaaaatgtgacatgaccatcagcacatacaatctttgttttcaatatagaattacataattttaatcaacacaaaatcagtttctaccaaacaccgccagttgaatgatattttttaaatgtcagttgagagaagttccaaattatttggaaagcaaatgatagtttcaatatcttgc

SEQ ID NO: 455186 - DNA, 669 bp, Homo sapiens
tgataggggtgaagacgtttgcccaaactttgatggcatgaggcctgtccccagcccagcacgtaactagcagagctaaaattctaactcattcagcaatcagctagctgacaggctcctaaagtcagcagcggcagtcagctgagtcctgaacaaaataaagcatgatagaatagtgctttcaatggagaatgagtgatttctactgtcatctatcttttaaaccagttagcatgcctccaaagaagttgcctaggtctcaacaaaaactagagaaaggataagagaaaagtgtgaactgtgttgacacgaaatccaaaaagaatatttaaatgaactttgaaaaataacctttaatcctatccaagtaaattatatctatccttactgaatgtgacttttgctgcccagtgatgagaatagaaaaatatgtgtgtgtgtgtgtgtatatatataatatatatatatatatatgacaatttgaaataaagtaaaatgtgacatgaccatcagcacatacaatctttgttttcaatatagaattacatamttttaatcaacacaaaatcagtttctaccaaacaccgccagttgaatgatattttttaaatgtcagttgagagaagttccaaattatttggaaagcaaatgatagtttcaatatcttgc

SEQ ID NO: 455187 - DNA, 618 bp, Homo sapiens
cctggttaatttttacttatcttttaagactcaactcaagtatcattcacccaggaaatmtccttgagcctgcattaaatattcaagaagtaatctgaggccaagcgtggtggctcaggcctgtaatcctagtacattgggaggcagaggcaggtgaattgcctgagctcaggagttcaaggtcagcctggcgaacatggtgaaaccccatctctactaaaatacaaaaaaattagcccggcatggtggcccatgcctgtagtcccggctactcaggaggctgaagcataagaattgcctggacctgggaggctgatgttgcagggagctgagatcgcgccactgtactccagcctgggcgacagagggagactcagtctcaacaaaaacaacaacaaaaagtaatctgtgtgtttgtctcttatgctcagcccagtcaaagctacaagaatgcaggaactgtttttttctatattccctatattcatctacccaattcctaacttataataggggctcaataattgaacagaacagatataagagaactaagaaagtcaagatcagggacccaattagatttttcagatatatcaatccagaggttacagtccagcc

SEQ ID NO: 455188 - DNA, 552 bp, Homo sapiens
  misc_feature (1)...(552): n = A,T,C or G
ttgggattcttgttttggcattacatacacacagtgnnnnnnnnnnnnnnnnnnnnnnnnnnnnnnnnnnnnnnnnnnnnnnnnnnnnnnnnnnnnnnnnnnnnnnnnnnnnnnnnnnnnnnnnnnnnnnnnnnnnacagaaatctggaatagaaaaaaaaaaagacatttgtggaaaaactagagaaatttgagtaaaatctgaagtttagtcaatagtaatgtgcaaatgttgatttcttagtttttctaaatataccagggtgatatgtgakgttaacaaggacaactgggctatacagaaaccctctgtaaaatctctgtaaactttgtatatataaaattacttcataataacaggggttttgtttttaactctacactatgtttgtcaagaagaagaggatagcaaatttaccactctgtacaaaacttgtttcacccatgctgcctttgaaatgcacataaaatacattaaatctcttaattgctaaactaataattctaacttgttttagaagaacagatgtataaatgcatctggaactgctg

SEQ ID NO: 455189 - DNA, 552 bp, Homo sapiens
  misc_feature (1)...(552): n = A,T,C or G
ttgggattcttgttttggcattacatacacacagtgnnnnnnnnnnnnnnnnnnnnnnnnnnnnnnnnnnnnnnnnnnnnnnnnnnnnnnnnnnnnnnnnnnnnnnnnnnnnnnnnnnnnnnnnnnnnnnnnnnnnacagaaatctggaatagaaaaaaaaaaagacatttgtggaaaaactagagaaatttgagtaaaatctgaagtttagtcaatagtaatgtgcaaatgttgatttcttagtttttctaaatataccagggtgatatgtgaggttaacaaggacaactgggctatacagaaaccctctgtaaaatctctgtaaactttgtatatataaaattacttcataataacaggggttttgtttttaactctacactatgtttgtcaagaagaagaggatagcaaatttaccactctgtacaaaacttgtttcacccatgctgcctttgaaatgcacataaaatacattaaatctcttaatwgctaaactaataattctaacttgttttagaagaacagatgtataaatgcatctggaactgctg

SEQ ID NO: 455190 - DNA, 556 bp, Homo sapiens
taaaattacttcataataacaggggttttgtttttaactctacactatgtttgtcaagaagaagaggatagcaaatttaccactctgtacaaaacttgtttcacccatgctgcctttgaaatgcacataaaatacattaaatctcttaattgctaaactaataattctaacttgttttagaagaacagatgtataaatgcatctggaactgctgtaaactcattataaatcaagttatagatgaaaaartattcaaaaaatataaaaatgtgaagatataaattcatatggctcttgaaagaataataaattcaattaatgagcattgtgaatttcacatttttataggaaagcaacttctataaaagcaatggaaaagctaagttatatagtaagtcagtctgtaggaattaggatttaaaatgttggaaatggttagcataggataaacaaattgaattattattattttttttgagactggtagtatcattactctgttgccaaagtaaatgcagtggtgtgatcacagcttaaatattttgatgaatgagat

SEQ ID NO: 455191 - DNA, 525 bp, Homo sapiens
aattaacaaattaccctggatttgcaattcaattaattgtcctttctttgtgtttcttggcaggcccagaatactttgtaaaatttagctctaactaatgttgacaaaatattttaggccactggaaatgtcagtaatgtcattttccaggccagtttcaaattgaaaacatgttcatactttgcacacagttttgtcacacaaattctcctcagtgaactcacggcaatttaaatatttttaaatacasatatttgtggatactatatggcaatttttgatcaaccaagtgaaaatagatttattcaaaaatgtttatttctttgtattaaaaatgtttaaagcattaatattaactttatatggcaaactatataatttttttagacattaccaaattatcctcacagtacccaggccagccagtattttctccattttatccagagttaataaaaagcagaatggaaaagtgatcttgtgccttaaattctagcttagtgttatggccataagatccttttt

SEQ ID NO: 455192 - DNA, 525 bp, Homo sapiens
aattaacaaattaccctggatttgcaattcaattaattgtcctttctttgtgtttcttggcaggcccagaatactttgtaaaatttagctctaactaatgttgacaaaatattttaggccactggaaatgtcagtaatgtcattttccaggccagtttcaaattgaaaacatgttcatactttgcacacagttttgtcacacaaattctcctcagtgaactcacggcaatttaaatatttttaaatacacwtatttgtggatactatatggcaatttttgatcaaccaagtgaaaatagatttattcaaaaatgtttatttctttgtattaaaaatgtttaaagcattaatattaactttatatggcaaactatataatttttttagacattaccaaattatcctcacagtacccaggccagccagtattttctccattttatccagagttaataaaaagcagaatggaaaagtgatcttgtgccttaaattctagcttagtgttatggccataagatccttttt

SEQ ID NO: 455193 - DNA, 525 bp, Homo sapiens
aattaacaaattaccctggatttgcaattcaattaattgtcctttctttgtgtttcttggcaggcccagaatactttgtaaaatttagctctaactaatgttgacaaaatattttaggccactggaaatgtcagtaatgtcattttccaggccagtttcaaattgaaaacatgttcatactttgcacacagttttgtcacacaaattctcctcagtgaactcacggcaatttaaatatttttaaatacacatatttgtggatactatatggcaatttttgatcaaccaagtgaaaatagatttattcaaaaatgtttatttctttgtattaaaaatgtttaaagcattaatattaactttatatggcaaactatataatttttttagacattaccaaattatcctcacagtacccaggccagccagtattttctccattktatccagagttaataaaaagcagaatggaaaagtgatcttgtgccttaaattctagcttagtgttatggccataagatccttttt

SEQ ID NO: 455194 - DNA, 472 bp, Homo sapiens
agagtttcaattatacacgttgaataagctctagagatctgctgtatgatatcatgcctgtagtaaacaatactgtattgttatgcctaaaattttgttcagatgayagattacatgttaaacattcttaccacagctaaaataataattcattcactggacaggacagaggggtcttcatcactgagcaaggcaaggaaggccctgccattagaatcaagatataaattcagagcactgaaacatcatcaattaatgttgaatagaaagaatcattggtccagtaaaggatctgtagtttcacctttatgcttctttttttctttctaatgtaatcgactctcccatctccttatcaaaacagaaacaaatctgttatcattcatactcatactttatgtgtaaatgtttcagatatattccatttaaatttttgtttctgattatagaaggaaagtctttgaatactgtt

SEQ ID NO: 455195 - DNA, 553 bp, Homo sapiens
tagtttgttttaaagaaagacatggtatcttattccatcattagttttgtgtttaaatgcttaatgaatttgctttacattctttgttcagctggcaatgtctgaggccccctcaaaggataatgtgagttcccctgaacaatctgggcaacagatgtcaaccagggagaagatgctggcagtagggttcccgggagttgaacatctgcctgacctcctactgggctcttctaatgctgcagcctaaggtacttacattccctaaccttagtggctccactgttaaagcaagcatgatatttactactccctggtcttctaaaaaaggaagatcatggcatagcagtattaacaaggastttggagtccaaagacctgctttaagactcaatgctgttattctttagccacgtgaccagaaacattttaaaatccattttccttacatctaagcaaaagatatatctacttcagatgcttaatgaattaatgcatacaaatatttagcaaaggatgggactcatgttaggtattcagtacatgaaagtacctt

SEQ ID NO: 455196 - DNA, 441 bp, Homo sapiens
ttaaaagtgaatggtatacaaagacagacattgactatcattatactatcttctttattacrtgggcctttttaaatatctttctaattgaaaaataaatgcatattgattattgaaaatttacaaaataaactaaagacaaaaatattaccaccaattccaacaatcattaattatatataacatatatagtattaatatattaactaatatatatataattaatataatatatatttatgtattatctatatataaagtatgtgttttataaatatataagtatattataaatgtgcattaataaatgtatatttatttatatattcatagaaaagaggcaagtgtgtatattcatagaaaagatatcaaaatatatagaatattctcctttttgtgaatatacaaataaattgttagtcctacttatgctagttgagg

SEQ ID NO: 455197 - DNA, 590 bp, Homo sapiens
tcaatattattagaagtacatatttttgaaaagataattttaatttttacctgtagccattatgcagtaactgttactgaattttcttcatagaaaatgattagaaaactggactaaacatgaaacaacagtttataggcatcaaacaagcaccacacgtctaaaagaggagagagaagcgtgagtcctaatactgccctggcttcctgtttgtaagcactttctagactacagtgcaaaaatgcaaagcccaggcagaacatgtctcatgtagcagaagacacagaaatcagagtttggggaagtcaacacggctggaatttaaaaggcagagtgccagaaaagagatayacaaagaaataaagaaatacagaactatgcatagagttgaggctttggctgaacactaagctgagcatgaataaggagagagactccatgagtttgaacaaggaactaccagggaagtaacaaccactgggagttgctgaaacaggactggaagttgtttcaattctgaccaaaatgaaaactacttaattaaatcccagtgcatttagtaaagactccaaaaagaaaatcttagtagg

SEQ ID NO: 455198 - DNA, 566 bp, Homo sapiens
ctcccaaataaaaagacattgtggctgaattaatttaaaaacaactgtataccatgttgtaaarattcaactgtataccatgcacaagaaactcattttagattcaaggacacatataggttgaaagtaaaggaatagaaaaagttattacatgtaaataataaccaaaagaaagcaggagtgctatacttacactagacaaaacagaatttaatccaaaaactgtctcaacaaagaaggtcataacataacaataaaatggtcagttcaagagaaagatataataattgtaactacatacacatccaacatcagacacataagaatataaaacaaatattgacagatctgaaagggaaaaattgatagcaacacagtaatagtaagagacttcaatacatcacatttaataatgaatagaaaatccagatagcaaatcaataattaaatgtccgactgtggccaggcgtggtggctcacacctgtaatcacagtactttgggaggctgaagcgggcaaatcacaaggtcaagagatcaagaccatcctggccaacatggtgaaac

SEQ ID NO: 455199 - DNA, 567 bp, Homo sapiens
acattaaatgtctttaattcaacagactgcatgaaaataaaattaaaatattaattttactaaaattaaataaaaataaaagttaaatttaaatgttaaataaaattaaaatattaaaatgcaaaatgacacaaaaatataatagagaaagagtcaataataacratttctagccatagaagcttggtttgtacacgttaagaaatattacaaagccagatgaatcctgaattttttcactttatacttggactttggtttttcagcacttagtgtttataaggattccaagcaccaagaatgacaggcagagccccagatactcaaaatactgcctaaattctgctacatcacctctgaatcacccatcttgctcagagacattgttctcacactcccaagaggctctctactttgaacatcccttttctccaccagcaggaaagtttcctttaaatctaggatttcttggctgcattgtctgtcttaagagtaaagaattggatagaagtgttatataggttccaaaagcagagaagaaatcacctatttgaaaattcatcctat

SEQ ID NO: 455200 - DNA, 567 bp, Homo sapiens
acattaaatgtctttaattcaacagactgcatgaaaataaaattaaaatattaattttactaaaattaaataaaaataaaagttaaatttaaatgttaaataaaattaaaatattaaaatgcaaaatgacacaaaaatataatagagaaagagtcaataataacgatttctagccatagaagcttggtttgtacacgttaagaaatattacaaagccagatgaatcctgaattttttcactttatacttggactttggtttttcagcacttagtgtttataaggattccaagcaccaagaatgacaggcagagccccagatactcaaaatactgcctaaattctgctacatcacctctgaatcacccatcttgctcagagacattgttctcacactcccaagaggctctctactttgaayatcccttttctccaccagcaggaaagtttcctttaaatctaggatttcttggctgcattgtctgtcttaagagtaaagaattggatagaagtgttatataggttccaaaagcagagaagaaatcacctatttgaaaattcatcctat

SEQ ID NO: 455201 - DNA, 567 bp, Homo sapiens
acattaaatgtctttaattcaacagactgcatgaaaataaaattaaaatattaattttactaaaattaaataaaaataaaagttaaatttaaatgttaaataaaattaaaatattaaaatgcaaaatgacacaaaaatataatagagaaagagtcaataataacgatttctagccatagaagcttggtttgtacacgttaagaaatattacaaagccagatgaatcctgaattttttcactttatacttggactttggtttttcagcacttagtgtttataaggattccaagcaccaagaatgacaggcagagccccagatactcaaaatactgcctaaattctgctacatcacctctgaatcacccatcttgctcagagacattgttctcacactcccaagaggctctctactttgaacatcccttttctccaccagcaggaaagtttcctttaaatctaggatttcttggctrcattgtctgtcttaagagtaaagaattggatagaagtgttatataggttccaaaagcagagaagaaatcacctatttgaaaattcatcctat

SEQ ID NO: 455202 - DNA, 566 bp, Homo sapiens
ctcccaaataaaaagacattgtggctgaattaatttaaaaacaactgtataccatgttgtaaagattcaactgtataccatgcacaagaaactcattttagattcaaggacacatataggttgaaagtaaaggaatagaaaaagttattacatgtaaataataaccaaaagaaagcaggagtgctatacttacactagacaaaacagaatttaatccaaaaactgtctcaacaaagaaggtcataacataacaataaaatggtcagttcaagagaaagatataataattgtaactacatacacatccaacatcagacacataagaatataaaacaaatattgacagatctgaaagggaaaaattgatagcaacrcagtaatagtaagagacttcaatacatcacatttaataatgaatagaaaatccagatagcaaatcaataattaaatgtccgactgtggccaggcgtggtggctcacacctgtaatcacagtactttgggaggctgaagcgggcaaatcacaaggtcaagagatcaagaccatcctggccaacatggtgaaac

SEQ ID NO: 455203 - DNA, 571 bp, Homo sapiens
cctgcacataaacgtttatagaagctctactcataattgccaaagcctggaattaaccaagtggtattacaaatggctaatggatatccaaactgtggcacaactrtacagcgggatattattcagtaataaaaagaaatgagctaccaagccatgaaaacacattgaggaatcttaaatgcataatattacatgaacaaagtcatctgaaaaaggctacatgttctttgattccaactaaatggcattctggaaaaagcaaaactgtagagaaagtaaaaaaacaaaatcagtggtttccaagggcttgagggaggagatgagggattaatagctgaagctcagggggtggatttttaggtcagtgaaactatcctgaatgatactttaatggagaacacatgatattatacatatattaaaactcaaagaattgtacagcacagaatgaaccttaatgtaaattatgaacattagttaatcacaatgtatcaatgttgggtcattaattgtaatagacataccgcattaatgcataatgttaataaaaggagaaattgtgttgggggag

SEQ ID NO: 455204 - DNA, 571 bp, Homo sapiens
cctgcacataaacgtttatagaagctctactcataattgccaaagcctggaattaaccaagtggtattacaaatggctaatggatatccaaactgtggcacaactatacagcgggatattattcagtaataaaaagaaatgagctaccaagccatgaaaacacattgaggaatcttaaatgcataatattacatgaacaaagtcatctgaaaaaggctacatgttctttgattccaactaaatggcattctggaaaaagcaaaactgtagagaaagtaaaaaaacaaaatcagtggtttccaagggcttgagggaggagatgagggattaatagctgaagctcagggggtggatttttaggtcagtgaaactatcctgaatgatactttaatggagarcacatgatattatacatatattaaaactcaaagaattgtacagcacagaatgaaccttaatgtaaattatgaacattagttaatcacaatgtatcaatgttgggtcattaattgtaatagacataccgcattaatgcataatgttaataaaaggagaaattgtgttgggggag

SEQ ID NO: 455205 - DNA, 567 bp, Homo sapiens
agaatattacagttgttcggtgaatgacaggtattctcattgtcatttacattctgccttacattattttaacttgatttttgacmtctatattaataaagtataatccccatgaggaaagtgcttatctgtattccccacagcaccaggtataaagttttatgaagagcaagctttcaattaagcccacaaaattgtagcaaaataaagaacttgaaataaacttgaaaaatacttccaaaggtgatcgttatctacagccacataacataatataggaaggatctcacatacaaagttgcaggtacagtcactcatagtgttatctctttctccagtgaattttagaatatgattgataatgcccgcctttgattctttctcaaaaccaaacttgaataagtggctagtactgtacaaagcaagccagttccatctttcaaaaatatttacagtttaagacagagaagttttaaaattggaagaaagcattaaatgcaaattatatttaagttctctcttctaaaaccataaaatactaattatttagtctgtgaaaactaaatg

SEQ ID NO: 455206 - DNA, 513 bp, Homo sapiens
tgctaaccaaacttctggctaaccagtaagacaactcagagctcaaatcttaagaagctacttgactgctgtgacagggaccaattaatctctgcagatttacccattttctctgctctgtcagaatagactgtggattaggtgaaactagtaaatagcttcacaaagaaaataactaatgttgatttttatcgccagtacaaacatagccttctcaactcttaaaattaatgacctaaaaacctcataataatttcctatccatcaagccttctataaatatccttgctcacaacatagggaatagtacagaaatactgaaaataattatgccaactaatctttgggaaagggtaaactaaaagaaaatgaccttagttaaacaawaggaaattgcagttttgtaggtgaaaaatgattgaatattaacaatttcctatgtttcaacttaatagctttttgcacttcccaagcacattgtatttgaaatttccacagtgcccagcaatgtct

SEQ ID NO: 455207 - DNA, 662 bp, Homo sapiens
aagacactgatagttaaaagctctgtggattaaaaattgagttctgcttttatttgttttctaataaaaagtttcaagataagaccaaatggaaattggaatattttgctatatcttctatgttgtagttgttaaacaatatgtattaaatcactttcggcatttgttaaaatgtaaatgtgtaagactgacttactgaatcagaatcttggggtaaagctcctgaagtcataatttttactaagtattaaagatgaatcttatcataccaaatctggtgagaaacactgaattatacagcaacctttccatggatgagataattgaagtctgaagacattaagtgatatattctgatgtcatacaaccagtaagtactagagttggttgtctcattcaggccttttgattcatagttccattttttcttctaccacatgaactraacagaaaaaagctttttgacttattaattttttagatatcctttgcttttttttcattttattgcatttgttacactctgaaaatgagaagcaactcatggaaaggcatgctcatgtagctatttttcctgtaaaggcatgaattttccacagtattattcaagcttgcttactattagatttacagaatgttatatattaatttacataatccac

SEQ ID NO: 455208 - DNA, 516 bp, Homo sapiens
tcagttttatgtattttaccaaaagtctgatgttgattgagggagaattgtaaacatyacgtttcactatctttgatcaatccatagtagagtttaagcagtcattgtcactcacaaaataaaaccaaacaaattaaatgtgttacagaaacttataacaatgtgcactatataattaatattcagcatttaggggactaagttcttattgttttgtctgtaaaaatataatatgaaataaaataattccttcattttataagaacaatgcttgggacatggcatagcaattattgagcaaggttttaccaaagacacggcactagttacaacacttttaaaacaagtcctggaatggaaagatatcctgtgttcatggattggaagaattaatattttttaagtggtaatactactcagagctatcacagattcagtgcaatccctatcagaataccaatgacatttttcacagaaatagaagaaaacaaacttaaaatttgtatagaaccacaa

SEQ ID NO: 455209 - DNA, 595 bp, Homo sapiens
gccatccttctccaaactctctttgttttttgctttttttttttccactcccatgtctcctttgattgttttgaatttcctttcttggcttctctttgtttactactccttaacaatgagtgctctcctcagccttcttccattctcacttgtcattacatccttgggtgatcttaactactatgaattccactccatattgaaaagtcttaaatcactattcagttttcacctctctacccagatcaacgtgttcaaaactgaactcatcactccttcctctacccctctcaattattccttttctgtttcctatctcagaggatggcaccactatccatcaagttgccaaagccagaaccttgggagtcattctagatttctcctaagtcagggcccatatctaattagtcatcaagacttgcttttctacctccttgatgtctccatccctcctgttactgccttggcttaaamcctcataatttcttgcctggattattgaaacagccttctaaaaggtctctctgcccctaattttgcctgattctaatcaattctccaaattcgattggaatgcttttttttcccattt

SEQ ID NO: 455210 - DNA, 570 bp, Homo sapiens
ggggagactttttcctctgagaaagcaataaaaaaatttgcttgaagcatctaaatggtgcctcagagatcgggctgagttatggctgatgacataaaggaatcccgggcaaacagggctgggtgtttggcagcaggcaaactgctaaatgctggactttccattgtgcaaatactggctccaggacttgatgtgaacagggccctggcctcatcctaaagtagcagcttcttargctggtttttagcgggctcaccatggaaatcataggaagcaggcctggggaaatctggaagggaggcttcttgccttcaccatggtaagactgaacaatctcaagcacctattaaagactggaccctttctataattacctcaagtaatcctcacagcagtgccctgagggaagactttttattcctgtattatagaggaagtagaccaaggctcttgaaggttaagttccctatccaagttcatggctaataagtaaaggagtataattcccacctgtgtgtatctgacttccaatcctatgctttttggattataattctgtgaaggcaatgg

SEQ ID NO: 455211 - DNA, 474 bp, Homo sapiens
cacaacatttattttttcagagatgttaggaattatcaggtagtgttctcttagatatcaggtatgatatgagataacgcctctggataaaatgacaccagaaaattttctgcccattcttgattatatgctgacagcaggggaagcagatagagggaaatttttttaactatattgcctgatttgaatggtataggacttacatgaccaatacaatttttaagatccttctaacaaaatatttcttttctcccacgttctttacattacccccaagaccttcaaagtgctattcacaayttaaatttgggagtgggttctagttgccatagcaggcactataattctaataacaaaagtaggtaccaaacctccaatgtcaagccaggcagatcaggactggaggacaagttctgtgagcctgattctagattcaggcagacctgatttcgaatcccactttaactgagtttt

SEQ ID NO: 455212 - DNA, 556 bp, Homo sapiens
ctaggtgtcgcccttgtgtagctgttgaagatagtgtgggagagtggggtgtgtgttttaagcaagtgcttggttcaaagtgccaatttctcttcaccagctaagtctcgatcagcctttgtcagagctcaatctgcctgtgaatttgcctggaatccattcccagcagcaccatctgtttgcrattgtcctaccatctgaccatttaccctttgtcaacttcctcctccgggcactcccactgccagttggaatccgcccatggattccacccattgtccatcctggataaactgagtctggagaaagacagcacaggagagaagggaagaggtgggagacgttccaatgtgctagcgttcttggccaagaggtgtctgggaagccccattaagccttcacacagaacctggagagagagcatgtggcccagccagagccatattgtgccccaggcagtctgatggctccacaaataatattgatgccttttgtttgaaaactctttgtggaggtttcccattcccaacaaaccacgcttgatgctgggcttccc

SEQ ID NO: 455213 - DNA, 573 bp, Homo sapiens
gaagggaatgtagctaggaaaagtctgaagcacaataaaatatccaggtgtgcctgattctggaagtagcctctatagcccctccagcccctcctccttacttcctctgtggatgttagttagccattgttactacaaatatgtattaatgataatatttttattgttgctgttttaaggctcttcattccttacagaatgcagattctgtgacagaattcctaaggagtggtcttttcttagctgctattttctactttacactcwgctttatgaaattacacaaccacgaaacatctctccagtggtttatattaaacaaggcaaaacaaaaagctgtgcaataaatgtctccataagattaaatactgtggttaaaactgccttccttgaattcaacagctttagattacgagtcaccagagaaagattccaaagaaacatctccatccgagtcagcactctctcctttcttcccaaagaaagacgaatagctgtaataaggggaccaaagaatgccccctcctaaaacttcaggattttacatttaccatcaaacagagtaaggaagag

SEQ ID NO: 455214 - DNA, 573 bp, Homo sapiens
gaagggaatgtagctaggaaaagtctgaagcacaataaaatatccaggtgtgcctgattctggaagtagcctctatagcccctccagcccctcctccttacttcctctgtggatgttagttagccattgttactacaaatatgtattaatgataatatttttattgttgctgttttaaggctcttcattccttacagaatgcagattctgtgacagaattcctaaggagtggtcttttcttagctgctattttctactttacactctgctttatgaaatkacacaaccacgaaacatctctccagtggtttatattaaacaaggcaaaacaaaaagctgtgcaataaatgtctccataagattaaatactgtggttaaaactgccttccttgaattcaacagctttagattacgagtcaccagagaaagattccaaagaaacatctccatccgagtcagcactctctcctttcttcccaaagaaagacgaatagctgtaataaggggaccaaagaatgccccctcctaaaacttcaggattttacatttaccatcaaacagagtaaggaagag

SEQ ID NO: 455215 - DNA, 521 bp, Homo sapiens
ctgtaataaggggaccaaagaatgccccctcctaaaacttcaggattttacatttaccatcaaacagagtaaggaagaggaaaaaaaatggtctccaatgttttgtttttgcccttgtaagtcaaagtataatgagtttataaacaggaagcaaaaaagaactgctcttttgaacagtctaatcatagatctataaaaatgaggcattttgcagtgaagtctcttgtccaaatagaggagaggcaaatactgaygttaaactgagatgtattacaaagatatgggggtgttacatttgttttttctccaagagacatgcaggacccaagctactaatctttatgactaatgggggacttcaggtaaaaagacaagcaaaggcaggccgactttaaatagaatgcaaatatggtcaagtttcttttctccttaaaatgctctcttggctctggaaaaacaagactgtgtagcatactgattagatgggccaactttgggccctgtggtagttttctagggct

SEQ ID NO: 455216 - DNA, 521 bp, Homo sapiens
ctgtaataaggggaccaaagaatgccccctcctaaaacttcaggattttacatttaccatcaaacagagtaaggaagaggaaaaaaaatggtctccaatgttttgtttttgcccttgtaagtcaaagtataatgagtttataaacaggaagcaaaaaagaactgctcttttgaacagtctaatcatagatctataaaaatgaggcattttgcagtgaagtctcttgtccaaatagaggagaggcaaatactgatgttaaactgagatgtatwacaaagatatgggggtgttacatttgttttttctccaagagacatgcaggacccaagctactaatctttatgactaatgggggacttcaggtaaaaagacaagcaaaggcaggccgactttaaatagaatgcaaatatggtcaagtttcttttctccttaaaatgctctcttggctctggaaaaacaagactgtgtagcatactgattagatgggccaactttgggccctgtggtagttttctagggct

SEQ ID NO: 455217 - DNA, 584 bp, Homo sapiens
ggaccaagtcatgatgtacacgtggaccagctgaatggtattgaactttatagtgacatagggaaaacatctaaaggatttagggacaagatcagatttaggcttggaggagggcaagagtggatatagggagccatggtctgctttagatattttataaaggcacaggtaaaagagaagacatttctatcaaaggaattggaatctaaagggggatgtaacaactggtaatgcttgttgagaactatgtgccattcattcattttcagatattttttsagcacctactttgtgcctggcactgttccaggtgctgaggaggcaccagtgaccaaaaatgaccgtagtcacggagcttacatttgagcaccagatactaggcactttagagatattaattaattaaccctcaccatagccctacgacgtagactatcacattatttccctttacaaagaaactgaggtgcagagtagttaagaactgtccaaggtttgcctgcaggtctgtctggccccatgaatcttttggtgagataaatgcaagggaaaggcaagagacctcgagtgaggaaagccaaaag

SEQ ID NO: 455218 - DNA, 487 bp, Homo sapiens
cctggctactcccagctgcagcctctcctcccccagccatgctccctgcaccctcccagctccccatcctctcaccagccatttgctttcttcatggatgccaagtcagccaatcagcattgcttgtctcctttcctgctgtgctccacatacccaactaaggctatttcctggtttccatcctgaaccaggctgaaattgctaaaatattaatggctccctttgtgaaaaataacaccgaagygtcttattataaattaaaattgccagagagtcagaaacaatgacatggaggaaataaagcaaagctctaatatgaaaaagtgttttaggagttaaggcaggagaagatatccttagccctgccttccccatcacaatgctgggatcttgccgtgggaaataccatcaccactggctgagagtcaccttcttgaccacctagagggggtgtatggcagggtacgcgatccctgtggttttgcct

SEQ ID NO: 455219 - DNA, 508 bp, Homo sapiens
ctaactaggtaatcttaagcccagaagaacacgtggctgccatgccctttgcacagtcctgataaagggcaaaaacgaagagtttttccatatttaattatgcaaatcattccaaagcttggtggggtcctttacaaactcagaattatctatctcccttttcaatctgcaagccctcttttcaacaatttatcctaaacactatgactaacaaggcctccatccagcttctaaactgaaaagtggggctgattgctcttagtcctaggaagcagggctcactctgctcaaacagcytaaggcaggctttctaattctgagtctgttgctccgggtcgtttgtttagaacaattgggtatagagtccctcaacacaaatctgggtgatcaacttgagggtctgggtgataccagggcctgggtgatattttgattcctgcaattgtcaaaagaggtcatagattgttttagaaggaaattagaaaattggtggcctgtgggtttacca

SEQ ID NO: 455220 - DNA, 534 bp, Homo sapiens
aggattaaggagttgattgtgagagaaaggtgatgaaaaaagtgttagtgctgtttttatctttaggccatttaaattctcttctttcattaatttttgcaggtttactgagggattgttaactcctttcatttctaaatatggttggtagatgctatggtctgaatgttggtgtccccttaaaatttatatattggaacctaatactcaatgtgatagtattaggaggaggagcctttaggggggtgattaagccatgagggctctgctctcatgaatgggattagtgcccatataaaataagttgaagggagctggcttgccctttccaccatgcgtgaggacacagtaataaagcaacatctctgaagcagcgagcaacccctcaccagacactgaacctgctggcaccttgatcttggactttccagcttccagaactgtgaaaataaatttctattgttcrtaagttacccagtctaaggtaatgtggtatagcagcccagactaagacagtaggttctgtgtgtttct

SEQ ID NO: 455221 - DNA, 587 bp, Homo sapiens
  misc_feature (1)...(587): n = A,T,C or G
gcaagggacagagncaaacccagttgggggcaagtttgcccagtaaaagaagccttcaaagtcctggatttctctgctaattccaaacagaattgttccatgacccatctctcccttctggctgaaatttatacctactctggtaaaactagaatgacagttcttaacctgacagtattactcaagaactaaagagatgctatatatcaagtgtagcatagaacctggcacaacrtatataattgaaaggcaggggaagtcatagttattactaccatgatgataaaagtacctgtaatctgatagaaagacaggctacatcctagtcacgaaacatcactttcagtaaatattggagcctacattagaaattgtcaggattgaacttctccaattagacactgagaggagcctcagaaagcacatatcagagcacaaaaggcaataccaagcctctcctccttcaaagatccttcctttcttgacaattccaaatcatactaactttccttccttgtgacatgttgatatcaccattacacatttcacctaacacatactgtcactgagtagcctcatggggctac

SEQ ID NO: 455222 - DNA, 391 bp, Homo sapiens
aaatgggttcaaataatgagcttctcaccacgatcaccattttacgtataaggaaactcaggtttagagaaggtaagtaattcccctaaggacacaagttaatgtacrtatattatcttatttaattctcacaacaacagttctagggaggtgtgttttagttgtgaaagctgagtatttcggagttgagatgacttgagtaaaggtagtagtggggtcagtggggctgcattttgagaattgttctgactctaaacttcattaacttttcaatacttcaagatccctcaaagaaacacacacacacacacacacgatatcttaactctggagaaatctcttattgattgagaagattgtgtcctgcaggttcccagacagaagcaaatcc

SEQ ID NO: 455223 - DNA, 391 bp, Homo sapiens
aaatgggttcaaataatgagcttctcaccacgatcaccattttacgtataaggaaactcaggtttagagaaggtaagtaattcccctaaggacacaagttaatgtacgtatattatcttatttaattctcacaacaacagttctagggaggtgtgttttagttgtgaaagctgagtatttcggagttgagaygacttgagtaaaggtagtagtggggtcagtggggctgcattttgagaattgttctgactctaaacttcattaacttttcaatacttcaagatccctcaaagaaacacacacacacacacacacgatatcttaactctggagaaatctcttattgattgagaagattgtgtcctgcaggttcccagacagaagcaaatcc

SEQ ID NO: 455224 - DNA, 391 bp, Homo sapiens
aaatgggttcaaataatgagcttctcaccacgatcaccattttacgtataaggaaactcaggtttagagaaggtaagtaattcccctaaggacacaagttaatgtacgtatattatcttatttaattctcacaacaacagttctagggaggtgtgttttagttgtgaaagctgagtatttcggagttgagatgacttgagtaaaggtagtagtggggtcagtggggctgcattttgagaattgttctgactctaaacttcattaacttttcaatacttcaagatccctcaaagaaacacacacacacacacacacgatatcttaactctgsagaaatctcttattgattgagaagattgtgtcctgcaggttcccagacagaagcaaatcc

SEQ ID NO: 455225 - DNA, 450 bp, Homo sapiens
cctgctctttccaaggtctctaaccatccccagagacaatggaacagatgtgcagcctgtcataaggccaatgtgaaactaacatttacagcagaagctggaaatcttctccccacgtcttccacgcatggaagtcctacttcagggycaagtataaattcagcttccccaggaaacttcccttagccttccaagactggggctcttcactccctcagcattctgtgtctttatcttcatgtccctgaggacaggagtctcatttccgtttgttcattggtaaatttcccatgcctagctaagtgtttcacacataatgggcatccaagacatgtatttttaaactaatctggatttctggttggtttcaatagatcgatcaacactctaagcaaccaaaaactgaaaaaacactttgaaaattatgaaattctattaacaggcaaggta

SEQ ID NO: 455226 - DNA, 539 bp, Homo sapiens
atttaatccctttaagagctattcactaatgataagtgagttggaaagtataacataygatcacaatgatcacttacacattcagaaagtgtattttaccatcctgggtaacataacaattttggtgtttttatgaactgtgaactgtatcaaaatcaacacgtgagcagctagcacagtactaggcacttggcagaaatgagggaaagtctcactgaataactccttgggagactgggggaccaagaggcaaaggggctcaggttggtaaaatagtgtaaacctgtgaaaatttggatgctgtttttaagtctcatataagcatatgagttctaggggtggggtgggcggggatttttgtctgatatatcccccgcacctagaatagggactgacccatggtagaaattcaacaaatatttaatgaaaaaataaaagtagagccctaagacagaccctaatgcagattatgacttcattaacatagaccttatagccttttctttttcttgttactcccactgaaagtgtacctgtgg

SEQ ID NO: 455227 - DNA, 539 bp, Homo sapiens
atttaatccctttaagagctattcactaatgataagtgagttggaaagtataacatacgatcacaatgatcacttacacattcagaaagtgtattttacyatcctgggtaacataacaattttggtgtttttatgaactgtgaactgtatcaaaatcaacacgtgagcagctagcacagtactaggcacttggcagaaatgagggaaagtctcactgaataactccttgggagactgggggaccaagaggcaaaggggctcaggttggtaaaatagtgtaaacctgtgaaaatttggatgctgtttttaagtctcatataagcatatgagttctaggggtggggtgggcggggatttttgtctgatatatcccccgcacctagaatagggactgacccatggtagaaattcaacaaatatttaatgaaaaaataaaagtagagccctaagacagaccctaatgcagattatgacttcattaacatagaccttatagccttttctttttcttgttactcccactgaaagtgtacctgtgg

SEQ ID NO: 455228 - DNA, 582 bp, Homo sapiens
aagagctattcactaatgataagtgagttggaaagtataacatacgatcacaatgatcacttacacattcagaaagtgtattttaccatcctgggtaacataacaattttggtgtttttatgaactgtgaactgtatcaaaatcaacacgtgagcagctagcacagtactaggcacttggcagaaatgagggaaagtctcactgaataactccttgggagactgggggaccaagaggcaaaggggctcaggttggtaaaatagtgtaaacctgtgaaaatttggatgctgtttttaagtctcatataagcatatgagttctaggggtggggtgggcggggatttttgtctgatatatcccccgcacctagaatagggactgacccatggtagraattcaacaaatatttaatgaaaaaataaaagtagagccctaagacagaccctaatgcagattatgacttcattaacatagaccttatagccttttctttttcttgttactcccactgaaagtgtacctgtgggatcacctcatgattagatggaccaatgcagtgaagctggtttttcagaattaggt

SEQ ID NO: 455229 - DNA, 565 bp, Homo sapiens
aggtctaaatgagacatcttgggaatcccgggcaactagaggttagcttgaaggtgaaacattgggagggggattggtatttgtgagggaggagagggtcatctgtgagggaggtgatgaggaagtgtcaaaaattactttacttggatccaagttctcttgagaatttgtcctggaacctaaggttctattctcatcataaatgcacttttaattttttagtatttagaaaatccattccatgtagcattactgttgggtgcctctttaacattcttttcttccgctcttacttcctcacagrcttggttttgttagtataaacaaccacgtccggagagccatgtgtctagggaaggctggtccccgggccagcccagggatggaggttgagggagttgacaatgatgttccaagccaatcaaagtggttctacgcactttaggtgtctttggttcagggcaaatgataattctggccactgaaccatgaagaaaagtctgttgggggcagctaggaaaagttaacttgctttaacaaagatacagacagaaaatggtttctt

SEQ ID NO: 455230 - DNA, 565 bp, Homo sapiens
aggtctaaatgagacatcttgggaatcccgggcaactagaggttagcttgaaggtgaaacattgggagggggattggtatttgtgagggaggagagggtcatctgtgagggaggtgatgaggaagtgtcaaaaattactttacttggatccaagttctcttgagaatttgtcctggaacctaaggttctattctcatcataaatgcacttttaattttttagtatttagaaaatccattccatgtagcattactgttgggtgcctctttaacattcttttcttccgctcttacttcctcacagacttggttttgttagtataaacaaccacgtccggagagccatgtgtctagggaaggctggtcccygggccagcccagggatggaggttgagggagttgacaatgatgttccaagccaatcaaagtggttctacgcactttaggtgtctttggttcagggcaaatgataattctggccactgaaccatgaagaaaagtctgttgggggcagctaggaaaagttaacttgctttaacaaagatacagacagaaaatggtttctt

SEQ ID NO: 455231 - DNA, 594 bp, Homo sapiens
ggagcagtcataatacacacaacaattaaggattaatttcactatcttctacagaggtagatcatggcaccccaaaataattgcaatgtaacatcaaagaccactgatcacagatcaccataacagataaaataataatgaaaaagttagaaatattatgaaaatgtgactcagagacataaagtgagcacatgctcttggaaaaatggccctgatagacttgcttgatgcaggattgccagagaccttcaatttggaaaaaacacagtatctggccaggtacggtggctcacgcctgtaatcccagcactttgggaggccaaggcaggtggatcacctgaggtcagtagttcgagaccagcctggccaacatggygaaatcccgtctctactaaaaatacaaaaattagcagggcatggtggcaggtgcctgtaatcccagctactcgggagggtgaggcaggagaatcacttgaacccaggaggcggaggttgcagtgagctgatatcacgccactgcactccagcctgggtgacagagagagactccatctcaaaaaataaataaatacaataaaaacacacagtatcttt

SEQ ID NO: 455232 - DNA, 576 bp, Homo sapiens
aaaattattccttggctatgacacaaaatattacagaccccaggattctttatgggaactgatggctttgggaacttagtgccctaagaaataaataagtgactctctaattacctttccactggtagatcaactataggagacattgtaaaactatattagttcagctagaaaacatttgaccttattctcatgaatygtttattctgttgttctcgtattttaaaggaaatgttttcttttctacaaggattcaaaaataagctgctaacttgacctgttaaactaactagcaaacttagtgatggagcaatacaaaaaccacctgaacagatagtaaagtatgatattatgcaggaattgcctctccaaagcccttacctcattcatatgcgtatagaggaagtcaccacagaagcacagggtcattgcacttcctacatcagcacagggtcagcacactccccaattcagcactaagtcatcacactctccacatcagcactaggtcatcccactccccacataagcacagggtcagcacacatctttatccctgaacctgaacctgaacct

SEQ ID NO: 455233 - DNA, 402 bp, Homo sapiens
ctttccctttcttttctttcttcgttttttttttttttcaaagacaaaatctcattctgtcgcccaggctgtagtgcagaggtacaatcatggctcactgaagcctcaaaactcctgggctcaagccattctcctgcctcagcctcctgagtagctgggattacaggcatatgagccaccatgcttggcccayttttagagactatttcacattttatctcttcctcatagtcacaaacccataactagttctctttactctcagtaagagaccttacaccctagttcataaagaaaatgtagacaccaagaagaatgattttactttttccacatcgaatttagaaacctaaatgcatccatacttatttgtttctctctctactcgtcttctatcctgtt

SEQ ID NO: 455234 - DNA, 496 bp, Homo sapiens
aaaaccaaaacagctgaaaagtcatagtattttccatatttcccagagttgaaactcaggagtttgggaatataagaaatcccaaaggttagagaaaagaatgtgggagccccagcacttgtaaaatacaacaaacttaagccacagtagcctccctggcatctcatggagaatctaaggtgaggatcactgctgagttctgttcgctttttgatactgattaggtatgtgctcctgagacatcttctgcaggttcttgattcttctcattccttgkgacttaagcctctatgagctatgtatgtggagaattatcctgaatgtgatgtttagttatgccggaatcagcatggacacatgtaggtttgggctagagagttggaactccaggtctatgatttgacttgataagtatgggatagactaggttggcctcagtgggatgatcccctgaggcatcacttttatgggtttgaaaatcattgcactatgaaat

SEQ ID NO: 455235 - DNA, 616 bp, Homo sapiens
caaaaatgtagtaggctagctagaatgaataagcaaaatgtaaaatgtttttaacagaaaatcaacattatcatacttaaaaacagtttgtytaagaaataggaagtattgatagttttgtcttaattacttaataggaatccttcttatttaaatcattaattccttgatatacaaatagatcttgtataaatgaacaacataattcattctaagtattcttggaatactttgagaatcttagaattcgtgggaagtcttctgtaaagaacatgaagaataaacaaaacacttttaaaagttattataggccgggcacagtggctcacgcctgtaatcccagcactttgggaggccaaggcaggcagatcatgaggtcaggagatcgagatcatcctggctaacacagtgaaactccgtctttactaaaaatacaaaaattagccgggcatggtggtgggcgcctgtagtcccagctactcaggaggctgaggcaggagaatggcgtgaacccaggaggcgcagcttgcagtaagctgagatcgcaccactgcactccagcctgggaaagagcaagactccgtctcagaaaaaaaaaaaaaaaaaaaaaaaaaaa

SEQ ID NO: 455236 - DNA, 616 bp, Homo sapiens
caaaaatgtagtaggctagctagaatgaataagcaaaatgtaaaatgtttttaacagaaaatcaacattatcatacttaaaaacagtttgtctaagaaataggaagtattgatagttttgtcttaattacttaataggaatccttcttatttaaatcattaattccttgatatacaaatagatcttgtataaatgaacaacataattcattytaagtattcttggaatactttgagaatcttagaattcgtgggaagtcttctgtaaagaacatgaagaataaacaaaacacttttaaaagttattataggccgggcacagtggctcacgcctgtaatcccagcactttgggaggccaaggcaggcagatcatgaggtcaggagatcgagatcatcctggctaacacagtgaaactccgtctttactaaaaatacaaaaattagccgggcatggtggtgggcgcctgtagtcccagctactcaggaggctgaggcaggagaatggcgtgaacccaggaggcgcagcttgcagtaagctgagatcgcaccactgcactccagcctgggaaagagcaagactccgtctcagaaaaaaaaaaaaaaaaaaaaaaaaaaa

SEQ ID NO: 455237 - DNA, 608 bp, Homo sapiens
aactgaattcatataatatggccttttaatttcaaaggcagtatgaagagtaytagcagaaataaaatcaattaaatcaacaaacaactgtatttaaaacatactgagattcaaatacaaaagggaataattttagaatttttctccctggtccaatccagtctctttgtacttaagttatgaaaatacctttagtgctcagagatatgggcaacggcaagtcaggaggcctaaattcaatttccagtaatttcactactgtttaggcgattttaggaaagggaactaataagtccctgtcttttcttctctatagttttcagtatagcagcaggaatgctgcttgcctaatttctacctcacaggaagactggaaaattcaggaaatcataagctgcagggagacatttaatttggaaagtgggtagtgttctcatgcattacgggggtttgttcttttttctgaaaccaaataggtcccaaatagtttacgtcaaaatcttcgactggcactcaaaactgtaaatttacctttgttaaatgatcatggtaataatgcttctttgcaggattattggaatgatttaataaaaacacttactcttagc

SEQ ID NO: 455238 - DNA, 592 bp, Homo sapiens
actgacactacctaacctcaagacttactataaagctacagtaatctgacagtgtaatattggttaaagaatagacaaatagatcaattgaacaaaaaagacatcccagaaatagacccacataattaaatcaactgatttttgacaaagcagtaagacacttcagtggagaatacatagtaatttaccaaatggtgctggaacaactgcatgttcacatgcaacaaaaaattaatctagacacacccttcaccaaaattaactctaaatggatcatacatctaaatgtaaagcacaaaaatatraaattcctacaagataacacagaagaaaacctagatgatcttgaatatgttgatgacacatgtgtttttaaatacaactccaaaggcaatattcatgaaagaaattattgatacgctgggtttcattaaaataaaaaactctggctgggcgcagtggctcacacctgtaatcccagcaatttgggaggccaaggcagatagatcacctgaggtcaggagtttgaaaccagcctggccaacatggcaaaaccccatctctactaaaaatacaaaaattagctggacat

SEQ ID NO: 455239 - DNA, 592 bp, Homo sapiens
actgacactacctaacctcaagacttactataaagctacagtaatctgacagtgtaatattggttaaagaatagacaaatagatcaattgaacaaaaaagacatcccagaaatagacccacataattaaatcaactgatttttgacaaagcagtaagacacttcagtggagaatacatagtaatttaccaaatggtgctggaacaactgcatgttcacatgcaacaaaaaattaatctagacacacccttcaccaaaattaactctaaatggatcatacatctaaatgtaaagcacaaaaatataaaattcctacaagataacacagaagaaaacctagatgatcttgaatatgttgatgacacatgtgtttttaaatacaactccaaaggcaatattcatgaaagaaattattgataygctgggtttcattaaaataaaaaactctggctgggcgcagtggctcacacctgtaatcccagcaatttgggaggccaaggcagatagatcacctgaggtcaggagtttgaaaccagcctggccaacatggcaaaaccccatctctactaaaaatacaaaaattagctggacat

SEQ ID NO: 455240 - DNA, 533 bp, Homo sapiens
acgctatgctgggccaccagctgaacctcatcagatgaaaacccaagcatgatgtcagcaagcttaccagcctcatactaggacaaccacatagaatctagtctgtaagaaggttcatttcagctgggtgtggtggctcatgcctgtaatcccagcactttgggaggccgaggcgggtggatcacctgaggtcagcagtttgagaccagcctggccaacatggcaaaaccccatctctactaaaaatataaaaattagctggrtgtcgtggcacgcacttgtaatcctaactactcgggaggctgaggtaggagaatcacttgaacccaggaggcggaggttgcatgagccgagatcatgccactgcacgccagcctgggagacagagcaagactccatctcaaaaaaaaaaaaaaaaagaaggctcatttcatctcatagagatttcaggaggagttagtcctttaatttctggaactaaatttgtgacaagaggtactataaagacgggttaaagacaccctacctggcag

SEQ ID NO: 455241 - DNA, 552 bp, Homo sapiens
ctattgtgaaaaatgctacaataaacatgggagtgcagatatctcctccatatactgatttccctggtgctaggtgtacacctagaagcagatgtacatctagcagccggatcatatgatagttttagttttttgagaaacctccatactgttctttatagtggttgtattaatttacattcccaccaacagcatatgagggttctttctctacatcctcgccagtactcgttatgtcttttggataaaagccgttttaaccggggtaagattttatctcattgtacttttgatttgcatttccgtaatgatcartaatgtcgagcacctttacatatacctgtttgtgatttgtatgtcttcttttgagaaatgactattcagatcttttgcccctttttattttcctttggacatagtctcgcctggtcgcccacgctacagcgcagtggcacgatcttggctcacagcaacctccacctcccaggttcaagcttcttgccccagtctccaagtagctgggactacagatgtgtgccaccacacgcggct

SEQ ID NO: 455242 - DNA, 552 bp, Homo sapiens
ctattgtgaaaaatgctacaataaacatgggagtgcagatatctcctccatatactgatttccctggtgctaggtgtacacctagaagcagatgtacatctagcagccggatcatatgatagttttagttttttgagaaacctccatactgttctttatagtggttgtattaatttacattcccaccaacagcatatgagggttctttctctacatcctcgccagtactcgttatgtcttttggataaaagccgttttaaccggggtaagattttatctcattgtacttttgatttgcatttccgtaatgatcagtaatgtcgagcacctttacatatacctgtttgtgatttgtatgtcttcttttgagaaatgactattcagatcttttgcccctttttattttcctttggacatagtctcgcctggtcgcccacgctasagcgcagtggcacgatcttggctcacagcaacctccacctcccaggttcaagcttcttgccccagtctccaagtagctgggactacagatgtgtgccaccacacgcggct

SEQ ID NO: 455243 - DNA, 552 bp, Homo sapiens
ctattgtgaaaaatgctacaataaacatgggagtgcagatatctcctccatatactgatttccctggtgctaggtgtacacctagaagcagatgtacatctagcagccggatcatatgatagttttagttttttgagaaacctccatactgttctttatagtggttgtattaatttacattcccaccaacagcatatgagggttctttctctacatcctcgccagtactcgttatgtcttttggataaaagccgttttaaccggggtaagattttatctcattgtacttttgatttgcatttccgtaatgatcagtaatgtcgagcacctttacatatacctgtttgtgatttgtatgtcttcttttgagaaatgactattcagatcttttgcccctttttattttcctttggacatagtctcgcctggtcgcccacgctacagygcagtggcacgatcttggctcacagcaacctccacctcccaggttcaagcttcttgccccagtctccaagtagctgggactacagatgtgtgccaccacacgcggct

SEQ ID NO: 455244 - DNA, 528 bp, Homo sapiens
atcatcactaatcgttagagaaatgtaaatcaaaaccacaatgagataccatctcacagtagtcrgaatggctattagtcaaaaaagcaaaaaaagtaacagaagctggcagggttacagataaaggggaatgcttatcactgctagtgggaatgtaaattaatatagccactgtggaaagcagtttggcgatttctgaaagaacttgaaacagaactaccttttgaccccgtaattccattattgggtatatacaaagaggaatatcaatcattctaccataaagacacatgcacacttatgttcatcacagcactattcactatagcaaagacatggaatcaacctagatgcccatggactggataaagaaaatgtgacacatatacaccaaggactattatacagctgaaaaaggaagagatcatgtccactgcagcaacatggatggaactggaggctattatcctacgtgaactaatgcaggaactgaaaaccagataccacatgttctcacttataagcggg

SEQ ID NO: 455245 - DNA, 626 bp, Homo sapiens
cttcaagcaatgggaagcatcaggagtgccagaagaaataaatatccttgagaatagccatagacaaaggggaggaagcaggattataattctgagcctcagaaactctgctctgtaactcagccaaaggagatgccaaatcagagyggctgatttgctgtagcaccttgctgtaggacggtggtccttggccacaaaccaccagaaaaccttcccacatcactgggacatgatatccttttctggacctcccccattcaggagagtaggcattctgtttgtttatatgaactgaggcaaacctgagcttaaagttctgtctagttcattaaaggaggcagaaacctaatggaggggaaaaaaaaagcatttaaaaaatgtattatccttagcaaactaacacaggaactgaacaccaagtatcacatgctctcacttataagtgagagctaaataatgagaacacatggacacatagaggggaacaacacacaatggagcctttggcagggtggaagatgggaggagggagaggatcagaaaaaataattaatgggtttaatacctgggtggcaaaataatttgcacaataaatccccatgacacaacatgcagtttcaacaggg

SEQ ID NO: 455246 - DNA, 626 bp, Homo sapiens
cttcaagcaatgggaagcatcaggagtgccagaagaaataaatatccttgagaatagccatagacaaaggggaggaagcaggattataattctgagcctcagaaactctgctctgtaactcagccaaaggagatgccaaatcagagtggctgatttgctgtagcaccttgctgtaggacggtggtccttggccacaaaccaccagaaaaccttcccacatcactgggacatgatatccttttctggacctcccccattcaggagagtaggcattctgtttgtttatatgaactgaggcaaacctgagcttaaagttctgtctagttcattaaaggaggcagmaacctaatggaggggaaaaaaaaagcatttaaaaaatgtattatccttagcaaactaacacaggaactgaacaccaagtatcacatgctctcacttataagtgagagctaaataatgagaacacatggacacatagaggggaacaacacacaatggagcctttggcagggtggaagatgggaggagggagaggatcagaaaaaataattaatgggtttaatacctgggtggcaaaataatttgcacaataaatccccatgacacaacatgcagtttcaacaggg

SEQ ID NO: 455247 - DNA, 626 bp, Homo sapiens
cttcaagcaatgggaagcatcaggagtgccagaagaaataaatatccttgagaatagccatagacaaaggggaggaagcaggattataattctgagcctcagaaactctgctctgtaactcagccaaaggagatgccaaatcagagtggctgatttgctgtagcaccttgctgtaggacggtggtccttggccacaaaccaccagaaaaccttcccacatcactgggacatgatatccttttctggacctcccccattcaggagagtaggcattctgtttgtttatatgaactgaggcaaacctgagcttaaagttctgtctagttcattaaaggaggcagaaacctaatggaggggaaaaaaaaagcatttaaaaaatgtattatccttagcaaactaacacaggaactgaacaccaagtatcacatgctctcacttataagtgagagctaaataatgagaacacayggacacatagaggggaacaacacacaatggagcctttggcagggtggaagatgggaggagggagaggatcagaaaaaataattaatgggtttaatacctgggtggcaaaataatttgcacaataaatccccatgacacaacatgcagtttcaacaggg

SEQ ID NO: 455248 - DNA, 626 bp, Homo sapiens
cttcaagcaatgggaagcatcaggagtgccagaagaaataaatatccttgagaatagccatagacaaaggggaggaagcaggattataattctgagcctcagaaactctgctctgtaactcagccaaaggagatgccaaatcagagtggctgatttgctgtagcaccttgctgtaggacggtggtccttggccacaaaccaccagaaaaccttcccacatcactgggacatgatatccttttctggacctcccccattcaggagagtaggcattctgtttgtttatatgaactgaggcaaacctgagcttaaagttctgtctagttcattaaaggaggcagaaacctaatggaggggaaaaaaaaagcatttaaaaaatgtattatccttagcaaactaacacaggaactgaacaccaagtatcacatgctctcacttataagtgagagctaaataatgagaacacatggacacatagaggggaacaacacacaatggagcctttggcagggtggaagatgggaggagggagakgatcagaaaaaataattaatgggtttaatacctgggtggcaaaataatttgcacaataaatccccatgacacaacatgcagtttcaacaggg

SEQ ID NO: 455249 - DNA, 650 bp, Homo sapiens
gtggcaatatgtgtgaactcactggccaagaatttaaaatagcaattttaagaaaattcagggattgccaagataacacaggaaagcaattttaaagtttgtcagataaatttaacaaagagattagaatacttttaaaaaattaaacagaaatattggaactgagaaatacatttgctgaactgaaaaatcactagaggctctcaagtgcaaaatggatcaaacagagcaaagaatcactgagctcaaagaggctcttgaaaatgcacagttcaagaagaaaaaagagaaaagaataaaaaggaacaaatattatctacaatatacaggaaattttttcaaaagaccagatctaagaattattggtgttcaagagagagttgagcaaaagtaggagatataaagttgattcaaagaaataataatagaaaacttccccaaacttgagaaacatataaatatccaggtataggaacgttacagatttgattcaaataatcctataccaaggcatgtaataattaaactctcaaagatcaagaaagaagaccctaaaggtaggaagagaaaagaagcaaataccatatgaaggagcttcaatatgtctggcaaaagacatctcaamaaaaccatacaggccagaagggagg

SEQ ID NO: 455250 - DNA, 556 bp, Homo sapiens
gcactccagccttggcgacagacctggatctaatctcaaaacaaaaaaacaaaacaaaacaacaaaaacaaaaaggaaatatccaagtgaataattttcataatttgttttgcaagtctgtgtaggtagaattctctctttaatgtcacgtagtggtgaaatgaacagaaatggacaatttttgaatttttggcaaatatgaacctataatattgggttaacaacatcaaccattccaatatagcatttctctaacaaacactgggataagaaaagtgataatgatgtttcagttattctcattatgcctatttctgagttcartatcaagttaaatcttgcttgatgtgggcatttctctcctgagaattgtttctaaaggatgcttccaatatttttttcttgcagattcgttatgatgcctggccagcacctgtttaaaaatctcacattaatagagaaagattttatatatcactaaacttagaatcccttccagttcaacagactccaaaaatatctgccacatttgtattaagattatgtgtaggactct

SEQ ID NO: 455251 - DNA, 675 bp, Homo sapiens
gcactaaccaagcagttaagtacagaagatgaactgccaaagccaatctgctgctccatgtgaaaagaggagcggagtcctaggactgaacgattcagtttgtaagatttgtcattacatcagaagtggtgtatatgggccaggcgcagtggctcacgcctgtaatcccagcactttgggaggcagaggtaggcggatcacctgaggtcgggagtttgagagcagcctggccaacatagtgaaaccccgtctctactaaaaatacaaaaattagccaggyatggtggcacaagcctgtagccctagctgctggggaggctgaggcagaagaattgcttgaatcaggaggtggaggttgcagtgagccgaggtcgcccgactgcactccagcctgggtgatggaggcagaacttgtctcaaaaaaaaaaaaaaaaagtaactgtctatgaaggaatagagagaccagcattattattagcaatactaataaacaagtaaattggccaacagtaattcagaaaccacaaactgatcagtagtacaaatagctaagggtggaggtatgttgcaatgtacagatggaatggtaagttgagaagcactttctaaattctaattgaaaggcagacgtgctctagtgtggtcaaatatccaatcattttgtaacagtggggc

SEQ ID NO: 455252 - DNA, 675 bp, Homo sapiens
gcactaaccaagcagttaagtacagaagatgaactgccaaagccaatctgctgctccatgtgaaaagaggagcggagtcctaggactgaacgattcagtttgtaagatttgtcattacatcagaagtggtgtatatgggccaggcgcagtggctcacgcctgtaatcccagcactttgggaggcagaggtaggcggatcacctgaggtcgggagtttgagagcagcctggccaacatagtgaaaccccgtctctactaaaaatacaaaaattagccaggtatggtggcacaagcctgtagccctagctgctggggaggctgaggcagaagaattgcttgaatcaggaggtggaggttgcagtgagccgaggtcgcccgactgcactccagcctgggtgatggaggcagaacttgtctcaaaaaaaaaaaaaaaaagtaactgtctatgaaggaatagagagaccagcattattattagcaatactaataaacaagtaaattgkccaacagtaattcagaaaccacaaactgatcagtagtacaaatagctaagggtggaggtatgttgcaatgtacagatggaatggtaagttgagaagcactttctaaattctaattgaaaggcagacgtgctctagtgtggtcaaatatccaatcattttgtaacagtggggc

SEQ ID NO: 455253 - DNA, 598 bp, Homo sapiens
  misc_feature (1)...(598): n = A,T,C or G
aaaccacaaactgatcagtagtacaaatagctaagggtggaggtatgttgcaatgtacagatggaatggtaagttgagaagcactttctaaattctaattgaaaggcagacgtgctctagtgtggtcaaatatccaatcattttgtaacagtggggctcacacagaaactgcatattgatatcacctgggaaaattagagataaccctgagccttggtgctaattaggtcaaggatacagcctctgtgtcaagacttttaatttccctacttcatttcattacacaaccaaggttaaaatcacttttttatggtgatctctcatcatccagaaataagaaatggcagttaaagataattttgacattctcttcatcttgtttccttattagatttagaaatctaattttaaagttatagattaaaagtccagtgctagctatgaaacatattgtttaccactaatttacttacgtgaagaatgattccgttaattgaatttatacagaatctggagtcaaygtggatttgagagcagttttgctgcaaattttgggcaagtcatttaccttttgcttgttgcnnnnnnnnnnnnnnnn

SEQ ID NO: 455254 - DNA, 566 bp, Homo sapiens
tatttttgaatccctgctcatgtgcatggacatctaatttctgaggaatctgttggagcttttcaaagccttctatagatatctgtttcctcagcttttctttttaaatgttttaatcactttcttgtttactctgtatccttgtttccggtagctatgatgttaaatattcatttctacttgtttcagcaaatgcatagcgtaaaaaactcgtcacaggaagtgaattttgtcatgtaagatatgaataagctatgtgagcggaggaccctagggaactgccagataggtcaaattatgacaaaatctgggaactgggcttttgagtgactgctctttccagtgtctactaggctgatyttaaaaaatagcttctgtagtttcaagattgttgtttttttgagtatcatgagattgaggagattggaataatagcacaataatagcacaggtgaaataccgtgaatttcatttgttcttaccaagattcaaccatttgctcttgaataaatgttccttgggtttttgcaaaactttggttaattcgtagcattctaacaatattg

SEQ ID NO: 455255 - DNA, 410 bp, Homo sapiens
gtttttccttttaggtcttcttgttaccttccagactcttaaagtctggagtgtacagggcttaaacttagatttttaaaaaatcagtcattctcttgaagagctcatctaatttcatggttttaagtacrgtctaccctatagtttcaaacctaaaattttactacctgtaagatataccattattttaagcacctatcaaagaaaaaactgctgtcagttagtttatggcatgccacatgttataggatgtattctaatttcagagatttttaacctgtgaaaatgtgtattttggatttgatgaaatataatatgtacttatgaccacaaatttatacctccagaatgcactaacattctgtcctctagttattgtatctgattacctattcagtatctcctcttgg

SEQ ID NO: 455256 - DNA, 573 bp, Homo sapiens
caaaaatatgtatgtaaatggaaactaatttgtcttgtaactgaaggctcaaaatgttaaacatttctaacattatacaattgcatagttgatccaaattatactatcttttcacattttgacaagtattaaatgtaaaactcatgcttctgttggacatggcacttaaaaattattcatacatggrtacatggacagtacttattgagatagattttacaaccaattttatttgtccttcacttttattgatataaaaacttagaaaccatgttcatataaataatgggtaaattaaggaataaaagtgactttgttatagcaatgtcactgacttctacaaatactttctaagttatatgtcaaaacaagtcacatagttatctgtgaacaaaaacagagatgctgcagcagactctgagaaaaggaaatactaaaggtattttagtatttagtctgctttagtcagataatcccaaggagaagctatgagatacaagaatgaatgaagggtaaactgggaaatatataagtaaatgtaaacaaatgactatttaaaagactattaatgat

SEQ ID NO: 455257 - DNA, 577 bp, Homo sapiens
tataatgaaactcaacacactgtttatagaagagaggtatccccctccaagtaaagaccagatatgacaaacccacagctaacgctgcactgaatgggtgaaatctgaaagcctttcactaaggactaactggaacagggtgcccacttttaccactactattcaacatagtactggaagtcttaacsataaaatcaggcaagagaaagaaataaaaagcaaacaaataggaaaagaggaagtcaaattgtccttctctactaatgacaatatgatcttgtatctagaacaatccatagtctgttactgaaatgccagggtctaggtcctgttaatcaccacacagaaagccaatcactgagataatgactattgccagggaagatggctttttatttagttggtatcaatcacgagaatgggagatacatctcaaatctgtctcctcaactgactaaaactgaatattctcatagtggggaaggaatgtgaaacgggaactagggaggggtatggaaggtaatcaaatgaggggtctagcatctcactgtctggatgcagtgatctggtgagcttc

SEQ ID NO: 455258 - DNA, 590 bp, Homo sapiens
agcagtggttttcaagttatacttcatgcatccctgtgtgtgttctggagtgaagttgggggcagcaggccgagcaggccacataayagggccaagccgccaagcctctaatttaactaggacagctgtgctttatatctgtttatcatcctggcctctgaagatatttcccattagagtgaaaattctacagccaaaagaaatatttgaatgctattgatgttgaccttcataactaataagcttagtatttatcaggaacagaagggtatctctgacatcaagaatgtgaaagcttcataggccttgtgtccaggaactttatcccccctagatgtattcgtttggttgcaaggcccagaatgaggcctctcacagcttgatgtgaccttttgtgtgttgtaaggccctttctctgtctttcagggctgctggtgcctgttatacacatgaaatacagaactctgcctgaagaacaaccatggccttgatgcaggcactatccctggtcagcatcagatatgaaattgcacatagttctataatttgcattttctacttaatatatgtctaatatactcctgagtgat

SEQ ID NO: 455259 - DNA, 590 bp, Homo sapiens
agcagtggttttcaagttatacttcatgcatccctgtgtgtgttctggagtgaagttgggggcagcaggccgagcaggccacataacagggccaagccgccaagcctctaatttaactaggacagctgtgctttatatctgtttatcatcctggcctctgaagatatttcccattagagtgaaaattctacagccaaaagaaatatttgaatgctattgatgttgaccttcataactaataagcttagtatttatcaggaacagaagggtatctctgacatcaagaatgtgaaagcttcataggccttgtgtccaggaactttatcccccctagatgtattcgtttggttgcaaggcccagaatgaggcctctcacagcttgatgtgaccttttgtgtgttgtaaggccctttctctgyctttcagggctgctggtgcctgttatacacatgaaatacagaactctgcctgaagaacaaccatggccttgatgcaggcactatccctggtcagcatcagatatgaaattgcacatagttctataatttgcattttctacttaatatatgtctaatatactcctgagtgat

SEQ ID NO: 455260 - DNA, 334 bp, Homo sapiens
tttatatggcatgatgtaggagtaaaacttcattattttgtatgtggacatacagttgtcccagcaccattagttgaaaagattattcttttcctaataaaacttcttggcacccttgttgaaaatcaaacggccataagtgtgagagttcatttctagactctcaattctattccattgttctacgtatgtatgtaggtatgtatgtgtatatatacacacatatatatacacacacacacatatatatacatatctatcaatctatctatctatctctctctmtatatatgtatgtatgtataagacttttattccctttcctgtcttattg

SEQ ID NO: 455261 - DNA, 553 bp, Homo sapiens
ttagtgtccccatagggtagcagctactttgatgattgacaatataaatttaaaagctgagatatcctgtactatcttgatactgaaatcaataaaaccatcaaatcctaagccagcctcaccaaactaaaagggagttgcaaccacaaagcaaatttaacacctcttggaatctttctgacatcacatgaagcactacctctgaggtgagaatggcattagcttgaagctctacagggctgaaaccttagctattacagggctggattgtatctgccaccttcacatgggaagagaaattgacatggggggaagagacaactgactaggcagtctttgcagctctgactgtgcataaagagaatgaaaaaataaaagaagagagggaaaacacagcataatcctcattgttaagatgttakcatgctcatgggcataacagaaattactgttcttcatctcaccttatgattccctttaacaaaagacaaccattgaaaacacaatttgaggccagtttaccccttcatgctcagagcctgaatcacaaatt

SEQ ID NO: 455262 - DNA, 490 bp, Homo sapiens
aaacatatacacactacaaacaccactgtctgtggcagaaacagagggatgttctcaacagagggagggtctcagccaagaaggataaatgagggccattcatcctttcagaccctttctgccattggcaaagattggtccagtccactgcctaggttttctgtgggctctcaacattttgctcagcagagacttcccaaggctgcttcactagtggctggtggcatttaacctctgtgggagrgatggagctttttcttttcatcatggaatccattatttttctttgaagcatagtgcaaagcttcttacaaattgcatggcaaaaatagaaatgcagccagttctcagcacagccttgtggaagtcggggcaacctgtccctcaggcagtgtggatggagagtgtgttcatttctgaacttgatggtaaatcctatggggaaggaggcagaaagcaacccatcccttcctcttctcccttaaaggga

SEQ ID NO: 455263 - DNA, 556 bp, Homo sapiens
gatatcttatatatcccccaacgtttctcctttacaggccctattgtctcttctaccttcaagagtaactcctattatagaatggttttcttttgtcaatcttgcaaccctcttctggaggttttccactttcttagtgactctcttaaaatgtgatgtctaaaattgaacaggagacggcaggagtgaacagaggaggttacagtgcaatgattatattctaggatctagaaactgtactttgattatgcaatctaaaattgtgctctgtttttagcgactaaataatttaggtacattaaactgttggctcgaattgtgcttgtgggtcaattcaagccccttgatcttttttagtttgtttatttgtttgatgtgagttgctgtgaagccacacttcccctattttggcctcayaaaatggacttttaaaatttgaattgatgattttttttctttatctcatttatatttcaccatttaaattttagcccagtattccaacccgtctgagcttattttgaatctcaattttgttcttcaacatattccgaca

SEQ ID NO: 455264 - DNA, 578 bp, Homo sapiens
aattgctgtaaggaataagtgaagtcagacatgttaaacacatgtcaggcacatataaatgtgctcagccaacatgaaatatcataattgttgtgrttatcatgtcagctcttctctgagcacctttgtattatgagatttacttagcagccaagcacactttgcagcctcctccagtagaccctctccaatcttcactgtcatttccctgagggcggaggccctatcctttataccatttctggtgtctccatgacacctggcagtgagtaggtgttcagtgcatgaagcagagagcactatgctgcaagcacagccatcagaagcatcactgcctgggttcaagttttagcatgtccactttacttgctgggtgactttctagcaactcctggatcttctctgagtctccattctctcacatgtagtaagggtgtgataataattcctacctctggggattgctgcaaggattaaagctgggtacatagtgagagcttaataagggttgagtgttttaattgctgttattatttgagaaaagtcttacagtcaaggatcacaggagctactctgag

SEQ ID NO: 455265 - DNA, 554 bp, Homo sapiens
atttatcattttaacatgaagaattcagtgacatttggtacattcacagtgttacagaaccacagctcttctgaattgattacccctttaagctggctgtatccagaggaaggcagggctcattgycttctgtaacccttcttgtcactattccatacctcttcacatccccactttgtttctccttcctcattttttcaattgtactctctctctccactctcctgctctttgggggcaaagggatatgtgtctctgatatacatgtacttttaggaagagtgaggatatttacccactggaaagattccaggtctaaaagatggcactggaagagtgcagaatgggactggtgaagccacttcttgccaggacaggcttggcacacctgaaagcaggcacagcacaatgtcagctgcccattgaccttagtcttcgtggccccagggtcaacagacaacctgaaaaggcttattatcaattatgacgtctgagaatcacagtcctgtttgttatcatgtcttctatctttggcctccccgttattatgagta

SEQ ID NO: 455266 - DNA, 554 bp, Homo sapiens
cagataaagtttcctttgcaggacaataaaaggggaattggaaaggctggaaaagtaaggtgagcacaagttaacagaagatgaggaacatcaatctgctttactaaaggaattacttttgcaaaagtattgctgaatagtgcttttaagtatcaaggacatggtgggtacatgggggttcactgtaaaattatttcacatttgttttacaaactcttaaggtgttatttttttatttgcatttttttgagacagggtctttcactctgtcacccaggcgggagtgtggtggtacaataatggctcactgcagccttsactttcctggctcaagcaatttttcctacctcagcctactgagtagctgaaatcacagccatgtgtcacagcacccggcttattttttaattttttaaaaagatgtggtctcgctatgtttcccaggttgggccgaagcaagcctcccacctcagcttcccaaagtcttgggattacaggcgtgagccactgtgcctggccctgttaagatgttcatatgtggtttgatttataaa

SEQ ID NO: 455267 - DNA, 614 bp, Homo sapiens
tcccaattaatattttgaactaatggttcaaaaatattttttcccattctgtaggttgtatgttcactctgattatttcttttgctgtgcagaagttttttagtttacttaaatcccatttgtctatttttggttttgttgcttgtgcttttgagatcttaatcatgaattatttgcctagaccaatgtccaagagaactttccctaggttttcttcaagtatttttattgtttgaggttgtattagtccattttcatgctgctaataaagacatacctgagactgggaagaaaaggaggtttattttgacttacagtttcacatggctggggaggtctacaatcatggaggagggctaaaggcacttcttacatggcagcagcagaaagaaaatgagggagaagcaaaagcagaaacccctgataacccatcagatctcattagatttattcacgaccacaagaatatcacaagtgacaccagcccccatgattcaattacctcccactgggtccctattctgcatatggraatctaattttcccagaactgtgtattgaaaagggggtcctttccccagtgtgtgtgttgtcaactgtgtcaaagatcagtt

SEQ ID NO: 455268 - DNA, 531 bp, Homo sapiens
acttttctgtgaatgtgcccacctgcttcacttgttctgtcctaggggacaagtgttaggattgtgtgcctttactctatcctgtcaagccaggtatggtgataagcctcctgtttcttttccctatggcactgcccaagcatgaacaaggttgcatgccttttctcagaccaaaagagtcaagccagctattaagatatgtacctgctattgagattcgagtactgtctgtgggaggtcaggcaggctgtgctcagggaagtatgggcaccatccacaaggttgtaggggttcattaagtgctcacagctcatgttggctagttggggkgttcctcaggcaagtcattcttcagatttcttgggtgggccttgtggtggagtctttaagcaagttaacaggatctatagccactgttttaaactgcacactgattgttgtgctctccctccccttctttttgcttcttgttgtccccaggcaatttaaccatacagattccctcagtattcaaggtgcagagagatagat

SEQ ID NO: 455269 - DNA, 619 bp, Homo sapiens
cattgtttttcagggtccaaaaatatacagttaaaggtagtgattaatcaaacagcagacattttttgcatacctgctatgtgttattaatgttaagtattgaaagtatataaatgaataaaacatcatctcagctcacagggagtgcacaatctggtaggcaagatagagcgtgtaaacagacaattagagtaaagtatgacaaggggcaggcagggtattgtgggagcccaagggaggtatgcttgattggggatgggggttatgatcaagaaaggcttcatgggcgaggtgacatttgagttgagtcttgaagaattaattcaccaggttactaagtggaaaatggtatcctaagttgaaagaatggcatgtatgaaggtagagaggtcatagttaagtgagactgcagggagwccttggaagtgtgactgccaaattctcaacaaactcagaatgggtctttctggtttggagtgatgactggtggccaaaaaaaaaagccagtattgcagattgataaagaccacaacacatctctatattaagaaacatctggctcatttattaatattagtgtgttttgctttaagcaaatctgatatatgtaaatgtgaga

SEQ ID NO: 455270 - DNA, 577 bp, Homo sapiens
cactgcctctctgacctttacagtgaatttcttttaaccaaaaatccactaacggaatttttccaatagtccatgaatggataaagacaggcatacctgcattacatttactttttgcacaaaaatttaccaacttcaacgcaggaatttcctctcattctgtggatgtttaataaatactaaaagaaaatatgaaaatgctagtaatgaatattaaatccattggctgtgatcttttatcattcaaactgtatataaaatagaaactaacctgaacgggatcttgaggaatttttacattttaggtacttttagtagtttcactggtaattaacaatggtacaagatttctgtgctgtatgttagttttaaaatggatatataataactgctctaatgctcgtgcaattaagccagaacagggrcacattctgagtctcctgttttgttgtgttggtgctgattgcattcataggctgataaatggccctgggagtgagactaagagactgattatttctactggaaatgcctggtggtcacaaaattatgctaggtaagagtgtgggttctgaga

SEQ ID NO: 455271 - DNA, 636 bp, Homo sapiens
actaatgcgtgaggatgtgtgagataaaaagaagactaagacatagtccccaaccttagagagttgatcatttagtaggggagataagacatatagtcaagctcaacatgttgtaagacagaaccgtgttatcagagtaaatgagaacatacatatatcctttataagctgggaagactatataaatgccaatggttttaggttttttttttttaaacaagccttaagaattgcaaagtgctgtaggagatagagaagaaaggaaccatttcttactgggggcatcatggaaagcactgaagcatgagtagtctttcaacaggtagaactgagggcaaagggcaccagcaaagccctgcagatgagaactcactcaggatatgaagggaccagtaagtagcttgtgtcggcttccgcatagaatacacacaggagtcttcctgaaggatgacaaagctggaaagtttggctggarctgggcttaaataccaggctacggagttgggcttatttaggaggccatggggaattttagagcaggggaattgcatcattcaaacttcccttttggaagtcactctgacagcaggaagtgccatctcctctggccgcctgaaggacttttctcctgcaatg

SEQ ID NO: 455272 - DNA, 570 bp, Homo sapiens
ccaaccttagagagttgatcatttagtaggggagataagacatatagtcaagctcaacatgttgtaagacagaaccgtgttatcagagtaaatgagaacatacatatatcctttataagctgggaagactatataaatgccaatggttttaggttttttttttttaaacaagccttaagaattgcaaagtgctgtaggagatagagaagaaaggaaccatttcttactgggggcatcatggaaagcactgaagcatgagtagtctttcaacaggtagaactgagggcaaagggcaccagcaaagccctgcagatgagaactcactcaggatatgaagggaccagtaagtagcttgtgtcggcttccgcatagaatacacacaggagtcttcctgaaggatgacaaagctggaaagtttggctggaactgggcttaaataccaggctacgragttgggcttatttaggaggccatggggaattttagagcaggggaattgcatcattcaaacttcccttttggaagtcactctgacagcaggaagtgccatctcctctggccgcctgaagg

SEQ ID NO: 455273 - DNA, 580 bp, Homo sapiens
tttgccatttttaattgtgttatctttcttatggagttgtaagtgttccttatatattctagataaaagtgcttcaggagatttacgatttacaaatattttcttccattctgtgggttgtcttttcatttcttgatagtgccctttgacacacacccaaaaaaagtaattcaacttattgagtttttttctttggttgctttcacttttggcatcatatttaagaaaatgatgcctagtccaaacacaaaatattgacccctatattttcttctgagtttcattgttttagctattacatttaggtctttgaccatttcaagtaaagttttgtatataagacagtggtcaaaatttattcttttgcatgtggatatccagttgtctcagtaccatttgttgaagaaactgcttttctcctttgaatggtcttggactctcaattctrttccattgactgacatagctatctatccttatgccacttggttactgtcactttgtagtaagttctgaaactgggaattatgagtcttcattttagatctttttcaagattgttttgcctatcacgaggccc

SEQ ID NO: 455274 - DNA, 513 bp, Homo sapiens
gaggtctctgggtataccatacaacctcaggcttaccaggaagtagcatcttgcttgcaagaagagaggaagaaagggctggcctggagggcgtccaggctcagcagatcatattcctactacagactgttgcctgcccacctgcctgcctgcctacctgccttaggttatgaagccaattaggaacagaagaggataaagaactgtgatttgttccactttccaactctccattaaactgtagaacccatgggtaaggaaattactttttttttttttttctgcctcagaagacaaagagcattcccttggagattgtcatcttgtttttatggaagccactacctagagttgaatagctttcccctttccatgctatactgtcagcagtgccacatgacatcttcaactacygctacctaaaaaaaaactcttacttcctaccctagcctggaataaccagtggctgaagccaaatgcctaagaggtgctttcctcaaaagaatctctgtc

SEQ ID NO: 455275 - DNA, 603 bp, Homo sapiens
gcaaacataatcaagaaatgttgtgtatgttctgactgctccaccaaccagctgtcctcccatctctctccttctccctctcctaagccctgcctattttctgagacacaacaatattgaaattaggccaattaataaccccaaaacagtctctaagcattcaagtgaaaggaagagccgcatgtctctccctttaaataaaaaactagaaatgattaagcttagtgagaaaggcatattgaaagccaagatagacctaagctaggcctcttgtaccagttatccaagttatgaatgcaaagtaaaagttcctgagggaaactaaaagtgctactccagtgaacacatgaatgatgagaaaacaaaacagacttattgctaatatgggcaaagtttgagtggtctaggtaaaatgtcaaaccagctacaacattccctttagcaaaagcctaatccagagcaaggcctaactttcttcaattgtatgaaggctgagagaggttagtaaagtgccaaagaaaagtttgaagctagcagtgattagttcacgagatttaaggaaaaaygccatctccataacatgaaactgcaaggtgaaacagc

SEQ ID NO: 455276 - DNA, 600 bp, Homo sapiens
aaaacgactacccctttttataggagctttacaaatgacctactgagtaaatggcctagtccatgtctctgggccgatatagaaacagctttgggctctcagttcacccaaaatggtctggggagagaatctccttagatgaaaatgtattttaacttttttagtacaagcaggctttccaaaggtggcagaaagcatggaacttatcttaaagtactgagttggttttagaygtaattttaaaaacaagataatttgattgtttaaacacgacagtttttttttaaagtaatacgtcatagccaatcaaaattcccaagccagaaaaaaatgtttttttcaatttagccagtctgctttaaatctaggatatcccaggggcttggctaaactagccatgagattgctccccaaccccactgtcacctccagccttttaaatcaaaaagcataaaaatgtatggcagcaaagaaagatgctctgaggcagggactagccttgactcctaatatggtcagattgcaattaaccagaggatcagcagctctgttaggcattttaaatttctgtttaactcaaaagccttatttttgtttgaa

SEQ ID NO: 455277 - DNA, 587 bp, Homo sapiens
agtttattagacatctgttatgtatatcatacccattttagtcayactgtgagcctctaggtagattctaggaaatatggctaacttctgatcattcaaggggttttctaggtaaccctggcttggttaccatttgttatggtaaagcttaattagccaaagactgtcagagacaagactatagtcccacaaactcaaatttattgtgtggtttaagaactgagtatctccagtaataaatacaagtagcaaagcaggtttaaggcatcactggtaagaaaggagtagtcactcaaagtaggcggtgtagttatggccttttacaactgccgtgtgaccttgggagaaagtgttttctattaactttgcagctggctttatctgtccattctcccagcctgattaatggcagggctgctttttcttagctcaaactgactttcactctttcagttctggggaagttttgactttttcaggttttggtccttttcagaaagggatgagcccgagaaaaatattgacattcagattaactattaataatgttgctcctcttcagccaagttggtaaaatagttaatgga

SEQ ID NO: 455278 - DNA, 593 bp, Homo sapiens
gtaatgtgctttgccttagtcaatttggcattccactcacacctccctctatttagctttactggagggttgcagaggttcctcactccttcaccacctgttcctcatgtctctggattatagtggatacatgagttcaagagggacctggagagggtagrtatggaactcttcaagattgtttccaggatttgcctgacataaattgtctgagaggatctccaccatttgccttttggtgatttattttctcttcgcctcctgagagaaatgttctattgctcaccatttcagatggttgggtgtggggatgggggcacttctgttcctgacaacctcattatgtggttatcaggagcagacactgcccaggttgtcacgacaaccagcaatgattcaaagcttccctgaaaggtctgtatctccggcaaataatcagcctttagctctcagcagatgctgaactgagcagccaatcacaggtgagctggaaaaacatgacatcatagtccagccggtccaaaaaaaataaaaataaataagatttggttttctctttacttccttcattctttatcccctagattttgttt

SEQ ID NO: 455279 - DNA, 628 bp, Homo sapiens
cttgattcaatcattctacattatatacatacagcatcactttataccccataaatatatacaattataatttgtcaatattcaataaaaataaaacaggaaaaagttccttttaagaagttaacatttattgcttgctaaccaagtgccaaggatttttcttggatgcgtccatcaaatcctcataacaaccccacgaactaggtagtgtcagtatccccattttacagatatagaaactgaggcaagagaggatcaataacttgtccaagatcacacattagcaagtagtggagttgggatttgaaccttgaaattcggcctgaatgttccactaatgagaaaaaatgacgggtactggattgactaaattgactgtctaacttggtcctctttaattttgtaaggccaaagagaatgagtcatacacattgcttggcgtctttggtttttctatttgattcaaaaaatgcctcaattttccataagtgatgaggagctattgttgggatgccagtgaagataggratcctgctctacaagtagcccttctggtaaccacagagtgatcaggccttacaaaactggaatgacatttgggaataagaagacatgcagagtccactgc

SEQ ID NO: 455280 - DNA, 628 bp, Homo sapiens
cttgattcaatcattctacattatatacatacagcatcactttataccccataaatatatacaattataatttgtcaatattcaataaaaataaaacaggaaaaagttccttttaagaagttaacatttattgcttgctaaccaagtgccaaggatttttcttggatgcgtccatcaaatcctcataacaaccccacgaactaggtagtgtcagtatccccattttacagatatagaaactgaggcaagagaggatcaataacttgtccaagatcacacattagcaagtagtggagttgggatttgaaccttgaaattcggcctgaatgttccactaatgagaaaaaatgacgggtactggattgactaaattgactgtctaacttggtcctctttaattttgtaaggccaaagagaatgagtcatacacattgcttggcgtctttggtttttctatttgattcaaaaaatgcctcaattttccataagtgatgaggagctattgttgggatgccagtgaagataggaatcctgctctacaagtagcccttctggtaaccacagagtgatcrggccttacaaaactggaatgacatttgggaataagaagacatgcagagtccactgc

SEQ ID NO: 455281 - DNA, 580 bp, Homo sapiens
tttttcctttttttttttttttgagacggagtcttgctctgttgcccaggctaaattgcagtagcgccacctcggctcactgcaatctccgcctcctgggttcatgccattctcctgcctcagcctcccgagtagctgggactacaggtgcccaccaccatggctggctaatttttttgtatttttagtaaagacgagmtttcaccatgttggccaggatggtctccatctcctgaccttgtgatcctcccgccttggcctcccaaagtgctgggattacaggtgtgagccactgcgcctggattgtgtttttcatttaaaccctattacaaccttctgagacaaaaaaaaaactcctttcaatactttagagataagaaaattaagtcaacaatatcaacaggtctcttattctatgcaaaacaatggaagattctaatggagaagttgtgcatttctactttactatgcaccttttaggtgccaagggctggactaagggatttaatggtgaatgaacacaaccatgggtcctaaactcattgaactcagagacaaggagtcttagtgcacataccca

SEQ ID NO: 455282 - DNA, 580 bp, Homo sapiens
tttttcctttttttttttttttgagacggagtcttgctctgttgcccaggctaaattgcagtagcgccacctcggctcactgcaatctccgcctcctgggttcatgccattctcctgcctcagcctcccgagtagctgggactacaggtgcccaccaccatggctggctaatttttttgtatttttagtaaagacgagatttcaccatgttggccaggatggtctccatctcctgaccttgtgatcctcccgccttggcctcccaaagtgctgggattacaggtgtgagccactgcgcctggattgtgtttttcatttaaaccctattacaaccttctgagacaaaaaaaaaactcctttcaatactttagagataagaaaattaagtcaacaatatcaacaggtctcttattctatgcaaaacaatggaagattctaatggagaagttgtgcatttctactttactatgcaccttttaggtgccaagggctggactaagggatttaatggtgaatraacacaaccatgggtcctaaactcattgaactcagagacaaggagtcttagtgcacataccca

SEQ ID NO: 455283 - DNA, 571 bp, Homo sapiens
agcaatggtgacacatccatctctttcccagcatcagtttggctgttttgttttggttttgtttgcctttgttccatcaatgttctgttggtaagatcaaggggaagccctggtaagaatctytttttcctttcagtaatccttgagcatcttactcatcactgtgagctgagcaattaatttattcaaagcaaaactttagagtaactgacaaatgggaggaatctttctctaattaattttactgatgctatttatgttagaataaataatgccctggggataactaggcttgcgaatgaacatttacttaaacattgacaaagggagtgatgtgtatgatcgtaagactttctccaaagtctctatcttacataataaatgtgctccccaaagtaacggggcatgaagaaaaaaatgcatgaccttgcaactgaaaagagaaggaacaaagagcttcctataagacaaatattcattctgtaattttctgattggtaagtttaaatccgacataatataaacagttaatgtcttgaaaagggcaaggcaaagctttcttggaggaaac

SEQ ID NO: 455284 - DNA, 580 bp, Homo sapiens
aaaagaatgattaattccaatagaatattacagtaacaagggatcagtaataagaaatgaactctaaacaatgcagaaataacagatataagcagtagccactacctttgtggcttagctggacgcccatggaagagctccctcccctcaaggctgagatcccraccatgttggagagggcatgacatagctaaccagatggcagataattgtgacgtcataccagtacaacttgctgaaaatcttccagcgaatgaaggctgctgaggaaacctattcacagggatatatctcaccagaggcactttgtggcaaaaccacctaaagggtgttccaggggcagctgccggctgctgtgcactgcagaagcctaatgctgcaaaagctgcacatgatccagaagtgaaatactggaggagctgtgcctgcttcaggagctttgtgctggggaaactgtcacactatagggctttccaggctgacacaccagcaccagcaagcaaaaccctttccttctgcagtgcttctccattgccctcaactgctatagcttcacattctaccagctgacaaaagaaaa

SEQ ID NO: 455285 - DNA, 580 bp, Homo sapiens
aaaagaatgattaattccaatagaatattacagtaacaagggatcagtaataagaaatgaactctaaacaatgcagaaataacagatataagcagtagccactacctttgtggcttagctggacgcccatggaagagctccctcccctcaaggctgagatcccaaccatgttggagagggcatgacatagctaaccagatggcagataattgtgacgtcataccagtacaacttgctgaaaatcttccagcgaatgaaggctgctgaggaaacctattcacagggatatatctcaccagaggcactttgtggcaaaaccacytaaagggtgttccaggggcagctgccggctgctgtgcactgcagaagcctaatgctgcaaaagctgcacatgatccagaagtgaaatactggaggagctgtgcctgcttcaggagctttgtgctggggaaactgtcacactatagggctttccaggctgacacaccagcaccagcaagcaaaaccctttccttctgcagtgcttctccattgccctcaactgctatagcttcacattctaccagctgacaaaagaaaa

SEQ ID NO: 455286 - DNA, 306 bp, Homo sapiens
ttaactacacgacagcctgagggttgttggccttgttagatggtggaggcttctctaaagcaagcattccaagaggcccsagaggaagctatgagacttcttatctagcctcagaagtcccagaatgatatttacacagcattctgctggtcaaggaagtcacaaaggacaactctgattcagggaaagggaacttagactccacctctcagtggaagaagtaggaaagaatttgcagctatatttaatctaccataatgattatttatttatttatgtacactgggtaagacaaacaagaattgt

SEQ ID NO: 455287 - DNA, 559 bp, Homo sapiens
aaattgttaccctacctcttttaaaatgcttctggttggttgaacagcattgactagatacgagaattctttgaactgaacttttggcaatgaaagtctccctccagtcccatctttaacctcaaaatatttttccgtgattttacaaaattatttgtcaaagataataaatattctttctggaaaattatagaaattcatatragcaagcaaaaaattaaagttacttgaaattctacaacttagatggaattgtttgaaagactatccacttttaatgtatagtctctccaatattattctatacaaatatctaccagtaaacacacaaggtttcagatgaaacaggattgtactatacattcagctaaatgtttcgaaaatgtgtctattacatattattagttaaatatttagcatccaggggatagttatttaataaatatcaatggcccgaaatctaatgtacaattttaagcagactagcttgaaatttaaatttaattaaaattatggtcataagatatgcacgatctctaaaacataataaatttaatct

SEQ ID NO: 455288 - DNA, 607 bp, Homo sapiens
ggtgaccaggtgctatcagtgagcagtaagattttgaaagaaatctttttttctgagcagtggttctcaataatggactttaaatattcagtaaaccatgctgtcaacagatgtgctgtcatcccagctttgttgtttcattagtagagcattggcagagtagatttagcataattattaaaggccctatgattttcagaatggtaaatgaaccttggcttcaacttaaagtcccaagctatattagcccctaaccaaagagtcaaactgctctttgaagctttgaaaccaggcactgacttctcatctctaactatgaaagtcctacaaggcatcttctttcartttaaagctgtttcatccacattcaaacagtttagtgtagccaccttcatcaatgatctgagctagatcttctgtagaacttgctgcagcttctacatcagtacttgctgcttcatcttatacttttatgtgatagagatggcttctttccttaaacctcatgatccgacctctgctagcttccaatttttcttttgcagctttctcacacctctcagccttcataaaatagaagagaatttggcctttgctgtggattaga

SEQ ID NO: 455289 - DNA, 557 bp, Homo sapiens
gcctgtagtattctgttatggcagcccagctgactaagacacccactgttctccagtccatttcattcccttccctgctggcaacttcttaagacagttttggctgtttcttctggcatatatcctrttctagatttctcaatagtatcctttgactcattaattttagacattacctattaatttcctattatggcagttaagtatttacctttgttgtactgcttcctctttcccatcctcccactggagtgacattacgattttggttaaatcaatatgtagaatttatgtaattttctgaattattgggaaaactattggacaacaccatttgacctgaatccgtgcaggggttcctctgtgggggcaagttgcttgaaatgtggaaggggaaaacaattgtatcttgaaatcagaatatggatagagtgagtggaagtggctgaatcactaatgttccttccttttcccaaatgtatccatcagatacggtgctctcatccattatccataccctacagaactggagctactcaatctcaacataaataaat

SEQ ID NO: 455290 - DNA, 600 bp, Homo sapiens
cgattttggttaaatcaatatgtagaatttatgtaattttctgaattattgggaaaactattggacaacaccatttgacctgaatccgtgcaggggttcctctgtgggggcaagttgcttgaaatgtggaaggggaaaacaattgtatcttgaaatcagaatatggatagagtgagtggaagtggctgaatcactaatgttccttccttttcccaaatgtatccatcagatacggtgctctcatccattatccataccctacagaactggagctactcaatctcaacataaataaataaataaataaaataaaataaaataaaataaaatwaaattaaattaaaaggcccagcatggtggctcaggcctgtaatcccagcactttgggaggctaaggcgggtggatcatttgaggtcaggtgttcgagaccagcctggccaacatggtgaaaccccatctctagtaaaaatacaaaaattagccagctgtggtggtgtgcgcctgtaatcccagctactcaggaggctgaggtatgagaatcacttgaaccctggaggcggaaattgcagtgaactgagattgtgccactgcactccagc

SEQ ID NO: 455291 - DNA, 574 bp, Homo sapiens
taatccccagaagcagagagactgatatgtgctgtagatgtgggtgcacggttgagttcccaggggccctattgtgcatcgctcattggcctctgtactgtttccatgtgtgcagaactgtgctgsgagctgtaagaatgtaagcaacaacaataaagcgatcttagacctaaatcaagtcagtccaaggagaagaaacatacacttcttttcttctataagcttgcagtctatctattaggagagcaaggacaggcacccaagaaattaaaatataaggtagagggacaaagaatatttcattggcttggggagatcacgagctgtaaatagtaaatgagtctgtgcgttctaggctatagtacaatgcaaatttggagaataaaggtattttaatgagattaatatgtttgaaggttaatttttatttttatgtacagtaaaggtaacattaaacctttatcccagtttggcgacaagttctttagccttgctttttgagcttagcaatgagagccataaatttgatagaatgttatccccaatgatagcagatcttgtcatgtctgtcatt

SEQ ID NO: 455292 - DNA, 637 bp, Homo sapiens
gggtgcggttgctcatgcctgtaatcccagcactttgggaggctgaggtgggtggatcacttgaggtcaggcgtttgagaccagcctggccaacatggcgaaaccctgtctctactaaaaatacaaaaattagccaagtgtgttggcacacgcctgtaatcccagctacttgggaggctgagccaggagaatcgcttgaatctggaaggcagaggttgtggtgagccaagattgcgccactgcactccagcccgggcgacagagagagactccgtctcaagaawaaaaacaaaatgaattaatacatatgaagctcttagcataatgccaggcatgtagcattcagtaagagttatctcatatttaatcatctaagtttcctttatcatcccaacattagaaggtcaattatttttagctggaaatgatcttagtgctcatacatgccagtgtttgacagacttgtttatttcttcttcctttttaagcaatgaactcttttttcctagtgaaacctgtgtggaactgtagcagctgaggttggggccaccatgtgcccatgaacacacagcatttctggaccatctggaggcttctcttttatatctctcaaggagtaggggtgggaggcaaatat

SEQ ID NO: 455293 - DNA, 361 bp, Homo sapiens
ctaaataagatcgctacgagataaaaagctacacacctcccccataatttgcccacaagaaaattcctagtgagctgcaagatcttttaaggtgtttctgtgaagatttcaccatggcaatgtaaaatgatagcttctctttacaggtgcagtcaccccaggcccaccagacacagatgcatatctgattgttcccctgtcccattttgtctatgttatcttatgtcaaatgcagattccctgtatttttcctctgcccatttgtytatgtcatcttatgcaaaaaaatgcaaattaatagagccagacaaaggcatgaatgactatttttccctatacccctcttacatgaaaattgtat

SEQ ID NO: 455294 - DNA, 622 bp, Homo sapiens
agtggctgtggaggttttatgcactgttcagggtgcccaggcagtgtaagtcctcttcctgcactgggatctgtgattccaagagtctgctttctgctctgtggcatccagaagggaaagaatttgcagctccagtttcacctggaagcttggctcctgccctaggtggagtgatgcactcaagctttccacattgaagagggctgcagactgtgctgtgaaatgcgtctgtgtgtgtgtgtgtgtgtgtgtgtgcgtgcagatgtgcatgcaggtgtgtgtgcaggtgtgtgtgggtcgggtgtgtgtgcaggtgtgtgtgggtcggaggggtgtggacagaggtggtggacaggcctgatgggagsggctggaaaagcaaaagccaaatacctcagtccttaatggatggtcagatcgctcagacttttgaggacacgccggccccagtgcagacccaatttcaaagatagctcaggccagtcagggagggaaggtaggtcagggcacatctgtatccccaaaaggagctgaaattgttcttttctctgcacaaggatgacgcagagagagaagcagagcagacatagccatttttgtagtactttctcaaatcgttttc

SEQ ID NO: 455295 - DNA, 534 bp, Homo sapiens
tgaccaatggcctgtgacacagccctcaggagatcctgagaacatgtgccaaaggtggctgggctacaacttggttttatacattttagggagacataggcatcaatcagtacatgtaagatgtacattggttcatctacaaacatgggacaactggcaagggtyggggcttccaggccatagacagattcaaagattttctgattggcaattggttgaaggagttattatctaaagacccagaatcaatagaaagaaatacctgggttatgataaggggttgtggagactgaggttttgtcacgcagatgaagcctccaggtagagcaggcttcagagagaatagagtgtaaacgtttctatcagacttaaagagttagtaatcccaaaagggagggtatcatgaggtgtgtccaacttccccttcccatcatggcctgaactggttttccaggttaattttggaatggccttggccgagaggaggggtccattcagatggttggggggcttagaattttatttttggtttac

SEQ ID NO: 455296 - DNA, 619 bp, Homo sapiens
tcaaaacgctcttcaagacctttccatcacagctcctggagcctctacttctttccatttgcaagccttcaggatactgtaggagccccttagagcagcgattttcagtgtgtttcctggaccagtggcatcagcagcacccgaaaacttgttataaatattgttctcatgccctgtctagatctactgaatcagattctgggagtaaagtaggccccagccccctgagttttaacaagtcctccaggtaattctgatgcacattaaattagtgggagaacaattgccttaaaataaaatgcagcctctgcctrtttctttaatcttctgccttgtcccatggccaactcctccattctatggtactctaacgatgcagaactgtggtactaatcattctccaatctgattaagtttcttcctggctcagggatttgtaaaagctgctacctcagcttgggaatcactactgctgtctattattcccttcaccccttgtttcccaacatgacaagcttccaggacttccttcctcctagagttaaactctggatgtgaagacagactgggatgtgtgctctgacattatcagcagaggcctctgggattccaggactat

SEQ ID NO: 455297 - DNA, 619 bp, Homo sapiens
tcaaaacgctcttcaagacctttccatcacagctcctggagcctctacttctttccatttgcaagccttcaggatactgtaggagccccttagagcagcgattttcagtgtgtttcctggaccagtggcatcagcagcacccgaaaacttgttataaatattgttctcatgccctgtctagatctactgaatcagattctgggagtaaagtaggccccagccccctgagttttaacaagtcctccaggtaattctgatgcacattaaattagtgggagaacaattgccttaaaataaaatgcagcctctgcctgtttctttaatcttctgccttgtcccatggccaactcctccattctatggtactctaacgatgcagaactgtggtactaatcattctccaatctgattaagtttcttcctggctcagggatttgtaaaagctgctacctcagcttgggaatcactmctgctgtctattattcccttcaccccttgtttcccaacatgacaagcttccaggacttccttcctcctagagttaaactctggatgtgaagacagactgggatgtgtgctctgacattatcagcagaggcctctgggattccaggactat

SEQ ID NO: 455298 - DNA, 426 bp, Homo sapiens
ctctcctctgctgctctgccagtggagcttgggatttatatgggcataggataggagtgtggtgggccagagtggtcttggaaaaggcaacatttgggtgccaaaacaggaatgcctcttcccatttagggttgtgggtctccaggcttgagggtggggccgttgccagggaactgccctcttctactcagtatttccctgtctcctgtctgtatcactaggaaccccatgcaaatatgggtgagactcttgctgtgcggactttcctgtcttaaatgagaggtgacttgaaggaagagtgtgtgtggaaggggmgagagtcattacaaggacttgtctcttttcattattttgtgataaaggaaagctaaattaaaacccagcctgtgtttcaaatgtcattctttgcaattctttttttttttt

SEQ ID NO: 455299 - DNA, 586 bp, Homo sapiens
tccaagcaatcatctagacctaagacagtggcttccaactgaatcatccactttggaatgatgactccacttccgtaggaacgcatttgkctcacctggctgcactgttagaacaaacccatcagttttcagtggtcattcaccagacagttccaatttggttaatttcctgttatttctacccaacttgaagcaaggccaaattttttgttgtctcttgaatgttttttggttccctgtaaatatgagacctacttatgttattaataaaacccgatggaatttcttggtatttttcatgctgttttcaagtctgatcaggaggtaacctgagccctggacccaaagtgaacaaacattcttcatagctactgtgacctgttaatttaagccaaactcacaatttttcagttgttccaattcagacttttactacaatcacctaatctttcatctgtgatattatcttgtgaatatttcagaattttcatggcagcattgtctgtacagtacagaaaaggaatcaaggattctatattttgaagcttcacagatacttactatgtggcatttaaatttaagaaaa

SEQ ID NO: 455300 - DNA, 586 bp, Homo sapiens
tccaagcaatcatctagacctaagacagtggcttccaactgaatcatccactttggaatgatgactccacttccgtaggaacgcatttgtctcacctggctgcactgttagaacaaacccatcagttttcagtggtcattcaccagacagttccaatttggttaatttcctgttatttctacccaacttgaagcaaggccaaattttttgttgtctcttgaatgttttttggttccctgtaaatatgagacctacytatgttattaataaaacccgatggaatttcttggtatttttcatgctgttttcaagtctgatcaggaggtaacctgagccctggacccaaagtgaacaaacattcttcatagctactgtgacctgttaatttaagccaaactcacaatttttcagttgttccaattcagacttttactacaatcacctaatctttcatctgtgatattatcttgtgaatatttcagaattttcatggcagcattgtctgtacagtacagaaaaggaatcaaggattctatattttgaagcttcacagatacttactatgtggcatttaaatttaagaaaa

SEQ ID NO: 455301 - DNA, 580 bp, Homo sapiens
tgtcatgagatctgatggttttatcaggggtttccgcttttgcaccttcctcattctctctttgcgtgctgccaaccatgtaagatgtgayttgctcttccttgccttctgctatgattgtgaggcctcctcagccatgtggaactgtaaattcaattaaacctctttcttgtgtaaactatccagtcttgggtatgtctttatcagcagtgtgaaaacggactaatacactcagacagacttccttctatagccctttcctgcttttcaggactctgtgattccattggccaaccttgataaccagggcaatccccctattttagggtcaggaagttagcagccttcattctgtgtgcaatcttagttcctttttgccatgtaacctaacatagtcacagatcctggagactgggatatggacatgtttgatgaggggcattattctgcccactgaacagttataataatttatttttgttaggatttgagtagtaatctctttatttttaaccactgtgagttcttataggtgtgtctcttgaaaatagcatatgacaaaaatccttttcttcttcct

SEQ ID NO: 455302 - DNA, 580 bp, Homo sapiens
tgtcatgagatctgatggttttatcaggggtttccgcttttgcaccttcctcattctctctttgcgtgctgccaaccatgtaagatgtgacttgctcttccttgccttctgctatgattgtgaggcctcctcagccatgtggaactgtaaattcaattaaacctctttcttgtgtaaactatccagtcttgggtatgtctttatcagcagtgtgaaaacggactaatacactcagacagacttccttctayagccctttcctgcttttcaggactctgtgattccattggccaaccttgataaccagggcaatccccctattttagggtcaggaagttagcagccttcattctgtgtgcaatcttagttcctttttgccatgtaacctaacatagtcacagatcctggagactgggatatggacatgtttgatgaggggcattattctgcccactgaacagttataataatttatttttgttaggatttgagtagtaatctctttatttttaaccactgtgagttcttataggtgtgtctcttgaaaatagcatatgacaaaaatccttttcttcttcct

SEQ ID NO: 455303 - DNA, 563 bp, Homo sapiens
taaaaatctaccacatagctactagaactgtaaagtgagtttagtaagttggtaggacacaaaatcaatacacagaaataataattctatatagtagcaataattaaaaatgaaaaataccatttataataacaaaatataaaatacttagggataaatttgacaaaatagatgcaagaactatgcactaagaactataaaacrttgctgatgtaaaaacaaaccaacacaaaccctaaataagtggggagatacactatgttcatggatcaaaaggcttaatatctacccaaattggtcaatgtaataccaatcaaaatctcagcaggctttcttatagaaattaacaagctgactctaaaatttatacggaagtgaaaggacctggaatagccaaaacaattttattgtttttatttttaattttttaaaattttaatagcttttgagtacaagtggtttttgattacatggatggattgcatagtggtgaagtgtgagattttaatgcatccatcacctgaatagtgcacattgtacccaatatgtttttttttttatct

SEQ ID NO: 455304 - DNA, 563 bp, Homo sapiens
taaaaatctaccacatagctactagaactgtaaagtgagtttagtaagttggtaggacacaaaatcaatacacagaaataataattctatatagtagcaataattaaaaatgaaaaataccatttataataacaaaatataaaatacttagggataaatttgacaaaatagatgcaagaactatgcactaagaactataaaacgttgctgatgtaaaaacaaaccaacacaaaccctaaataagtggggagatacactatgttcatggatcaaaaggcttaatatctacccaaattggtcaatgtaataccaatcaaaatctcagcaggctttcttatagaaattaacaagctgactctaaaatttatayggaagtgaaaggacctggaatagccaaaacaattttattgtttttatttttaattttttaaaattttaatagcttttgagtacaagtggtttttgattacatggatggattgcatagtggtgaagtgtgagattttaatgcatccatcacctgaatagtgcacattgtacccaatatgtttttttttttatct

SEQ ID NO: 455305 - DNA, 557 bp, Homo sapiens
ggcaatttccagaactgaggattcctcccctttttagaccatatacggtaacttcctgatgttgccatggcatttataaactgtcatggaaccgaagggagtgtcttttagcatgctagtgcattataatgcgcatataatgagcagtgaggatgatcaaaggtcacttttgtcaccatcttggttttggctggcttctttactgcatcctgttttatcagtaaggtctttgtgacctgtatctygtgctgacctcctatctcattctgtgactaagaatgcctaacctcttgggaatgcagcccagtaggtctcagccttattttacccagccccaattcaagatggagtccctctggcttgaatgcctctgacacatgtctagctggcattcgggacaatcattggaagtttgttctttctacacactttaaatatttctctaaatgatttctctttcctcttaacactactgcccaatattgtgtttcttcttactcaagtccatcttctcttgacctccctgaacagacctgctgtctcttaggggtgggtaa

SEQ ID NO: 455306 - DNA, 602 bp, Homo sapiens
cataattcccacgtgttgagggagggacctcwtgggaggtgattgaatcataaaggcagttccgtcatgctgttctcatgatggtgagtgagtgctcatgaaatgtgatggttttgtgagggtcttctcccctcttctctctgcacttctctcattcttctccttcctgctgccatgtgaagaaggacatgtttgcttccccttcttccatgattgtaaatttcctgaggcctccccagccatgctgaactgtgagtcaattaaacctctttcctttgtaaattacctagtcttgggtatgtctttattagtaccatgagaacggactaatatactcgccaatgtttctatcccaatttacccttcttccaaggtatcttagactgtcagtgacccatttccctccatacacataatctggaatcatctaaacccagactttctacagtcttcccatcatgctcataataaaacacgaacttgtccactggtcaacaagctctacagccaggcccttttcctcactccaaccttagcctcacctctaaatgctcatgctgctccagctatgctggttttcttccttcctttcttccttcctt

SEQ ID NO: 455307 - DNA, 602 bp, Homo sapiens
cataattcccacgtgttgagggagggacctcttggraggtgattgaatcataaaggcagttccgtcatgctgttctcatgatggtgagtgagtgctcatgaaatgtgatggttttgtgagggtcttctcccctcttctctctgcacttctctcattcttctccttcctgctgccatgtgaagaaggacatgtttgcttccccttcttccatgattgtaaatttcctgaggcctccccagccatgctgaactgtgagtcaattaaacctctttcctttgtaaattacctagtcttgggtatgtctttattagtaccatgagaacggactaatatactcgccaatgtttctatcccaatttacccttcttccaaggtatcttagactgtcagtgacccatttccctccatacacataatctggaatcatctaaacccagactttctacagtcttcccatcatgctcataataaaacacgaacttgtccactggtcaacaagctctacagccaggcccttttcctcactccaaccttagcctcacctctaaatgctcatgctgctccagctatgctggttttcttccttcctttcttccttcctt

SEQ ID NO: 455308 - DNA, 645 bp, Homo sapiens
agatgcatacaaagtttcgtctcagttaccaccttatttcttgtggtcctacatattattttgcgagtggctattgctattaactgaaagataactttttgaatttttattttgtctagtagtagcactagtataaatattactgtcatctgcttctcattttaatttgaaagaaaacatcttttaatgattcctgccttataaaccctataatgattttctttcctaatttttctatgagactgcttgagaaggacggagaaggaaaagctctcgacactgtgaaatagcttactggaagagtaagcatttaagctcgtgcaaaaataattgtttctttaaaaactgccttttcgctacagctacacttttcttgtcatttccttttgctctccagttttaaattacacagactttcgtagagtgcccactctccctttctcacctattcattgtggaaagattcctgtcagggctaatctttaataagagaggcagttacrgtaactatagggcgaagaagggaacagtaaaagttgagcccactcagatgtcatggacctgaaaggtgctggtgggttggaagcttcattatgctcagctgctacaagagatttcctctttttagattgattaagaaaaggg

SEQ ID NO: 455309 - DNA, 564 bp, Homo sapiens
ggacgatgtgaagccaagagagagggcagagaagaggtggtgtgtgcaggggcattagtctgtggctactcctctgcttggccatggggcccctggggagtgctggagtggccctggcctgagcagggccacagaggccccactcatttcccactgctgttgtgcaggaaagccactttgcttcccttcttcttcagatcctcytcactggctgttgagaaggagagatgcatataattaccaacataacttgagtgtccatgacaaatgacccttccagcactctcctaaaccaccagcttagcccgttgagttttactaatgctgtttgatgcagtgataaagcggaaacattgctctgctacctgcccaggatagcattgccatgtaaagggcaagtgatgtggactgagaccaccataatgcaggtcttcttggaaaagtatctaatgcaaggcagagttgcataaggggctgaataaccctgggttattcttactgtgaaaaattcccctacttttttcccatagttacctgggctatataagaggtatgcatgctacg

SEQ ID NO: 455310 - DNA, 564 bp, Homo sapiens
ggacgatgtgaagccaagagagagggcagagaagaggtggtgtgtgcaggggcattagtctgtggctactcctctgcttggccatggggcccctggggagtgctggagtggccctggcctgagcagggccacagaggccccactcatttcccactgctgttgtgcaggaaagccactttgcttcccttcttcttcagatcctcctcactggctgttgagaaggagagatgcatataattaccaacataacttgagtgtccatgacaaatgacccttccagcactctcctaaaccaccagcttagcccgttgagttttactaatgctgtttgatgcagtgataaagcggaaacattgctctgctacctgcccaggatagcattgccatgtaaagggcaagtgatgtggactgagaccaccataatgcaggtcttcttggaaaagtatctaatgcaaggcagagttgcataaggggctgaataaccctgggttattcttactgtgaaaaattcccctacttttttcccrtagttacctgggctatataagaggtatgcatgctacg

SEQ ID NO: 455311 - DNA, 451 bp, Homo sapiens
aaatgtgttccgtgggaccccacccaggtgctattctccacaaaatctattctcggaaagttctagaatggatagtaagatagctgcactacattgtgaaggtactaaatgccaccaaattgtacattttaaaggttaattttttttgttatgtacattttaccacaacacaaaaacatcttttgaaagatgtttctcaaaagaaagtctcagactcaaacatgttacacttacctcctggaggttttacaatgcatattagtaaagaatctgagatgtcttaaaggaacccgcttaattttgcttgattcartgttcccaaagctattaatagactttaagaaaatgcacaactacctgttaatgtccagctagttaatattcttagggatacaaattgtaattgcctgcttaatcatgctctcctatactaagtggtagggatgggacc

SEQ ID NO: 455312 - DNA, 571 bp, Homo sapiens
atcattataatttatattttattactaatgatttatacatgcagaaagataaacagtttccacaaaggcttattcacattcctggattttaaacctatgatgagactgtgtttaattagaggtacggcccacggcagttgttttctttacaggaatttaagaaatcatatattttaaacttgcttaagataaatctaaataattctttggatggcatgttaattaggagatgctgatatttatagattaggaattatttgtagactctgcatgcaaatattatgggtaaaaagaaccatttaagtattttgaaaataacattagaccagatgatgttgtaattataatgtgtatttgattatgaccttttacttcttacaacaaacaggatggatttgaagcactcttttctaatgataattccaaagatttaaataactttctagatttttgtaccttccacactgtataaaacacccctgtcttccctgtcaagaaaattttkggggaaaaaaaagaaaacattgtgcacagagagttgataatgaatttaaatattactaatggaaat

SEQ ID NO: 455313 - DNA, 515 bp, Homo sapiens
tacattcttaccacccatataccagctgcccaccagctgcgttgctgatggtgctctggggctagccaagaggaatgtctggaagagctgagggtagccttttagagaggagataactttcagcaggtgatgcatctggagaagcgtgggggaatctgccgagctgagtctgaagaaccttggccatagccggcaacatctattgtctttgcagagctctgtgctgggactaaattctgcctgattgaccaagaaaaagcaaaagagggtcagcatgtcctttgtaagccggaagcgcagagcaaggtttcagattggcagtggctttctgatcaaatttcrggtcttgacacagcaagtgataaagctttgacccctgggtatattgttgatgggagacccgacttactgagccatgtccgtgtcgtcctgttggtaagggctgttcaggatcctcagtgatgagaattggttgtgagttagagcctgggacaatggcctgatgggaaatgctg

SEQ ID NO: 455314 - DNA, 590 bp, Homo sapiens
atgcatatattgaaggagtgtggattagtggttaacaartatcatatttggcatcaaattggcataggctctagtctggtcattgtatacccttgggttagctatttgtccccttttgacctgtttcctcatcagtaaaaggaggtaatactgcccacttcattgtgcagaaatgaggaataaatgagaatatatgtatagggcttaagaaattacccgggaagtaatgagcactcaaccgacgttaacattgcttattattgttgaattgtgaatattaatgacaaaaacaattatatgagaaaggtgctttataatttcagtgttaaaatagccaatgatcttagcatgtcttgtccggcatgttgtaaaacatttgggtattgaagagttcctgaaagaaattcatgcgaccttttaaggacatcgtagcagtgctttgctttttataagaaatcattaattacaaatgtcaagttaatggcagcttaagaaacaactgagtatattgtggtctaggaagtgtccttttggtaggcttttcatgttctagtaacaaattatcttcagaagcatttttaactacaata

SEQ ID NO: 455315 - DNA, 588 bp, Homo sapiens
cttttcagcttatttggaccctaacatgttgcctaattacaatagcagtgaacacccacagataacatgtataacagattttatgggaattaaaggagctctataaaggactgatgttttcttaagcctattattatggaagtttatatgtaaatagcaatttaatttttaaaatccttactactagttgcaataaatgttcaatatttggtaaattaacaagtgctatatgagaaccactgtgagtccctctcagaactcacattgtgtcctattaaattgttctgacctttcccattaaggcaatttttcccacaaaggacatattgagagcttcaatgagcagtttttaataagttaactatcaagaaagatatttttytattagtaccagtagccaatatgtctatttttaaaaaatgatttcagtatttcctccaagaggactagattctctcatacgtatcctcagagatccacaaaataatatgaatttggccccataattagttttgcaattttgtgcagcatctagataaaagcacatttggaaaaaaaaaaaaaaaaaggtgaagacaagtcagaaat

SEQ ID NO: 455316 - DNA, 588 bp, Homo sapiens
cttttcagcttatttggaccctaacatgttgcctaattacaatagcagtgaacacccacagataacatgtataacagattttatgggaattaaaggagctctataaaggactgatgttttcttaagcctattattatggaagtttatatgtaaatagcaatttaatttttaaaatccttactactagttgcaataaatgttcaatatttggtaaattaacaagtgctatatgagaaccactgtgagtccctctcagaactcacattgtgtcctattaaattgttctgacctttcccattaaggcaatttttcccacaaaggacatattgagagcttcaatgagcagtttttaataagttaactatcaagaaagatatttttctattagtaccagtagccaatatgtctatttttaaaaaatgatttcagtatttcctccaagaggactagattctytcatacgtatcctcagagatccacaaaataatatgaatttggccccataattagttttgcaattttgtgcagcatctagataaaagcacatttggaaaaaaaaaaaaaaaaaggtgaagacaagtcagaaat

SEQ ID NO: 455317 - DNA, 532 bp, Homo sapiens
ttaagacaaggcaacaattccatattttatgagccaaaatattacactatcccatcaagagtcctccagattccaacctgttgttatcaccatgaccatcagtattttcaaatactactactaaataaaaaccagtcaagaggaaaggtttctaaccctctccatccaggaatatatctttgaaggtttctatcacttctaacttattttacaccatgttctgaagtaacaagctatctaaagtttaaataccagtagagtggattcccatctgtggggtcttggaccaagaagagggtacagaagtaattgattggggcaaatagaaaaggaaggaaatccttaaagcaaatatggggctgttcacagccatttcatcattttacagggatctgtttgagaataaagaargattccaaatttaaaaattttctacctatggttttagatgtcactacaattaatatcaacgttctctaaattattagaatcattcctcttcaatgatgatatttgatctagagaaagaata

SEQ ID NO: 455318 - DNA, 632 bp, Homo sapiens
gtggcacacacatttacctttttatgatgattatcttaaaggaaacctctttctacatatgtatataaaagttaaatgctaagcatattatctaaagtcagtagagacacaccagggaaggaattcctggtgtctggaatatacaaataaaaaggttttgttttcatacacttggataactctaaacttctcagaataattagtctgttagcaatgataaaacctggtataaaaagtcaaatactttttattttatcaaataaaaactatttggaattgagcttttgaaactgactcttccaactggtcttttgattgaaagctaattttttaaataatatacttcttataatgaggagaatatttttcaaacatgtttgaggaatggaacacccaagaatcttgttttttttctttccaaaacgaaactagtattgagataattggctttttttttttttaattctgggtccacaaggtaaaagactcacaaggaaaaagctactattaagaaaattaaaattttggttaactttttatttaccaaactaaaaaaaaawatatcactgtcactgaatgttaggtgggaaattttgttctgcatgtgattgtaaaagcatagctgtgattga

SEQ ID NO: 455319 - DNA, 570 bp, Homo sapiens
aaaggtagtctaaacataatcttaaaatagaatacttttatatatccttttaggataaaataaatatggatggaaattatttttgtttcctggagtcactgtttgcttaaaacttctaaatattgttatttctattaatagtagtgtttaataatattccagtgtaaactgacattcatagactttgaacatcatgaatagctaaataaatgagtgtgaagaggtttataccacagttgaggagattttaggttcactttctcttgcaaatcatgttggcggacactcaggcactctgttctgcagtagatggagaccattttacacttttcgtccagtggcctcattagattcccatttcgtccacgtggatcatttactttctccctgctttactgacaaatgccaaaaatgtgccagctctcatgatgggctttatctaagtgaactggatgaagatcattsatttatctcacacaagctactagagaaactaattaattggagattcaaatatctgacctgtatggttaatgaagaagacattgaaataatactctgaccacccat

SEQ ID NO: 455320 - DNA, 576 bp, Homo sapiens
aagactctcttatctgtcatcttccaaaatgagctgtgttttaatttatatctaaaaactttccatgcctttcttttttgtttcttaraactttacctttgattattaaactttatccatgcattacataaatgttattttcaccctttaacacagtagatttttttttaattgatagatttttggtcataagtgtagcactattgagatttttctcacatgtctgatgatgtctgtattcaggttgaaaatttgatcatagtttgtattttcccagaagagatcctatatttcttggagcataaataccaaaagagctattaaaaaaatgaagctataaatcataagtgagaccagaaaatcaatattaacagtttttagatattttctacctttctaagtatcggcatacatagttctttctgtttgtttatgtatttgtttaattacgtgggtaactgcagatctgtcatttactggtcaactagaaaattaagtatagtagaaaagtatgtgctcataaaaacgtgatggcttttaataaagctagttattaactatcaatatttatacaaa

SEQ ID NO: 455321 - DNA, 576 bp, Homo sapiens
aagactctcttatctgtcatcttccaaaatgagctgtgttttaatttatatctaaaaactttccatgcctttcttttttgtttcttagaactttacctttgattattaaactttatccatgcattacataaatgttattttcaccctttaacacagtagattttttyttaattgatagatttttggtcataagtgtagcactattgagatttttctcacatgtctgatgatgtctgtattcaggttgaaaatttgatcatagtttgtattttcccagaagagatcctatatttcttggagcataaataccaaaagagctattaaaaaaatgaagctataaatcataagtgagaccagaaaatcaatattaacagtttttagatattttctacctttctaagtatcggcatacatagttctttctgtttgtttatgtatttgtttaattacgtgggtaactgcagatctgtcatttactggtcaactagaaaattaagtatagtagaaaagtatgtgctcataaaaacgtgatggcttttaataaagctagttattaactatcaatatttatacaaa

SEQ ID NO: 455322 - DNA, 536 bp, Homo sapiens
aacttatgatgatagatctgaatttccaggtattgccaagcttgttataaactgacatcaagtgctacagctgacttactatgggtcccattaatcttagttgcaaagatgcgttaataaagttaacactcactggctcaatagcaaatggaattccctcatctcagcttacaaacagataaatcatcatctgggaggaagaattcactctgacttaaatgattattctcaaggatttgccataaacctagtacaaagaaccaaggaggacactaaatgctgcccagtaggactggggttttgcccagtacgactggggtttgagccaatcttttcttaattccctatcaacatttttaagatatgattgtgattatttaaaaacaaacaaattttttttaaaaattaaaattactttacmgcataatggtgaaatgctgatgtgatgtcttttacacaagcctggttaactatatgctaacagcattgattaagctcagggaccacgcttcctgtgtcctccagtgagatgaatt

SEQ ID NO: 455323 - DNA, 557 bp, Homo sapiens
cactgtagctcaggctccctattagtaaagtgggagaactaattttctacctatccctcaggactgatatcgagattaaatgggctaacctgtagactaaagtggtttaagagtagcacacattttaagtattttggcatagcagcacactttttgttaagtgatctttatcatcatcattattatttgttgttgtgcaaacactgctctttctgaactgcagtgcacccatctatttcaaagagataatacttcacaggattgctgtgaaaagtaaaacacatatatatattttttgtaaagcacttagcatactgttyggcacatattaaatactcaataaatggtggctattatcaatttcagtattcagaggaaaaaatctgaggcactggaaagcctagggtttttgttcaacattacattgctagttagtgtcgattctgggatgggatcctagtttttctggtgcccagcccagtgtcccagccacaccacatggtctcctatagatacctgaatccaaactaaaaaccaagggctgatgcttctttcct

SEQ ID NO: 455324 - DNA, 557 bp, Homo sapiens
cactgtagctcaggctccctattagtaaagtgggagaactaattttctacctatccctcaggactgatatcgagattaaatgggctaacctgtagactaaagtggtttaagagtagcacacattttaagtattttggcatagcagcacactttttgttaagtgatctttatcatcatcattattatttgttgttgtgcaaacactgctctttctgaactgcagtgcacccatctatttcaaagagataatacttcacaggattgctgtgaaaagtaaaacacatatatatattttttgtaaagcacttagcatactgttcggcacatattaaatactcaataaatggtggctattatcaatttcagtattcagaggaaaaaatctgaggcactggaaagcctagggtttttgttcaacattacattgctagttagtgtcgattctgggatgggatcctagtttttctggtgcccagcccagtgtcccagccacaccacatggtctcctatagatasctgaatccaaactaaaaaccaagggctgatgcttctttcct

SEQ ID NO: 455325 - DNA, 554 bp, Homo sapiens
atattctattattgctccatctcaactcctgtgcaaacctattaatacctacagatactgcacggaacatgctatgccattcacaatttagtctttcagattgaaacatgtcttaattcatctcaagaaaagactagaagaaaatggtagttgcttcttaaaattaccaaaatcatgatcatcactattaacaactgataatacgccataatgaacactctttggcactgtctatcaataaatattattttaatttaaactattcattttggacatcatctactattgtagttattataatattgtcctctgataaaaacatctgaacattttaattcatgatgatgatagttgggaggccctaaaaattggtccaacactttaaaataatgtataataaattaaacaccaaaaggcattaagcaataaaatgtccattaaagcactgtatctcagcagctggaaaacacctaggtggtatatatagcaaaatataagtatcaaatatttggtggtayatatagcaaaataaaggctaaccactaagaagaaaa

SEQ ID NO: 455326 - DNA, 595 bp, Homo sapiens
agaaaaaaaaaaagttgatggacattattggaatgacgctgaaaacaggacaaagatgagagggatgaaaggacagaaagaatgagtaagatcattctgtgaacgttagttcagcactcttacctcttattggtgtaccacctgggtggataatatgaatgcaaataagattagaaagaagaagcattagtacgagaagaaggaggctagggctggggagaagaattaaattagatttacagaattaaataaggtcttaaaagaaacttgaattactatattggtaaaacaggaatatattagatagtattattagatcataaaaaacaagttgcattataccacagagggtaaagaccgcaataggcagcattgcctttctcagagaagcaactgagttttcaggtctggggtcatatagggttagaattatatcttatatgcctcatatctcttaaaaaaaaactatacaatatttttaaagacatagtttaggaaaatactggctaatctatttaagtatatatatagatatgcatatatatatatactgtgataggaaacrctaaagactaactggaaacaaacattgttg

SEQ ID NO: 455327 - DNA, 491 bp, Homo sapiens
agggcgtggtggagaggggccacagtgggtgtttcctgaccctcttccaggaaggtgctgctgcygctgcagggaggacacatacaggatgccccttcctgccccctgcctcccattgggcccacaaaagccagggcaagcctcccctccctgccagccacctggtctgcttcccagaaattctgtcttgcaggctgttgggaggatcccagtactttgtaaactaaagcaagggaggagtggccgttctctctctttgttcattcattcaccttttcattcattccttcttccctccattcccccatctgtccatccttccctgccctgattgctcacaccaccccccagcccctcctgacctggtcctttggtttctctttagggctttctgtctcctcccacagggctgagaatggcagctcagggacaagtgggggctggggactgcttagtctccccagtggctctcaggggatttgagggtttga

SEQ ID NO: 455328 - DNA, 491 bp, Homo sapiens
agggcgtggtggagaggggccacagtgggtgtttcctgaccctcttccaggaaggtgctgctgctgctgcagggaggacacatacaggatgccccttcctgccccctgcctcccattgggcccacaaaagccagggcaagcctcccctccctgccagccacctggtctgcttcccagaaattctgtcttgcaggctgttgggaggatcccagtacttygtaaactaaagcaagggaggagtggccgttctctctctttgttcattcattcaccttttcattcattccttcttccctccattcccccatctgtccatccttccctgccctgattgctcacaccaccccccagcccctcctgacctggtcctttggtttctctttagggctttctgtctcctcccacagggctgagaatggcagctcagggacaagtgggggctggggactgcttagtctccccagtggctctcaggggatttgagggtttga

SEQ ID NO: 455329 - DNA, 491 bp, Homo sapiens
agggcgtggtggagaggggccacagtgggtgtttcctgaccctcttccaggaaggtgctgctgctgctgcagggaggacacatacaggatgccccttcctgccccctgcctcccattgggcccacaaaagccagggcaagcctcccctccctgccagccacctggtctgcttcccagaaattctgtcttgcaggctgttgggaggatcccagtactttgtaaactaaagcaagggaggagtggccgttctctctctttgttcattcattcaccttttcattcattccttcttccctccattcccccatctgtccatccttccctgccctgattgctcacaccaccccccagcccctcctgacctggtcctttggtttctcttyagggctttctgtctcctcccacagggctgagaatggcagctcagggacaagtgggggctggggactgcttagtctccccagtggctctcaggggatttgagggtttga

SEQ ID NO: 455330 - DNA, 545 bp, Homo sapiens
gtatactctttcctgcttccctctaccccacattatttcagtgcaaatcccagatatataactgtacccatacatatttcagtatgtttattttaaaccccacaagatatcattttctatactactgtaattttataccaataacattcatttagatttacccacacgtttaccctaccctccgggtcctgtttgaaaatcaarcccatgctcacaggccaattttttttcttttagagacagggtctcactttgtcacccaagctggagtgcagtggtgtgattatagctcaatgcagcctccaattcctggactcaagggaccctcctgcctcagcctgccaagtagcttggactatagctgtgtgttttattattagtttgtagacatggggtctggctatgttgtccaggctattctcaaaattcccagcctggagcaatcctcctgcctcggtctctcaaaggttgggattaccggtgtgaggcaaggcacccagctcagccacagagccctgttgcatctctcttactaggagcaagag

SEQ ID NO: 455331 - DNA, 545 bp, Homo sapiens
gtatactctttcctgcttccctctaccccacattatttcagtgcaaatcccagatatataactgtacccatacatatttcagtatgtttattttaaaccccacaagatatcattttctatactactgtaattttataccaataacattcatttagatttacccacacgtttaccctaccctccgggtcctgtttgaaaatcaaacccatgctcacaggccaattttttttcttttagagacagggtctcactttgtcacccaagctggagtgcagtggtgygattatagctcaatgcagcctccaattcctggactcaagggaccctcctgcctcagcctgccaagtagcttggactatagctgtgtgttttattattagtttgtagacatggggtctggctatgttgtccaggctattctcaaaattcccagcctggagcaatcctcctgcctcggtctctcaaaggttgggattaccggtgtgaggcaaggcacccagctcagccacagagccctgttgcatctctcttactaggagcaagag

SEQ ID NO: 455332 - DNA, 545 bp, Homo sapiens
gtatactctttcctgcttccctctaccccacattatttcagtgcaaatcccagatatataactgtacccatacatatttcagtatgtttattttaaaccccacaagatatcattttctatactactgtaattttataccaataacattcatttagatttacccacacgtttaccctaccctccgggtcctgtttgaaaatcaaacccatgctcacaggccaattttttttcttttagagacagggtctcactttgtcacccaagctggagtgcagtggtgtgattatagctcaatgcagcctccaattcctggactcaagggaccctcctgcctcagcctgccaagtagcttggactatagctgtgtgttttattattaktttgtagacatggggtctggctatgttgtccaggctattctcaaaattcccagcctggagcaatcctcctgcctcggtctctcaaaggttgggattaccggtgtgaggcaaggcacccagctcagccacagagccctgttgcatctctcttactaggagcaagag

SEQ ID NO: 455333 - DNA, 379 bp, Homo sapiens
gcaaccccgtcggcaacgccgtggacggcgtcatcgagagtgacgccctggacggcgtcgtcgttagcgacgccctggatggcgacctcgttagggatgccgtggatggcctcctcattagcgatgccctgggcagcgtccttgttcgcgaagccctgggtggcatcctctttagtgatgccatggacggggtcctcrtcagcaatgagctggactgcatcctcgtcagcgatgccctggacggcgacaccatcagcgatgccatggacgtcgtccccttcagcgatgccctgggtggcgtccccgtcagcgatgcccttgacggcgtccccatcagcgaagccgtggacggcgtccctgtcagcgaggccctggatgg

SEQ ID NO: 455334 - DNA, 479 bp, Homo sapiens
aacaagacaccaccaatcctcaagcacccaactcagcaccacccaaaagggagcacagctgcttcctcaaaatttggccataatttttccctggggaattcaggttttaaaaaaacacttcccctatacttattcctatcacaatcccaggatcagggtggctcttcacattgaaaccaggcaaggatgccacacctttcttggcatccagattgttttcttggcaagtgattccagaatacttactagattcacgcctcagaggggccacctgcaccacctgcaatacagaaacaaaacttttgaggggtatgtcatgttgtggattgtttgcacaaggctstgtttctctcaatgaatactgaaaacttgatcagaagtgtagtcaacttcaaggcctccagaccaagggtaggatacacactggaaaagacatcagcttctggatggtgtatctctcaggtccacgtaggttggca

SEQ ID NO: 455335 - DNA, 633 bp, Homo sapiens
tatctggttttggtttcaagactatactagccatttcatttaattgtacatgtagggtattctaatttatggaaaactattacatcttccttgatttttttttttttttagaaattacttctagggatctatatggtagagtccatggagaattgttttaattctwcattcatgtcttcagtgggtatacgattggtcatattggtcatagttttctgctcggatttcaataagaaacttgtggaagaacctgaagggtgggatctttgagggagcctaagacggagcaagacaagctaagaaggagggcagtgccacagcagaactgttattgatgccccctcacctagattgcagaagagacatccagctgtagacactgaggtgcaggaaaacaatggagcaccatcagagaaagcagtgcccaggaacaaggaggcactgatggtggcaaggggcaaagacagctaccacgaggctgttcacatgagggtctcaggctgcatagacacccacaccagctgaggggtcctggttttcataaagtgtgtggctcagccaggccaccaacaagaagttcacaaacagtagtaatacgacactttccaaagaccttacttgagtaacatggtg

SEQ ID NO: 455336 - DNA, 633 bp, Homo sapiens
tatctggttttggtttcaagactatactagccatttcatttaattgtacatgtagggtattctaatttatggaaaactattacatcttccttgatttttttttttttttagaaattacttctagggatctatatggtagagtccatggagaattgttttaattctacattcatgtcttcagtgggtatasgattggtcatattggtcatagttttctgctcggatttcaataagaaacttgtggaagaacctgaagggtgggatctttgagggagcctaagacggagcaagacaagctaagaaggagggcagtgccacagcagaactgttattgatgccccctcacctagattgcagaagagacatccagctgtagacactgaggtgcaggaaaacaatggagcaccatcagagaaagcagtgcccaggaacaaggaggcactgatggtggcaaggggcaaagacagctaccacgaggctgttcacatgagggtctcaggctgcatagacacccacaccagctgaggggtcctggttttcataaagtgtgtggctcagccaggccaccaacaagaagttcacaaacagtagtaatacgacactttccaaagaccttacttgagtaacatggtg

SEQ ID NO: 455337 - DNA, 530 bp, Homo sapiens
actcagggagagcccacatcctgggccatcttgggtggtggcaagatgaggtagatgactgcttttgcaacacatacctgacaacaaaaaatcaacaactgtaaaagagccacaaaatccccaaatatttgcaaattagcaatgcakttttaaataactcatgggttaaagaagaagtctcaatagaaaattaaaaatacttttaactacattaaaagaaaatgtgacttggcaagatttctggatgtagcaaaagcagtccttagagggaaatctatagcattggatgtaatatactaaaaatcacaagatctaaaatcagtaatatcatgtttcaattagggaactgtagaaaatagaggaatgcaatggaaagcaagtaaaagtaataaacaacatcacagaaatcaataaaattaaaacactgaaatcatcagaaaatcaataaaaccaaaagctggttctttgatatgctcattacaatgaatgaattgatatgcaggctaaccaagaaaaagaagataacacaa

SEQ ID NO: 455338 - DNA, 415 bp, Homo sapiens
gctgacccccacgcttgtacccacctgctaacacagaaagggtccactcagaagggaggcacagctccagcactgaggctgtccacaccagcttcacaagagggttgccacaaggacgacrgatacccggataacaaccaaatggtaatttgagtacttaatggtcatgatccctaatgtgtgtagctcagagggcttgtggtgataactccatcaagactctaaagcgtctccccaattcttactggacttgatccatgtcttgaggagacccagctatgacacgcaggcaccacgttgtcctacttagtgcctcccttagtgtttcagaacctgtgatttgatcagaaacatgggctttctatgttggtttcacacaaaggactatgtgacacctgcaggaaggtgtctacat

SEQ ID NO: 455339 - DNA, 415 bp, Homo sapiens
gctgacccccacgcttgtacccacctgctaacacagaaagggtccactcagaagggaggcacagctccagcactgaggctgtccacaccagcttcacaagagggttgccacaaggacgacagatacccggataacaaccaaatggtaatttgagtacttaatggtcatgatccctaatgtgtgtagctcagagggcttgtggtgataactccatcaagactctaaagcrtctccccaattcttactggacttgatccatgtcttgaggagacccagctatgacacgcaggcaccacgttgtcctacttagtgcctcccttagtgtttcagaacctgtgatttgatcagaaacatgggctttctatgttggtttcacacaaaggactatgtgacacctgcaggaaggtgtctacat

SEQ ID NO: 455340 - DNA, 485 bp, Homo sapiens
caaaaaaaattaatgtaaagcatgagttcttagggacattttatgatcttagaggatttctatttagactatgaagctaggaattctgaagttcacattcacycctctgtttattctcccctctctcaagggtataagttagcagaatatttgggaatctccaaatccctaacaaacaactgaaggaagccacaccatgtaatattaagattgcggaacttcttaaagatctcaaaagactaggatcctcagacagaaccaatcaagtgcccacattataatgaaacagcaagtaatgagggtacagaataaaaattcagatcatgaggtacatgaaagcctaaaagctaccagagaagaaaataaaagagttaaattcaaaggaacacccatcagaatggcacaaaacttcccaactccagatgctagaagagtataagtttccaattctacaggaaaatacttttcaaagtacaattctcaac

SEQ ID NO: 455341 - DNA, 485 bp, Homo sapiens
caaaaaaaattaatgtaaagcatgagttcttagggacattttatgatcttagaggatttctatttagactatgaagctaggaattctgaagttcacattcacccctctgtttattctcccctctctcaagggtataagttagcagaatatttgggaatctccaaatccctaacaaacwactgaaggaagccacaccatgtaatattaagattgcggaacttcttaaagatctcaaaagactaggatcctcagacagaaccaatcaagtgcccacattataatgaaacagcaagtaatgagggtacagaataaaaattcagatcatgaggtacatgaaagcctaaaagctaccagagaagaaaataaaagagttaaattcaaaggaacacccatcagaatggcacaaaacttcccaactccagatgctagaagagtataagtttccaattctacaggaaaatacttttcaaagtacaattctcaac

SEQ ID NO: 455342 - DNA, 485 bp, Homo sapiens
caaaaaaaattaatgtaaagcatgagttcttagggacattttatgatcttagaggatttctatttagactatgaagctaggaattctgaagttcacattcacccctctgtttattctcccctctctcaagggtataagttagcagaatatttgggaatctccaaatccctaacaaacamctgaaggaagccacaccatgtaatattaagattgcggaacttcttaaagatctcaaaagactaggatcctcagacagaaccaatcaagtgcccacattataatgaaacagcaagtaatgagggtacagaataaaaattcagatcatgaggtacatgaaagcctaaaagctaccagagaagaaaataaaagagttaaattcaaaggaacacccatcagaatggcacaaaacttcccaactccagatgctagaagagtataagtttccaattctacaggaaaatacttttcaaagtacaattctcaac

SEQ ID NO: 455343 - DNA, 495 bp, Homo sapiens
aaggtgcattattaacatcaataaagctcaggaaccagcttccaccatatttgtgtttaatttacagtttttctcagagtctttggaatagattcctccctccatgagccagagaacttacaatgttcactgcagtgtctttaaatgtagcagtagcagctgtgggttgagaacacaagtcttccacttttccttttagagccagccattcacggtgctctgtgttcttattcagcattgggtaggggcatctgggtgctgggcatagcaccagtgccccatggaggagggaggcaggaagcccctttcttccttctctaaaaccttttttctttatgtagwtccaagtttttagcctatatcattttcttctctctggataacttcttttaacattttgacagatctactgacagcaaatttgtgtttctctgagaaagtctttttcttcactttggaaagataattttgcagaatacagaattttaggttggt

SEQ ID NO: 455344 - DNA, 621 bp, Homo sapiens
acattggtccagatacaatttgattatgtaaagtcgtgaataccttctatccttaatattatgtgcatctgtycatgagcccattgaacaagtatcagctgactaacatctattatataacatgtcattgtatgcatacgattactcctcttcagtggattccctctaataagaatttacttgggctacaagtattttcatacttcgtgtctattttaagaagtcatcttcggctgggcttggtggctcacacctgtaatcccagcactttggaaggccaaggtgggcggatcacgaggtcaggagatcaagaacatcgtggctaatacagtgaaatccagtctcgcctaaaaaaataaaaaattagctgggcctggtggtgggcacctgtagtcccagctactcaggaggctgaggcaggagaatggcgtgaacccagaaggtagagcttgcgagcttgcagtgaactgagatcgcgccactgcactccagcctgggcgacagagtgagactctgtcttgaaaaaaaaaaaaatccaactattcaaaagtaaagaaaaaaatatgtcaatccaccatgtgtccactgcacaccatcacaaattttaaaccatgcatgagc

SEQ ID NO: 455345 - DNA, 572 bp, Homo sapiens
aacagtatttacaatactatacattttattcatattttagagtgtagtacttctactcatgaaaaataattaactataaaacagcgtcgggaaggtctttcaggagttcttccagaagaaagccttgttatcatagaagatgacagctgcatatatgttattgcccttgaagtccctgaagacctttcactgggacaagatttggaratggaagacagtgatattgattatcctgacccttacagggctaagctagtgtgtgtgtttgtatcttagtttttaacaaaaaagtttaaaacataaaaaataaaaataaataaagcttatcgaatagggatataaagtatttctgtacagctgttcaatgtgtttttgttttaagatgtgttataagaatcaaaaagttaaaaaaattaaaagtttataaagttatgataagctaagatgaacttgttaaagaaagaaaaattttaaatacatttagtgtagcctaagtgtacagtgcatataaagtctatagttatgtacagtaatatcctaggcctttgcattcactcaccaagtactcactg

SEQ ID NO: 455346 - DNA, 572 bp, Homo sapiens
aacagtatttacaatactatacattttattcatattttagagtgtagtacttctactcatgaaaaataattaactataaaacagcgtcgggaaggtctttcaggagttcttccagaagaaagccttgttatcatagaagatgacagctgcatatatgttattgcccttgaagtccctgaagacctttcactgggacaagatttggaaatggaagacagtgatattgwttatcctgacccttacagggctaagctagtgtgtgtgtttgtatcttagtttttaacaaaaaagtttaaaacataaaaaataaaaataaataaagcttatcgaatagggatataaagtatttctgtacagctgttcaatgtgtttttgttttaagatgtgttataagaatcaaaaagttaaaaaaattaaaagtttataaagttatgataagctaagatgaacttgttaaagaaagaaaaattttaaatacatttagtgtagcctaagtgtacagtgcatataaagtctatagttatgtacagtaatatcctaggcctttgcattcactcaccaagtactcactg

SEQ ID NO: 455347 - DNA, 572 bp, Homo sapiens
aacagtatttacaatactatacattttattcatattttagagtgtagtacttctactcatgaaaaataattaactataaaacagcgtcgggaaggtctttcaggagttcttccagaagaaagccttgttatcatagaagatgacagctgcatatatgttattgcccttgaagtccctgaagacctttcactgggacaagatttggaaatggaagacagtgatattgattatcctgacccttacagggctaagctagtgtgtgtgtttgtatcttagtttttaacaaaaaagtttaaaacataaaaaataaaaataaataaagcttatcgaatagggatataaagtatttctgtacagctgttcaatgtgtttttgttttaagatgtgttataagaatcaaaaagttaaaaaaattaaaagtttataaagttatgrtaagctaagatgaacttgttaaagaaagaaaaattttaaatacatttagtgtagcctaagtgtacagtgcatataaagtctatagttatgtacagtaatatcctaggcctttgcattcactcaccaagtactcactg

SEQ ID NO: 455348 - DNA, 621 bp, Homo sapiens
aagatgaacttgttaaagaaagaaaaattttaaatacatttagtgtagcctaagtgtacagtgcatataaagtctatagttatgtacagtaatatcctaggcctttgcattcactcaccaagtactcactgactcatcagagcaactgccagtcctgcaacctctgttcatgctaggtgtcctatactggtgtaccactctctttaacttttgtaatatatatatatttttttctttctttctttttttttgagaaggagttttattttgttgcccaggctggagtgcaatggcacgatcttggctcactgcaacctctgcctctggggttcaagtgattctcctgcctcagcctaatgagyagctgggattacaggcccatgccagcacacccagctaattttgtatttttagtacagatggcgtttctccatgttggtcaggctggtctcgaacttctgacctcaggtgatccgcccgcctcggtctcccaatgtactatgtttttactgtatcttttccatgtttagatattactattgtgatataactgcctacagcagtggtccccaaagttttgacaccaaggactggttttgtgaaagataatttttccatgga

SEQ ID NO: 455349 - DNA, 621 bp, Homo sapiens
aagatgaacttgttaaagaaagaaaaattttaaatacatttagtgtagcctaagtgtacagtgcatataaagtctatagttatgtacagtaatatcctaggcctttgcattcactcaccaagtactcactgactcatcagagcaactgccagtcctgcaacctctgttcatgctaggtgtcctatactggtgtaccactctctttaacttttgtaatatatatatatttttttctttctttctttttttttgagaaggagttttattttgttgcccaggctggagtgcaatggcacgatcttggctcactgcaacctctgcctctggggttcaagtgattctcctgcctcagcctaatgagtagctgggattacaggcccatgccagcacacccagctaattttgtatttttagtacagatggmgtttctccatgttggtcaggctggtctcgaacttctgacctcaggtgatccgcccgcctcggtctcccaatgtactatgtttttactgtatcttttccatgtttagatattactattgtgatataactgcctacagcagtggtccccaaagttttgacaccaaggactggttttgtgaaagataatttttccatgga

SEQ ID NO: 455350 - DNA, 621 bp, Homo sapiens
aagatgaacttgttaaagaaagaaaaattttaaatacatttagtgtagcctaagtgtacagtgcatataaagtctatagttatgtacagtaatatcctaggcctttgcattcactcaccaagtactcactgactcatcagagcaactgccagtcctgcaacctctgttcatgctaggtgtcctatactggtgtaccactctctttaacttttgtaatatatatatatttttttctttctttctttttttttgagaaggagttttattttgttgcccaggctggagtgcaatggcacgatcttggctcactgcaacctctgcctctggggttcaagtgattctcctgcctcagcctaatgagtagctgggattacaggcccatgccagcacacccagctaattttgtatttttagtacagatggcgtttctccatgttggtcaggctggtctcgaacttctgacctcaggtgatccgccygcctcggtctcccaatgtactatgtttttactgtatcttttccatgtttagatattactattgtgatataactgcctacagcagtggtccccaaagttttgacaccaaggactggttttgtgaaagataatttttccatgga

SEQ ID NO: 455351 - DNA, 621 bp, Homo sapiens
aagatgaacttgttaaagaaagaaaaattttaaatacatttagtgtagcctaagtgtacagtgcatataaagtctatagttatgtacagtaatatcctaggcctttgcattcactcaccaagtactcactgactcatcagagcaactgccagtcctgcaacctctgttcatgctaggtgtcctatactggtgtaccactctctttaacttttgtaatatatatatatttttttctttctttctttttttttgagaaggagttttattttgttgcccaggctggagtgcaatggcacgatcttggctcactgcaacctctgcctctggggttcaagtgattctcctgcctcagcctaatgagtagctgggattacaggcccatgccagcacacccagctaattttgtatttttagtacagatggcgtttctccatgttggtcaggctggtctcgaacttctgacctcaggtgatccgcccgcctcggtctcccaatgtactatgtttttactgtatcttttccatgtttagatattactattgtgatataactgcctacagcagtggtccccaamgttttgacaccaaggactggttttgtgaaagataatttttccatgga

SEQ ID NO: 455352 - DNA, 592 bp, Homo sapiens
tgaacagggggtagaattcagtagtgatcccagaaaggccaagtcttaagtatagggttaaactaatgctaggactgcagctaccaaaatgtggactagggaaccccagtgggtctgtaaagttaaaacaagtttaaataatactaagatttaatttgccttttttcactttaatttattcacaatgatacagtggtgtttatagaagctacatgttgtatcataatattacattgacattgtacaggttgtgcttctgtagtcttgtgttacaaaatgttcctagttttaatttctaaaatgctgaatagtccatagttaaaatcctcatgaacaaaaactatggcgtccccagtaattttaaagagtgttaaggttctaaaaccataaagtttgaaaatatccaccttagagtgaaggctttctagacttgccccagcaagcttaaaaagaagcttcaaaggtatcaaacttatccacaaacaattgcctcctgcaataaaaatgcaagctgagccaattcacatatccctagtatatttctagataytgctgtatttctcaatgagactgcagtattctatactgtcca

SEQ ID NO: 455353 - DNA, 364 bp, Homo sapiens
ttttaaaaacaggaataactagrtgtctgatagtgcactaattgtccaatcttaacttatgtaagtcgtactcatctgtaaaatgggaattcggtaattgttggatgggttaaaagaaatacattactaccttgaaagggatcttattcaatttccttaggtccaaaacattaagtattctaaaaaacaaaatctaatgatagcagctacttttatacagaatataaagtacaaagaagaaaagaaacatgttttatgcatatataactccatttttaattggctttatatactctgtgtttttcagtcacataccatgagcaactaattttaaaaaactacataaattaaccgtactagtctt

SEQ ID NO: 455354 - DNA, 364 bp, Homo sapiens
ttttaaaaacaggaataactagatgtctgatagtgcactaattgtccaatcttaacttatgtaagtcgtactcatctgtaaaatgggaattcggtaattgttggatgggttaaaagaaatacattactaycttgaaagggatcttattcaatttccttaggtccaaaacattaagtattctaaaaaacaaaatctaatgatagcagctacttttatacagaatataaagtacaaagaagaaaagaaacatgttttatgcatatataactccatttttaattggctttatatactctgtgtttttcagtcacataccatgagcaactaattttaaaaaactacataaattaaccgtactagtctt

SEQ ID NO: 455355 - DNA, 364 bp, Homo sapiens
ttttaaaaacaggaataactagatgtctgatagtgcactaattgtccaatcttaacttatgtaagtcgtactcatctgtaaaatgggaattcggtaattgttggatgggttaaaagaaatacattactaccttgaaagggatcttattcaatttccttaggtccaaaacattaagyattctaaaaaacaaaatctaatgatagcagctacttttatacagaatataaagtacaaagaagaaaagaaacatgttttatgcatatataactccatttttaattggctttatatactctgtgtttttcagtcacataccatgagcaactaattttaaaaaactacataaattaaccgtactagtctt

SEQ ID NO: 455356 - DNA, 364 bp, Homo sapiens
ttttaaaaacaggaataactagatgtctgatagtgcactaattgtccaatcttaacttatgtaagtcgtactcatctgtaaaatgggaattcggtaattgttggatgggttaaaagaaatacattactaccttgaaagggatcttattcaatttccttaggtccaaaacattaagtattctaaaaaacaaaatctaatgatagcagctacttttatacagaatataaagtacaaagaagaaaagaaacatgttttatgcatatataactccatttttaattggctttatatactctgtgtttttcagtcacatascatgagcaactaattttaaaaaactacataaattaaccgtactagtctt

SEQ ID NO: 455357 - DNA, 413 bp, Homo sapiens
tgtgatttatccagaaggtgatagaaatttcattttcctagacagaccacagatataagccaaggagaatagaaagctctgacctaaacttcacaagtgtcccttccaarcagggacacgtaagagtaaacaaaaaaagaagatcaaattaaactcaaagtgagaagataggaaaaaataaagatgagaatataaatcaataaaacagaaagaggaaagaaaatagagaaaagtccatgaaaacaaaggctgactcaagaagatcaataagactgataaatctctagccagactgatcaggaaaaaaataagacaagatacaaattattagtatcaagaatgaggaaggtgaaatcactacagattctacaggtattaaaataataagaaacattatgatcaactccattcct

SEQ ID NO: 455358 - DNA, 377 bp, Homo sapiens
aagctctgacctaaacttcacaagtgtcccttccaaacagggacacgtaagagtaaacaaaaaaagaagatcaaattaaactcaaagtgagaagataggaaaaaataaagatgagaatataaatcaataaaacagaaagrggaaagaaaatagagaaaagtccatgaaaacaaaggctgactcaagaagatcaataagactgataaatctctagccagactgatcaggaaaaaaataagacaagatacaaattattagtatcaagaatgaggaaggtgaaatcactacagattctacaggtattaaaataataagaaacattatgatcaactccattcctttaatttgtcaagatagacaaaatgaacaaatttctt

SEQ ID NO: 455359 - DNA, 413 bp, Homo sapiens
tgtgatttatccagaaggtgatagaaatttcattttcctagacagaccacagatataagccaaggagaatagaaagctctgacctaaacttcacaagtgtcccttccaaacagggacacgtaagagtaaacaaaaaaagaagatcaaattaaactcaaagtgagaagataggaaaaaataaagatgagaatataaatcaataaaacagaaagaggaaagaaaatagagaaaagtccatgaaaacaaaggctgactcaagaagatcaataagaytgataaatctctagccagactgatcaggaaaaaaataagacaagatacaaattattagtatcaagaatgaggaaggtgaaatcactacagattctacaggtattaaaataataagaaacattatgatcaactccattcct

SEQ ID NO: 455360 - DNA, 500 bp, Homo sapiens
cacctgtggatatttcactgccttcctcgctaatctttcttcatctcctgtacgtgttcttcctctatttgacttccaaagccctggagtttcccagggcttgagcctagatcctaaatggtgttatctacaatgagggcatcttggaagttgatgcttcccacattcttatttctagttttaatcaaagatctccaaattagcaggattttcaacttccttcttagcatttccattttctcacayaaaacccctcttaattttgccatgtttaaaatttctcccttaaccggtttcatcccagtcttccccatccttataaatggcatccagtcccttgtcactctcctctgctccttcagtcctctcccccaacacttcgtcaatgcaaatcatcagcaaattcaagactttttatcttcaagttttgtctccgatccttctacttcttgtcacttccaccactagcagcacactcgtggccaccaccatctctcacc

SEQ ID NO: 455361 - DNA, 466 bp, Homo sapiens
caggattttcaacttccttcttagcatttccattttctcacacaaaacccctcttaaktttgccatgtttaaaatttctcccttaaccggtttcatcccagtcttccccatccttataaatggcatccagtcccttgtcactctcctctgctccttcagtcctctcccccaacacttcgtcaatgcaaatcatcagcaaattcaagactttttatcttcaagttttgtctccgatccttctacttcttgtcacttccaccactagcagcacactcgtggccaccaccatctctcacctaacctgctacaagagtctactgctggttatgcttctctcaccctgcatctactcaagcctttccccacagcagccagaggaacttttcaaaagtacaaatgtgatcaagcaagtcactattctatttcaaaccttcaattgcttctcagagcacttaaaatacaaacc

SEQ ID NO: 455362 - DNA, 500 bp, Homo sapiens
cacctgtggatatttcactgccttcctcgctaatctttcttcatctcctgtacgtgttcttcctctatttgacttccaaagccctggagtttcccagggcttgagcctagatcctaaatggtgttatctacaatgagggcatcttggaagttgatgcttcccacattcttatttctagttttaatcaaagatctccaaattagcaggattttcaacttccttcttagcatttccattttctcacacaaaacccctcttaattttgccatgtttaaaatttctcccttaaccggtttcatcccagtcttccccatccttataaatggcatccagtcccttgtcactctcctctgctccttcagtcctctcccccaacacytcgtcaatgcaaatcatcagcaaattcaagactttttatcttcaagttttgtctccgatccttctacttcttgtcacttccaccactagcagcacactcgtggccaccaccatctctcacc

SEQ ID NO: 455363 - DNA, 500 bp, Homo sapiens
cacctgtggatatttcactgccttcctcgctaatctttcttcatctcctgtacgtgttcttcctctatttgacttccaaagccctggagtttcccagggcttgagcctagatcctaaatggtgttatctacaatgagggcatcttggaagttgatgcttcccacattcttatttctagttttaatcaaagatctccaaattagcaggattttcaacttccttcttagcatttccattttctcacacaaaacccctcttaattttgccatgtttaaaatttctcccttaaccggtttcatcccagtcttccccatccttataaatggcatccagtcccttgtcactctcctctgctccttcagtcctctcccccaacacttcgtcaatgcaaatcatcagcaaattcaagactttttatcttcaagttttgtctccgatccttctrcttcttgtcacttccaccactagcagcacactcgtggccaccaccatctctcacc

SEQ ID NO: 455364 - DNA, 466 bp, Homo sapiens
caggattttcaacttccttcttagcatttccattttctcacacaaaacccctcttaattttgccatgtttaaaatttctcccttaaccggtttcatcccagtcttccccatccttataaatggcatccagtcccttgtcactctcctctgctccttcagtcctctcccccaacacttcgtcaatgcaaatcatcagcaaattcaagactttttatcttcaagttttgtctccgatccttctacttcttgtcacttccaccactagcagcacactcgtggccaccaccatctctcacctaacctgctacaagagtctactgctggttatgcttctcycaccctgcatctactcaagcctttccccacagcagccagaggaacttttcaaaagtacaaatgtgatcaagcaagtcactattctatttcaaaccttcaattgcttctcagagcacttaaaatacaaacc

SEQ ID NO: 455365 - DNA, 524 bp, Homo sapiens
taaaatcagcatctgagagagacatctgcactcccacgttcatggcggcattactcccaatagccaagatatggaaacaaactaagtgtcctaatggacaatttacttacccattcaaggacagatgaatggataaagaaattgtgacgtgtgtatayacatatattaagtcctcccttaatgtcatcaataggttcttgggaactgagacgttaagctaaatgaacatacagcaggtcctcaagtaacactgtttccttcaatctaattttggcataatgcaaaatgaaaaaaaaatcagttttgtcatacttttttttcgcctcttaaccacagtttctaagaacttactgatgacaatgaggactttatacaatgggatagttagctttaagaaaggagatactgccatttgtgacaacatggatgaactgggaggaaagtatgctaaataaagtaagccagacacagaaaaatactgtatgatctcacttaagaagcagaatgggaggcagcggggtgag

SEQ ID NO: 455366 - DNA, 471 bp, Homo sapiens
gctccgcttcctgttcgccagctatgggagcaaagtcttcctgaaggaggaggcagctttgacttcatcagcggcttccactcctagggatgccaggmgccccagaagacgtcacgttgacaccagcagcctctatgcgcttcgggtagccctgccccacctgccctggccctgtgcccttggcgctggactgacctcggcagccgcgatcttggtcaggaccagcgggcacagccctgggggctcgggacccactgcagcctgtgaaggccccatggctctgcacacagagaggcggagcagcagactttgggacttggcccttcacaaccaggacttcagagaggaatggggcgggtaagggaggggccacggagtccgcattttaaaaaatttcagacttagtgtgagctggagcttttctcccttctccagcctcttcctttcacccttcacccagcatcccgcccc

SEQ ID NO: 455367 - DNA, 471 bp, Homo sapiens
gctccgcttcctgttcgccagctatgggagcaaagtcttcctgaaggaggaggcagctttgacttcatcagcggcttccactcctagggatgccaggagccccagaagacgtcacgttgacaccagcagcctctatgcgcttcgggtagccctgccccrcctgccctggccctgtgcccttggcgctggactgacctcggcagccgcgatcttggtcaggaccagcgggcacagccctgggggctcgggacccactgcagcctgtgaaggccccatggctctgcacacagagaggcggagcagcagactttgggacttggcccttcacaaccaggacttcagagaggaatggggcgggtaagggaggggccacggagtccgcattttaaaaaatttcagacttagtgtgagctggagcttttctcccttctccagcctcttcctttcacccttcacccagcatcccgcccc

SEQ ID NO: 455368 - DNA, 471 bp, Homo sapiens
gctccgcttcctgttcgccagctatgggagcaaagtcttcctgaaggaggaggcagctttgacttcatcagcggcttccactcctagggatgccaggagccccagaagacgtcacgttgacaccagcagcctctatgcgcttcgggtagccctgccccacctgccctggccctgtgcccttggcgctggactgacctcggcagccgcgatcttggtcaggaccagcgggcacagccctgggggctcgggacccactgcagcctgtgaaggccccatggctctgcacacagagaggcggagcagcagactttgggacttggcccytcacaaccaggacttcagagaggaatggggcgggtaagggaggggccacggagtccgcattttaaaaaatttcagacttagtgtgagctggagcttttctcccttctccagcctcttcctttcacccttcacccagcatcccgcccc

SEQ ID NO: 455369 - DNA, 417 bp, Homo sapiens
actacattcacacatcaccgcttgccaagacctctcctcaaccaccatcttatcaaaggtgacaagagtcacctttgctccagttcccagcaagttcctcatctccatcagagactgcctcagcatggatttcattgtccatatcattatcagcattttggtcaaagccattcaacaagtctcttggaatttcaaactttcccacagtttcctgtcttctgagacctgcaaattgttcaacctctgccagttacccagctccaaagtagctgggattacaggcayacaccatgacacccagctgatttttgtatttttagtttcatcatgttggccaggctggtcttgaactctcgacctcaggtgatcctccccccttggcctctcaaagtgctgggatcacaggtgtgagccact

SEQ ID NO: 455370 - DNA, 417 bp, Homo sapiens
actacattcacacatcaccgcttgccaagacctctcctcaaccaccatcttatcaaaggtgacaagagtcacctttgctccagttcccagcaagttcctcatctccatcagagactgcctcagcatggatttcattgtccatatcattatcagcattttggtcaaagccattcaacaagtctcttggaatttcaaactttcccacagtttcctgtcttctgagacctgcaaattgttcaacctctgccagttacccagctccaaagtagctgggattacaggcatacaccaygacacccagctgatttttgtatttttagtttcatcatgttggccaggctggtcttgaactctcgacctcaggtgatcctccccccttggcctctcaaagtgctgggatcacaggtgtgagccact

SEQ ID NO: 455371 - DNA, 417 bp, Homo sapiens
actacattcacacatcaccgcttgccaagacctctcctcaaccaccatcttatcaaaggtgacaagagtcacctttgctccagttcccagcaagttcctcatctccatcagagactgcctcagcatggatttcattgtccatatcattatcagcattttggtcaaagccattcaacaagtctcttggaatttcaaactttcccacagtttcctgtcttctgagacctgcaaattgttcaacctctgccagttacccagctccaaagtagctgggattacaggcatacaccatsacacccagctgatttttgtatttttagtttcatcatgttggccaggctggtcttgaactctcgacctcaggtgatcctccccccttggcctctcaaagtgctgggatcacaggtgtgagccact

SEQ ID NO: 455372 - DNA, 417 bp, Homo sapiens
actacattcacacatcaccgcttgccaagacctctcctcaaccaccatcttatcaaaggtgacaagagtcacctttgctccagttcccagcaagttcctcatctccatcagagactgcctcagcatggatttcattgtccatatcattatcagcattttggtcaaagccattcaacaagtctcttggaatttcaaactttcccacagtttcctgtcttctgagacctgcaaattgttcaacctctgccagttacccagctccaaagtagctgggattacaggcatacaccatgacacccrgctgatttttgtatttttagtttcatcatgttggccaggctggtcttgaactctcgacctcaggtgatcctccccccttggcctctcaaagtgctgggatcacaggtgtgagccact

SEQ ID NO: 455373 - DNA, 486 bp, Homo sapiens
tagaccacaccttgacagttctggcctttgagtctttcacaactgtgattataatacattagctcttctagaagttagaagtgactttggattaagtctttcataaggtggctaaatgaatttatatggctcatcacaattcacttgattggttaagcaggaagtttacagagatttttttctttgctgtaaatgtttttctaaattgaaaaacttctattactgtcttctggagtactagaaataagtgcaagtgattgtttttggcaggaggccacataaacatttctgcttctctgtgccttatgggtagcattgatataaattgttaaaaataatgattgtagatagataatgtatcagartttgggctcagccgtggtagctgctgttgacccagagggaccactgggatcctcacatctcagggcagcacatcgttggcagcaatggttggttctacgcaaacttttatgaaattaggtg

SEQ ID NO: 455374 - DNA, 488 bp, Homo sapiens
ataatacattagctcttctagaagttagaagtgactttggattaagtctttcataaggtggctaaatgaatttatatggctcatcacaattcacttgattggttaagcaggaagtttacagagatttttttctttgctgtaaatgtttttctaaattgaaaaacttctattactgtcttctggagtactagaaataagtgcaagtgattgtttttggcaggaggccacataaacatttctgcttctctgtgccttatgggtagcattgatataaattgttaaaaataatgattgtagatagataatgtatcagagtttgggctcagccgtggtagctgctgttgacccagagggaccactgggatcctcacatctcagggcagcacatcgttkgcagcaatggttggttctacgcaaacttttatgaaattaggtgaggcccttgcttagaattttttaaaagcttaatatgagtttatatctcttta

SEQ ID NO: 455375 - DNA, 462 bp, Homo sapiens
tgtttttcctttttctttctttgaatttaacttgttctttgtctgatttattgactgatgcttagttttttttttktttttttttttttttgagacgtagtctcactctttcaccaggctggagtgcagtggcacaatcttggctcactgcaacctccagctcccgggttcaagcgattctcctgcctcagcctcccgagtagctgggactacaggtgtgcgccaccacacccagctaatttttgtatttttagtagagctggggattcaccatgttggccagcacaaagtgctgggattacaggcatgagccactgtgcctggccagtgcaagtgtctttagccagcttcatttactccctaactccttacctcaggttctgcatccgtaaaatgaggtcactaggagtatttacctcagagggctgttgcaaggttaaagctggttatacaagcagagta

SEQ ID NO: 455376 - DNA, 398 bp, Homo sapiens
tgttttgtttggttgtttttgtaggtgtaggatttttttttttttaaacataattttcctgcatatgcagttttgcatttttaacccaaacttaatgttctttttaatgttcttgtacttacaaagatttatcctgtttttagattgatatctcaccttggcagaaatgagataaaattttaaaatattcatttggtggctttcacagtattatttgatctctagggtctcctgtgagtttgctacatggtrcattgtattactttcatcttatagatgaagaaagatactagtgtggctgagtcgcatgcagaatttggaggagcatggtgctgaatgagctttgatgattgtaggggccacaactggaaaagtagatgtaaaatggtgaggtcgat

SEQ ID NO: 455377 - DNA, 398 bp, Homo sapiens
tgttttgtttggttgtttttgtaggtgtaggatttttttttttttaaacataattttcctgcatatgcagttttgcatttttaacccaaacttaatgttctttttaatgttcttgtacttacaaagatttatcctgtttttagattgatatctcaccttggcagaaatgagataaaattttaaaatattcatttggtggctttcacagtattatttgatctctagggtctcctgtgagtttgctacatggtgcattgtattactttcatcttatagatgaagaaagatactagtgtggctgagtcgcatgcagaatttggaggagcatggtgctgaatgagytttgatgattgtaggggccacaactggaaaagtagatgtaaaatggtgaggtcgat

SEQ ID NO: 455378 - DNA, 503 bp, Homo sapiens
caaaatatatatatacacacacacacaaaatatatatatatatacacacacatttccttgtacatgcataaaatacatctggaaggttacacgaraaacctctgaggtttctggagatgtaaactgggggcatgaaggcaggggaaagggagagacttcactgtttacctttttattattttccaattttaaatcatttgaatgtataacttgtctaaaaatcaaattttaaaagttgagggaattaacattacagaaagtaacaaacctcaaggaagcagccaccttcaccagatggacagtctacctcactcttcccacgctccagtagttactgaatgccagtcccctccctccattcagtctgccccacctgctggccttctagagcctcagtgcagtcctattcctacacctccaaacacatccatacactgtgatggtcgatctgcgaccaccagttgagaggaaatgtgttgtgtttccacacttcagacaaacag

SEQ ID NO: 455379 - DNA, 318 bp, Homo sapiens
gaataagtaacaaaagcacatcttggcatgatcaaattcccatatatgcaaattagggacagtgttttaccacagagtgttttaattaatatttataaatcacagagtgcctttgaaagggccagtaagctgtttatattattatcatgtcacacaartaacaaaccctttggagattgctgcctactttgcattttggtctgagaagtaagtgagcatgttgcctgtgtttctctccctcgtaggtgtggtgtcagcacagcggcaggtcaccgttcaggaaggacccttgtaccgcacagagggctcccacatcac

SEQ ID NO: 455380 - DNA, 318 bp, Homo sapiens
gaataagtaacaaaagcacatcttggcatgatcaaattcccatatatgcaaattagggacagtgttttaccacagagtgttttaattaatatttataaatcacagagtgcctttgaaagggccagtaagctgtttatattattatcatgtcacacaagtaacaaaccctttggagattgctgcctactttgcattttggtctgagaagtaagtgagcatgttgcstgtgtttctctccctcgtaggtgtggtgtcagcacagcggcaggtcaccgttcaggaaggacccttgtaccgcacagagggctcccacatcac

SEQ ID NO: 455381 - DNA, 503 bp, Homo sapiens
caaaatatatatatacacacacacacaaaatatatatatatatacacacacatttccttgtacatgcataaaatacatctggaaggttacacgaaaaacctctgaggtttctggagatgtaaactgggggcatgaaggcaggggaaagggagagacttcactgtttacctttttattattttccaattttaaatcatttgaatgtataacttgtctaaaaatcaaattttaaaagttgagggaattaacattacagaaagtaacaaacctcaaggaagcagccaccttcaccagatggacagtctacctcactcttcccacgctccagtagttactgaatgccagtcccctccctccattcagtctgccccacctgctggccttctagagcctcagtgcagtcctattcctacacctccaaacacatccatacactgtgatggtcgatctgsgaccaccagttgagaggaaatgtgttgtgtttccacacttcagacaaacag

SEQ ID NO: 455382 - DNA, 573 bp, Homo sapiens
ctgtgctgtttaggttcagtagttgcatctccaactctacccttctcagtttatttcagtaaacatgtagccagtctccacagcattgaaggtgtgatggtgataggcattaagggcttcaaagatgactagcactggtccctgcacttaggcagacctgagaaccaatggacaagtaaaatgtgctaagtgcattgatagcatttgtatagagtcctctgggaataccggaaataggaagtgttcttgcaaccatagttttctctgaatgggatggttgataagacaaatccaggaacaccaataagtttcttgacttgaactgagtctggaagcttgaggagtcaggagaagaagcataaaagtgcaaaagtgtttgatatgtttggcaagcagaaaggagtcaagtatgactagttccagatgttsagttccagatgtgtgtgatgagaggaaagggagcccgaagccccaaatgcagtgatatagagccagggcttgactctgtgggccaagagtttttaagctgttcttggaaccctggaagcccctcaaaggtgcctaggaggttag

SEQ ID NO: 455383 - DNA, 573 bp, Homo sapiens
ctgtgctgtttaggttcagtagttgcatctccaactctacccttctcagtttatttcagtaaacatgtagccagtctccacagcattgaaggtgtgatggtgataggcattaagggcttcaaagatgactagcactggtccctgcacttaggcagacctgagaaccaatggacaagtaaaatgtgctaagtgcattgatagcatttgtatagagtcctctgggaataccggaaataggaagtgttcttgcaaccatagttttctctgaatgggatggttgataagacaaatccaggaacaccaataagtttcttgacttgaactgagtctggaagcttgaggagtcaggagaagaagcataaaagtgcaaaagtgtttgatatgtttggcaagcagaaaggagtcaagtatgactagttccagatgttcagttccagatgtgtgtgatgagaggaaagggagcccgaagccccaaatgcagtgatatagagccrgggcttgactctgtgggccaagagtttttaagctgttcttggaaccctggaagcccctcaaaggtgcctaggaggttag

SEQ ID NO: 455384 - DNA, 573 bp, Homo sapiens
ctgtgctgtttaggttcagtagttgcatctccaactctacccttctcagtttatttcagtaaacatgtagccagtctccacagcattgaaggtgtgatggtgataggcattaagggcttcaaagatgactagcactggtccctgcacttaggcagacctgagaaccaatggacaagtaaaatgtgctaagtgcattgatagcatttgtatagagtcctctgggaataccggaaataggaagtgttcttgcaaccatagttttctctgaatgggatggttgataagacaaatccaggaacaccaataagtttcttgacttgaactgagtctggaagcttgaggagtcaggagaagaagcataaaagtgcaaaagtgtttgatatgtttggcaagcagaaaggagtcaagtatgactagttccagatgttcagttccagatgtgtgtgatgagaggaaagggagcccgaagccccaaatgcagtgatatagagccagggcttgactctgtgggccaagagttttyaagctgttcttggaaccctggaagcccctcaaaggtgcctaggaggttag

SEQ ID NO: 455385 - DNA, 617 bp, Homo sapiens
gcccatacctaacaaagctattccctcattagcatggaatgaaaagataccttgagatttgctaaaaccaaggaagattagatttgcttctcatggggtaaagaggcttctatcaacatttatctgcttggatataatcagtatattagattttaaacgaccagtctgtgactttgctgggaaagaaacttgttatgtcaggtcttcctgtttatcaggagacatyggttgtcctcagcaactttatgtcccactccctgggactgtgtcaccaccttccttgcaggtcgggatggtggtgcttttggatacttccagtaaagatggcagccccgagtggtttttgtccttaacagagtcctccattttcttacccctctgagattagaattacatttgttttctaaagcttaatcctaaagattgacctgctttttgcagtaattatatggctcagatttctgtcttagaaacttcctccagtgattgcgtttcctgatcagctcagttcctgtgtccatactcagcacctgtgtggacccagtcagatggaacttgggggacaaattttggatgtccagtactggtgttttttttttttaaccatcctggaaggt

SEQ ID NO: 455386 - DNA, 446 bp, Homo sapiens
ccgtgcaggactcccagagggcagttgaggcaccaggagagtgcatccccttaagtgttactgtctctcctctattaaatatttatgcatttagcacttaatattttccagagagcttcataagagtttttactctttcttatwtactttggtgctggtgcattcattttggggaaatagaagtggaaaaatacatgagagctgactgtgcgctggagactgttggacacttggtgtatattatctcacttaatcttcactgcaaccctgggaggaacatattgctttcccattttataaatgaagtaacagaggctctgagaggttctcagttcctcaaattaaacacctagtgagtgggggaagttgggatttgaatccaggtgtgcctcgttaaaaagtaattgcggtagggagactttgacctttttaaaggctatgtaatc

SEQ ID NO: 455387 - DNA, 446 bp, Homo sapiens
ccgtgcaggactcccagagggcagttgaggcaccaggagagtgcatccccttaagtgttactgtctctcctctattaaatatttatgcatttagcacttaatattttccagagagcttcataagagtttttactctttcttatttaytttggtgctggtgcattcattttggggaaatagaagtggaaaaatacatgagagctgactgtgcgctggagactgttggacacttggtgtatattatctcacttaatcttcactgcaaccctgggaggaacatattgctttcccattttataaatgaagtaacagaggctctgagaggttctcagttcctcaaattaaacacctagtgagtgggggaagttgggatttgaatccaggtgtgcctcgttaaaaagtaattgcggtagggagactttgacctttttaaaggctatgtaatc

SEQ ID NO: 455388 - DNA, 446 bp, Homo sapiens
ccgtgcaggactcccagagggcagttgaggcaccaggagagtgcatccccttaagtgttactgtctctcctctattaaatatttatgcatttagcacttaatattttccagagagcttcataagagtttttactctttcttatttactttggtgctggtgcattcattttggggaaatagaagtggaaaaatacatgagagctgactgtgcgctggagactgttggacacttggtgtatattatctcacttaatcttcactgcaaccctgggaggaacatattgctttcccattttataaatgaagtaacagaggctctgagaggttctcagttcctcaaattaaacacctagtgagtgggggaagttgggatttgaatccaggtgtgcctygttaaaaagtaattgcggtagggagactttgacctttttaaaggctatgtaatc

SEQ ID NO: 455389 - DNA, 446 bp, Homo sapiens
ccgtgcaggactcccagagggcagttgaggcaccaggagagtgcatccccttaagtgttactgtctctcctctattaaatatttatgcatttagcacttaatattttccagagagcttcataagagtttttactctttcttatttactttggtgctggtgcattcattttggggaaatagaagtggaaaaatacatgagagctgactgtgcgctggagactgttggacacttggtgtatattatctcacttaatcttcactgcaaccctgggaggaacatattgctttcccattttataaatgaagtaacagaggctctgagaggttctcagttcctcaaattaaacacctagtgagtgggggaagttgggatttgaatccaggtgtgcctcgttaaaaagtaattgyggtagggagactttgacctttttaaaggctatgtaatc

SEQ ID NO: 455390 - DNA, 515 bp, Homo sapiens
agggcagctgtggttagcaaaatgtggcaaggcagggttcatggcagctcctgaatcttcttctgggtttgcagtttgcaccctgaatyttgggcttacaccagctccacacccagagttcctacctagaaggcattttctggtcttatgcatctgcatcccccttctttcttagctcccagcccagcccagacaagactttcctgtctccaaactgaatcattcctcctctggcccttcctcgaccccgtggtgtagcccttattcctctccctcacaggtggcactcaacctctgccagaatgcttccagggagggagagctactcactccacaagcctcagttccacttttgggcagctctgattgttgaaaagttcactttcctgtaatttcccttttgagatctgcccatggaaaaaccaaagagaagtctgcgtcatttcctttcaaatacatgaaatgtatgccccttctctgttaaagatctctagttctttcaacttctcacatag

SEQ ID NO: 455391 - DNA, 515 bp, Homo sapiens
agggcagctgtggttagcaaaatgtggcaaggcagggttcatggcagctcctgaatcttcttctgggtttgcagtttgcaccctgaatcttgggctkacaccagctccacacccagagttcctacctagaaggcattttctggtcttatgcatctgcatcccccttctttcttagctcccagcccagcccagacaagactttcctgtctccaaactgaatcattcctcctctggcccttcctcgaccccgtggtgtagcccttattcctctccctcacaggtggcactcaacctctgccagaatgcttccagggagggagagctactcactccacaagcctcagttccacttttgggcagctctgattgttgaaaagttcactttcctgtaatttcccttttgagatctgcccatggaaaaaccaaagagaagtctgcgtcatttcctttcaaatacatgaaatgtatgccccttctctgttaaagatctctagttctttcaacttctcacatag

SEQ ID NO: 455392 - DNA, 515 bp, Homo sapiens
agggcagctgtggttagcaaaatgtggcaaggcagggttcatggcagctcctgaatcttcttctgggtttgcagtttgcaccctgaatcttgggcttacaccagctccacacccagagttcctacctagaaggcattttctggtcttatgcatctgcatcccccttctttcttagctcccagcccagcccagacaagmctttcctgtctccaaactgaatcattcctcctctggcccttcctcgaccccgtggtgtagcccttattcctctccctcacaggtggcactcaacctctgccagaatgcttccagggagggagagctactcactccacaagcctcagttccacttttgggcagctctgattgttgaaaagttcactttcctgtaatttcccttttgagatctgcccatggaaaaaccaaagagaagtctgcgtcatttcctttcaaatacatgaaatgtatgccccttctctgttaaagatctctagttctttcaacttctcacatag

SEQ ID NO: 455393 - DNA, 515 bp, Homo sapiens
agggcagctgtggttagcaaaatgtggcaaggcagggttcatggcagctcctgaatcttcttctgggtttgcagtttgcaccctgaatcttgggcttacaccagctccacacccagagttcctacctagaaggcattttctggtcttatgcatctgcatcccccttctttcttagctcccagcccagcccagacaagactttcctgtctccaaactgaatcattcctcctctggcccttcctcgaccccgtggtgtagcccttattcctctccctcacaggtggcactcaayctctgccagaatgcttccagggagggagagctactcactccacaagcctcagttccacttttgggcagctctgattgttgaaaagttcactttcctgtaatttcccttttgagatctgcccatggaaaaaccaaagagaagtctgcgtcatttcctttcaaatacatgaaatgtatgccccttctctgttaaagatctctagttctttcaacttctcacatag

SEQ ID NO: 455394 - DNA, 535 bp, Homo sapiens
caactatgttaccatctgacacagaggaagaaacagaaactctcatggggaatatttctggttagcagagagatgagtaaacagtaaacagaaaaattacgagaataaacacttgagaaataaaataggagagagaagaaaagagaggaaaagataaggaggaaagaagagagaaagattgattagtgaaaggatgcagttttgatgtcactaaaatagtgtttcctgaactgtgatgtgcacaaaaatcacctgggttyttgttaaaatgcagattccagttgaataagtctggagcagggcaaggataaaggttttttttttgttgttttttttttttttttttttaacaagaaaccttgtagtaaaaatgctcctggtctgtgaaacacactttatgtagtgaggccctagagcacatcatctaagcaggtacttacactatcacagttgtgctattggtcctctcaccagcacgtatatagagaagataccccctaagaatgtagtgactagaatatgttagaagtgcatt

SEQ ID NO: 455395 - DNA, 334 bp, Homo sapiens
  misc_feature (1)...(334): n = A,T,C or G
nnnnntttctcattaattaaaattctccttattacaataaagtaaataagatcatctcctgaattgtccagygcactttggcttttaaatagcacaactttctacaggcatgcacattcttttataataatgtattaataaattcttgaggtaagaaaacattttatagtcataggtaaatgtcaaaagtttcttgtttataaactcacagacaagcacataaagagcttgaattatagcttcagctctagctctacaacttcaactacagattacaaataaacacacacaaaaaactcacacatttcttcccatggggcatgaaattattcat

SEQ ID NO: 455396 - DNA, 591 bp, Homo sapiens
gtctgtagcctttcattgggtgattttatctcattgctttggttaatggctcgacaaatctatattggaagcacattttttctttcttgagcttcacacatgaatatagcagaaaagtgtaaacctaatatgttataagtgctcctttccaagtttgctcctctgactatattttttaatgagtgatcacatagttaggtaaatgtttcaaataagaaaactgcaagtaatccatttctcttaaacctaaaattcactgaaactccttgatttcttctaagtcagaactctgccctaaatttttatactgtccaaattgttgttataggtttaagtaagaaatacattyggtggatactttaaatcctgaatgccaagttttactgatgctttataattaataagaatatttatgttaaagttattttaatagtataatagaaattaatgtggaatgtggaaacttggaaacccaatgaattcattgaagacaaggacaaaacagaagcattaagtattgaagtataagatgaaagaagttaaataaatttcttgaggaccaagagagaagacccttggattggcagccta

SEQ ID NO: 455397 - DNA, 591 bp, Homo sapiens
atgcattaaagaatatctagagctaattttttttttctggccatgccaatgaagcaagattacttaccttgatggttaaagcttttgactactgtttgtggaaaatatttttaagatttcaaaaatatatattcttgggcgggcacagtggctcatgcctgtaatcccagcactttgggaggccaaggtgggtggatcacaaggttaggagtttgggaccagcctggccaatatggtgaaaccctgtctgtactaaaaatacaaaaattagcggagcctggtggcgggggtttgtagtcccagctactcggggggctgaggcagmaaaatcacttgaacccgggaggcacaggttgcagtgagccgagatcatgccactgcactccatcccaggtgacagagtaagactccatctcaaaaaaaaaaaaaaaaaaaaaaaaaaaacctatatgcttaagggtcaatctttgattttttaaatattttagatgtctttgaacatcaattagagaatgtatctcattgcttttttgacattttagattctttcttttctaatgtgacttacgaatgaataattttttttaagtt

SEQ ID NO: 455398 - DNA, 364 bp, Homo sapiens
tcttttctcttttagtattgttttaaatatatgtcatagatatagatagatagatagatagatagatagatagatagatagatgatagatagattttaagtttccttccaacaccatgcttgagactttctttcagtgggcaaaattatagttcccaaaaaaaaatcttcagagattttcaattctgataakgtggcagagagagataagttagagctcttactgctatgaatgcattgaagttttaagtagaattaaattttaaaatagttaaaattatgtagctagggtcactagaataagacagctatacatattgggcaaaagaagaaagcaaagctagagtgataagagtaagaaggga

SEQ ID NO: 455399 - DNA, 642 bp, Homo sapiens
aattcttgacttaataaaggaaaaaaatgtatgctgagcttgctaaaacctatagtaagaacaaatctatcaggataattgcgaagaaaggacaagaaatttatgctaatttggctgttgtacctcaaagtgcaaaagttatggccatagtgcataataagtgcttagttaaaatggaaaaggcattatatttgtgggtagaagacacaaacagaaaatgtgtttcaatgaatggcaatgtgttgtgccacaaagcactgatcctaaggaagacttcagcaaatgatcccctcaaactaattatgccaatccatttactgcatgtaagggatggttacaccgattccagaatatacagttcaatagtagccgaaggctatatcctgatgactgtgtcattcacttgacttcatctcaacgtgtaggcatcgtgtcatctcacatcatcacaagaagaaaggtgagtagagtacaatcagatattttgaggctaagagycagagactacattcaccaacttttattatagtatattgctataatttttccattttattattagtttatcataagtataaatatatagcaaaaaacagtatatatagggtttgttactatctgggttttaaggcattcactaga

SEQ ID NO: 455400 - DNA, 631 bp, Homo sapiens
tctgctcatgtcaaacttatggctaggaattttacagcataaagattgaacaacacctccaaccatttattgaactctcaggcattaatcaccaccttcctagaatgtgatctattttagttcaactattgttctcccatctatgcactactacaagacgtgagggcaatagaggagcctgcagtttgagcaagaagagtagtctcattcaaagactgtcatcccttcttttgcagagcttaagaccaaccagggagagtataaaatcactacatccattagaggcaagagaagacactgactatctaaaggtcccattagcatttcaaaatgagaagcaagaatctggaaaattcccagaaaataagctyactcatccttaggaccacctgacaaatggaggaaggtagggaatggaatagaatgagtggagaaaaggtatattacattcttgtttatagtccaaccagtgcatgtgacagttcttcatagagcctaactaccagcaggtggagaaggaatgtggttctctcgagtgttgtaggctggagttgacactgctatggaaatacagatgtgctagaagtccccattccatggaaccaaacatgcagctcaagtccaaggacca

SEQ ID NO: 455401 - DNA, 471 bp, Homo sapiens
ttaaggaagcaacagacacccctcacattatagtacattagttctgccacattttttaaaaaaggtatgaagtacatgtgatatcacacacacacacacacacacacacacacacacacacacaaagattctctttatagcgattaatgctaacctaaatactttggtcatgtatttttcttcttagtgagtttcagaataaaaaataaataaatgaaaagaacggtcacaaattcaagattataggctgaatttgaattctatgttttactctstcacacatacacttgagagcattgatgttttctcatatgaacagtaagaagacatagaatttgtgttaataacacttgcaactttgtcctcaataatgaatctcttagtttgggttaccccagacacacacctctacacaagggttcaagtggaagtagtttatttgggaagcagagagtacagttgttgcagggt

SEQ ID NO: 455402 - DNA, 471 bp, Homo sapiens
ttaaggaagcaacagacacccctcacattatagtacattagttctgccacattttttaaaaaaggtatgaagtacatgtgatatcacacacacacacacacacacacacacacacacacacacaaagattctctttatagcgattaatgctaacctaaatactttggtcatgtatttttcttcttagtgagtttcagaataaaaaataaataaatgaaaagaacggtcacaaattcaagattataggctgaatttgaattctatgttttactctctcacacatacacttgagagcattgatgttttmtcatatgaacagtaagaagacatagaatttgtgttaataacacttgcaactttgtcctcaataatgaatctcttagtttgggttaccccagacacacacctctacacaagggttcaagtggaagtagtttatttgggaagcagagagtacagttgttgcagggt

SEQ ID NO: 455403 - DNA, 587 bp, Homo sapiens
gacaagtctcgtgttgatgaaatacttcaccttttgtttgtctgaaaagtctttatttcttcttcatgtttaaaggatgttttccctttatatgctattctaggataagagttgtttttcttcagtactttaaacatatcatgcaattttctcctggcctgtaaggagaggagaagtctcctctgaggtttccactgagaaggctaatgccacatgtattgaagttcctttgtatattatttgtttgttttcccttgctgcttttaggattctttctttatcttcracctttgggaatttgattgttaaatgccttgatgtaggtgtatttggattaaatctgcttggtgttctataatcttcttgttcttgaatattgatatctttctctaggtttgggaagttctctgttattatccctttgaatagattttcttaccccaatctctctttgtacctcttctttaaggcccataaatcttagatttgcccttttgaggttattctctagatctcataggcatgcttcatttatttatttttatttttatttttatttttggtctcctctgcctgtgtgttttcaa

SEQ ID NO: 455404 - DNA, 600 bp, Homo sapiens
agaaactgacacaaagatatttaagttatttacccaaagtcaatctgctggctggtaagtggtgaaactggaattaaacacattacattttcagagcccacatgcttaaccattattactacataccytaaatcacttgggatagttgtcttagagttccaaggaaagttatataaaatggaaatatgtggtttctaagacaaaaggaatattataatttatttgtcctctattcatttatttttaattttcaattatgaatacataacagttgtacatattgatgatgtacatgtgctaccttcgtacaagcataccatgtgtgatgatcaaatcagggtaattggggtatccatcgcctcaaccactgatctttttttgtgtgtcagtaacgttccaattctactcttttcgttattttgaaatatatggtaaattattgttaactatagtaactctattgtgctaccaaacactagctgttattccttctatctaaccgtatttttgtacttattagtcattcctttattccccacctccttactgtcctttccagcatctggtttaactttttttaagttctcacatatgagtgag

SEQ ID NO: 455405 - DNA, 584 bp, Homo sapiens
tggatcttttggctaaagtccccacttccaatcatgaaaatagttaacatttatgagcatttaatagaagccaggcattctactcatctttatataatccctcagctagcttctcataaccccagtggggaaagtactgatgttattcccattttacaggaaatagaagtttagaaaaattaaatgacttgaccaarttcatttggctagaaagtagcacctcaaagattggagccacctcactgaacagcccagtagctcccacctgcttgggcttggatgtactccccatccctggctccatgccagcttccctggcctgctaagaggaggaggactacagagctccacccttcctttccccaggactcctctgctccggagtaggaactttactgggccctgggtccttgcctgtctccaccaggatttctgaagcagcttctagtttaggggaagatttgccacagacaggagagctgcctgcagagctctctggctcagtaacaaaattcactgggagcagagctatctggagagccccatattcctgctgactctcccaagtcaagaaataagagcgt

SEQ ID NO: 455406 - DNA, 596 bp, Homo sapiens
gttctatttcacaagaggccatgttgcagattacaactagctcatgaacacaaaagtcaaggctgaattacatttatatagctatagtaaatcttacatctactttaaaattgaggatgtgtgggacagcttctgcaaacatctggtaccttctaagattttatagactatgagaaccagagagagatttctaaaagatgttgccaatgaggagaggcaaaggttgatgagacaaaggcagggattctgtattatttcatactactttttatccctaagtgttagagaatgcttctaacatcaagtataaaagtgagacctgagtgtttttgtcccaattatgcaacctaatatttaggctaccccagttagcaaagaccctaataattcaactcactatattgggtaagctaggcatatacattttttgcccttagggaatttaacatagttaaaataattataacaaactatgacaaagtgttaggataacagaagcatggggtgctaagcctttactcagctgggggacttaacttagtcagcggggrgtcagagaagccctactttgttaagtgtagaataaaatagtatat

SEQ ID NO: 455407 - DNA, 577 bp, Homo sapiens
accttatacacctcagcaccctggctgccatttttgttgcattcattcctgcccctactccaactctctggtaactgccttctgtcatgcttcttccatcttccatcctatgaacattttagcagagaactaagtcctaagtcataggactttctgactgtggtgtatttgaaggaattgagaggttttctgcaactgcaaaacacactaccgcctacggagatccgtgactgtgatgggttatgggcaggattccagggaatgatatagatcagtgagtcaaacctatcctggaagacttgctcaaatcagtaattaagtgctcaatatgtaaaaacgttttggtttgtatttcatccatgaccatctaccatattaatatagttcttctctagaaagactaggaccacaggagcccgcaagaggagaaagcccaccatctacagcttgaggaaataccagcaagaaggacgtgttgctcraagttgaagagatcagtaatttatttttcccaccttttcactacctcctgagaagatgtggagtctacagagaaacgtgcctgagggtgagggag

SEQ ID NO: 455408 - DNA, 532 bp, Homo sapiens
agcttcctgtttgctaacagcactgtctttctctcaggcacttatctcagtcatatctgatgtattttttgctttgccctcttctttcagtcacctctatttagacccggagtcctataaatttttatgtccaactctaccattattgctgcctccctttctccttttgtgccatgcttagatgacctatctagtcttactaccacaagtctcatccatctgaatccatcttttacttagctgccagattactatttagatcctgacattccctggataaaaaaaccctgtgccttgtcattgcctacaaggcaaaagaaggtcaagtatttggcctgacttttaaagcttccactgtccaattctgcccaaccttacctccmtgtacacaacagcaagtaagtctatttcagctgcgctggttttctcacaagctccaaagcacatcatacttattcctaccttcctaccactgtttttccccccctggtgtcaccaagcacttattcatttgagcaggggtaaggccatc

SEQ ID NO: 455409 - DNA, 505 bp, Homo sapiens
ttctaaaagctaaacagaacaagactttccaacagagaaaatatgaaatatacattttgtggatgataaaacaaatatttattgttagtcaacgtgattcaaaaaatgcagtctctacattcaaatggatcaaatcagaaaagagaagacaaaaagacataagcaatcctaatacaatgtgattagtcccagatgtctggacaagactctctggaagcagagaggtgaggaaaacttgcccatttgctgtttggaagagaccgagggaaaggtcacagaagattactagttgaagtggtttgtatacttgtattgaaaaggrcagttttaaagataccgaccctacattatttaattcccacatctatccttacactacttaggtatctctctgtcaagaatcaatcttgttcgaattttttatttctctatcctaactacttctcttccatatccaccaacttactaaggattaggtaaaatctactactgacaggaaagccaa

SEQ ID NO: 455410 - DNA, 590 bp, Homo sapiens
tgcttcccatgatactaatagtagcagtactgtccttgttatacattactcaacatcattataatcttccaatgtccttccaattgacatcctagaaggcttccaattgttccactgtgctgttgtagaatataccaccatcatgagactgtcaccagcaaaagctagcctgctaagcaggcacagagaatgtgcaccaatagacgttattgctagactcagacttctgggtgacctcctggcaccagcgctaaggtgccaggatggccttcagagagcaacatgatttttctactctccttatctctttagggagataggrcaggagaagtagcagaaatttgccaatcctcttactgagaggggaaaacaggcttcctgacagctcttattacgttattacagttcagcctggtttctgggtccctatgccagtgaagccactccttcagtgcctaccagtaagaggcaatttgcaactagcaccataaatggcatttgtaatctagctagtagtgtcgtaaatgcatcctattggtcatgagctgaaccagggcaatcaaatgtccctgctagataatccactttgg

SEQ ID NO: 455411 - DNA, 614 bp, Homo sapiens
catgcggtatctgtccttttgtgactggcttattttacgtagcataatgcccttgaggttcactcatgatgtagcatatgataggatttctttcttttttaaagctgaataatattccatttattttataccatattttttctcattcattcattgatggacatttaagatgtttgtacctcttagctatttgaataatgtttcartgaatgagaatctaatgcctccactgatctgacaggagacggagctcacacagtaacaattgaagcattgttttcaatgttctctgagaacctgttttcaattttttggaataaatacccagaagtggcattgctaggtagtactataccatattagttactttagctttgtagtgcatttgaagtcaggaaatgtgagtcctccaacgtagcttctctttttcaagattgtttgactgtttgggcatttgcaattttatatgaacttgagggaaagctgttagaattttgaaagagattgcggtgaatctataaattgctttaagtagtattgctattttaacaaaatatgtcttctagtccataaacatgggatgtatttccattgaattaggtcatttgtaattt

SEQ ID NO: 455412 - DNA, 551 bp, Homo sapiens
tttaaccttctttccaatttcaaaagtgagactgccagagaaaggcatgtagtgagcctcttgaagcctctgaatttggagtcacattgaggggtaattataattatcaaaatgtccatggtcattagaactgattgaacttttactccacactcgacctatacaatcaatagtaaagtggactgtgcatcttgcctccattctgtttgtaatatcatagaatcttgagtgtcaagaaagtttaaatastaggctgtatgatggtagatcaaaatgcctaacaagcataagctaatcaaattactatttattgatttaacaaaaaaggtcttgttttcacttgtgtgtcttttaaggagataaattaaaatggcattttaacctttttgcttatcccaatcaaagacacctctctcaatcctccctttaattatttgctaagagcagtgctcctcttgtaattttgacacttcttcctctattctgactgagctctattgatgcagttgtcatgttccagcagtgtgcatcattcacagggctgatttaca

SEQ ID NO: 455413 - DNA, 520 bp, Homo sapiens
gaggctgtgtctcaaaaacaaaattaaatataaatgtgatctctactttttttaaaatttattattgttatactttaagttttagggtacgtgtgcacaatgtgcaggttacttacatatgtatacatgtgccatgctggtgtgctgcacccactaactcgtcatctagcattaggtatatctcccaatgctatccctyccccctccccccaccccacaacagtccccagagtgtgatgttccccttcctgtgtccatgtgttctcattgttcaattcccacctaagagtgagaatatgtggtgtttggttttttgttcttgcaaatttatgttagcttttctaagcattctctcttttttttttttttttgaaagggggtgctttccagattgagggaaactttctttgtattttccctcatgttcattttagaataagtagggatgattatttatttagaaactgcattgtatggtgggaaaaaagcaccttaatgctgaaattcagagggaattgga

SEQ ID NO: 455414 - DNA, 620 bp, Homo sapiens
gtagcttttattgaactttctatgggttagttttgagaggaattcaggggaagaatcaatgacaaaactctaagaatttacagctcgtgtgtttgtgtgtgtgtgtgtgtgtctttgtggctgtgtgatatggtttggctgtgttcccacccaaatatcatcttgaattgtagctcccacaattcctacgtgtcatgcatggaagggacctggtgggaggttattaaatcatgggggtgggtctttcccatgctgttcttatgatagtgaataagtctcacaattataaagcagagtttccctgcaccagctatctttctcttgcccaccaccatgtgagaagtccctttgcttttccttcatcttccaccatgattgtgaggcctccccagccacatggaatgtgagaccattaaacctctttcctttataaattatctagtctcagatatatctttattagcagcatgagaactaatacaatgtgtgtgtggcggggggtgggtgtgtgtttggagatgtattgcagtggagggagtgattsagagatagatccaatggagtatttacctcacctctagggaaatcacttggtatatttttatccacggtttatcacc

SEQ ID NO: 455415 - DNA, 543 bp, Homo sapiens
ggaaataacaaattagagtttaatgtatgctgtactgtcaaggatcaatatagaattatttggaatgacatggaaactaagaggcttgagaaatttttgatgctagatgttggtataatatttgatttagttttccccagtctctcaatatttctagattccacaaagatccaggcatctcctgaagataacagtttcttactaggcaaaaacccttgggatgccttgatgctaaacatttagaagatgctcagaagcatgaataatcatctagcaccaaccgaagagataataaaaatgtgatacacactgtggtcatcttcccagctatgttctacttctccccagtgttatggcagctkagtagtttaaaagggattgatatcaactgtggtttgatactgattgtactggttgtatcagcaaaacccattcagttcagcatagaaaaatacagagagatgtgatggggctttagaaaaagattcccatttgtcctgcagtgagagccactagaagagaccctcactatccctggaagta

SEQ ID NO: 455416 - DNA, 468 bp, Homo sapiens
  misc_feature (1)...(468): n = A,T,C or G
aggtacagtaaaaatatggtgttaaaatcttatgggatcaccataatatatgcagtccatcattgaccaaaacgtccttaggctgcacatgaacgtatttccattatcacatttggtctgcaatttgattnnnnnnnnnnnnnnnnnnnnnnnnnnnnnnnnnnnnnnnnnnnnnnnnnnnnnnnnnnnnnnnnnnnnnnnnnnnnnnnnnnnnnnnnnnnnnnnnnnnntatgatttctataaaaaataagagagtgagagaagggtttttgttttgtggtgagacaacaaagcatagccatcatagaataaaatgtttaaaataacgtgtttrttaaaacgtttgatgaaaatggtaatatctctaaagatttgagtgcctttctcaccaatatttaccctgtttcagttattttataccaaagtttcttaactgagaacataaaagatcaacttttagagagatg

SEQ ID NO: 455417 - DNA, 468 bp, Homo sapiens
  misc_feature (1)...(468): n = A,T,C or G
aggtacagtaaaaatatggtgttaaaatcttatgggatcaccataatatatgcagtccatcattgaccaaaacgtccttaggctgcacatgaacgtatttccattatcacatttggtctgcaatttgattnnnnnnnnnnnnnnnnnnnnnnnnnnnnnnnnnnnnnnnnnnnnnnnnnnnnnnnnnnnnnnnnnnnnnnnnnnnnnnnnnnnnnnnnnnnnnnnnnnnntatgatttctataaaaaataagagagtgagagaagggtttttgttttgtggtgagacaacaaagcatagccatcatagaataaaatgtttaaaataacgtgtttattaaaacrtttgatgaaaatggtaatatctctaaagatttgagtgcctttctcaccaatatttaccctgtttcagttattttataccaaagtttcttaactgagaacataaaagatcaacttttagagagatg

SEQ ID NO: 455418 - DNA, 532 bp, Homo sapiens
ccaacacacagacagtttctctgaattcctggtaatatacaagtgttacacaggcagcatgatgccttgagaatttttggtccgtaggcattgttagtttcattaacatttattctaaggtctttctgtgattaaaaaataatacccatttattacctgctacaaaaaacttggaatacagagaaaaggtcaaaataatataactgttatccagaaatgcagaaatgatgatttttaaggttttttcttttcataatatcttacacctactataatgttatgtacacttccagaatgtattcacttagtatctatagwtacacattctaatgtcaatgatgatctatgtaacaaatcttaataattaagttttaaagaaaacataaaatacctaggtggcactgtataaagttttatcctcagtatggaacttgggctattttattttttaatagaaaagataaacaacctcctgtaattaataggacgtttgattttctttcttgaatagaggtatatttttactcagtaa

SEQ ID NO: 455419 - DNA, 583 bp, Homo sapiens
attttgtcaggattctatttaatccaccacagcgyacagctgttcatagcatttttatataatcatctttatctctgtaagattgagagtaatgttccttctttcacttctgattttagttactttttcttttctctctttgatagtcagcctagctgaaaattggtcgatttggttgatcttttcaaagaaccagttgttggttccattgactttctctgctgtttctctatttgctttttttgtttattttcactctaatctttattatttcttttcttccactagctttgggcttagttttttcctttttttctagttccttaaggtataaagtgaggttattgatttgaaatctttcttctcttttaacataggcatttatggctataagttttggcatgttgtgttttcattttcattcatctaagtattttctattttccctagtgatttattccttaacccattgtttgtatgaaacgtatgtggtttaattttcacgtccttgtgaacttttcagttttccctctgttactgatttctagcttcattcctttgtggtcagagaatatactttgta

SEQ ID NO: 455420 - DNA, 583 bp, Homo sapiens
attttgtcaggattctatttaatccaccacagcgcacarctgttcatagcatttttatataatcatctttatctctgtaagattgagagtaatgttccttctttcacttctgattttagttactttttcttttctctctttgatagtcagcctagctgaaaattggtcgatttggttgatcttttcaaagaaccagttgttggttccattgactttctctgctgtttctctatttgctttttttgtttattttcactctaatctttattatttcttttcttccactagctttgggcttagttttttcctttttttctagttccttaaggtataaagtgaggttattgatttgaaatctttcttctcttttaacataggcatttatggctataagttttggcatgttgtgttttcattttcattcatctaagtattttctattttccctagtgatttattccttaacccattgtttgtatgaaacgtatgtggtttaattttcacgtccttgtgaacttttcagttttccctctgttactgatttctagcttcattcctttgtggtcagagaatatactttgta

SEQ ID NO: 455421 - DNA, 642 bp, Homo sapiens
aagtctgaaagtttttcaatgtttaacagccagcgagagaaggataaacttacaaaagatgaatagaggagctgaaaaggaaaagtaggagtgactaagtgaagcagcagagcatgactgaaagtgtaaacatagactacaaactggatatggttacttctaggaaatggaattggatggaggggaactgtcatagtcaactgttttgaattgattggattagttacaaggagcgggtgttacttttttagttaaataaaacaatatctgtggctcccattggtcagtataattgacttacaacaattgaattattacctattaaaaatataattgttgaagagatcaaatattcataaattacaatggtcaagaagaattatttatgtgtcatcrtcttcataagaattcttcattcctagagtgatttctttaattactcatttttacacatttatgttttaggcaacatttttaaaagtctttcatggatagtaaactgagttattcaaaatatgttctaataattaaaatgtcttttagaggatgggttattgtctttttaatttcacctaatgaaatggcaaaaatgaatagtaaaataattttggttttggagatttctgcatggagaactatgga

SEQ ID NO: 455422 - DNA, 513 bp, Homo sapiens
gtgcctagtgatagctgctccctgctttaagtaggcactacttgctaaatcctcacacggaggaaggagtgaaaagggaacagagaatgctrtcttcacatgacagaagagagggaaaggcaaaaaggtgctagagcactcccaacttcttttataagagcattaattcgttcaagaggatagagcccttgtggcctaatcaacacccaaattccccttttcttaatcactttgggctttaagttccaacataagaattttggagggacacctacgtttgaaccacaacactaggaataatttttaatttatatatttcaaaaatttggcatctttgttatggagcaggcaattgcctgtatactggccaatatactttttttttagtttaacaagtgtgtattaactgcatgcttttctgcgcactgcaattcaagctatgattttgggttgaaaagctcttgtggtttgggttgtgactattagcacctcactgtaatacagacacagaag

SEQ ID NO: 455423 - DNA, 631 bp, Homo sapiens
acaatttaccatttaaaaccataaagatcacggaattgaaactgttgggcttctcactcctgtatgtactggcggcactacaggcctgagctatctggactttgcccaggatgccagcatcagagcaaaaaacttagaagatattccagataatgaaactcaaattggtgayggtgttggaaaaataaaacattttaatgagcttactggaagagaagtcctgggaccaacaatggtactaagacttctcacacctggtgaaggcccagccagtcagtcaatcttgacctgtcagccttaccacagctctttcagaaaaaggtacaatctcctaagacagctcttatctcattgaactatctgtttactggctttctgcaagcacaattcattctcacatctcaaacacatgagcattcactctcattcattcacaattcattctcatatctcaaacacattcactctcacatctcaaacacatgagcattatttttacacaaataaaaaatctctatcagatgcctattatttctctagaaatcataaaatatgttatactagtttaagcttatactttattcaaactattattttgtttctggtaggtcaccaaagaacacttcataac

SEQ ID NO: 455424 - DNA, 268 bp, Homo sapiens
gacttgccttgtctcagatgagactttggactgtgaacttctgagttaatgctgaaataagctgagactttgggggaccgttgagaaggaaagattgtwttttacagtgtgagaaggacaggagatttgggaggggctggaagtggaatgatatggtttagatttgtgtccctgcccaaatctcatgtctgaattataattcctaatgttggaggaagggcctggtggaaggtgattaaatcatgggggtggacttcccccttgctat

SEQ ID NO: 455425 - DNA, 541 bp, Homo sapiens
cctatgtgttggcaatagaaacagatttaagaagccaaggtgaagaattttaccagtttttaaattgtgttagttttagatctttttccttgttgggtcctccatatgagatttctttttacatttcgaagaatcatggtatttattaaaagggattatttatgaaatccatttgaggtcagattcttgatgctatggggacaagctaaatttagagcaagaatcagtccagtagagtaacataattatgataataatttttaaaagaccaaaacaatttgttgtcattgaatttcatttttataatgctatcttatatataactataaactttcctgaggaatgggtgataaattcaaacatrgagtttcaagatccaattcaaatgtaaattcttttgaagccccctcagggaaagctattagtttgatcttgggagatttatgctttctgaagcaatctttcactagtcagtgagttatcataaatctttccttgtagtattttatatgtgtatacacattcactgatgtaaaccata

SEQ ID NO: 455426 - DNA, 550 bp, Homo sapiens
tgcctctcttcctccaaaggatcacagctcctcaccagcaaggaaacaaaactggatggagaatgagtttgatgaattgacagaagtaggcttcagaaggcgggtaataacaaacttttctgagctaaaggagcatgttctaacccaatgcaaggaagctaagaaccttgaaaaaaggttatgagaattgctaactagaataaccagtttagagaagaatataaattacctgatggtgctgaaaaagactagtactttttaagaacttgarccctctgtaattcactctgtgcttatttttcctaaccactgtatgtgtgttatattaaaagtattttaaacataaaactgggctgcaggcagaaggtaagtttgaaacattcttttacttcaccatcagctggaagaagaagagagcccagagaggaagataagagttggtagtaactggaaatgagaagtcttcggtgaaaccctattgaccttcagtgtgagagaaaggatacaccagaagttgagtaatgaccctggccttcccctaaactctagt

SEQ ID NO: 455427 - DNA, 565 bp, Homo sapiens
ctgcatgatcttggattaggcaatgggttattttagatatgataccaaaagcataagcaacaaaattaaaaacaaataagttgaacttcatcaacatataaaaaggacaccatcaagaaagtaagaagacaacccacagaatgggagaaaatgtttgccaatcacacgtatttgataagagtccactatctagaatatataaaggactcttgcaactcaacaatataaagagcacctgattaaaatgaagacaaatgatctgaatagatatttctccaaaaaaaaatacaartggccatttaacacatggaaagatgctcaacatcattaatcattaggaaaatgcataccaaaaccacaatgagataccatttaacacccagtagaatggctataattttcttaaaagaataataagaagtattggtgagaatgtggataaattgaaactcctacgttgctggtaggagcataaatgatgccactgcatggcaagagtctggaagtttcttacaaagttaaacataaaattaccacatgaccaagcaattccactcactggtaa

SEQ ID NO: 455428 - DNA, 650 bp, Homo sapiens
attttgtgacacataaaattatataaaactaaaatttcagtgtccataagtgaagttttattggaatgtagtcatgtttattcatgtctatgttgtctatggctgctttcatgctacaatgacataattgagtagtggtaacagagacttaaataatatcctttattttgcctcttggcctacagaacctaaaatgtttaccatatggcatttatagaaacagtctgccatccctgacactaggtggtaggtcctctgctctgttctgtcagtagtgttcttttatctcctttgtgtcttttatatattcattgatacaactgtattgatggctccttctcttgtctttgttgttgtcagttcatttcatttttattcctttgctaatattttgggaagctaaaaaaatggataaaatgctacttgagaggccgaggcaggagaatcacttgagcctaggagattgaggctgcagtgagctgtgattgtgccaccatactctagcccgggtgacaaagcaagagcctgtctcaacaaacaaacaaataaaaaaaaaaccccactaaaatgtatgtkgcataaatatgtcctaacacacacacactcatttaatatatataaacagagaacaactgttctcagtacaacag

SEQ ID NO: 455429 - DNA, 512 bp, Homo sapiens
tgtccactgtcatgattcataaatagatccaatgtagtttagaataaatgagaattctgacaagttaagttttattaggaggtagggagggggaagaaatgtgcccaaagtgaggggagatggaattctgtacctatcaaatgtttgtttcttgtgtcttaacatttggctcaaggcgrtacttttcagtttggcaatatggtattattttgtgttattttatattagagatagggttgcattctgttgctcaggctgcagtgtaggggtatgcccatagctcactgcagccttgaactcctgggatcaaacaatcctcccacctcagcctcccaaagtgctgggattacaggcatgagccattgtgactggcctctgtttggcaatatcttatgtcaccaactgatgaactatagcataggggaagcagtggagtagggcttgtgatcttaactgttctaaagatttgggggtatatccattttttaaatgtgagaattacttccaaaagt

SEQ ID NO: 455430 - DNA, 633 bp, Homo sapiens
gcagtgtctcttggatgactgagtgctgccggccctgttatagacagtgtgcacctaatggaactctatttgctgtccctcagcagggctcctggctgacctggcctcacctcgctcctctgtgagcctgccaccctggtgtctacccccaagtctcctctgtgaggtcacttgtctgcccagcaggccctgtggcaggcccattgtctctcaggtgcaaacatgcaggaactggagagatttgggaaaactcaacctcataatctttcttttttttgcacatagtgcatagccaagtagctgtgtctgcatcccaggctgttgtatttaggaagaagggaaaaacttgaaaggtgctcattttccagagtcttccatgagaagtaggtcactatagctcttatctttaacatttattttattttcacttatgtgaaacacatccccctgaaatccagggagggtaaaaggggagacatcagtttgataattttcaatcyctttctctgttttcttctcattgtctcccaagccagatgcttattttatttctcctttatcttttcttcttctatagagtgatcctggctgttggtaggagtatgagacacccctccacattagcaaacccta

SEQ ID NO: 455431 - DNA, 601 bp, Homo sapiens
ctggttaatctgtaggtgcctcaaagtcaacacactgaacccattcaccagtgaatgctttcttctcttgtgtgtgccatctcatttaatggtgggagaattcaaccagttccacactgacaccttagactccttctttccccagaacccccaacattggcctcctaccttcccatttccaaacctcccaatccaaaccactaccaattcctctccatgcccttctttctaccctcactgtaaataccctaggccaggttctcatcatttcttacatggactattctaataacttgctaaagaatctttttgctccttattcccccatatgatagcaatctacctccatgttgctgccagaatgctcttttaaaatcctttgggccccatccctaccctcattttatcctgtctcacatctagctacttcccataaacttgttttcctcyagtcattcttctggtagttcttagaatgcttcctgctctcttatgccttgctacttttacacaggtgatttattcttttgggtcacctttctttctgtatccattgagctaattcttaattatgctttataaattatttcctgctaccttt

SEQ ID NO: 455432 - DNA, 553 bp, Homo sapiens
aataggagatacatttatctatatcttctattggttatacatacatatatacacacacacatatatatataaatattatatatatatatatatatatatatttatttatttatttattttaaagaattagctaatgcgattgaggagccagcaagtccaaagtctctagagcggaccagcaggttggaggcagtcagggtttttatgttgtcgtcttgaggcagaatttcttctttgagaaacctcagtctgttttctcttaaggccttcagctgatsggatgaggctcactcacaccatgggaagataatctgcttcacttagagtctactgattttaatgttaatcacatctaaaacataccttcacagcaatatgtagactagtatttgacaaaatgattgggcaccatagcctagccaagatgacacataaaattaaccacgattggcaccaaaagagggacagtgaaagcccacatgaaaaggaagagctaggccagaagcctgagaagagccatagacaaactcagtgtctgtgatgggaagtaaac

SEQ ID NO: 455433 - DNA, 566 bp, Homo sapiens
acataattaccctgtttgcaaggatcttatgtatctatcagtatcagcattttatttaaggaatcatcaacttacaggaaatgaaattaagccttcatctacattagagactagaagaaaatactgcattcacaggcacacatgtgtgtgcatgcacgtgtgtgtgtggtttatctcagagagtttaaatgttcttaaacaaaattgcagcagagtaggatatctgttttgcttcctcacacttctatgacctaattrcatcttctgtttaaagtacttcacagataaagctcatattatagccaataccacagagagctttatttgaatgccagttatgtcttaggaactattctaaacgctggaaatatagtggttaagaagataggaaaatcccctgccctcatctgtgaaaactgagtaacatcccccaaagaaaattactcagtacctcacacgtacacaaaatagatgtctaagaaatatttgctgatttaactgaatttttattagaagttgagttctaagtgaaattgtattgtagcaagctatttgtaaatggatag

SEQ ID NO: 455434 - DNA, 603 bp, Homo sapiens
tttttgttgttgttgttgttactgatattatgtatgacaggaaaaccctgcctccacagaccagacacgttactgggcatctctgtacttagcacagggagtctgatcaattagtccatttaacaggagctccccagccagcctccctctggaaagcagctaagaaattcttayattcctctcaatatgttaatcagacaactggtatcacagttctctaactgtgtaataccagtcccccttggcagatatattttatttggataatgatgtgaaatttaagatctacgtttcaattgtgcagagccataggcagttgtcaattttagtgacagacatagacctcgagctaaattcctgtgcacaagcaaaaactccaacaagcgtagcacaattctggtcccttaatagaaatacattttctcccatcgaggggcagtatttttaaatgttcatcacatctcttggtaccagcaaatcactaatgctctcgaatatttcccttaacatgggcattggtgacttgagccatcaaccaggctgacaggaaatcagatgattataacctgatatcctgcttcttctctaggagaacaatgctga

SEQ ID NO: 455435 - DNA, 550 bp, Homo sapiens
aaatcaaattgctctaccatggcatgggttgctctgatyaccagtagagaggtgaatcacagagggaagctctctgcctctcttacatacctgggctttactcatttttatcaggtggacactgttacagtggttgtttgtcagctttatcagaggacactgttacagtggttgtttgtcagctttatcctcactgggatctgggttgtccttcatgattcagtggattcccattttacttcttggattaaagctcacagagttgatctttatacattatcttgctattttcaagtggccaaggcatgctaaaagcctctaatctgccacgctgattaaaaaattggcgtcttttttaatgtagttatttattgttacaatcttccctcagaactgctttcgctgcatcttataagttttgatatgttgtgtttcttaatatattttttattttcctttttgaattgctactttgattcatgattgtttatgagcatgtcatttaatttccacatacttgtgaattttccttcttttattgatttctagt

SEQ ID NO: 455436 - DNA, 601 bp, Homo sapiens
aatgctgataagagaagagaggagtcattctcattgatgtgctttgtaaaaataaggcagagaaaaatgggagttctgtgtactgttgctctaactgtgaaggaaaacaactttaataattcagaacattttcctcttgggccttatggaacagaacaaagtttgatacttgagcttacttaaactctaaactcctaacattagcatgaccttgtttttgcttttgaacaattgggaaattatctrtaaagaaaagttctcaaacataagctgaaacctggtttctctatttcatcccaaccccaaggaaaaactatcacaaaaagaactttaccaattaaaaaaaaaaatcaaaagtaaccccaaaactacattacatctatttgtttagtggatgttttgtggtttgttgatgttggttttttgtctgctttttcctttatgtactttgtttacattgtatctccatcctgttaagtagctataattgcttacaatttaattactatagctcttcaaactaaatattgatttattgttattgtatttattatataaaactgcattaatataaatatctttgcttcattttaattttttt

SEQ ID NO: 455437 - DNA, 589 bp, Homo sapiens
tcagaaatgagggagaaataaaatatttcccagacaacaattatgaaagtatgaaaaagcagggtgttacagcaccctcaaaagattgcactaactttctaacattggatcctaaccaaaataaaaattttgacattccagaaacagaattcaaactattgattttaaagaagctaatggagtttcaaaagaaacctgaaaactaacacaaagaaatcagaaaatcaatttgggatataaacaagaagttgaccaagtagatacatatatcttaatttaaaaaaaagaaataaaaaaatgttttgaaggaacttaaaaatacagttgaaattttcaacaacagaccragcagaagatggaatctcagaacttgaatataggtctttttcattaatttggttaaacaaaaataaagaaaaatatttaaaaagaataaacatacctggcacatttgttcatgcctgtaatttcagggcggatcacttgagtccaagagtttgggagcagcttaagaaatataatgagacccaatctctgcaaaaaaattaaaagtttaaaaaattagctaggcatagtggagtggcatgtg

SEQ ID NO: 455438 - DNA, 561 bp, Homo sapiens
agaaatgccatcagactaacagcagacttctcagtccactgttacatgccattatatattgggattctattttaacagcgtttgaagaaaaaaaactgtcaaccatgaattttatattctgttggaataagcttcataaataaagctttccagaagtgcaaatgctaagacaattcatcaccactaaaccaacactacaagaaatgytcagagttaaaaacacagaaacaaaaggtcaatacttgccatcattaaaacacataaaagtgaaaaactcaaaagacttataagacagttacacaaatgaggaagagagaaatcaaatgacaacatggcagaactctaccaaaccaaaattacaaacagactatagacaaaacaatctacaaagcaataagataacaattaatattatgaccagaataaaatttcacgtctcaattaaccttgaaagtaaatacattaaattatctgcttaaaaaatatagattagtaaaatagattttaaaaaccatgaaccaactatatattgcttaaaataaactcatcttactgatacag

SEQ ID NO: 455439 - DNA, 561 bp, Homo sapiens
agaaatgccatcagactaacagcagacttctcagtccactgttacatgccattatatattgggattctattttaacagcgtttgaagaaaaaaaactgtcaaccatgaattttatattctgttggaataagcttcataaataaagctttccagaagtgcaaatgctaagacaattcatcaccactaaaccaacactacaagaaatgctcagagttaaaaacacagaaacaaaaggtcaatacttgccatcattaaaacacataaaagtgaaaaactcaaaagacttataagacagttacacaaatgaggaagagagaaatcaaatgacaacatggcagaactctaccaaaccaaaattacaaacagactatagacaaaacaatctacaaagcaataagataacaattaatattatgaccagaataaaatttcacgtctcaattaaccttgaaagtaaatacattaaattatctgcttaaaaaatatagattagtaaaatagattttaaaaaccatgaaccaactayatattgcttaaaataaactcatcttactgatacag

SEQ ID NO: 455440 - DNA, 570 bp, Homo sapiens
  misc_feature (1)...(570): n = A,T,C or G
tcaataaccacagaatatatattcctctcattagaggaattagaacattctctaatctaaaacatttgttaggccacaaaacaagactcaataaatttttaaaaattaaaatcataccaagtttcttcttgcatcacaacagaataaaactagaaatcaactccaagagaacctcttaaaactatgcaaatatgcaataactaaacaacatactcctcaacaattttggggtcaatgatggaatcaatttcttttaaaagaaattttttgaaataagtgaaattggaaataccgaaacctccgggaaacagtaaaatcagtgctaaaattagagtttatggtattaaatagctacatcaaaaaatagaaagatcacaaataaacaacttawtatctcacatcaaggaactagaaaaacaagaacaaaccatatgcaaagctagcagaagaaaagaaacaatgaagatcagagtataaacaaataaaattgagaccccaaaatatacaaaatatcaatgtaacaaaaacttgcttatttgaaaagataaataaaattgatagnnnnnnnnn

SEQ ID NO: 455441 - DNA, 556 bp, Homo sapiens
gcagtgtgctgcctttttcagagcatttaggctaccaaatcaacaatattctgctgataacaaacttccatgaagccatggaaatagtttgattatataaaaactataacttagatgatctggtaatcctgattccagcaaggatgggtggtcagggacctgagataaagcttgagttctcttttccaaggccctgtgaattcaatattcagattkaaggatcttcctctaaaattacagaatcgtgatgccttaggcttttgaatgagtggcacttcctcctaaattaaaaatgcttttgtggaacaccttccacatagcatacactgaagtaggtactttcacatataatgtcccttttaattctcctaaaaacatgttttttttcctttaaatttagtatcaaaaattaattatattctgagaacttcataatatcctttgagatcattagcatagctctagagggtcctccctgataccataagaatcactagtttatggagagtcatctgtcagtagctttggcattatctaccattactcctaatctttg

SEQ ID NO: 455442 - DNA, 499 bp, Homo sapiens
aatccatccaacattttaagatgtctctcttttttgtgaatagaatgagtagccaatagcaaaacacatcctcacatagaattctaagttacacttcttttcacaaaattctggtgccaaaaaatgtccccagaaataaataatctgcaaatatcactgaaacagatcaggactgatggatgaatcaaccatgatcataaatcttgggtgaaagctgaaaggaataaataactttccttttactttctcatgtcaccaactcggtaatgacaagatcctctttgaaaagatatagatttaaaagctgtctctcccattatattttgagtacattttcccttcctcagacatctccagttagggaggtatagaataccaaataaaaggtgatattaaaattattagccaagttttcagyagtcagctagaattatgaatatgttgcaagaagtttccaaaagtattgactgctgcccttaaaaatatttcaataaaagtt

SEQ ID NO: 455443 - DNA, 499 bp, Homo sapiens
aatccatccaacattttaagatgtctctcttttttgtgaatagaatgagtagccaatagcaaaacacatcctcacatagaattctaagttacacttcttttcacaaaattctggtgccaaaaaatgtccccagaaataaataatctgcaaatatcactgaaacagatcaggactgatggatgaatcaaccatgatcataaatcttgggtgaaagctgaaaggaataaataactttccttttactttctcatgtcaccaactcggtaatgacaagatcctctttgaaaagatatagatttaaaagctgtctctcccattatattttgagtacattttcccttcctcagacatctccagttagggaggtatagaataccaaataaaaggtgatattaaaattattagccaagttttcagcagtcagctagaattatgaatatgttgcaagaagtttccaaaaktattgactgctgcccttaaaaatatttcaataaaagtt

SEQ ID NO: 455444 - DNA, 458 bp, Homo sapiens
aaagtttgccattcatgtcaaattcttttcatgaaattttgattactttcagagctgcctcctctggaacatttatttatacttgattttttttctcaaaaaaaaaaaaaaaaaaagtactccactaggggttaggaaaacaattatctaatctacttaaacttgtaagttaattaaaattaataaaattctgtatgttagaactcccaaaagcagttttatggcctaaaattctgcgtttgttttaatggaagcwagtttaggggcaaggaattaacatcatttcaactaattcaaataaaaaggaactcacaggctcacaggacagggagctagggataaggaagccatcaagaatccaagaaaatattcccttggccacttggtctgtttcttaatctctctccccaccactcccacctcacctctcctgcaacccagcattggcttccaactct

SEQ ID NO: 455445 - DNA, 347 bp, Homo sapiens
tctgtaatacattaaaactcaccaaaggtacaggcatttgcttctgctacaagcacagctggcctctccctagctattcacatacacctgccagatttattagcctgaaatgascatgaaaccttaacagagctgggatcctgggacattcgcagccctcccagccccaccgccccccttcctccctggtctgtgcagagctcccaggtctttctgactaaacctcagcaacaggctccaaaccttttgctacagcggcctcacctgcatcccactgcttgtttgtcagagtctctttgactgccttcctcatctctgggattctgacctagctgacccaccaggag

SEQ ID NO: 455446 - DNA, 632 bp, Homo sapiens
taacaaggtacacagactgggtggcctaaaaaacagaaatttatcttccacagttttggagggtgaaagtccaagatcaaggtgccagcaggttttgtttctcctgaggcctcttgtcttggatggcaaacagcaaccttctctctgaaccctcatatggccttttctctgggtgtccccatcgctggtgtctgtgtgtccaaatttcctgtctttattaggacacaagtcatattggattagggcccacctgaacaacctcattttaacttttcacctctttaaaagtcctrtctccaaatacagtcatattctgaggtactggggattagagcttcaacataagaattttggagggacacatttcagcccattaaacttgccaagagatgttcataaaatttagaataattattaatcaaactgagattcttaaatagaggagacagtctactcacagcttccatagcattaccctgctgaattcacaaaacaaaggaggactgtgttatatccaccaaggccacaaagcaatgtacttgttgattatgatagtacaactgtcacaggatgccctaatttacaatgccatagagagctcctacatttactaaaactgtgatttgattgtt

SEQ ID NO: 455447 - DNA, 442 bp, Homo sapiens
tcctactatttggcaattcaatatttattaaatacctaacagaaaacacctgaaaccaggccaggctttgtgccaggcagatatatcaatgattaaaatatcaagtacttactaactgattcctatgtgccaggcactgytgtaaacattttatattcattatctcattaaattttcaccaaaaaagcctttggggtcactcccatgaccagaggcaaggacaggtgaatgacagagctagagctagaacctgggacatgtgatttcagggcataaactcttcaatgtcactaccaagctaaggaggacccgttacctgtggaaggtatctgagttaccggtggcctatccatacaggtctgcagcgatgtcaatacttgtctcctcagaagaaggaattcgactgagggccataaggcaaaggagctgtaagtgagttttc

SEQ ID NO: 455448 - DNA, 645 bp, Homo sapiens
ctgggtaaactggatatacgtatgcagaagaataaccctagatctccgcattataacatatacaaaattcaactcaaaatggcttgaagacttaaaagtaagacctgaacctatgaaactactagaagaaaacattgggaaaatacttcaggacattggtctgggcaaagagtttttaaataagacctcaaaagcacaggcatcaaaagaaaaatagatgaattagattatatcaagctaaaaagcttctgtatagcaaagaaaataattaacaaagtgaagaaacagtttacagaatgggtaaaaatatttacaaactattcatatgacaaggaattaataactaaaatatatgaggaacttaatagcaaataaatgaagataataatagtaatccaatttttaagtgggcaaaaaccctkagtagatatttcttagatgaagatatacaaataacaaccagttacatgaaaaaaaattctcaacatcaggtaaataccaatcaaaaccacaatgagacatcatctcactcaagttagaatagatatcatctaaaagacaaaaaattacaagtgctagtaaggatgcagagaaagcatacactattgatgggcgtgtaaagttgtaaagccactatgggaaatc

SEQ ID NO: 455449 - DNA, 642 bp, Homo sapiens
taccatagtttgtttaccaatttcccagaaaatggacatttgattggttaataagttgttgttttttttaaagccagcctggactaaatgccaggctgtcaagaaggtagatctcactcttacccaaggatgaggtacaaacgctggctatatacagttatgaataagggcccacagagcagccctatgtgttttcttatgacagcttaatatcttgaaccacgatctgcagatgacctccagatctcagattttcctgttcacagttctcagattttattctgtgagacatgccccatgtagrgagcgctgtgactgagaacctatgttgacaggctccatgaacaccgtggagcagcaaagacgttctgcttttgtgccttgctttctacataacttccatggcagttgcatggagatccaaggtaggccaacaggagtttcacaaaacataccatattacaatatatttaacataatataatttattatatatagtgtcatataatttaatataaaatatatagtcatatcacttgtctgcatacctgatgcttttattcttgcataagaaaaaataatcatggctgggcacgatggcttatgcctctaatcccagcactttgggagactgaggcaggt

SEQ ID NO: 455450 - DNA, 256 bp, Homo sapiens
cgtgtgtttagtccagtggccgcactagttgcttttaactggctgacaggtgccaatgtttagcccctgaattstaaggaaaaatacgacagaataacaagcgaaagaggtctgatggtatgaaccacttggcaatagtcgcatctgggtcaccaagatgtgtccggagttggttcctttcggtgaattcttggtctcgctgacttcaagaatgaagctgtggactttcgcagtgagtgtcacagctcttaaaggt

SEQ ID NO: 455451 - DNA, 534 bp, Homo sapiens
tcagtgctgaaggaacctgcaaacctgctggtaaaattatctgtaggatgcgtggctccctttgcaaacgttcccagagtgttgccacttgatggttatccagcctttgctggagccctttcagtgaggacaaaatgacagctgtggtagctctggctgctgtcgagcgcctttttgttttaagttacactcagtccttttagtgccccagtattcctcattctctgcttcgaggccgtagtgaataaggaaactgccccttccaaatatttgaaggaagagcgatgtcagctcatgccttcccagtgtctaattcaattgccaaaccakccaggtgttccacgcacaggagtggagctccagctgagaggtcccacagtttacctaggctcagccatgtttacctgagatgggcagatgcagcccggctgagagcagggtcagagtcagctgagaggagccacagtcggagctgagggaaaatcggtgaacatcaagcccagacctagaatagggaacagaagaaggacatca

SEQ ID NO: 455452 - DNA, 610 bp, Homo sapiens
cctatggctcttatctctaaaccggaaggcgatttcatggtagttctattgcactagattggccatttctttgatcatctcccaaccggcacatgtatggaatggttgaactactgctgtcaatacagttttaaaaacgaatctgatatgtaaaccctgagagaggtattaaccataatgacatttgaatgttattagccatctttcgtcctgcctgagtatcttctgctctgcccagtttactaatacaccagactcctctgaactaggataactttttgataagtttggactgaagaaatctaccagtttccagagactatttcataacaggaatgatttggtaaaccagtgttggcatttagttcagtctatttcccaacttaaatagataataccagtttgcatgtatgtctagttttatttaatcttttaaaaagtgtttaatacagtcatgcttgatgatgcagcagaatacctaaaggctggtattaagatatgtttctgatcctctgaaaagcttttctgacccagtaggctgtgaacattcacaatagccctggaggcaatcctccatgtgttattgcrggttgataactgcacctggatt

SEQ ID NO: 455453 - DNA, 609 bp, Homo sapiens
ttatatttgtatcatgtactctgtcttgaaatctgaatgtatctttttgagccattcctttttctgattctcccaggcctgttttttcttattaaatacatttttagagccattttagattaatagcaaaattgaagaaaggtacagagagttcccaagtacccctgcccctccacatgcacagcctcccccattatcagcatcctccaccagagtgatacatttgttacaaytgatgaatctgcattgagacatcattatcacccagagtctatagtttacattgtggttcactgttagtgttgtacattcttttggtttgtaataataacatgtatctaccattgtagcatcatatatggtattttcactgccctaaaaattcaccatgctatgtctacccagccctccccctccatcctttctaacctctagcaactactgttccttttactgtctctatacttctgtcttttccagaatgtcatatagttgaagttatatgttgtcttttcacattggcttcttttactcagtaatgtaaatataagttttctccatatcttttcatggcttgataattcatttctttgtatcactgaacaataa

SEQ ID NO: 455454 - DNA, 586 bp, Homo sapiens
gatggaagtaataaacaaaaataactttgctgtttttctcagctcttcataaatttgcatcagagtttgtagatgatacaaaaatcattgagacaaagtattctcataaaaacactrtttctcaccctcccgttttgttatataaaaataaacaaagctctgtgagataaatgagcacaaaataaattgcctttaaataaggtagttatttttttcacagtcactcagaagttttattattttaatgaaggtcattatcacttcacatataaaaattacgtaacatgagggccgggtgcggtggttcacacctgtaatcgcagcactttgggagcctgaggtgggtggatcaccaggtcaggagatccagaccatcctggctaacacagtgaaaccctgtctctactaaaaatacaaaaaattagccgggcatggtggcaggcgcctgttgtcccagctactcaaaaggctgaggcaggaaaagcacttgaacctgggaggcggaggttgcagtgagccgagatcacaccactgcacacccagcctaggcgacagagcaaggctgtctcaaaagaaaaaaaaaata

SEQ ID NO: 455455 - DNA, 559 bp, Homo sapiens
tgataataaaaatatagtaaagaagtcaccaaaatagatgacaaaatgtgtttggccacatctttattgtcctttaattgtgactctgggatctgaattgatatgacatagccatgtggtactcacatgttctttggttcaaacttgtggccttaaaagcttcaaagttgctgtgatcatttatctgggctgatttggaagacccacatcccggcagtagtatggatttttcttctgggcaatatattgtggcaatataatagggtgcacatgacaacttatcaccaggatagtatatggagtaatggatcatagttgctgtcttggaatacaggcagaaacttcattagagtctggatttaggataaccaatggcattgtattcttccatactgttcaactgcttrgagttagaaacaggtttacattcattcagtcactcaacagatattcactgagtgcctctgccctgcattggtatgaagcactgtacatacaggggtgagtcaaagtctttgctgtcaggtaaattaaattcttgtaaggagacgcaaatgaa

SEQ ID NO: 455456 - DNA, 484 bp, Homo sapiens
agacaaggaattcagtgtaccaattagttcagtttgctgttagcattcttcagaactttatttactatactgagttttacataaactatgtttacatccataaataccagctgaagtcattgcaaatgacttcaggtttccaggttctcaggtaagagtctcaatcgtcatagtacacaattgcaaactcagttctttggaacctgctactaatgcaggtgcaatgcagaagggattcaacaagcgctttgaaaattgastctttaaggagcttactaaaatagactcatgaaaattaaagccaagaaagatctgattgttctacgtaattcatcccttgaggacttgtatgagattgtcttttgcagcctatttttccatatatttccccacgtaaagtttgaatcactcaaacaaaaggacttctaatccttccattgggacaattttataaaagacctctttattagggagtatttcctga

SEQ ID NO: 455457 - DNA, 469 bp, Homo sapiens
atctggggcaaaggaatcaggagagcatgggagctttcctgatgtaagaagrgtgcctgtaggtgttaagagcagaaaggcttatgctcttttgtgcttcacttattcattgacttattcattcaataaatacttactgagtgcctccaagtgttaactgctggcttacccattacagaactcccagtctaatggggctgtgtaaaccaacagttgcatagtggaaaatgccaagataaagctttacaggtaattgttgatatggtgctaagacaaagtgcttgtgtacgtgttgtggccttattgttctgcaacgatacttgtacagagttaaatgttaagaaactttcatggcaaattgtggtgtgattttcatgactgttgaatataataaccacaaagtgtgcttagttttttcatcttcttatttcacttttgtgataatttgtttttattatatttttcaaaa

SEQ ID NO: 455458 - DNA, 469 bp, Homo sapiens
atctggggcaaaggaatcaggagagcatgggagctttcctgatgtaagaagagtgcctgtaggtgttaagagcagaaaggcttatgctcttttgtgcttcacttattcattgacttattcatycaataaatacttactgagtgcctccaagtgttaactgctggcttacccattacagaactcccagtctaatggggctgtgtaaaccaacagttgcatagtggaaaatgccaagataaagctttacaggtaattgttgatatggtgctaagacaaagtgcttgtgtacgtgttgtggccttattgttctgcaacgatacttgtacagagttaaatgttaagaaactttcatggcaaattgtggtgtgattttcatgactgttgaatataataaccacaaagtgtgcttagttttttcatcttcttatttcacttttgtgataatttgtttttattatatttttcaaaa

SEQ ID NO: 455459 - DNA, 469 bp, Homo sapiens
atctggggcaaaggaatcaggagagcatgggagctttcctgatgtaagaagagtgcctgtaggtgttaagagcagaaaggcttatgctcttttgtgcttcacttattcattgacttattcattcaataaatacttactgagtgcctccaagtgttaactgctggcttacccattacagaactcccagtctaatggggctgtgtaaaccaacagttgcatagtggaaaatgccaagataaagctttacaggtaattgttgatrtggtgctaagacaaagtgcttgtgtacgtgttgtggccttattgttctgcaacgatacttgtacagagttaaatgttaagaaactttcatggcaaattgtggtgtgattttcatgactgttgaatataataaccacaaagtgtgcttagttttttcatcttcttatttcacttttgtgataatttgtttttattatatttttcaaaa

SEQ ID NO: 455460 - DNA, 469 bp, Homo sapiens
atctggggcaaaggaatcaggagagcatgggagctttcctgatgtaagaagagtgcctgtaggtgttaagagcagaaaggcttatgctcttttgtgcttcacttattcattgacttattcattcaataaatacttactgagtgcctccaagtgttaactgctggcttacccattacagaactcccagtctaatggggctgtgtaaaccaacagttgcatagtggaaaatgccaagataaagctttacaggtaattgttgatatggtgctaagacaaagtgcttgtgtacgtgttgtggccttattgttctgcaacgatacttgtacagagttaaatgttaagaaactttcatggcaaattgtggwgtgattttcatgactgttgaatataataaccacaaagtgtgcttagttttttcatcttcttatttcacttttgtgataatttgtttttattatatttttcaaaa

SEQ ID NO: 455461 - DNA, 491 bp, Homo sapiens
cctggcaatttgaaagtggctggcgttttaygggcttgatggaatctttgttaattgtgtgagacatttgccctttactggaaagtggagttagcacgtagccaaggatgacatctcacctatttgaactttaccattttggagatgtttcttggaaaacattttagttctatgcttctaaatggacagcatctatctcttcattactgatagaaaatgctgaagaaaagatgtgttgaaatacatctctgctaaaatctctgtattccgtaatcatgacccttgttaactcagtacaaagaacttgcatcaccatttaaacaatgaatgaggcccatgtacgaccccaaatacgcaaaatagaatagatgtaataaatgtacttactttcgaagtggctgggaactaaattttagattataagctttctggaaatatctggtgttcactacacgggaataaaagtaagatctcgccctaccccgcctcca

SEQ ID NO: 455462 - DNA, 640 bp, Homo sapiens
cccttgttaactcagtacaaagaacttgcatcaccatttaaacaatgaatgaggcccatgtacgaccccaaatacgcaaaatagaatagatgtaataaatgtacttactttcgaagtggctgggaactaaattttagattakaagctttctggaaatatctggtgttcactacacgggaataaaagtaagatctcgccctaccccgcctccaagtttgaaggaaaattgaaaaaaaaataaatagattcggacctacttattattgttttttaacagataagcagaggagatttgggaagtcaaagttcaatcaaagtcatttggatgaaataggaagaaggcattatgagaatgtaagtaactagaaaagttatatacaatcactgtcataagtcactcagatggtcttataaactaaatccatcttcctttccctccaaataaataaaaacaaaaggccagaaagagtaagatattgtccacgtttctccagtatataagtatggaagccagggggatatgtgtgtttgcaactaaaactattattcaggtttatctttgcagttgtgagggatgtatcaggctatgctgttttaatatcatcagccattaatcaaagtaaccaatatgctctgtttc

SEQ ID NO: 455463 - DNA, 628 bp, Homo sapiens
tgaaaagaggttacatgcatattaaaaggttcatgaygcataagtaagagcagtgtaaaatattggtaaatagcatagcaatagtcacatggtctatgtgaaaataagagttcatgacacataattaagagcagtgtaaaatattgttaaatagcatagcaataatttccattgtttttccacttgtaggcagaaaaatacaacattgcgttttcaagcaaatgttataattttgctttgtggaataaagataaagaatatatatttaaaaagctatacattattgaaccactctttggacatagacaaattatattattttaaaagttatttttattatttctatgttttattttattatctaaggaatagaactatgttcatactatcttggcttatttatttagattgctcacgtaacaaaacttttaaaattgcagtcaattttgccaaacatagaaaaaaattagttaagtgtgctgttcaatgtaggtaatattattgttactttttaaatattctaagttgatactaacttatctaatgccaatataaaatagaatatggatggagacaaatatggaaccaggattcttgggtgattaacattggctctttgtttcttatg

SEQ ID NO: 455464 - DNA, 628 bp, Homo sapiens
tgaaaagaggttacatgcatattaaaaggttcatgatgcataagtaagagcagtgtaaaatattggtaaatagcatagcaatagtcacatggtctatgtgaaaataagagttcatgacacataattaagagcagtgtaaaatattgttaaatagcatagcaataatttccattgtttttccacttgtaggcagaaaaatacaacattgcgttttcaagcaaatgttataattttgctttgtggaataaagataaagaatatatatttaaaaagctatacattattgaaccactcttyggacatagacaaattatattattttaaaagttatttttattatttctatgttttattttattatctaaggaatagaactatgttcatactatcttggcttatttatttagattgctcacgtaacaaaacttttaaaattgcagtcaattttgccaaacatagaaaaaaattagttaagtgtgctgttcaatgtaggtaatattattgttactttttaaatattctaagttgatactaacttatctaatgccaatataaaatagaatatggatggagacaaatatggaaccaggattcttgggtgattaacattggctctttgtttcttatg

SEQ ID NO: 455465 - DNA, 466 bp, Homo sapiens
gttgaaactttgacctcctctcatgaatcctgaatgttcttaatggcactagaataaaaaggaaaatcttcatttgcagaaggttttcaatttactttgcctaactccttcatataaattattatctatgtaatctataagtcataaaatatactttttaaaaataataagagctgaaagttgaattactccttgatccatgggctgcagaatggttgttgtgttagcaggcataaaaacaacattaatttccattaacatctccatcagagctcttgggttacaggaaccttgtaaatgagcagaaatattttgaaaggmatccttttttctgagcagtaagtcacaatagtgggcttaaaatattcagtaaactgtgctgtaaacagatgtgctatcattcaggctttgttgttgcatttatagagcacaggcagagtagatttagcatgattcttgaggtcct

SEQ ID NO: 455466 - DNA, 600 bp, Homo sapiens
gaagtcaaggtccagtccgatgagccatgttggttggagccctaagtctggttgtaaactgcctgactttgaaaagccactctccagtgaggtctggtgttggtgcctttttctgatgtctaaagcatctctgttttgtttcagctggcaggtttcatctacgcctgttatgttgtgaaatgtataactgaagaagaggacagctgtaagtattaaagctctattctgtttctttcaagttcaaagcatctcctttactgcctcctacttagcmttcctattcctcagacaagatcctacaacacagcattagaatggaaaataagccttttgtgcccatcagactaaagtgtttctcataacagtatccagcaaactgaagaatggagaagcacccattttgaaaacataacttctttcttttcattgaaaaccttttaaaaatcatttcctcttataaacaattctagtagggaacagagatgggagattggagatggaaatgattttaaaatgtggctaacttgaccattctcttttttatgatccctttattaggtattgataactaaccagttttacccaagactacaaatcccc

SEQ ID NO: 455467 - DNA, 586 bp, Homo sapiens
tattcaagtaattcaaaataaggtataaataagcttactaccagagtggttaactaaaaattattatagaattagtgattttagaacagttgctattgctattataaatttgcacagaaattgcattgtattaaacagagcgtttatttttgaataaaatatcgcttttgtattcatttgtgcaactgcaaaaaacaattgcttcacctgcctttctcactccaaagctgtctaaattaaactgttccttaagcaagcccaggtatcccttagaattctatctttgacggtctagattcaactggttatttgaattattcctagttataaaaatgaaaaaaataatattttatcaaactaattttaattaatatgttacctctatacaatgcttctaatacrtaatactcaaatcatagagagctatggtagtaactatttgtctgaccacagtaaggttttagaattcataatcccagtcacgatttttataagcagtgtatttgtccattcatacagcaagcatattggatatgagtgagtccttgcactgaaggagctgataattcagcaaataaggcagcta

SEQ ID NO: 455468 - DNA, 565 bp, Homo sapiens
ttatacacaagtagactgacgcttgcctcagatgttcatgggactagtaaacaggtgggaggagatgttcatttgggctcgctgtctgtccagttgtctttggtgactttcagttaggttcatttacttgtagtcattcacacctagacagttatgagtatcttttggttacaatgctttgggttgatattctctgtatgtaatcactttcctgatgtttatcctcagacgatgcctggacatatgacttccgatccatagagtaaaaaaggtttgacatttctgtatcattttggtaattatattacaaaaaattatcctgatccttaaaaagttgggtgaaaggttaaaataaaaccactctcaagcaaaccctgaaacatgggagggatttaatgtacatgtaaacactgagagggtctctatgtgcctatttttgcccactgtggatttgcaataatgcatcattatttgcagtgaaacrtagtggcaggagtaggtgctagctacctgcttgccaaattggttaagtttccattactaagagccttaggaggaacagcgg

SEQ ID NO: 455469 - DNA, 574 bp, Homo sapiens
tttttgaagaaagctggcagaaataaaatactgttacccatttgcaaactgaggtttgtaatctgacatttacaagggactgaactgtgttttggacataaagtcttctaactgtgactataataaacttctcagttgttatgaacctcttgctttggcaaaaagttgctgatgtaactcaacactttgagttttcattaatgagattctgagcgaacagaagtaatactaatcaattcagagggaagtgtatttttaaatgttctttcccacatcttggtgagatcctattaaaatatttaatgcatgagttattttcccttgtgacttctaagattttgcctgatttttcatctaactcccataatattcatgtgtagaacaataattagagtcactcacttaagcaggttgttctgaatattagtaatgaggtgtgttggaagtcatcaaaatgtgaaattaaaaatatatcgataaatcatctttataaatacacacttctttatgtattttttctgagcrgagaattctgctggattctaaatcttacttaactgaaagaaagaaaaag

SEQ ID NO: 455470 - DNA, 443 bp, Homo sapiens
tcagtgtttccttcttatagacaacctgaacattcttaataattctgttggggttccaatttacttttttttctcttcaaggagaacatccagtccagcctccaggaggtaatgtgagaggagagtcgctcttcggcaatgtggcactctactaaatggagaactctgcagactcccatcccctacccgtgctccccaagccccagctgccaaatcagtttggccttactagttgctgcaaaccctggcaactgcaggttaagaaayagaccttatgtgtaattagctctgcagaactcagtaacatcttcattcttaaagtatgctgtctctgctgtaatcgctgcactacttaatatttgtaggggtggagaatatctcaataagtaattcacaatgttctattaccaaaaagagggtcagttttattagaagctgagttc

SEQ ID NO: 455471 - DNA, 559 bp, Homo sapiens
actgtgcctggggcctcaaggccactggcccttacagcaaagcaaagggcagtatccatcggctctcatgttcccgtttcaacgccacatccccttgtctttgagatctcagtatgtttcctgataaagtcagctctgaaatgagggtgtggtagtatctgcattttgtatatttctttcaagctatgagaatgcaagattgtggaattttagtaagtagtctatataggatgcatttcaagattcttaatgcacttgacacatcattcatccaaagtacaagttcctggcaattccggttcattacaacacagacctgacactagatgtgaggcaccacctctgagcacagtagcagttgttgcaaaacctcagcactaaagtayggccttagggcctaagggaagaatcttactgccattattcagcattatttaacataattagtgactagcttgctctttgggtttccacaactcacagccagcagctcagggcagcagcacaatagaaaggaatggacaggagttgacactggaagtgatgtgggtgaaaagtg

SEQ ID NO: 455472 - DNA, 536 bp, Homo sapiens
cctatctcacaactattatctgagatctcagaccccaccatgcttggagtatagcaatggagaggagataagggagcaggagagatatctagrctaacagaatttggtggctaatgagattgaaaagtgtctcgagacacttttctggggttttcagagaccctgcattgcattaaatatctcatctgtaggtacatgatttagttggtgtctcttccatacttactatattttaacactccctccctcatgccctaagaataggtgatggtaaagattcagccatcacccccctacccaccagtcttcttagaaatccttggaagaaaacccacgttagctctctctcatgacagcccacatctgctaccaaggatcattactttagatccatgatatgtagcagtgcactttcctttctcatactgcctaatttttgtttgaccacttctcaggtagctctagccacagactctattttgagatttatcaggcctgagtcagacactagctgctgtgtttcctaggttccaaag

SEQ ID NO: 455473 - DNA, 638 bp, Homo sapiens
gcattaaatatctcatctgtaggtacatgatttagttggtgtctcttccatacttactatattttaacactccctccctcatgccctaagaataggtgatggtaaagattcagccatcacccccctacccaccagtcttcttagaaatccttggaagaaaacccacgttagctctctctcatgacagcccacatctgctaccaaggatcattactttagatccatgatatgtagcagtgcactttcctttctcatactgcctaatttttgtttgaccacttctcaggtagctctagccacagactctattttgagatttatcaggcctgagtcagacactagctgctgtgtttcctaggttccaaagatactttgaagcttttctcaacaggcttgcaaaaaaaagagatcaccccyaccccacccaaccaccaccatggagatgatgacattcatagcacacctttttccaaagaagttctacttgcaatctccaaattccctggccatttcaactcaacctttccatatgttcaatgtgagtgtgtggctccacgtcacaaacgatgacttaagacgttatctgtacagggtctgcctagtccatcagaacctcactttggagtgagtagttggca

SEQ ID NO: 455474 - DNA, 547 bp, Homo sapiens
tagcacacctttttccaaagaagttctacttgcaatctccaaattccctggccatttcaactcaacctttccatatgttcaatgtgagtgtgtggctccacgtcacaaacgatgacttaagacgttatctgtacagggtctgcctagtccatcagaacctcactttggagtgagtagttggcacctattatcttgtggccrtaactatcactgaaactgatagagtgcaatttcccataactgacctttttttcttagaacttatcttccttcatgacttgctgaataataaaatgcttttgatgcatttcctttagccgttctttccctggaagacaacatttgcccatgtgccattgatagctccaagttggcataggtgattgcaagctctctgagtgcaaaattctacttttattccatttacagctgggtatcacctaacatggtgaacttcatctaaatagttgatttattatctccaccctacaagaatttgataataatatttcctaaaaaatatttacttcttaattcttaagaaaca

SEQ ID NO: 455475 - DNA, 580 bp, Homo sapiens
cataattaatttagctgtgtcctcgcttcctgtaaaatacagcatggggtaggaaaaaaaaaacaaacaaacccacatttccaaatgggaaagtcaaagcaagtcagtcccaagtaagctgactaacatttataaagtaattctcatccttgtaaattgccttcttgcaggaaacagaccttatcctgacttttaatatatcaatgcaccgatcttggtggatggagaatggaccaggatgtacggtgacgtcagtgacacctgccccagactgggccccagaagaccatcgctacatcacggtctcagggtgtttgctggagtaccagtacatagaagtggctcatagttccctccagattgtcctcgcagtaagtgttggcagccaaccgctccttctagtgcctctggggttgttttatttctgtgcgaactcagtgcacacaaatggaatctgtgggtaaagtgtggcctttttgctttttcctcattaatgcgacttttaacaggaaatcctcaggttaaacyaaaccatcctctggacttagtgtgctgattttcttcgacaattagtaaatac

SEQ ID NO: 455476 - DNA, 454 bp, Homo sapiens
ttcagactattgaaaacccctccttcctcatctttatctttaggtctctcatgtcattagtcttccttcatgttatatatcatagaagcattttatttctttaatctgcaaaacatatttaagtgttagaagacatttgcttttattttagtatttaatatggctctcatgtagttttcagtctttttttacaggttttccaaaataagttatttgcttcattttagttttttctactttacatctaagttttgtacaaaacctgtaggaagmaagttttagtgacattgctagaattctgtgtattcatttgtaatcttttcttctattccctccactgtcgccctttttattagcaaagagcaactctgctgctattaaactgaaattttatgctaaaggacattttatcccttgccaactttaaaatatgtatttgaaacatcatttatct

SEQ ID NO: 455477 - DNA, 566 bp, Homo sapiens
gcaaacatcatacagagacctgagaagtgcaccttactattattgctctttaagcctgccacaccagtgtgaacaagcccagattattctgatgaatgattagatatgtgagaccacaaatatggggtccatttatttgacttcatcacccccacctaacaataagccaagccccagaaaaaaagtgctacccagatgattcacagtcaaccatagactcatgagtgagcccaaccaaattcagcagaagaactgcccagctgaactcaattcaaaatgttgacctaaaacacaatgagcaaaaatgaatggttgttactttaagccactaaattttggtttggtgtgttatgtctcaaaagttagtgataaaattatattcacatactgatagaacgccagttgaaaataaaacaatgaattactgwtagatgcagtagcttggattaatctaaaaaatattatattatgctcagtgaaagaagccagacaccaagcaataagattctattgtatgaagttcaagacccagcaaaagtattctatggttatcaaaatcagaacag

SEQ ID NO: 455478 - DNA, 529 bp, Homo sapiens
agattttgcatgttctcactcctacctaggacctaaaaattttaaaaattgagctaatagaaatagataatagactggtggtcaccagaggatcggaagggtataggggaggggggataaagtggggacggttaatggttgtaaaaatatagatagcaccaataagagccagtatgtggtagcacaacagagtgactgtagcaaacaataattcattgtagaatatattrtatatattaaaaaataactgaaagtttggaattggaatgttcccaacagagagaaatgatacatatttggggtgctggttatcccaattaccctgatttgatcattacacattgtacgtgtttttcaaaacatcacatacactctataattacatattactattatgtatccatagtgattaaaaataaaaaattaaatcagttagctagagatacgtggatttattgctgaattctctgttctgtgtcattgttctatgcatctgtttttatgccagtactattctgttttgattact

SEQ ID NO: 455479 - DNA, 529 bp, Homo sapiens
agattttgcatgttctcactcctacctaggacctaaaaattttaaaaattgagctaatagaaatagataatagactggtggtcaccagaggatcggaagggtataggggaggggggataaagtggggacggttaatggttgtaaaaatatagatagcaccaataagagccagtatgtggtagcacaacagagtgactgtagcaaacaataattcattgtagaatatattgtatatattaaaaaataactgaaagtttggaattggaatgttcccaacagagagaaatgatacatatttggggtgctggttatcccaattaccctgatttgatcattacacattgtacgtgtttwtcaaaacatcacatacactctataattacatattactattatgtatccatagtgattaaaaataaaaaattaaatcagttagctagagatacgtggatttattgctgaattctctgttctgtgtcattgttctatgcatctgtttttatgccagtactattctgttttgattact

SEQ ID NO: 455480 - DNA, 529 bp, Homo sapiens
agattttgcatgttctcactcctacctaggacctaaaaattttaaaaattgagctaatagaaatagataatagactggtggtcaccagaggatcggaagggtataggggaggggggataaagtggggacggttaatggttgtaaaaatatagatagcaccaataagagccagtatgtggtagcacaacagagtgactgtagcaaacaataattcattgtagaatatattgtatatattaaaaaataactgaaagtttggaattggaatgttcccaacagagagaaatgatacatatttggggtgctggttatcccaattaccctgatttgatcattacacattgtacgtgtttttcaaaacatcacatacactctataattacatattactattatgtatccatagtgattaaaaataaaaaattaaatcagttagctagagatacrtggatttattgctgaattctctgttctgtgtcattgttctatgcatctgtttttatgccagtactattctgttttgattact

SEQ ID NO: 455481 - DNA, 533 bp, Homo sapiens
agtcaaatacagatgttttgatattcttgcatttcaaaatctaaagaatttctttacctttaaaaccctgcctttgaacataaaagtagatgccacatctagtgcacactaggcactggttttatatcttccttagaagacaaaacacatttgtgctgaatgaggagggaagaatccttattagatgcrggtagaggtgctttgagaggatttctgtatgaaagaaagactttatgggtcatgactcaagactgcccactgggatcctgtaaacacatgtgggggatatgagacagaaactaacatggacttgggcatatgaatcaaaggaagtctgccgtctggatctcaggacagaatcatcttcaggggaccaccaggattgtggcagggtggcctgtgtcagagaagcactgtggcagtcccttacatctcctacccaacaaatccagagaagaagggaaccctgaaatacccctgttctccctgagaatggtctggaagtagaaatggagtatttcacactttctcag

SEQ ID NO: 455482 - DNA, 512 bp, Homo sapiens
ttagtgtattcaagctgctatgacaaatgtatcttaaatggggtaacctataaacaagagaaatgtgtttctcagagttgtggaacctgtgaaatttaagacgaagtgactgaagattcagtgtctggagaaaggttgctttctggttcatagatggtagcttgtatgacaccatagttggtactgtctgctgtgacctcacatggtagaaggcacaaacaagctctctcaagccttctttagaaaggcacaaatcttactcaagagggtgctaccctcatgacctagtcatttcccaaaaggccccaactcctaatattatcacattgagggttaagatttaagcatatggatttggggagtatacaaacactcagaccatcacrcattcccaccactatcctaggctgcatgatctcattcacttcatgttcactcttcccatccttctcgggattggtttcatggacctatgcacagggtcccacactcaaagggctccatgcatggtt

SEQ ID NO: 455483 - DNA, 566 bp, Homo sapiens
ttttgcctgtctcttacattatttatctactgaggtaattttwaaattaaattaaattaaattctgaggtaatttaaaaattacctcagtaatggtaacccaatgaatgaggtgtgtctttgagaccagtaatagataaagtactctgtgtgtaaagagtatttcctaaatactattgatggattattttgaggctccattttgagtccttgaggtttttggcaggagcctagggactggagtctctagaaaaattcgtggtttggccacagcaggatttgccttcacttcactggatttggaggcagtgctactggtggtttagattgcacactctcagctacattgccggggttcagaatcagctctgtgtcttcctacatatcacagtttgctcaacacacatgtgtttcagtttccttttctataagttgggagctaataataatagtgcaactccatataactgttggggttgaatgaataaaataaatataaaaagcatagaagaatgcttagcttctagtaagttctcccttaatatcagctgttattattattattag

SEQ ID NO: 455484 - DNA, 611 bp, Homo sapiens
gctgttgcctgcaatcacagcactttgcaaggccgagacaggaggattactgaggccgagggttcaaaaccagcctgagaaacacagtgacacttcatgtctacaaaagyataaagttaactaggcattgtggcacgtggctgtagtcgcagctactcaggaggctgaggcaggaggatcacttgagcccagaagttcaaggctgcagtgagctatgatcttgccactgcactccagcctgggtaacagagagagaccctgtcacttaaaaaaaaagaaaaagaataagtgtggaaatataacagatcattctataaaggtaagactaatttattcaaatataaatctgtaatgtatgcatttatagtgactttctatgcataggtattcagtataatatttgactttgaatgtatctgagtttgcgtcaggcagtaaaccattcatattctattgaagttgtaatagaggtatctttcttataaatttacatatttctcagaaaaaaactagtaacaaatgttgatctcatcaaatgtgaaactctgggtaagaaaataagatttcttttttcaaaataggtaaaaatcagaacaaagaagtctgagtac

SEQ ID NO: 455485 - DNA, 611 bp, Homo sapiens
gctgttgcctgcaatcacagcactttgcaaggccgagacaggaggattactgaggccgagggttcaaaaccagcctgagaaacacagtgacacttcatgtctacaaaagtataaagttaactaggcattgtggcacgtggctgtagtcgcagctactcaggaggctgaggcaggaggatcacttgagcccagaagttcaaggctgcagtgagctatgatcttgccactgcactccagcctgggtaacagagagagaccctgtcacttaaaaaaaaagaaaaagaataagtgtggaaatataacagatcattctataaaggtaagactaatttattcaaatataaatctgtaatgtatgcatttatagtgactttctatgcataggtattcagtataatatttgactttgaatrtatctgagtttgcgtcaggcagtaaaccattcatattctattgaagttgtaatagaggtatctttcttataaatttacatatttctcagaaaaaaactagtaacaaatgttgatctcatcaaatgtgaaactctgggtaagaaaataagatttcttttttcaaaataggtaaaaatcagaacaaagaagtctgagtac

SEQ ID NO: 455486 - DNA, 611 bp, Homo sapiens
gctgttgcctgcaatcacagcactttgcaaggccgagacaggaggattactgaggccgagggttcaaaaccagcctgagaaacacagtgacacttcatgtctacaaaagtataaagttaactaggcattgtggcacgtggctgtagtcgcagctactcaggaggctgaggcaggaggatcacttgagcccagaagttcaaggctgcagtgagctatgatcttgccactgcactccagcctgggtaacagagagagaccctgtcacttaaaaaaaaagaaaaagaataagtgtggaaatataacagatcattctataaaggtaagactaatttattcaaatataaatctgtaatgtatgcatttatagtgactttctatgcataggtattcagtataatatttgactttgaatgtatctgagtttgcgtcaggcagtaaaccattcatattctaytgaagttgtaatagaggtatctttcttataaatttacatatttctcagaaaaaaactagtaacaaatgttgatctcatcaaatgtgaaactctgggtaagaaaataagatttcttttttcaaaataggtaaaaatcagaacaaagaagtctgagtac

SEQ ID NO: 455487 - DNA, 566 bp, Homo sapiens
ttttgcctgtctcttacattatttatctactgaggtaattttaaaattaaattaaattaaattctgaggtaatttaaaaattacctcagtaatggtaacccaatgaatgaggtgtgtctttgagaccagtaatagataaagtactctgtgtgtaaagagtatttcctaaatactattgatggattattttgaggctccattttgagtccttgaggtttttggcaggagcctagggactggagtctctagaaaaattcrtggtttggccacagcaggatttgccttcacttcactggatttggaggcagtgctactggtggtttagattgcacactctcagctacattgccggggttcagaatcagctctgtgtcttcctacatatcacagtttgctcaacacacatgtgtttcagtttccttttctataagttgggagctaataataatagtgcaactccatataactgttggggttgaatgaataaaataaatataaaaagcatagaagaatgcttagcttctagtaagttctcccttaatatcagctgttattattattattag

SEQ ID NO: 455488 - DNA, 566 bp, Homo sapiens
ttttgcctgtctcttacattatttatctactgaggtaattttaaaattaaattaaattaaattctgaggtaatttaaaaattacctcagtaatggtaacccaatgaatgaggtgtgtctttgagaccagtaatagataaagtactctgtgtgtaaagagtatttcctaaatactattgatggattattttgaggctccattttgagtccttgaggtttttggcaggagcctagggactggagtctctagaaaaattcgtggtttggccacagcaggatttgccttcacttcactggatttggaggcagtgctactggtggtttagattgcacactctcagctacattgccggggttcagaatcagctctgtgtcttcctacatatcacagtttgctcaacacacatgtgtttcagtttccttttctataagttgggagctaataataatagtgcaactccatrtaactgttggggttgaatgaataaaataaatataaaaagcatagaagaatgcttagcttctagtaagttctcccttaatatcagctgttattattattattag

SEQ ID NO: 455489 - DNA, 566 bp, Homo sapiens
ttttgcctgtctcttacattatttatctactgaggtaattttaaaattaaattaaattaaattctgaggtaatttaaaaattacctcagtaatggtaacccaatgaatgaggtgtgtctttgagaccagtaatagataaagtactctgtgtgtaaagagtatttcctaaatactattgatggattattttgaggctccattttgagtccttgaggtttttggcaggagcctagggactggagtctctagaaaaattcgtggtttggccacagcaggatttgccttcacttcactggatttggaggcagtgctactggtggtttagattgcacactctcagctacattgccggggttcagaatcagctctgtgtcttcctacatatcacagtttgctcaacacacatgtgtttcagtttccttttctataagttgggagctaataataatagtgcaactccatataactgttggggttgaatgaataaaataaatataaaaagcakagaagaatgcttagcttctagtaagttctcccttaatatcagctgttattattattattag

SEQ ID NO: 455490 - DNA, 622 bp, Homo sapiens
atggcattaactatcagatgtgatgtgccatttattatgctgttctatgttatttttttctttaaaattaggataatgttaactatttcttggacagtttgtcatagagagtcctatgtaaaacacaaatgatacaaatgtttgaactgttaattgtgttaacaatttcaaatattacatattctacttaccaataattatactagtaatataaattacggagtattggattaatcttaatgccaatctcatcttgattccaaatgacrtttatgaaaatttgctcttctaaattttttttcaaaaattagcaatgtcataaaattactgaaaataaattgctctgccatggcttagaaacctgccaagatgtttaaaaaatgtatttggaaatccaaattggaatagtttcagtacatttaagggatcttttattagtgcaaatatacttaagaggaacaccattttaaccattttaagtgtagaattctgtgtcattaagtacatatattgttgtgcaaccatcactaccatgcacctgtctccaaaacaatttcattgtctccaactaacactttgtttttgttaaacaattactctccttctttcccttcccctatcc

SEQ ID NO: 455491 - DNA, 637 bp, Homo sapiens
aaatgtaagtctgtcatgcttattctcctgacaccctgaatagatgtgtataaatgcaaatatagagatgagctattttaaattatgtcccctaaaccagccaatgttcataactgcacaaaacacacatgcctgccaaagtactattaaaatcagcctgaaaaaatgacccaagggagtcaagtagtttatgagtttggctgtcactagatatttaattcatttgaagcaccctttataactggaatgataggagatgtcataatgatccagagatcttgatagatgcaccaagagtaaacgagggatarcttttcagcctcacttcattattgtctggctttcatcagtgagccagagcctgagagccagagcttgagtggcccattgagtctctgcagagaaggatgagtcggtgaagttccagatgttacccttgcctaaagttggcatttcctagtaatgtttctgtgctatgtgtgcaacttagttgctgatgtcaccagtgacaaaaatttatataatcattcatttggacatggttgaacaggaaaaataaaaacacactaaaacaaatatgctcaaccctaacatcaatcgaaagacaactgcggttaaaaacaaaaggaaacacaaa

SEQ ID NO: 455492 - DNA, 537 bp, Homo sapiens
tgaacaggaaaaataaaaacacactaaaacaaatatgctcaaccctaacatcaatcgaaagacaactgcggttaaaaacaaaaggaaacacaaaacatacttggcctgataagtcgttctgtgtgaaaaaagaggattgtccaagacataaatcatggcaacttccctctgcagtaagcacttttttcccctcagaattatcattttataatcggaaaagccmtagagtttaaagtatgcctcgtacaaatgtcacttccaagcttcagtgctaatccagaggaaatattatcctagtggtctccaaggcccaatgtctaagtgttggatacatgataaacttacgtggagctttcttagtgagatatagtcctccagaggattgaatttttcaaggcctagtacaacccaaccctttaaaataagatttaagcttcccttgtcaggttcttttaagagctttttaaattttttttatttgctgctttgaccaggttctaatccctagtccccagtgacaacctttggccatctcaa

SEQ ID NO: 455493 - DNA, 553 bp, Homo sapiens
ccagggagagatcagcactctttccctaatacctgctggcaggcatggctgtagggtccaactgggagatcctgcccattgagaagtgggtcaggtccctgcttaaagaagcagtctgccaatgatctggcaaagccgctatgttgtgctgctggggagacccttcctcgttcagactgtctggactctccaaagcccaaaggctggaactgctgagttgaccaaacagcagagatggtgcctgcccttcacccccaacccccgaccggggmtctgtcccatctcagacctattccattctgttgctggtagctaccaagctgggattccaagccagtaggtcttatctgctcagctccctggattctcagctccctggattctgccccttcctagcgtgcatgcagttgtcccaccttgcctgagttgcagacatgtttgttggggttcctgaggccagagtatctaaagctcctgggtctctctgtgtgcctgagcagctgctctgccaagactccacacagctctgtgggtcagaaccaagattctgata

SEQ ID NO: 455494 - DNA, 553 bp, Homo sapiens
ccagggagagatcagcactctttccctaatacctgctggcaggcatggctgtagggtccaactgggagatcctgcccattgagaagtgggtcaggtccctgcttaaagaagcagtctgccaatgatctggcaaagccgctatgttgtgctgctggggagacccttcctcgttcagactgtctggactctccaaagcccaaaggctggaactgctgagttgaccaaacagcagagatggtgcctgcccttcacccccaacccccgaccggggatctgtcccatctcagacctattccattctgttgctggtagctaccaagctgggattccaagccagtaggtcttatctgctcagctccctggattctcagctccctggattctgccccttcctagcgtgcatgcagttgtcccaccttgcctgagttgcagacatgtttgttggggttcctgaggccagagtatctaaagctcctgggtctctctgygtgcctgagcagctgctctgccaagactccacacagctctgtgggtcagaaccaagattctgata

SEQ ID NO: 455495 - DNA, 472 bp, Homo sapiens
tgcaatgctctatttgctaccacctcacaccattcttggctatgttcatactcagtaaatgaggttatratatagatctcaagtctaccagtcatcaatttccaggcaggaaagaaaaacaatgaatgcagaagaaagaaatatgactccagcaagagaaggtagaaactctgaatttatacattttggttttccatctcacaggggatcccttggtgggcggggggtaactactgttaaaaagtaaattatcatgaagagagagtcagaagtaaggaaaacaaagaaagaaaaaatgccatataaaaaacatactcattcagtagtacaacaagctaaatgtttgggaatatccactcaaaataaaatacctatcaaattaaaatatcataatactttaaagggaaattcagcatagaggatgaaataaggatgttttcagacaaagagagaatttaccactcataggtgc

SEQ ID NO: 455496 - DNA, 472 bp, Homo sapiens
tgcaatgctctatttgctaccacctcacaccattcttggctatgttcatactcagtaaatgaggttataatatagatctcaagtctaccagtcatcaatttccaggcaggaaagaaaaacaatgaatgcagaagaaagaaatatgactccagcaagagaaggtagaaactctgaatttatmcattttggttttccatctcacaggggatcccttggtgggcggggggtaactactgttaaaaagtaaattatcatgaagagagagtcagaagtaaggaaaacaaagaaagaaaaaatgccatataaaaaacatactcattcagtagtacaacaagctaaatgtttgggaatatccactcaaaataaaatacctatcaaattaaaatatcataatactttaaagggaaattcagcatagaggatgaaataaggatgttttcagacaaagagagaatttaccactcataggtgc

SEQ ID NO: 455497 - DNA, 472 bp, Homo sapiens
tgcaatgctctatttgctaccacctcacaccattcttggctatgttcatactcagtaaatgaggttataatatagatctcaagtctaccagtcatcaatttccaggcaggaaagaaaaacaatgaatgcagaagaaagaaatatgactccagcaagagaaggtagaaactctgaatttatacattttggttttccatctcacaggggatcccttggtgggcggggggtaactactgttaaaaagtaaattatcatgaagagagagtcagaagtaaggaaaacaaagaaagaaaaaatgccatataaaaaacatactcattcagtagtacaacaagctaaatgtttgggaayatccactcaaaataaaatacctatcaaattaaaatatcataatactttaaagggaaattcagcatagaggatgaaataaggatgttttcagacaaagagagaatttaccactcataggtgc

SEQ ID NO: 455498 - DNA, 472 bp, Homo sapiens
tgcaatgctctatttgctaccacctcacaccattcttggctatgttcatactcagtaaatgaggttataatatagatctcaagtctaccagtcatcaatttccaggcaggaaagaaaaacaatgaatgcagaagaaagaaatatgactccagcaagagaaggtagaaactctgaatttatacattttggttttccatctcacaggggatcccttggtgggcggggggtaactactgttaaaaagtaaattatcatgaagagagagtcagaagtaaggaaaacaaagaaagaaaaaatgccatataaaaaacatactcattcagtagtacaacaagctaaatgtttgggaatatccactcaaaataaaatacctatcaaattaaaatatcataatactttaaagggaaattcagcatagaggatgaaataaggatrttttcagacaaagagagaatttaccactcataggtgc

SEQ ID NO: 455499 - DNA, 600 bp, Homo sapiens
agactgcctgagctcaggagttcgagaccagcctgggcaacatggtgagaccctatctctactaaaaatacaaaaaattagcacagtgtggtagcatgcacctgtagtcccagctactcaggaggctgaggcaggagaatcgcttgaacccaggaggcagaggttgcagtgagccaggattgggccactgcactccagcctgggcaacagagtgagactgcctccaaaaaaaaaaaaaaaaaaaaaaaaaaattaacagagcctcagatacctgtggaaaaatatcaaaagctctaatattggtgtcatcaatatttctgaaatagaggagaaagagactgatgtggaaaagtatttgaagaaatgatggctgaaaacttcataaatttggttaaagatacaaatttacagaattgtaaagctcagtgaaccccaaaaggataaaagcaatgaaaaccccacccaccctaatcaaacttctgaaaaccaaatattaggaaaaaaattttaagagtagccaccaaaaaatsacatgttacatatgggggaacaataattcttatgactgtagatttttcatcagagaccatggaagccaga

SEQ ID NO: 455500 - DNA, 564 bp, Homo sapiens
  misc_feature (1)...(564): n = A,T,C or G
tgggactgaagcttcctgtcagcaaggcccaggtgtggcccatagacaagagtatgtcgatggcagtggtggtggcatctcctcatcgtgctgctcccctcacntacattttatcaactcatttgtcagtgaacatttaggttatttccacatcttggcttttgttaataatcatgcaatgaacacaggagtgcagatatgtcttcaaactcctgattgcaattcctttggatatatatgcagaagtgggattgctggatcaaataataattctgtttttaattttttgaggaacctccatattgttttccatagctgatagctgtgcaccaatttacatttccacgaacattgtacacattttcttttctacatccttgccaacacttgttgtccttttttttaatttttgataayagccatcctaacaggtgtgagatgatatctcattgtggttttcatttgcatttctctaacgattagtaacactgagcactttttcatatactgttggctattgtatgtcttagaaattacaccaaaagcacagggaaagaaannnnn

SEQ ID NO: 455501 - DNA, 564 bp, Homo sapiens
  misc_feature (1)...(564): n = A,T,C or G
tgggactgaagcttcctgtcagcaaggcccaggtgtggcccatagacaagagtatgtcgatggcagtggtggtggcatctcctcatcgtgctgctcccctcacntacattttatcaactcatttgtcagtgaacatttaggttatttccacatcttggcttttgttaataatcatgcaatgaacacaggagtgcagatatgtcttcaaactcctgattgcaattcctttggatatatatgcagaagtgggattgctggatcaaataataattctgtttttaattttttgaggaacctccatattgttttccatagctgatagctgtgcaccaatttacatttccacgaacattgtacacattttcttttctacatccttgccaacacttgttgtccttttttttaatttttgataatagccatcctaacaggtgtgagatgatayctcattgtggttttcatttgcatttctctaacgattagtaacactgagcactttttcatatactgttggctattgtatgtcttagaaattacaccaaaagcacagggaaagaaannnnn

SEQ ID NO: 455502 - DNA, 564 bp, Homo sapiens
  misc_feature (1)...(564): n = A,T,C or G
tgggactgaagcttcctgtcagcaaggcccaggtgtggcccatagacaagagtatgtcgatggcagtggtggtggcatctcctcatcgtgctgctcccctcacntacattttatcaactcatttgtcagtgaacatttaggttatttccacatcttggcttttgttaataatcatgcaatgaacacaggagtgcagatatgtcttcaaactcctgattgcaattcctttggatatatatgcagaagtgggattgctggatcaaataataattctgtttttaattttttgaggaacctccatattgttttccatagctgatagctgtgcaccaatttacatttccacgaacattgtacacattttcttttctacatccttgccaacacttgttgtccttttttttaatttttgataatagccatcctaacaggtgtgagatgatatctyattgtggttttcatttgcatttctctaacgattagtaacactgagcactttttcatatactgttggctattgtatgtcttagaaattacaccaaaagcacagggaaagaaannnnn

SEQ ID NO: 455503 - DNA, 564 bp, Homo sapiens
  misc_feature (1)...(564): n = A,T,C or G
tgggactgaagcttcctgtcagcaaggcccaggtgtggcccatagacaagagtatgtcgatggcagtggtggtggcatctcctcatcgtgctgctcccctcacntacattttatcaactcatttgtcagtgaacatttaggttatttccacatcttggcttttgttaataatcatgcaatgaacacaggagtgcagatatgtcttcaaactcctgattgcaattcctttggatatatatgcagaagtgggattgctggatcaaataataattctgtttttaattttttgaggaacctccatattgttttccatagctgatagctgtgcaccaatttacatttccacgaacattgtacacattttcttttctacatccttgccaacacttgttgtccttttttttaatttttgataatagccatcctaacaggtgtgagatgatatctcattgtggttttmatttgcatttctctaacgattagtaacactgagcactttttcatatactgttggctattgtatgtcttagaaattacaccaaaagcacagggaaagaaannnnn

SEQ ID NO: 455504 - DNA, 572 bp, Homo sapiens
tgaaaatgttttcctgatattactgccaccttcttaaaacaagatattaacctttcatataagaatcagaatagttattttatgatacttggttacccaaatgtgaataaattgcccstcccactcctcttatcaagatttgtgtgtgtgtatgtgtgtgagatctataaaaacttctcttttctaatgacactttttcttatccaccccatgccactgatctcctttggctgttcttgaggtcttatttttgtatcatgcattttccaccatgcattttcctgggtgccatggaggagagtggaaagagcaggattttaaagccagacaggccatagttaggactccaattttgctaattaccagttgttcaaatatagactgagtttcacattattcatctgtaacacgggaattcttgagaatcaaattttttaattatattgaacacaaagcctgacatccatgaggtattcaatagttcttttcttcattcctccttcccttatttcagtcttagtttctaactatattttaaactgctagagggagcagtaatttgtcttgcctaa

SEQ ID NO: 455505 - DNA, 572 bp, Homo sapiens
tgaaaatgttttcctgatattactgccaccttcttaaaacaagatattaacctttcatataagaatcagaatagttattttatgatacttggttacccaaatgtgaataaattgcccctcccactcctcttatcaagayttgtgtgtgtgtatgtgtgtgagatctataaaaacttctcttttctaatgacactttttcttatccaccccatgccactgatctcctttggctgttcttgaggtcttatttttgtatcatgcattttccaccatgcattttcctgggtgccatggaggagagtggaaagagcaggattttaaagccagacaggccatagttaggactccaattttgctaattaccagttgttcaaatatagactgagtttcacattattcatctgtaacacgggaattcttgagaatcaaattttttaattatattgaacacaaagcctgacatccatgaggtattcaatagttcttttcttcattcctccttcccttatttcagtcttagtttctaactatattttaaactgctagagggagcagtaatttgtcttgcctaa

SEQ ID NO: 455506 - DNA, 619 bp, Homo sapiens
agctataaactaacaaactggaaaacctagaggaaatgaataaattcatagaaacatacaacctttagaggaaatataaatagtcctgtaatttttagggcatccatcaacctgatgttgttacaactcctctatccctctgtagtttatcattttaaaaaatcactcttattttctatttttccttctttgagccatagttacaatttcttcttcactttctttttctaataaaagtattattcttttcattcatccctccccattacccttggcaacttatcctatataataatagaatatttcaattctttgaggaaagttcattgtagataccaaagagttaagaatgaaatgccatttgctgtrtcaatttgatctgaaacacaaggataatgttcccagctgtggcatctgggtccttggaaatttcatcagacagtgccagccgttattgtagagttctgggcttgtcacgaggattaagctgttccacagctgtttctgccacctcgatgcagtatagtacaagttgaatttcaattttcctctgaataatacctatttttctccccatttatattttgttaaactatctaggggatttggttttagatag

SEQ ID NO: 455507 - DNA, 396 bp, Homo sapiens
gtttttggtgtctgcaagttggaagttgaaactatcttttgtatacttcttttagctattatatacttgtgcctatttatttctcagtaccagaaaatgtgttcctgaagacatattcttcattgcacagttcagagaaaatcttgtatcctcattgttgaacattcaaaataatagtgtgattattctattactgtacttgatagctatggctaaacaactaatcccagtrggaaatttctagaagtattagaaaatttgaactacatagtgcaactccgtgaccacttccactgccatagaattttagtaagatttttatatagcttcaaaaattaaaaaaaaaaaccattgaattaacttttttaattgaaagattgataaaacatctcatgg

SEQ ID NO: 455508 - DNA, 578 bp, Homo sapiens
ataataaattaccacaaatttaacagcttaaataacagtttctatgggtaaggagttagagttaggagtctgggtacattttatctttycatggtttgaacagactaatctcaatgtgttggctagggcttcagtcccatctgaggcttgaggttttcttccaagctcactggttgttggcagaattcagttccctgcaactgcaggactaaagtgtctctttgtccataagttgctctggattcctaaaggccactttcatgtcctaactatatggctttgtcatataacgtggagcttacttctttaaagccagcgggagaaattctctttagtgtgctaaggtggagtcatgtttatataacataaccttatcaagggagcagctgtcctaccacattcacaggacctgtccaaacttaacagaagggaattataaagggtatgtacaccggagggcaatgatatggggggacatcttaggattctgcctcccatattagttgtgtgatcacagctaaaaagaacatgcatggcaaaaagctggaagaaataaataaaatgtgttaaatgttatc

SEQ ID NO: 455509 - DNA, 472 bp, Homo sapiens
gctctggattcctaaaggccactttcatgtcctaactatatggctttgtcatataacgtggagcttacttctttraagccagcgggagaaattctctttagtgtgctaaggtggagtcatgtttatataacataaccttatcaagggagcagctgtcctaccacattcacaggacctgtccaaacttaacagaagggaattataaagggtatgtacaccggagggcaatgatatggggggacatcttaggattctgcctcccatattagttgtgtgatcacagctaaaaagaacatgcatggcaaaaagctggaagaaataaataaaatgtgttaaatgttatccctgagaataggtattatgaggcaaggtatattttttcataatgactgtgtagttttacatttcttctgtaataaacactacctaattttctgtatttattaaattttaattattttttatagaagta

SEQ ID NO: 455510 - DNA, 578 bp, Homo sapiens
ataataaattaccacaaatttaacagcttaaataacagtttctatgggtaaggagttagagttaggagtctgggtacattttatcttttcatggtttgaacagactaatctcaatgtgttggctagggcttcagtcccatctgaggcttgaggttttcttccaagctcactggttgttggcagaattcagttccctgcaactgcaggactaaagtgtctctttgtccataagttgctctggattcctaaaggccactttcatgtcctaactatatggctttgtcatataacgtggagcttacttctttaaagccagcgggagaaattctctttagtgtgctaaggtggagtcatgtttatrtaacataaccttatcaagggagcagctgtcctaccacattcacaggacctgtccaaacttaacagaagggaattataaagggtatgtacaccggagggcaatgatatggggggacatcttaggattctgcctcccatattagttgtgtgatcacagctaaaaagaacatgcatggcaaaaagctggaagaaataaataaaatgtgttaaatgttatc

SEQ ID NO: 455511 - DNA, 612 bp, Homo sapiens
cattacaatctgattaatgattttagctttggcttctagttcaaattcttttttcaactttgtttaatctacagtttgaccatcgagattatacttttaattatatttctagtctagtagttctatttttttatttttaaaacaggtcagttaattattgacagatttttgacacttgcttaccacatacttcttaggacaatagactctgaaggatttgaattctagcactacaacttgcactgtgtaaatttagggaactttcttaatttctctaagttttcatttcctttttcataaaattagtagcatttactttatagagttgttgaggattagatgagtaaatatataagtgaggcatgtggaacagtacctgatacaaataaacattataaaagtatttattaaaaacaatattttatttcttcatttatttctttaaatcttttaaaaagttatttctgcatacttrttttatcatttcaatacctggtatatttatatttatgattctattgattttatttctgctgactttcattgacatcatcttgctttctcatatattttggaaacttcatttttgtagttcttcctgaccaattttca

SEQ ID NO: 455512 - DNA, 420 bp, Homo sapiens
atgaatgactcaggattttaaatataaaaacstgagttgatactataaaaagcattttgccaaatccgaagagacaaagaattatgtagacatgacttttgtctatctcttctcaatgtgtacaatcaccaagaaattataatctaggaaaaaaattaagtggcataaaagaagtaaaaatgtatagcatatacataaagattcaaggaaaacttaaattgtccacagcatctttcttttttaaaaaagaaaatgcacatggactgtaatacataaatattttgaagctcttgggaaaagttttagatacttcattcacaacactaaatgaatacaatccttaggtgtggttatatcactggtaatagggagagaaaataatcaccgagaaatacattcaatctaattttaaaattggtc

SEQ ID NO: 455513 - DNA, 420 bp, Homo sapiens
atgaatgactcaggattttaaatataaaaacctgagttgatactatraaaagcattttgccaaatccgaagagacaaagaattatgtagacatgacttttgtctatctcttctcaatgtgtacaatcaccaagaaattataatctaggaaaaaaattaagtggcataaaagaagtaaaaatgtatagcatatacataaagattcaaggaaaacttaaattgtccacagcatctttcttttttaaaaaagaaaatgcacatggactgtaatacataaatattttgaagctcttgggaaaagttttagatacttcattcacaacactaaatgaatacaatccttaggtgtggttatatcactggtaatagggagagaaaataatcaccgagaaatacattcaatctaattttaaaattggtc

SEQ ID NO: 455514 - DNA, 420 bp, Homo sapiens
atgaatgactcaggattttaaatataaaaacctgagttgatactataaaaagcattttgccaaatccgaagagacaaagaattatgtagacatgacttttgtctatctcttctcaatgtgtacaatcaccaagaaattataatctaggaaaaaaattaagtggcataaaagaagtaaaaatgtatagcatatacataaagattcaaggaaaacttaaattgtccacagcatctttcttttttaaaaaagaaaatgcacatggactgtaatacataaatattttgaagctcttgggaaaagttttagatacttcattcacaasactaaatgaatacaatccttaggtgtggttatatcactggtaatagggagagaaaataatcaccgagaaatacattcaatctaattttaaaattggtc

SEQ ID NO: 455515 - DNA, 420 bp, Homo sapiens
atgaatgactcaggattttaaatataaaaacctgagttgatactataaaaagcattttgccaaatccgaagagacaaagaattatgtagacatgacttttgtctatctcttctcaatgtgtacaatcaccaagaaattataatctaggaaaaaaattaagtggcataaaagaagtaaaaatgtatagcatatacataaagattcaaggaaaacttaaattgtccacagcatctttcttttttaaaaaagaaaatgcacatggactgtaatacataaatattttgaagctcttgggaaaagttttagatacttcattcacaacactaaatgaatacaatccttagstgtggttatatcactggtaatagggagagaaaataatcaccgagaaatacattcaatctaattttaaaattggtc

SEQ ID NO: 455516 - DNA, 579 bp, Homo sapiens
gaattactgtaatttatgttggctgcaaacttatttttataaatgctgattcatttcttactttcttctttatttcttctccttttaacccttcacttaaagaaaatataagaaatgacttttttcccgtttggaggtaattagtagaaagaatcgartatgtttctgatgtttttgttaatgatcttcaataagtctgaatggttcatattcacaattatctttcaaaacattgctatctatgctgtacactttctaaaagtatgattatttatacaatatacttgatatacaatatacattatttatacaatatacttgatatatttagttagtgtttagctttgaacattgtttgttgacgcagttttctgtgattagttgaacaacaaagagtggattgttaaggtaggctaagggctactaaaaaaccccctccaaatccctgttacttaacaatggataaaaggtaaatgtattagttaattctttgctccagttcccaatcagtttcttatttccatctgagacctcctcatcctggacttcactgtccatatcactatcagcattttgttc

SEQ ID NO: 455517 - DNA, 579 bp, Homo sapiens
gaattactgtaatttatgttggctgcaaacttatttttataaatgctgattcatttcttactttcttctttatttcttctccttttaacccttcacttaaagaaaatataagaaatgacttttttcccgtttggaggtaattagtagaaagaatcgaatatgtttctgatgtttttgttaatgatcttcaataagtctgaatggttcatrttcacaattatctttcaaaacattgctatctatgctgtacactttctaaaagtatgattatttatacaatatacttgatatacaatatacattatttatacaatatacttgatatatttagttagtgtttagctttgaacattgtttgttgacgcagttttctgtgattagttgaacaacaaagagtggattgttaaggtaggctaagggctactaaaaaaccccctccaaatccctgttacttaacaatggataaaaggtaaatgtattagttaattctttgctccagttcccaatcagtttcttatttccatctgagacctcctcatcctggacttcactgtccatatcactatcagcattttgttc

SEQ ID NO: 455518 - DNA, 579 bp, Homo sapiens
gaattactgtaatttatgttggctgcaaacttatttttataaatgctgattcatttcttactttcttctttatttcttctccttttaacccttcacttaaagaaaatataagaaatgacttttttcccgtttggaggtaattagtagaaagaatcgaatatgtttctgatgtttttgttaatgatcttcaataagtctgaatggttcatattcacaattatctytcaaaacattgctatctatgctgtacactttctaaaagtatgattatttatacaatatacttgatatacaatatacattatttatacaatatacttgatatatttagttagtgtttagctttgaacattgtttgttgacgcagttttctgtgattagttgaacaacaaagagtggattgttaaggtaggctaagggctactaaaaaaccccctccaaatccctgttacttaacaatggataaaaggtaaatgtattagttaattctttgctccagttcccaatcagtttcttatttccatctgagacctcctcatcctggacttcactgtccatatcactatcagcattttgttc

SEQ ID NO: 455519 - DNA, 579 bp, Homo sapiens
gaattactgtaatttatgttggctgcaaacttatttttataaatgctgattcatttcttactttcttctttatttcttctccttttaacccttcacttaaagaaaatataagaaatgacttttttcccgtttggaggtaattagtagaaagaatcgaatatgtttctgatgtttttgttaatgatcttcaataagtctgaatggttcatattcacaattatctttsaaaacattgctatctatgctgtacactttctaaaagtatgattatttatacaatatacttgatatacaatatacattatttatacaatatacttgatatatttagttagtgtttagctttgaacattgtttgttgacgcagttttctgtgattagttgaacaacaaagagtggattgttaaggtaggctaagggctactaaaaaaccccctccaaatccctgttacttaacaatggataaaaggtaaatgtattagttaattctttgctccagttcccaatcagtttcttatttccatctgagacctcctcatcctggacttcactgtccatatcactatcagcattttgttc

SEQ ID NO: 455520 - DNA, 668 bp, Homo sapiens
ccctctcttccctggggatattacaaaccatatcaccggtgggtgtaggccccacgagatatggggagtaataccaccttgtctccttcaagatgttatgaactatatcatagatgggtgcagcccccttggatatggggaataatatcaccctccctccccagatcattacaaaccatagatggtgtccttgcactcctgggctgcccaccacagctcaggggtgatctcaggatttatgttcctttcccaactttgagacagcagaggaagagaccttagyagtagctgtggccaagagccttttgctggtctcctgggggccccacttcagagagatgcaggttcacaatttctcagtgcaatcagcccatgatggagggtctgtgctgttgtccctagcttgtgttccctgtctggtgaacagcagtgggggtgggtggaagttatggaagatggactggagtattctctttgggttgactgcagtttgttacaggcgagaataaggcacttagagtcttgcttgttcattaattcgagggtagtgaaggcagttccactgcaaagacagtggcatagaggctttcagttgcccttggggactctatctccaagaaacatagagctgctcttactgggggtgttcagccagtggagtgagacag

SEQ ID NO: 455521 - DNA, 442 bp, Homo sapiens
ttaacagcttactatcagatataggaacaaaggaatgacctaaagttgaaatttataattaaaaaagaaacagagtataaaagtttggaaattttgtagcctggccatgtggtagaaaaggaaagagtgtttacaggagagaamgtcaagtgtgctaaggagcaaacatttactagagagattgacatagataaaagggaactagatgttaatagtcaagacaaggggaaatgggtcctgaatgcatttcagaaaccttcaaggcctggggcactgctgccctgcactacctgctgcttcctatcttctggccgcttcacttccacctccagccatggctcaaagagacacaggtactgcatgggtcatcactctggagggtgcaagccatgagcatttgtggcatccatgtggtgttaagtctgcagatgcacagaatgca

SEQ ID NO: 455522 - DNA, 497 bp, Homo sapiens
tatgaccctatgcatcttgagatgtaggacctcttaaaacaaagaaggatgctacctatgtagaatttctcatatcattctgcatctcaccctagaaatatgaataatttctcactgtattcagcactctcccaccctaaaaatgttgtatataaagaatttcccatggtattctgcattctactcagtcttttctttaaatatcaactagagtcttctcttttaaacagattattattatccattgyctattcaatgggtttgactagttctatacttcactcactttcctacttagatgtagcacctataatttccatttctgcaggcctgttaattgaaatttttgcatttgatttggaaggtgattaactgtttcattaggtagctgttctcagagaacaagacaaaaatatttctctgcagattaggtgttactgaagaaataattaggtcagaatccatcaaagtgtggcacagccccataaactgaacat

SEQ ID NO: 455523 - DNA, 290 bp, Homo sapiens
cagacctctgggatcctagctgcaggagatcccacatcccctaggacaagrgaactggcagggggatctccgcagagattagacagaaatggagatgcagcaaaagcatggaaccagggacatctgagtgcaagtcagcttcagtggaacctggccataagtgcccaccctgcagggctacctgtctccttctgaaaggctttggctccagctaactgccaggagaaaacaggatctgcttctccacaggacaagggaacatctacctaaaagcccccggcatgccagcc

SEQ ID NO: 455524 - DNA, 290 bp, Homo sapiens
cagacctctgggatcctagctgcaggagatcccacatcccctaggacaagagaactggcagggggatctccgcagagattagacagaaatggagatgcagcaaaagcatggaaccagggacatctgagtgcaagtcagcttcagtggaacctggccataagtgcccaccctgcagggctacctgtctccttctgaaaggctttggctccagmtaactgccaggagaaaacaggatctgcttctccacaggacaagggaacatctacctaaaagcccccggcatgccagcc

SEQ ID NO: 455525 - DNA, 550 bp, Homo sapiens
aaagcatggaaccagggacatctgagtgcaagtcagcttcagtggaacctggccataagtgcccaccctgcagggctacctgtctccttctgaaaggctttggctccagctaactgccaggagaaaacaggatctgcttctccacaggacaagggaacatctacctaaaagcccccggcatgccagcccatcctagaggcccaatttggccaccccataggagggtgtacacagtgcagcctctgctgcccagtctggaagctttcttactcctgagtgtgttccagcagmctgggagacctttggatcctccagtgtacctagaagagggtccagaggagggagccatgaccaggttctgacataccagggccacagtttgtggcttaggagtgctgagccatgatctgtgctcagcatctgaatgagagatgagccagcattctcaagaaactgagagaggtgagtcacacaggttctcaggctggtgtgggacctaggtttgcctccctccacagggttggtctggtaagggtgtggtctatctccc

SEQ ID NO: 455526 - DNA, 608 bp, Homo sapiens
tttactaattctccccactgcaaagccaaggacaagaattcaacaataaacaaagaccaactatagagtcttagccctctgaaaacttccagaaagaaagtcaattgactatactcaatttactccagagttaaaagaataacagatgggaaagaattagcacaaaaactggcaattcagaaaaccagagtgtccccttacctccaaagaaacccaatagctccccagcaatggtgcttaacaagtctgaattgtctgaagtgacagacttggagttcctaacctgggtggcaaggaagactattgagatccaggagaaacctgaagcttaatccaaggaagcaaascaattcagtaaaatgactgaagacctgaaagacaaaaaagccattttaagaaagacccaaaatgaacttcttgagctgaaaaaaatcactgcaacaattttataatacaattggaagtattaacagcagaacagaccaagctgaggaaagaatcccagagctggaagactgctccttcaaatcaattcagtcagacaaaaataaagaaaaaggaattaagaaaaatgaacaaaagctccaaaaatatgggattatgtaaag

SEQ ID NO: 455527 - DNA, 608 bp, Homo sapiens
tttactaattctccccactgcaaagccaaggacaagaattcaacaataaacaaagaccaactatagagtcttagccctctgaaaacttccagaaagaaagtcaattgactatactcaatttactccagagttaaaagaataacagatgggaaagaattagcacaaaaactggcaattcagaaaaccagagtgtccccttacctccaaagaaacccaatagctccccagcaatggtgcttaacaagtctgaattgtctgaagtgacagacttggagttcctaacctgggtggcaaggaagactattgagatccaggagaaacctgaagcttaatccaaggaagcaaaccaattcagtaaaatgactgaagacctgaaagacaaaaaagccattttaagaaagacccaaaatgaacttcttgagctgaaaaaaatcactgyaacaattttataatacaattggaagtattaacagcagaacagaccaagctgaggaaagaatcccagagctggaagactgctccttcaaatcaattcagtcagacaaaaataaagaaaaaggaattaagaaaaatgaacaaaagctccaaaaatatgggattatgtaaag

SEQ ID NO: 455528 - DNA, 609 bp, Homo sapiens
ttttataaggttggttccctaatactgaagtccaatggtaaatataatgcaagccaagccacatatataattgaaagtgttccagtattgactttaagaaaaataaaaaataagtgaataaattttaataatatattcaacctaatatagcaaatgtaatataacatatcaaaataaaaattactgaratatttcatactttgttctaagtcttccaaatttgtatgtattttacattgagtatatctcagcttagatgttaatattttgatggtttgattatttggggaagaagttggcttaaaaaatgttaacatgagaagcagcttctgctgaccaaaaggcagcagacaagttctcagaaaaccggtaagaaaatcattgaggagaaaggatacctgcctgaatagatttttaattcagataaaagtgccctatagggcatttattagtaagaaagagaagcaagtaccagtatttaaggcatgatttaaggctaactctactgttttgcaaatgcagttaggcttatgatcaggcctgcccttatctgtaaagctgccagccctcacatattgaagggaaaagataaacactagctgccagtct

SEQ ID NO: 455529 - DNA, 582 bp, Homo sapiens
tgatttcacgattgtgaaagttatcagtcctgaagcaacgaatttttactggagaatactgtgtccagatgttgtgcatgacttcataggatttttgaaacagccaatcgargagatcatgacagagattgtggatatagaaaaaaacaaaaagtggttaggtgaacgatttctagataagcattttggagaaattcaagaactaataggcaccacatcagatgaattaacagaagatgacttgggcaatctggcagaaggattcttattatttaagactacttttgatttattgtataacatggactcttctatgatatgggcatcaaaactgaagcaaatggtggaaggaggatctatattgtatagaaacatttttagataaatgaaaaagcttaagtcaggcataaattaccatgtatttccataaagttacaccgagtgttcctgactttcatgctttctattccacctcctccacctctcctgcctctgccactcctgagacagcaaggccaacccctcctctttctcctccttctcagtgtactccacatgaaggtaacaaagatgaagaccttt

SEQ ID NO: 455530 - DNA, 562 bp, Homo sapiens
agctcttaagtgtattaactaagagcacttgtaggaagtagtaatgggagcaytgtggtaaggacctaacacaacctagagaaaagggtaggtgtcagtgagggatttctggacttggcaaacacttgagttttaacaggagtagaagtttgagctaaaaccatcaagactggatcatgtttgcttttctagctgcctccccctaacctcttttaggcacactctatactcagataacaaaagctgtttgcagttctctgtacatatcatgctgtttcatacctccaattcattatgcaggggctcctcccttgacttttgacattcttccctgcccaccctcgtttattctttttcaagcctacttttcctttattttagtctgttttctgttctataactgaatacttgagactgggaaatttataaagaaagaggtttacttagctcatggttctggaggctgggaagttcaagattggatgaccacacctggtcagcttctagtgagggccttgtgctgcaccaaaacacggtggaaggcatcacagggcaaaggggc

SEQ ID NO: 455531 - DNA, 532 bp, Homo sapiens
acattcagcctttcctcagtttccaacatgctcaggttaaccatagttatgccaacttccatttcatgtcatctcttggcattcttacccaaaagcatcttatccatggggttctatttgaacaaatgtaaagcaaagtgcaagactgtgagagaagtttgtggtgatatgttaaacacatatttggttgaatttatgtggcataatttggaaataatgctttcaattcccttctacttcataaatcagaacaatttcttgttaactaatatgatgtttccttttattatatrtatcagaaaaatttcttattaactaacatattttcacttttgtttttgtatgttttggtacaaatatccatagacaaattatttaattgaatacatctgagaatgaaattgttcaaattatccataaatttagtcaatggtgcaaaatacttgtacactgaaaactacaaaatatttttgaaagaaattaaagatgaaaataaatagacacctcatattcattaattagaagacttaat

SEQ ID NO: 455532 - DNA, 583 bp, Homo sapiens
gtctgttaggtccatatgatcatatggttgggagtgtagtctaagtttcaggtttccttactggttatccatcaagatcatctgtccattgctgaaaattggatttttaaagtccctattatggttgtgttgcagtctatctttctttctttcttttttttttttttttttttttttttttgagatagagtttcactctgtcgcccaggctggagtgcagtggcgcaacctcggctcactgcagcctctgcctcccgggtttaagcaattctctgtctcagcctcctgagtagctgggattacaggtgcctgccaccatgcctggctaatttttggtatttttggtagagaccgggtttcaccatgttagccaggatgatctcgatctcctgaccttgtaatccaccygcctcagtctcccaaagtgctgggattacaggcatgagccaccgcgtccggctgttgcagtctatctttcttttcaaatctattaatatttgctctatataattaactgctttgattctgggtgcatatatatttacacttgttatatcctcttgctgatttgatccctttatca

SEQ ID NO: 455533 - DNA, 633 bp, Homo sapiens
cctcctaggcagcatattattggtcttgctttttttttttttaatccatatagtcattttgttttttgtttgaagattttgatctatttaagttcgagttaatgattgatatataaggacttattactgctattttgtgaattgctttctaattgttttgtagatccttttttcctttctttctctctttttgtcttcctttgtggttatgtgactttctccagttatatgttttgatwccttcccctttattttttgtgcgtctactctaggattttgctttgtggttatcatgaggcttataaaataatcttatagcaaattattttaagcttttaataatttggtaattaaaaataacacttttactctactccccttaccttttgaatttctaatgtcataatttacaactttttatactgcataccgcttaccaaattattgttgctcttattattttaatagttttatcttttaaccttcatactaaagatataagtgatttacttaccactagtatagtattattctaaatttaactgtgtacatacttttaacagtgaattttatacttccagatatttttgcattactcattagcatacttttctttcagtttaaagaactccc

SEQ ID NO: 455534 - DNA, 633 bp, Homo sapiens
cctcctaggcagcatattattggtcttgctttttttttttttaatccatatagtcattttgttttttgtttgaagattttgatctatttaagttcgagttaatgattgatatataaggacttattactgctattttgtgaattgctttctaattgttttgtagatccttttttcctttctttctctctttttgtcttcctttgtggttatgtgactttctccagttatatgttttgattccttcccctttattttttgtgcgtctactctaggattttgctttgtggttatcatgaggcttataaaataatcttatagcaaattattttaagcttttaataatttggtaattaaaaataacacttttactctactccccttaccttttgaatttctaatgtcataatttacaactttttatactgcataccgcttaccaaattattgttgctcttattattttaatagttttatcttttaaccttcwtactaaagatataagtgatttacttaccactagtatagtattattctaaatttaactgtgtacatacttttaacagtgaattttatacttccagatatttttgcattactcattagcatacttttctttcagtttaaagaactccc

SEQ ID NO: 455535 - DNA, 633 bp, Homo sapiens
cctcctaggcagcatattattggtcttgctttttttttttttaatccatatagtcattttgttttttgtttgaagattttgatctatttaagttcgagttaatgattgatatataaggacttattactgctattttgtgaattgctttctaattgttttgtagatccttttttcctttctttctctctttttgtcttcctttgtggttatgtgactttctccagttatatgttttgattccttcccctttattttttgtgcgtctactctaggattttgctttgtggttatcatgaggcttataaaataatcttatagcaaattattttaagcttttaataatttggtaattaaaaataacacttttactctactccccttaccttttgaatttctaatgtcataatttacaactttttatactgcataccgcttaccaaattattgttgctcttattattttaatagttttatcttttaaccttcatactaaagatataagtgatttacttaccactagtatagtattattctaaatttaactgtgtacatacttttaacagtgarttttatacttccagatatttttgcattactcattagcatacttttctttcagtttaaagaactccc

SEQ ID NO: 455536 - DNA, 570 bp, Homo sapiens
atggtggatctccacacgcttattctcagacccagggcttatatactgcagagaagaaatgtgtaggagaattgaagtcgatctctcagggaaagaaaataatgytgtatgaatctgcataatggaaggatttatggcaaagattgttttgacctaagggcaaaatttatgatagtagtagataaagtagaaatcctgtttttccaatttttatttcagattcagggggtacatgtgcaggtttcttacatgagtatactgcacgatactgaggtttgggtatccatgatctcattacccaggtactgagcataatactcaatagttagttttcaatacttgcccaccaccctccttctcccttctagtagtttccagtgtctatttttcccatcttcatgtttatgatacccaatgtttagctcccacttataagtgaaaacatgtggtatttagttttctgctcctgtgttaattcacttaggacaatggtctgcagcttctttcatattggtgcaacaacatgacttcatttttttatgactatgtagtattccatggtgtatatgt

SEQ ID NO: 455537 - DNA, 621 bp, Homo sapiens
cctaccatgtaatgtgaagatttttattttttcttttcagtaacaagacaaaatcattttaraaaataggttttctcaagaatttcaaagtgtagtattaaactttagtagactagtacgaaataaaatcactgctactccactttttttaaaaaaagaaagagaaatgcacaaaattattcaaggtgacagcaaccaccttcaactttttgtatgccagcaatgcaaaatttttttatacagtgaccttgaatcacaacagtgaaaagaatcaggtataacatattaggggtactgtaagactgccatgaaaaagaaaaaataaggaatccttataatgtaaaattcttataatccaccattttaaaaatcagatattttatgagagcatattgttttttcttttagggagctttcaataatgagaaaatgtccccatttcaactagaattactggagtaatcttagttactgcatagaatatagtaaaagtaaagtgatacataaatacatgggtatatatttttgctttgtaatcatcaaattttttctccattgtcttttgaaaaccatgtcatttatttttcagagacctaagttgaagtgagaagcagtatgtct

SEQ ID NO: 455538 - DNA, 623 bp, Homo sapiens
gttacaaacataaaagcaaagaaatgcaagaaagttgtgaaattttttttctcatacactgattggtatttaagagtgaagactttcaggagaacaatttgggggctatgtctttgtgaccataatactgttagatccagcaattccacaagttyatcttaagataaatgcacaaagtattcattatacggcacatttatatttcccttttaaatgcaaatgccaacatactattttttatttcactcctctcttctctttggggtcatatatgtaacatggctgtaaaacagaaatttactgaggcgcagagtaggtgagagggttaagagagcccctcacaggattgctggggagaaattctgaaactctctgtaaagagaaaaaaaaggtcacaggagaaagtaggaaaataacactatcataagaaaacagaaaaagatcctccctccccccataacagatgagctgtaggattcacagtatataaggatcacatggctctatggcttccatgtctgcattgcagtgtgcaggttactaaattacataaaatacaacagctccagagatcacagcataaacattaaaaagaaatgctgtagtttgcagcaaatccaaaa

SEQ ID NO: 455539 - DNA, 526 bp, Homo sapiens
cttcataagcctggagaaggaaaaataaatgccagtcaaggatacaatatccagcaaaattatccttcataagtgaaggtgacataacatgtttcctggacaaactgaagctgaaggaattcatcaccattagaacagcccaacaaatgtttaagggagtcctacatacaaaagcaaaaggatgatatctaccatcatgaaaacacatgaaagtataaaaatcattggttgagacaacacacaaataaggaagagaaggatttgaatgttaccgctatagaaaaccatcaaaaaacagtgacaaacatgagagagaaaaaaaggaagaaagaakatacaaaacaaccagaaattaaattactaaaatgatagaaataagccctcacatatcaataataatcttgaatatgagtgaattaaactttttatttaaacgatatagattggctgaatggatttaaaaaatagattatatttatatttgctccctacaacaagtaccccttactcataaagacacacagac

SEQ ID NO: 455540 - DNA, 649 bp, Homo sapiens
gaattcaaagatatgcctgtattctatgtggtcagtaataatatttcattccatggtcttaaaaattcatgttcttatttgaaggggtaactgtgtttaccaagacttttttaaaattgccagttacagaaatgatactcaacccatctaaagaaaatgaaataaactcataactggaaaggataggattaaacttcaggtatgtctagagctggggctcaaataatgtcatcagaagtttgycttgcgccatcacttaactctgagatttttctggattaacttcgttctttaagtgctccctatgtggtcacaaagatgcctgtcactgaaaccagcccaatttctccatagaactgatatttacaggttttttgaataaacaaagaattgacccttccggtcttaaaacttgaaacttaaatttgtcttgcctgagatcttcctcagaaaagggactgagtcactagatcaccgcatccagccaggtccctccctaatttctctttaccaactcctcttccttaacccttcctaatttctgttttccatcatgtagttaaatttcttccctgctatataaacctctagatttatctgagttgacatcactgaaataaaaagtcttcttccctggcaatacttattg

SEQ ID NO: 455541 - DNA, 649 bp, Homo sapiens
gaattcaaagatatgcctgtattctatgtggtcagtaataatatttcattccatggtcttaaaaattcatgttcttatttgaaggggtaactgtgtttaccaagacttttttaaaattgccagttacagaaatgatactcaacccatctaaagaaaatgaaataaactcataactggaaaggataggattaaacttcaggtatgtctagagctggggctcaaataatgtcatcagaagtttgccttgcgccatcacttaactctgagatttttctggattaacttcgttctttaagtgctccctatgtggtcacaaagatgcctgtcactgaaaccagcccaatttctccatagaactgatatttacaggttttttgaataaacaaagaattgacccttccggtcttaaaacttgaaacttaaatttgtcttgcctgagatcttcctcagaaaagggactgagtcactagatcaccgcatccagccaggtccctccctaatttctctttaccaactcctcttccttamcccttcctaatttctgttttccatcatgtagttaaatttcttccctgctatataaacctctagatttatctgagttgacatcactgaaataaaaagtcttcttccctggcaatacttattg

SEQ ID NO: 455542 - DNA, 597 bp, Homo sapiens
cattctttttcctctagtctgcctgtcttatttgagaaacatagtcttcaagctctgatattctttcctctgcttggtatattctgctgctgatgcttgtaattgcattgtgattttcctgcattgtgtttttcagctccatcaggtcagctatgctttattctaaactggctattctagttatcagctcctgtattgttttatcatgattcttagcttctttgcattgagttacaacatgctcctttatctcagcaaagtttgttattacccactttctgaagcctagttttgtgaattcagtcatctcagcctcagactagttctgtgcacttgctggagaaatgttgtggtcatttgkaggagaaaaggcactctggctttgtgaattttcagcatttttgcattgattctttcttatctttgtaggcttatttaccttcatttttgaggttccccaaaaaaacctcattcaaaggaatggggttttatgggtcttttttgttgatgttgttgctttctgttcatttttcttttaacagtcaggctctgtaggactattgtggtttgctaggggatcgctccagaccctagttg

SEQ ID NO: 455543 - DNA, 597 bp, Homo sapiens
cattctttttcctctagtctgcctgtcttatttgagaaacatagtcttcaagctctgatattctttcctctgcttggtatattctgctgctgatgcttgtaattgcattgtgattttcctgcattgtgtttttcagctccatcaggtcagctatgctttattctaaactggctattctagttatcagctcctgtattgttttatcatgattcttagcttctttgcattgagttacaacatgctcctttatctcagcaaagtttgttattacccactttctgaagcctagttttgtgaattcagtcatctcagcctcagactagttctgtgcacttgctggagaaatgttgtggtcatttggaggagaaaaggcactctggctttgtgaattttcagcatttttgcattgattctttcttatctttgtaggcttatttaccttcatttttgaggttccccaaaaaaacctcattcaaargaatggggttttatgggtcttttttgttgatgttgttgctttctgttcatttttcttttaacagtcaggctctgtaggactattgtggtttgctaggggatcgctccagaccctagttg

SEQ ID NO: 455544 - DNA, 614 bp, Homo sapiens
gggactcctccttgtctagaccacctgaactccctggagccagcaggctagaatggctgagtcaaactaacttcagaaatggcggctgcccttccccccaggaactcatttgtctcggacgtctccagcctgctgtgctggttggctggaattccaagccagtgggtcttaacttgtgaggtgctgtggaagtggggcctgcagaacaatgctgcttggcttccyggattcagctactttcctagaagaatgtacagatggatctctcaccttactgggattcccagcaccagagtctgtaaaactccaggatctctatgtgagtctgagcaactgctctgctgagaaggcacagctctgtgtatgggacccaaggccctggtggcatggactcacaaggggatcttctgatctacaggctgcaaagatctgtgggagaagcatgggcagggtcacacaatcactgaccacttcccttagctggcagtggggattcctttggctccatgctgctcccaggtgggctatcaccccacattacttttcttcattgtctgcgggtcgagttgtccacctagtcagtcctgatgtaagaacttggatattgcagttag

SEQ ID NO: 455545 - DNA, 383 bp, Homo sapiens
ggacttattttgaggagaaaaytgacttgcttttatgctttcttccctgtatgaaagtatttatacatatattcttagtgtcatacatttcattttgttttgcaaaaagaatgtagtgttggaatttgaaacctatggtaaaggcatttatgggaatttcatctccttctagtagatgaagcccaattattacattgtattgtgtgggtgatggtgaatgttttgacccaacaatggctattatactatttacaaagtcatcatatggagatgacttcagtgtagtctcactagtgttattttccctgaacaatcacaggcagtggctgtttcagagaaaagcctggttgtaataagttttatgtcttccattcctgaaaatt

SEQ ID NO: 455546 - DNA, 348 bp, Homo sapiens
tataattctaagtttcgtaaaaaaaataaataaaaaatccgtacatgcaaggaataaactggaaaaatgtatattaaagtatcagtagtaattttttctggatgayaggatcatggatgttttcaatttattctttacacttaacatttttttcaaaatttgccacagtataacatgaattactttaaacagaaaaaaaaatgtttaagcagttataaccactgaaaaagatcctgaacctaacaagggcatattacttggaataagaaatacatttcctagtgcaaagaaaacgtcagacttgttaccagcttctattatgcccagcagcttgtttccagcttctat

SEQ ID NO: 455547 - DNA, 619 bp, Homo sapiens
ctaagtttctccgattagtgaggttaaagttttcaaatatttatcagtcatgtgcttttttcttttgtgaatgcgtattctttttcatttatctttaaaaaaagtttgttcctatcaagcagtctgttctatttattaagaatagccactttttttgattatcccgttttccctcagatattgtttgcttttagctgtttatcacgctcaagttaatttctgttgttttttttttgttttattgcattgtttttttttcttttttttcagttattttgcattaaatctatgtttcccrtggtcattttcccctcatagctcatgagtttggtttataactgctaaggattgggtaccagtggattaaagcaaaagactagtttaagaatggaagttctgttgtgagtaatttagaaactctcttttgctataactacttggcctatggtctggcccacattaatttttcagacagggtctcactctgtcaccgctggagtgcagtggcacgatcacagcttagtgcagcctccaactcctggcctcaagcaattccctcccacctcaacctccaaagtcctgagattacaggcgtgagccaccgcattcagccagtcca

SEQ ID NO: 455548 - DNA, 355 bp, Homo sapiens
tttttcaaattacaaaaaataaaaaaaataaaaaataaataaaataactacaaagacaaggcaagaatgtctcctatcaccactgtttttcattattgtactggaagttctagctaatgcaataagacaagagaaaaaggtacccagatgggawgaaagaaacgaaactgtctgtttttgcaaatgacatgattatagaaaattccaaagaataaacaggaaaaaacctcctagaattaataaccaattatgaagaagtttcaggatgcaaggtgaatattacaaaagtcaattgcttctctatacaaggaataaacaactgaattttgtaattaaaaacacaatactatttata

SEQ ID NO: 455549 - DNA, 355 bp, Homo sapiens
tttttcaaattacaaaaaataaaaaaaataaaaaataaataaaataactacaaagacaaggcaagaatgtctcctatcaccactgtttttcattattgtactggaagttctagctaatgcaataagacaagagaaaaaggtacccagatgggaagaaagaaaygaaactgtctgtttttgcaaatgacatgattatagaaaattccaaagaataaacaggaaaaaacctcctagaattaataaccaattatgaagaagtttcaggatgcaaggtgaatattacaaaagtcaattgcttctctatacaaggaataaacaactgaattttgtaattaaaaacacaatactatttata

SEQ ID NO: 455550 - DNA, 634 bp, Homo sapiens
atgtttcttgacatggttgcagattacatgagtatatacataagtaaaaattcattatgcrttttatcgtatgtaaactacacctcagtttaattgaaaaatagatcttatatatcttttattatgtttattgacttgatttgttaacaaaagggtgtgttaagattctcatcattgagaatctcatgattgggaattaaaggtctgtttctttccatttctccttgtgatttctgcagcttttacttctgtattttgatgccaaattacttggtgcatagaaattcctatagtttcctcttcacagtagaggactatcagcataatgatgcataatgatgataaagcagccttttctgtccaatttaaatattttttaaaaatttgcctgacgttcattctttggctctagctttgtttttacttccaatttacaaaatatatcttttcccttctttaaaaaaacttcatagtaaattatgcataaagcttaccatcatatcatttttaagtgtacagtttactggtgttaagtacattcatgtccatcactgccactgatctccagaactctcttcatcttgcaaaagtgaaactctatacctcattcctccctccatttatgccacgtcaa

SEQ ID NO: 455551 - DNA, 489 bp, Homo sapiens
acatcatttgcacaaatatgttgatgttaacattgaaaaacctctttgcctgccattgtatattttatttggctaaaaacggttcatgtctaatacattacatgtcctttggtgatactatttaagcaagaaattccaaaactcacaaataccgaatagccaaaagttccaaagctgtgcacgracactaaacatgcaatatatctcctccttttccaaacagaaatagatttctctctgatttgtttgataaatttgacccatgatttccatttggagttattggagttcctactgtttttctgcgtgttggtgggccaagtcctaatcaccccaaagccccacagagaccataaattatagcgatgaggtgaagctttgtattccttcggctgcagaagaaggccattttgctgcagcctattttgacaggcatgaatttaattcattgttttatgacagatgggaaaagtgtacatgctcatagta

SEQ ID NO: 455552 - DNA, 642 bp, Homo sapiens
atgtaggagacctaattaaacaaaagcttttgcatggcaaaagaaactgtcaaggagggaaacagataacctacagattataagaaaatatttgcaaaatatgcatctgacaaaagtctaatgtccagaatatgtaaggaacttaaacaaatcaatgagaaaaaaaaaaactccattaaaaagtgggcaaaggacatgaacagacacttctcaaaaggagacatgcatgtggccaaaaaatacatggaaaaaaatgctcatcattactagtcattagagagatgcaaatcaaaaccataatgagatgccatctcacaccagtcacaatgattattacaaacaagtcaataaataggagatgttggcaagggtgtggagaaaagggaatgcttatacattattagtggtaatgcaaattagttcaagccttgtggaagtcatttggaggtttttcaaagarctaaacagaattaccatttgactcagcaatcccattattgggtatatacccaaggaaaaataaattgttctaccaataagacacttatactcatgtttaatgaagcacaatttacagtagcaaagaaatggagtcaactcaagtgaccattagtggtggattgaatatagaaaatgtggtac

SEQ ID NO: 455553 - DNA, 641 bp, Homo sapiens
gaaaaataaaacaaagcattctcatattatatgacatattaaaatayattccacctggattaaggagttatcgaaaaagtgaaactaaaatttaaaaaataaaaccagaaaaatacctgaaagtctaatttgtcttctgttggtgaaggactttctaaacataaaaaaaatcacaagggaaaagtaataggaagatttgactacctggaatgtcaaaaaattcttaactaaattaaaagatcataaattggttacgattgcaacgaaatgtatatgcttaatgtagaaagtgcttatatgtgtgaaagagcttataatatatatcaagctttgtaacatatatcaaaactcttgtcctgtgatttctaattcttcttcaaagactttatatccaggaaaatcatcagcaatgaggcaaacgataaaaagggtctgcccagaaggaaactttgtaacagaaaaagatgtgaaataatccaactgcaggaaccaactcaatagggggaggattgcctaattttcaagcatttctgattcattatgtcaccattagcatagtattcccaaaacgcacttcgtgacatgcaaagatcccaagataaaaatttcacctatgtgtacgtctgcaaaagagaaaaaca

SEQ ID NO: 455554 - DNA, 698 bp, Homo sapiens
aattaggaatgatatgtggcattatattttacttttgttaatgttcactgttaacttcctgaaatgtaagctgtgctcatgtgaaaaaaaaaaatggatcagtttttctgagaagacactgtaacacaaaaagacctacaggatagtatttgaatagttaattttaatgcaaacaaaaacttctatttcagcattaagaacacatattcttgatataagaaatagaaaatattctagcacatacctgacactggtaaaatatatgtattctttttccctacaacactacatatatttcacactacatatatattagcttttaactattgagtcaaacatagtttaaagtactataatatttccaaattacaaagaaaataatttttaaaatttctctgacagaagcaaacaaaacaatatttttcttaatttctttaaaatttctccaggaatttatacttttgaaaactcattgacttctggatttttaaaaaataatataaacatttaagaagctaccaaaatatgcgaagcytgaatgtatgttatatttatatttcttttttatagttttgaatgattattcacttcatgggcaatataaatttaggagtctcacacatattacatgaaaagtgatttttaaatttattctgtttttaaaaattaactgaatttttaaaaattgacaaataatt

SEQ ID NO: 455555 - DNA, 566 bp, Homo sapiens
ctgggttgagcacagccctcatgccttttggcttaaagctttctccatttgctttgcagaacttcctataagtaatagaacaaccacagatggagtttgaccagctggattttttttttaatatcacagcctgaggaaatgtggctcaatcattgaatgtttctgatrtggaccaatttcagtcaaagacagtaaaaacagaaagcctcagctttcttcttattttaaattagaattttaaatgtaaagcttaggtgaaggaaggatgggaatttgaatttaaaaggctaaaagaaagaataccaaagaattagaagataaacattttgtctttcaaagggaaataattcttcattctgttttacagccaaccataactggtaagatgaatgacgctttctgttagtgtcatgcttttcaagtcacataaaaacctggttttgcatgagaggcgctgctgaagcagcccttgtctgtggctgtgtctcattctgcaacacatagtgtcccaattttcactggcttcctctggaactgaagctgggtgcacaggtttatcaaccgtc

SEQ ID NO: 455556 - DNA, 560 bp, Homo sapiens
tgatccctccctcaaaatacttgcatctggaatttggctccttttctccctgcttaaatggtatagtgcaggtgataactgcgtagataaacctttatagttagaaagagtctaaatgttggtgtctgtaagcacaataagtaaatgagtttggtttttccttccaaaataactgaacgttcactttaaatataatgttagccagytttgaatccagaatatttacatcttgcagactgtgtcttgcagcctctgaatcaactgactgggagcatccgtctctgcgtgcagggctgctgaaaggtgggagcagagataaaagacaggagatgggaagaaacaaagggagccaagagatttcatagaatgctgcaagagacattcttttgatctatttggactcctccaaggcgggatccagagaaagaagagtggcaggttggagaccacacccctagattagctctcctttgaactgggatggtggaactgccattcctaatcagaaacatgaccaggaacgttggctcgtacctcccagatgtatttgcctgctggca

SEQ ID NO: 455557 - DNA, 560 bp, Homo sapiens
tgatccctccctcaaaatacttgcatctggaatttggctccttttctccctgcttaaatggtatagtgcaggtgataactgcgtagataaacctttatagttagaaagagtctaaatgttggtgtctgtaagcacaataagtaaatgagtttggtttttccttccaaaataactgaacgttcactttaaatataatgttagccagctttgaatccagaatatttacatcttgcagactgtgtcttgcagcctctgaatcaactgactgggagcatccgtctctgcrtgcagggctgctgaaaggtgggagcagagataaaagacaggagatgggaagaaacaaagggagccaagagatttcatagaatgctgcaagagacattcttttgatctatttggactcctccaaggcgggatccagagaaagaagagtggcaggttggagaccacacccctagattagctctcctttgaactgggatggtggaactgccattcctaatcagaaacatgaccaggaacgttggctcgtacctcccagatgtatttgcctgctggca

SEQ ID NO: 455558 - DNA, 574 bp, Homo sapiens
cattcggacactaaaacatatgattacacatttaattttaaatttggttaactttaacactttgaaccactctaccagtgtaaactaaataggttagaggtaagaaacactgggaaaatttgagtgatttataaagaatttttttttcagatttatctaacctaaatttatatagcctaagtaaataagtcattagtgcttttaaaaaagccattaacttgtctactgattggagtttatttcataaaacatttaattttccatgcgtatatcaagtatttctgaaaattttattaaaagaattatttttaaaccacttataaacgcacgttatttcctgtttcaactctaccttaataaccatacacaatttcctttttttattggtgcatgtgtatatgcatgtttgtaccttctacctctaaaaggcttattttcaagcrgaaatgacagcatggcatggttctctgttgaactgctttgttgatcagaacctcatgataatgaacaaagctaagcttataggttcaatactcatctggatcatttaactttgaaacaaagtgccctctta

SEQ ID NO: 455559 - DNA, 579 bp, Homo sapiens
ataatgtgttgtctctgtttaatgccgttattaatatgaaatgcttcctcattgcatcaccttaatttgagctttcagcaggatggtgacagttacactgctttagtaaagcacatagctagaacatcatgggaaagcacttatataaaaactctctctttccttctttctttctggcttgctttccctcctttgctgctggtgaccacccatgcttgagcagtgttttggctgctttcccactgatgagttttccaaaccttgtcaggagctggcagttaaatgttctgccgccagcttacagaaaatacaagttggattgccttgttcctgctttctttcaaacttgcatgttwatccatcttcaccttgattcctagaagagtcaaacatctgatcctcaggtcaagcctgaaggaaatggttgtcccagctgaaaataagatcgatcccaatttgctttacagtactcttgttaaagatcagtgtgtaatattttctctgtgtgatgcaatgcttcttaataaaaacaaaaagggatgtttgaccttaactttaaaaggtccaagcaacagtgac

SEQ ID NO: 455560 - DNA, 665 bp, Homo sapiens
gttgtccagtatatctaataagtgtttcatattatttccacataagggaaataagggagtacttttctttttccttctgtctttctatctagacatcaccattcatccatcacttaggcagccattgattcagcatgtgtacttgcatgtgcaagtgtgtatgtgtgtacatgtgtgtgtgcctgtgtgtgtgtgtacattatctactgtgtaccaggccatatttccggtatcaatctcagctcctcttctccagtacaaagattcctcttgtctataaattkctgtaatagagattactttctgtcaccagatagaaattctgtctggtgctcaaattgttgttgctgtttaatttatagtacatttttagctctttatttctaatttttaaatgtacaccgtgtgtccctgcaggcacagctccaggagctctgcattcccatgcaggctcagccaccacacactggagcaagtgtcatgtggcctcctctgtgatcatgaccactcatggcctgagctggccacagggaagagcagctggccacacttcaggtttataagcggctttgaaagcaccaaacatgatgtctgactctccctgtcctgtgattcccagggcccagactgggatctacagagaggaagaagggacacaggcttcc

SEQ ID NO: 455561 - DNA, 391 bp, Homo sapiens
aactaaagttagataatatagagagctaaataatgaaatatattccaaaacttacgcagagaaatttacaaaagytttaaaatgtttatttagtaaagaagaaacactggaaattaatgagtcacatgtccatctcaagacattgaataatggaacaatagcatacacacaagaaagtaaatggaaggaagtattaacagagcagaaattaataaaatttaaaacaaagttatgatagaaaggatcaggaaaacaaaaagctggttctttgaaaagactaataaaactgacaggaattaaaaaaagaaaatcgctacataggtaacattttttaaacaataggagatgattataaacttcatgcaactaaatttgaaaacttatgtgaaat

SEQ ID NO: 455562 - DNA, 626 bp, Homo sapiens
attctctaaatttacgcaggcataaaatctaaagtggagtcactcatctttgatttatcccttgtttaaaaagttgagatcaaatccacattacataaaattcagcattttaccaactttaaggtgcacaactcagtaatttttagtatattcacaatgttgtacaaccatcactactatccaattccagagtatttcccatatttcccaatttcctcytcccctcatcctggcactaccaatctacaatctgtctctatggatttgactattttggacatttctatagatgaaataatagaatgtgcagtcttttgtgtctaacttatttctttcagcataatgttttgaaggttcatccatgttgtaacatgcattgtatcagtatatcagtcatttttgtagttgaataacgttccattatataccacattttgtttatccccttatcagctgataaacatttggtttgttccattttcaggctattatgaataacactgctatgaacattggtgtacaagtttttgcgtgaacatatgtttttgaattatacattcaaaacgtacatgaacatccatttttggtatatacccaatttcttgggtatatccaatttggtacat

SEQ ID NO: 455563 - DNA, 626 bp, Homo sapiens
attctctaaatttacgcaggcataaaatctaaagtggagtcactcatctttgatttatcccttgtttaaaaagttgagatcaaatccacattacataaaattcagcattttaccaactttaaggtgcacaactcagtaatttttagtatattcacaatgttgtacaaccatcactactatccaattccagagtatttcccatatttcccaatttcctcttcccctcrtcctggcactaccaatctacaatctgtctctatggatttgactattttggacatttctatagatgaaataatagaatgtgcagtcttttgtgtctaacttatttctttcagcataatgttttgaaggttcatccatgttgtaacatgcattgtatcagtatatcagtcatttttgtagttgaataacgttccattatataccacattttgtttatccccttatcagctgataaacatttggtttgttccattttcaggctattatgaataacactgctatgaacattggtgtacaagtttttgcgtgaacatatgtttttgaattatacattcaaaacgtacatgaacatccatttttggtatatacccaatttcttgggtatatccaatttggtacat

SEQ ID NO: 455564 - DNA, 626 bp, Homo sapiens
attctctaaatttacgcaggcataaaatctaaagtggagtcactcatctttgatttatcccttgtttaaaaagttgagatcaaatccacattacataaaattcagcattttaccaactttaaggtgcacaactcagtaatttttagtatattcacaatgttgtacaaccatcactactatccaattccagagtatttcccatatttcccaatttcctcttcccctcatcctggcactaccaatctacaatctgtctctatggatttgactattttggacatttctatagatgaaataatagaatgtgcagtcttttgtgtctaacttatttctttcagcataatgttttgaaggttcatccatgttgtaacatgcattgtatcagtatatcagtcatttttgtagttgaataacgttccattatataccacattttgtttatccccttatcagctgataaacatttggtttgttccattttcaggctattatgaataacactgctatgaacattggtgtacaagtttttgcgtgaacatatgtttttgaattatacattcaaaamgtacatgaacatccatttttggtatatacccaatttcttgggtatatccaatttggtacat

SEQ ID NO: 455565 - DNA, 628 bp, Homo sapiens
atccaatttggtacatacccaatttcttgggtatatccaatttggtatatacccaatttcttgggtatataccaagaagcagaattgctgratcatacagtaactttattttcaactttttgaggagctaccaaactgttttccatagcagctgcaccatttcattcccaccggcaatgtatgaggattcccatttctccctatccttgccaacacttatttttccttttttttaattaaagccatcctggtggatgtgaagtggtatctcattgtagtcttaatttgcatttgtgtaatgactaatgatgttaagcatcttttcacatgcttattgatcatttgtatattttctttgcagaaatatctgttcgagtcctttgctcatttttaaattggattatttgtccttttattgttgaattttaagggttctttatgtattctggctactagactattatcagatatatgatttacaaatattttcccccgttctctggtttgtacttttactttcttgctagtgccctttggtgcactaaagtttttaattttgatgaagtccaacttctctatttgtcttttattgcttgtgctttttgtgtcatatttaagaaaccattac

SEQ ID NO: 455566 - DNA, 628 bp, Homo sapiens
atccaatttggtacatacccaatttcttgggtatatccaatttggtatatacccaatttcttgggtatataccaagaagcagaattgctgaatcrtacagtaactttattttcaactttttgaggagctaccaaactgttttccatagcagctgcaccatttcattcccaccggcaatgtatgaggattcccatttctccctatccttgccaacacttatttttccttttttttaattaaagccatcctggtggatgtgaagtggtatctcattgtagtcttaatttgcatttgtgtaatgactaatgatgttaagcatcttttcacatgcttattgatcatttgtatattttctttgcagaaatatctgttcgagtcctttgctcatttttaaattggattatttgtccttttattgttgaattttaagggttctttatgtattctggctactagactattatcagatatatgatttacaaatattttcccccgttctctggtttgtacttttactttcttgctagtgccctttggtgcactaaagtttttaattttgatgaagtccaacttctctatttgtcttttattgcttgtgctttttgtgtcatatttaagaaaccattac

SEQ ID NO: 455567 - DNA, 573 bp, Homo sapiens
tcaaaacaaaaacatcatccgccacctaagaagagtggctggctacctgtagggctgtggctcattgaccttctgctctattattctatttcatttcttatacctcctcccttcaaagaagtaacaaaatgattttccctcccaaaacagaatgcattactcctcaatggcagttctttttccaagcggtcaaaggttccctaaactctgkttctcagccctaagaggagatcccattttgtaggcacaaatgtcttcctctcatcttctccccgtagcagtaaattacacaactcggctgaagacaccgtccttaacttcctgattaagggggcaagagatactcttaccaagccgctagtttgaaggataacaagaatcacaccgtgacctcttccctaacaaaattcagggaagaagcagagacccatgaaaagtaacactgaaaaggcgaacacatggtaagctacggaagacatgagggtaaagaaggcgggaaaggggctggaaggtggagtgggatgtagatgtcagccctattaactgggggaataaaggaaggaaagggagacc

SEQ ID NO: 455568 - DNA, 523 bp, Homo sapiens
catttcacaggcacatagaactttagaattggaagggaactttgaagttagcagatctggcacctcttacatttgaatgtgcatataaatcacctraggatcttgtttaaatgcagattctgaatcagtaggtctggggtgaggcctgagattctgtatatttagcaagctcccaggtgatgctgatagtgctggtacttgaacaaccctttaaagagcaaagatctagtctcctggttcatgactaagagtgtacatcagaatgccctgcttttgcaaaatacagattctgaatcagactctaggcagtggggctgggacatatgaagtttgaaaaggcagtctcagaattccacttccagtcaatatggaataacaggaattggattcatcatctgcctgaaacaactaaaagaaaaaaaactgaaaaatcatgattcactggttttcaagacattagtgaataaaagagtcatttctggggacatgaaacaaatgacataagccccatgattgtcctagt

SEQ ID NO: 455569 - DNA, 523 bp, Homo sapiens
catttcacaggcacatagaactttagaattggaagggaactttgaagttagcagatctggcacctcttacatttgaatgtgcatataaatcacctgaggatcttgtttaaatgcagattctgaatcagtaggtctggggtgaggcctgagattctgtatatttagcaagctcccaggtgatgctgatagtgctggtacttgaacaaccctttaaagagcaaagatctagtctcctggttcatgactaagagtgtacatcagaatgccctgcttttgcaaaatacagattctgaatcagactctaggcagtggggctgggacatatgaagtttgaaaaggcagtctcagaattccacttccagtcaatatggaataacaggaattggattcatcatctgcctgaaacaactaaaagaaaaaaaactgaaaaatcatgattcactggttttcaagacatkagtgaataaaagagtcatttctggggacatgaaacaaatgacataagccccatgattgtcctagt

SEQ ID NO: 455570 - DNA, 583 bp, Homo sapiens
cctatctcactggtttgttttaaagatgaagggaaatactacatataaaagcacttagcccacagcctgatataaaagacatgctcagtaaatgttagctattgctatttgttgtcaacctaaagctttctgtgtcaagtaaagattttgcatcccttcttcatttatgagctcttggcagtgggragagctgatggtgatttcttaggtagaggaggtaccctggtcactgagaggaacctggaaagctgtgaggtagaagacaaagcatccagtttggacctcttccagaattgaggcttaaagtcagccatcaatttcttcatccttctgatgagtggttgtagttcactctagatattattctttcatggagccatggtttctgcttctgagcagggattgaggggtagcctggtgggtggaaggtttcttgtggccaagtccccaaggcagcttcatgaaagtacataaagtgctagcatactagtaagggataatagtgtacttgattattactcctggcattggaaattatccctgcttccacatgaagcaccaattaagtcaggccactgaagtc

SEQ ID NO: 455571 - DNA, 578 bp, Homo sapiens
attatttttattaccacctcttttaagacaagcaattatggtggaatgaatgctggcctttgagtgttcacgtcctggctatagacttatgacctagaatagtgcttcccaatagaaatataataaacactctacaggtaatttaaaattttctagtaaacacataaaaagaaacaggtgtaattaattttattaacatattttacttaatatatgcaaaatagttaacatgtaatcaaatatatgcatttattgagcaatttacatcattttttcatacaaagactttgaaattcagcatgtatgttacacttacagcacatctgaccagagactagccacagtttaagtactcagtagccacatgtgactagtagctaccatattgatagcacagtgtagacattccagattctaaagcaagtcatgtcaccttcatgagcctcaataatctcatttgtaaaaatggagataacttyaatggctttgtttgcagaagaaaatcagtaaacttgaaagcgcatgtcaactggtaaagactgtatataacaggttttctgctctttacaacacttaga

SEQ ID NO: 455572 - DNA, 595 bp, Homo sapiens
ataacatgaggaagagagctgccccactagatgtctgacattagataactcagagtcccgcctctccaacaagtctcccttactagagaaacggacagattctgttttgtgggatgggataaggagacaatctgaagtagagtttgacacaatattattctgcccatatgaaattctggtagccagggtgccaggtgtattcataatccagatgctgtcaattttaagcctgaagccccaagaggcgagcagtgtttaatacatcatctcttgttaaatagcagccacacagttggcggtagccagtgaagcattccctgccatgtaggacacgccagttgtctataaataggacctgtgaatgggccaaaaaaaaaaaaaaasagagagaaaacactgtcagaagaaggacagaccaaaggaaccctaagtcagaagagatcatttaaaagataacctttaggttgttttctggttgcattaaatgagatatttttcttttgaaattaaacaaacttttggaaactaagatgtgtatagccctgtagtaggctaaatggaagttacagaggcaacagtaggtaatgggccctgc

SEQ ID NO: 455573 - DNA, 500 bp, Homo sapiens
aatatatgaaataacctctttttgatgaaagtatttatctatatatgtgaggaaataaagcataagaggctatacacataaatgttaaagtgggtggtatcatggatgatttttattgattttattttcacttagtgatattttgtaatttatgtaactaaaataaaataaagtcacttttttaaaaaagaatgagatcatgtcctttataggaacatgaacagagctagaagccattatccctagcaaattaatgcagcaacagaaaaccaaataccacacattctcacttacaagtggcagctaaaagatgagaatacatggactcagaaaaaaaaatagctaatgggtactaggcttaatacctgggtgatgaaataatttgtacaacaaacacccatgacacaagtttacctawataacaaatctgcacatgtacccctgtacttaaaagtgaaaacaaaaacaaaacaaaagatcatttatcatgaccaagtgca

SEQ ID NO: 455574 - DNA, 599 bp, Homo sapiens
acgtaacagcaggaaaaagacaaaggtgcccaccaccactgcagttatttaccattttactcyaagatctagccagtgtaaaaagacaataaaaagaaatgaagtataaatattaaaaggaagagagaacattatcattacctgtagattataatgtctgcctggaaagcagaagagatcaactgaaaaactatttgaggtaataagagagtttagtaaggtgtctggctacaagatataaaccaatccacagatttcctacatgctagcaatgatcaattagaacatataatgagaaaacgagtcattccaatgatagcagaagttataaattaggaataaacagaaaatggctaaacttagaactataagaagttactgatggacataaacaaggattaaaataattgaatgacatattcttgggcaaatattgtaaagatacttgttcctgccatatatcagtgtcagtaaattaatgcaacttcaatcaaaatcccaatattaccttaggggaaacttgacacatcttcaggttctaatatactgcatgagaataacaaagacaattttgaagtgacaaaagataataaaaacat

SEQ ID NO: 455575 - DNA, 411 bp, Homo sapiens
ttttgttgttgttgttggcaatttttaaattatcattttaatcttgctgcttgttattggtgtgttcagagttactataacttcctggtttaatctagaagatctttgtatttccaggaatttatcctcttctctaggytttctagtttatgcatgtaaagatgttcacagaagccttaaataatttttttgtatttctgtcgtatcagtagtaatatctctcatttcatttctaattgagtttatttggatcttctctcttcttggttaatctcactaactgtctatcaattttatttatcttttccaataacaagcttttgtttcacttatcttttgtgtcttgtttgtttgtttcaatttcacttagttctgctctgatctttatttcttttcttctgctgggtttgg

SEQ ID NO: 455576 - DNA, 518 bp, Homo sapiens
ttccatcttcatttcattttgacccaacaatcattcaggaggttatttaattttcaggtatttgtgtggttttgaggattccttatggagtttatttctaattttattccactgtgttctgagagaatacttgatataattttgattttcttaaatttactgagacttgttttgtgccttatcatgtggtctatcttggagaatgttccatgtgttgataaatagaatgtatattctgcagttgttgggaagaatgttctgtaaatatctgttaagtccatttgttttarggtatagtttaagttgatggtttatttgttgactttcttttttgatgacctgtctagtgctgtcagtagagtcttaaagtcccccactattattgtgttaccatctatctcatttcttaggtctagtagtaattgttctataaattcaggagctctggtgttaggtgcatatatatttaggattgtgatattttcctgttggactagtccttttatcattctttaatg

SEQ ID NO: 455577 - DNA, 558 bp, Homo sapiens
cacccatgcagcctgcagtcctaaaggccagtcttactcccactgtgccccctcaacagcaccgagtctatttctgggmatctggtgatcaaggctgagaacttgccccagaccaccagcctcccagctaaaaagcaaggagactcacagtttttcagcatctcagggagcatgcagcagtgctccagttccttcaaagggtctgtggattatctcagcttccctggaatgttgctgtggtacttcttggagcaaaagatcatgatgtgagcctccacacctctctgtctgtccaagtgggagctgcaagctagtgctgcctcctatctgccatcttaattatcttattcttttttatggctgcatcatattcagttgtgtatatgtaccacattgtctttatccagtctaccattgatgggcatttaggttgattccatgtttttgctattgtgaatagtgctgcagtgagcatgtgtgcatgcatctttatgataaaataatttatatctctttgggtagatacccagtaataggattgctgggtaaaatggtagt

SEQ ID NO: 455578 - DNA, 567 bp, Homo sapiens
cactcagtaagcaacctctgttaactgatcagaaccactccatagtcagtggtctcttatcaagaaggaaggccagctgttgtgcygaaaccacaaaaaagggcgggggtcaatattaggcaattgatggaaatcatcagtagaacaaatcttttgaatgggctggtttctgtttaactcttaagaaagaggtaatgggctttagtgagggagggagtataatgagacgtgactttctgtctgaccttctgtgtcatcagtttttaaggtttatctaagttccccttggacaagaggggattaattcagttggttgggtgtcttaggattgtgtttttatttctcatttatgcctttggccaagatttctcagtcagcatcaatgcccaaactttcatttcatctcatatcattgtctgggtgatctggctactttccctgggattacccaatccatctgtgggacccctgtggccaagggacttagagccaaaagaattacaaccaattaaatgttttaggccagatgggaatgggagtgggcaggcactcatcaacccttaaaac

SEQ ID NO: 455579 - DNA, 608 bp, Homo sapiens
agtttcttaattgtattttcaaatatttgtaatatttagtgattttgtctgttccttcagttactcagaaaaatgcattaaagtgacttaaaataattgtgaaatttgaatattttttcttactagttccatccatttttgttttacatattttgaggccatattattatttgcactcaatttagagttgatacatcttcctggtagattgaccattttattataatgaaacatcacttcttgtcgctaattatatttcttgccttaaattctactttaattgatagtaactgtgcagcattcattttggcatatgtgtgggcatgtgcatgtgtatgtgtatgtgttttacttaggtttgtawggtatatttctgtgtcattatatttaggtatgtctcttgtaaacaccacgtacttagcatgtttaattcttattcagtctgagtattacattcaattggattactaatagtttttaatttaagcctaccatcttgctctttgttttctacttcttctacaggagtaaatttaaaaaacatcattggaaagtatggctattcaaaaactatattgactggaggaggtcagttgtgtcttcaaggg

SEQ ID NO: 455580 - DNA, 567 bp, Homo sapiens
cactcagtaagcaacctctgttaactgatcagaaccactccatagtcagtggtctcttatcaagaaggaaggccagctgttgtgccgaaaccacaaaaaagggcgggggtcaatattaggcaattgatggaaaycatcagtagaacaaatcttttgaatgggctggtttctgtttaactcttaagaaagaggtaatgggctttagtgagggagggagtataatgagacgtgactttctgtctgaccttctgtgtcatcagtttttaaggtttatctaagttccccttggacaagaggggattaattcagttggttgggtgtcttaggattgtgtttttatttctcatttatgcctttggccaagatttctcagtcagcatcaatgcccaaactttcatttcatctcatatcattgtctgggtgatctggctactttccctgggattacccaatccatctgtgggacccctgtggccaagggacttagagccaaaagaattacaaccaattaaatgttttaggccagatgggaatgggagtgggcaggcactcatcaacccttaaaac

SEQ ID NO: 455581 - DNA, 567 bp, Homo sapiens
cactcagtaagcaacctctgttaactgatcagaaccactccatagtcagtggtctcttatcaagaaggaaggccagctgttgtgccgaaaccacaaaaaagggcgggggtcaatattaggcaattgatggaaatcatcagtagaacaaatcttttgaatgggctggtttctgtttaactcttaagaaagaggtaatgggctttagtgagggagggagtataatgagacgtgactttctgtctgaccttctgtgtcatcagtttttaaggtttatctaagttccccttggacaagaggggattaattcagttggttgggtgtcttaggattktgtttttatttctcatttatgcctttggccaagatttctcagtcagcatcaatgcccaaactttcatttcatctcatatcattgtctgggtgatctggctactttccctgggattacccaatccatctgtgggacccctgtggccaagggacttagagccaaaagaattacaaccaattaaatgttttaggccagatgggaatgggagtgggcaggcactcatcaacccttaaaac

SEQ ID NO: 455582 - DNA, 567 bp, Homo sapiens
cactcagtaagcaacctctgttaactgatcagaaccactccatagtcagtggtctcttatcaagaaggaaggccagctgttgtgccgaaaccacaaaaaagggcgggggtcaatattaggcaattgatggaaatcatcagtagaacaaatcttttgaatgggctggtttctgtttaactcttaagaaagaggtaatgggctttagtgagggagggagtataatgagacgtgactttctgtctgaccttctgtgtcatcagtttttaaggtttatctaagttccccttggacaagaggggattaattcagttggttgggtgtcttaggattgtgtttttatttctcatttatgcctttggccaagatttstcagtcagcatcaatgcccaaactttcatttcatctcatatcattgtctgggtgatctggctactttccctgggattacccaatccatctgtgggacccctgtggccaagggacttagagccaaaagaattacaaccaattaaatgttttaggccagatgggaatgggagtgggcaggcactcatcaacccttaaaac

SEQ ID NO: 455583 - DNA, 621 bp, Homo sapiens
gaaaatgccaaaatagaaaatcaaatcagaaaaaaaaataaaatgaaaaacaattttgcatacaaatgagtaaatggagaaaaagcataaacatatgtgagctttaattagatgctgatttttttctaagtcgcacatctatgatcatttatttaaatagaaaactgaaaatacttaataaaggatatttaaagaaaacagaatgggatttaagtagaaattgacttcaacttttgcacaaaagctgcaaaatcgagagggaaagaaggagaaacacttacaaactcagccagccaacttattcaaaagatgtaccaaaattgggtacataactgcttactctaggccattgatgtcygtacttgcagctagccaactccaagcaacaaaggaataaagctaggtggaacggctgcctccaggaattggccagctacctcaagacacattcatatagaacttggatgttaatggttttggcagttagcacaaaatttttaaatgaatatttctatttcagtttgatctccaagggccagaacttcttctaaagaggctgcaagctgtgctgcctgccattcacttcagggtacaatggaacatgccatcttgaagttggcc

SEQ ID NO: 455584 - DNA, 527 bp, Homo sapiens
tccctcctctagccctcccaactcccgacaggccccaatgtgtgatgttcccctccctgtgtccatgtgttctcattgttcaactctcacttatgagtgagaacatacggtgtttggttttctgatcttgtgatagtttgccaagaaagatggtttccaacttcatccatgtccctgcaaaggacatagactcayccttttgtatggctgcatagtattccatggtgtatatgtgccacattttctttacccagtccatcattgccagtctaattgcctgctatacatgaccatcctgacaacccttcaaatgcttcatatccaaagctaagcccatcctcttcactcacaacacccagcacctaatataatcctttgtgaaataatgcaataaatgtctatttaattgaatatatatttttatagaatgtaaacaattatataccatttaaatacaattgatttttgaagcatatttgtgcaagcttcgactagtggcttgtaatttttaaaggcatgaagaggtt

SEQ ID NO: 455585 - DNA, 597 bp, Homo sapiens
aatgcttcatatccaaagctaagcccatcctcttcactcacaacacccagcacctaatataatcctttgtgaaataatgcaataaatgtctatttaattgaatatatatttttatagaatgtaaacaattatataccatttaaatacaattgatttttgaagcatatttgtgcaagcttcgactagtggcttgtaatttttaaaggcatgaagaggttttaccattgagcagcattgagtgacaagagcctaaggcgtttctggttcttttcattatttctcaaatatgtaattttcagagcctttaacagcacagctgtccctctctggccaaagtctgtcttgttaatgttctttttwaaaatatggctccaagattgttggaatgaattcaggacactcataactatgtaagttttgttgacacagctaaacctaataacaatttcaacctgcaggtggctttttgcttaaattttaagtaatagctggaatagcatggaccttcttattacccatgtgtgaagtgtgtgtgtgtgtgtgtgtgtgtgtgtgtgtgtgtctgtagggggtatgtgaatgaaataaaaagtgaag

SEQ ID NO: 455586 - DNA, 557 bp, Homo sapiens
atttaggcaaaacttcctaggcaaatttcccaatttccaattgtggaaagagtggagcccaatttcaaatttaggcaaaaaatttccagagtcaacatttaacttttttgttgtgttgcctcttttccaaataagtccagccagcattttaatgtagtgcaatgctatacatatttaattttctcatgaatccattcatacrctcttttatcttcatagctctgtttaaaactttaacatgttagcattcactatctgaaaagttgaaagcacgggatgccaatatttcattttgccccaaactcccctacctcacaaagtgtttcaaggaaaatatctcaaattttctgggaattgcctcatgatctcaatccatggatcttaaactacagcagcacttttgtagcatgactcagtcactagggccacagattattcctgggatgggtgcatgatttacactgagccatgtgatccttgctttgagaatttgaggactgggactctccctgggttcttcaatgacgacatataatatgtagattctttttaaaagt

SEQ ID NO: 455587 - DNA, 557 bp, Homo sapiens
atttaggcaaaacttcctaggcaaatttcccaatttccaattgtggaaagagtggagcccaatttcaaatttaggcaaaaaatttccagagtcaacatttaacttttttgttgtgttgcctcttttccaaataagtccagccagcattttaatgtagtgcaatgctatacatatttaattttctcatgaatccattcatacgctcttttatcttcatagctctgtttaaaactttaacatgttagcattcactatctgaaaagttgaaagcacgggatgccaatatttcattttgccccaaactcccctacctcacaaagtgtttcaaggaaaatatctcaaattttctgggaattgcctcatgatctcaatccatggatcttaaactacagcagcacttttgtagcatgactcagtcactagggccacagattattcctgggatgggtgcatgatttacactgagccatgtgatccttgctttgagaatttgaggactgggactctccctgggttcttcaatgaygacatataatatgtagattctttttaaaagt

SEQ ID NO: 455588 - DNA, 590 bp, Homo sapiens
agccttgtgcccctgaggacatacagtttttttcatgtttattacttagggtcatgaaatagaatactgaatgtaccatgtttattgttgatctctttatttccagctcctgagtctaatgtctcctgatytggatatctttccagccaggaggttggcttcttgacagacagaggctcttagacactggatgtcagccaggcctaagaggggcagagtaataaaactggaagacaaatgaaaggccctgcccacctccacatctttctctcagatgcctttccgagggagtgctttagtgagaaaacggaaaaaagtaagacctctaaaccattccaccactgaccaactgttccggtcaaatagcaagtcaagaataaaatgcttgacatagaataaaaatgctatcactcaaataagcagtgattaacatggtacattgactgagtggttcaaaattaaatctgagccaacactgtggcatcagtgcagcctgtattttacttaactggactattctcaagataggagtggtgctttattatcaggagtcaggtcgctgggatgtaacactggtatttcatttagtg

SEQ ID NO: 455589 - DNA, 583 bp, Homo sapiens
gccttgtgcccctgaggacatacagtttttttcatgtttattacttagggtcatgaaatagaatactgaatgtaccatgtttattgttgatctctttatttccagctcctgagtctaatgtctcctgatttggatatctttccagccaggaggttggcttcttgacagacagaggctctkagacactggatgtcagccaggcctaagaggggcagagtaataaaactggaagacaaatgaaaggccctgcccacctccacatctttctctcagatgcctttccgagggagtgctttagtgagaaaacggaaaaaagtaagacctctaaaccattccaccactgaccaactgttccggtcaaatagcaagtcaagaataaaatgcttgacatagaataaaaatgctatcactcaaataagcagtgattaacatggtacattgactgagtggttcaaaattaaatctgagccaacactgtggcatcagtgcagcctgtattttacttaactggactattctcaagataggagtggtgctttattatcaggagtcaggtcgctgggatgtaacactggtatttcat

SEQ ID NO: 455590 - DNA, 583 bp, Homo sapiens
gccttgtgcccctgaggacatacagtttttttcatgtttattacttagggtcatgaaatagaatactgaatgtaccatgtttattgttgatctctttatttccagctcctgagtctaatgtctcctgatttggatatctttccagccaggaggttggcttcttgacagacagaggctcttagacactggatgtcagccaggcctaagaggggcagagtaataaaactggaagacaaatgaaaggccctgcccacctccacatctttctctcagatgcctttccgagggagtgctttagtgagaaaacggaaaaaagtaagacctctaaaccattccaccactgaccaactgttcyggtcaaatagcaagtcaagaataaaatgcttgacatagaataaaaatgctatcactcaaataagcagtgattaacatggtacattgactgagtggttcaaaattaaatctgagccaacactgtggcatcagtgcagcctgtattttacttaactggactattctcaagataggagtggtgctttattatcaggagtcaggtcgctgggatgtaacactggtatttcat

SEQ ID NO: 455591 - DNA, 580 bp, Homo sapiens
tgctttcacttgagtcaagagagctgcaggacagagggcccagcagagtcctctaaagagccaaataaagtgcccccaagagagtcacctgtccactggccccaacagcacagacctatgtataacattagttccagcaagaccttccctgcatagttatcgctcctccctctccaactgcaacacgtgaagtgttagaaattgggtagtcagccagggaatggaagaagagtacgatgcagcagaaaagttatcacaactacattttccactgaagtcttctaccccaaagcagaggctttgagaagacttgamattatatcacattgagaatattggttattatctggtaataggccacctaatttctgaatgagaatatgtttacaacttaaagtgatttaggtagtactcaattacctagcaatgaatagaaaagtcaggggtctgtgaaaattccagctgggggctgggaatgaatatgttttatgcaatgaaaatgggagaactccttctccaaaaaaaaaaaaaaaaaatgttgatttcaagtgtttcctgagcttttcctgttcactaactt

SEQ ID NO: 455592 - DNA, 472 bp, Homo sapiens
cttctccaaaaaaaaaaaaaaaaaatgttgatttcaagtgtttcctgagcttttcctgttcactaacttggtagaataattattattttccaggcaatgtgctaaatgatttatgtgtattattttatcttaatactcacaacacacttacaaattaggtataattgtctttactttgcaagtgagacaaatgaagcttgcagaatttcagtattttgctcaaggtcacagatctggtaagyagaggagctgggataatagtcaggtctgtctgattcaaagtccatgttcttaactcctgtactttcaaccactaccatgtactgttggcagaaactattcataattcataattcagtaaaaagctttgagagaaagatattttatgaaacagcatgcaaaacatccattttgtaagtaaaatatatatatttctatatatttacataaatgtgtgtgtattactatgcgt

SEQ ID NO: 455593 - DNA, 581 bp, Homo sapiens
ctttttgaaaaaaaaaaaaaaaaaggtaaatttgatagtggggactagctgtaggttactggcccctccttgatctacagagattccctttttcttttcccccatcccaatttagcatgcagtttttttcttttccttttagacttttatagtttctcccacagggctagaactgcactgctgaccaatctcagaataccaatgcatgaacaaaaaaaaacagtggcagagactaaccataacagcatccaatttatctttcttttcctgacagtttcgagattcaatagaaaacaatatagaaagaggaatttaaattccccctcctcaccctatagctggaaataactcagggaagtwcaatagtagaaactgagaatcaccaaggaaagactatatgtgggattttagattgttaggatgccatttctcttgcctctgtggactcttctttcccacagtgtctcctaggttcccaggagataggattcagggaaaacctcaggcaaaaggactctgtgcaatgctaatgctactccacaaaatctccaggtattttcagagcctgaaaaaaaaatatt

SEQ ID NO: 455594 - DNA, 567 bp, Homo sapiens
taatatacatacctacataatacagttttattttttattaaaaaaaaagtaccatgcttacatttcagatggacagttaatctcatttctagcatgaaacttcttcaaaawaagattgttctttttcactttattactctttatttcatgttgggtccagttacattttccagaatacgtgtttttataagtgattgaaaagaactattttgctttgtttcataagaaataaagttaaaataaaaattttgcacaacagaagtcttcatatagaagaattgatcacccttactggttttgaatttctcctaagagtctgttttctgttctttacagatgctcagctttggaagcaaaataaaatgacagactgtcttccagagttcattaagatgcagccaagtatctccaacatcatatctccacttagggagtatccagtcctcttcactctttcttttctttaatcccttttttcttcctacattggattatctgcttcttttcccaagtcctttgggttgcaatgacacctacagcttcctagttttcccaaatgataaaccc

SEQ ID NO: 455595 - DNA, 536 bp, Homo sapiens
gtaataccagcagaagagctttaggcaggacacatgaaatgtttttgtgatttttgccagatggtttttaatgatttcmtcagtctgctcaactagcccagaggactggaatgataggcacagtgaaagtgctgtgggattggccaggttttaaacacctgtttcagtacttgactggtaaaatgagctcccctatctgtgatgttcaaagggaatcccaggtagaaatggttttctcaagtagtatttggccaccaccatagctgtgacttgtttgtaaaggaaagcctcaactcaatgagaataaacgtcaccactacaagaacatatttacatccatggggtggcaataacagaatgaaatcaacttgccattacagtgaagggaagtgaaagttaacttggaggagagtttaggggtttactgagggcagacattgcaaagtttatggacctgagaagcactccaggtatctgagggcagacattgcaaagtttatgtacctgaaggcagacattgcaaagtttatgtacct

SEQ ID NO: 455596 - DNA, 536 bp, Homo sapiens
gtaataccagcagaagagctttaggcaggacacatgaaatgtttttgtgatttttgccagatggtttttaatgatttcatcagtctgctcaactagcccagaggaytggaatgataggcacagtgaaagtgctgtgggattggccaggttttaaacacctgtttcagtacttgactggtaaaatgagctcccctatctgtgatgttcaaagggaatcccaggtagaaatggttttctcaagtagtatttggccaccaccatagctgtgacttgtttgtaaaggaaagcctcaactcaatgagaataaacgtcaccactacaagaacatatttacatccatggggtggcaataacagaatgaaatcaacttgccattacagtgaagggaagtgaaagttaacttggaggagagtttaggggtttactgagggcagacattgcaaagtttatggacctgagaagcactccaggtatctgagggcagacattgcaaagtttatgtacctgaaggcagacattgcaaagtttatgtacct

SEQ ID NO: 455597 - DNA, 536 bp, Homo sapiens
gtaataccagcagaagagctttaggcaggacacatgaaatgtttttgtgatttttgccagatggtttttaatgatttcatcagtctgctcaactagcccagaggactggaatgataggcacagtgaaagtgctgtgggattggccaggttttaaacacctgtttcagtacttgrctggtaaaatgagctcccctatctgtgatgttcaaagggaatcccaggtagaaatggttttctcaagtagtatttggccaccaccatagctgtgacttgtttgtaaaggaaagcctcaactcaatgagaataaacgtcaccactacaagaacatatttacatccatggggtggcaataacagaatgaaatcaacttgccattacagtgaagggaagtgaaagttaacttggaggagagtttaggggtttactgagggcagacattgcaaagtttatggacctgagaagcactccaggtatctgagggcagacattgcaaagtttatgtacctgaaggcagacattgcaaagtttatgtacct

SEQ ID NO: 455598 - DNA, 612 bp, Homo sapiens
ccaacagtattgtctgctccattgaatcatttgtctggattgcaataggtcagattctgtatgaaggttaaagtcggtctctaaagagtgctgggtacaattggatgtctacttggactttcctataattttgtctgggggtttaaagaacaattttgttttatctaattcctcctttcagcctctgaaactgtttttagaaatagtgagagtctggagaagagatcttcagatgggaaagggaatgagggagaggaaggagcccgggaagaaggaggggtagtgggttgagcagccataactggggaaggagtcaccctgcaggagctggagctgccacacttcttaggtaattgtctttgctgtcctatgtcttstcagagaaatgtctctggactttgataatgactattgcttgaggagcctgaatggtatccaagaggaccagaacaaagtcttcgttcttaacaggctcttcagaaaaggtgtgaaatcctttttggctctagatcttgctgaaatcacaggcaactctgaaggcatgtctgctgtgtgtataaatattaccccctttatatgtggctagtggacaggcttgagtgagggcatgca

SEQ ID NO: 455599 - DNA, 612 bp, Homo sapiens
ccaacagtattgtctgctccattgaatcatttgtctggattgcaataggtcagattctgtatgaaggttaaagtcggtctctaaagagtgctgggtacaattggatgtctacttggactttcctataattttgtctgggggtttaaagaacaattttgttttatctaattcctcctttcagcctctgaaactgtttttagaaatagtgagagtctggagaagagatcttcagatgggaaagggaatgagggagaggaaggagcccgggaagaaggaggggtagtgggttgagcagccataactggggaaggagtcaccctgcaggagctggagctgccacacttcttaggtaattgtctttgctgtcctatgtcttgtcagagaaatgtctctggactttgataatgactattgcttgaggagcctgaatggtatccaagaggaccagaacaaagtcttcgttcttaacaggctcttcagaaaaggtgtgaaatcctwtttggctctagatcttgctgaaatcacaggcaactctgaaggcatgtctgctgtgtgtataaatattaccccctttatatgtggctagtggacaggcttgagtgagggcatgca

SEQ ID NO: 455600 - DNA, 631 bp, Homo sapiens
atggcagagaaggatacactgttgctggcattaaaggagcagtagaaggagaatggggagacacagcatcttcctctgtctcaaggttggaatctaactcaaggtagctctcaagtttttaaatatactggtcaagtttcaaattagactccttcagccttgaatttgtctcctttgaggaggccatcggagactccagaacatgtttagagttctcataataccaattaattacaaaaggtcycacactgctattgagaggtccaaaccctctccgttctaattgtgccaataaacaaactaatttaagcatgtcaaaagttcccccattgtgaccaacaaagctttaaatcctcctggttagctttagtcaggatctcaaatattcaaaagaatgtttccctggttcttaaacatgtaagccaccagggtttctgatggtggctgaccagaggctattcccttagaacccaggttccccataacagcatttaccaaaggtgtccctttgaggaccccactgagttaagctgaaatgccccccaccacctgccccccacctaagacccagggccaagagaaatatctcttccaaggtccagatggaagggagaggtaggaagaaataaag

SEQ ID NO: 455601 - DNA, 519 bp, Homo sapiens
ctagatgccccggatcctttggtagctctgtgcacccatcccagctccagcatgctttgtgctgagatccacctgtgacactggaagattactttggatactggagctaactcattcttaagatagttggaaatacctgggagctgtggcttttgtagtggactgagtacaaagccctagcgtctaagcagagacrttcccaaagcattacatatactacagagctttctgagggacttgaaattacatgcttgcctgactccttccccatttctgtcctttctcctccattccctctgcttgctcctgggagtaaatctttaataaatcatttgcttctgaaacattgtttcagggtttgcttctggaagaattcaacctaagccaccaggctagccttggttaccttcagggataaggaatgtacgaattattacttatatatgtttgcattgttgcattaattacactaaatcttacttttcatttaaaaagcaattcaaacattttaagagaaat

SEQ ID NO: 455602 - DNA, 519 bp, Homo sapiens
ctagatgccccggatcctttggtagctctgtgcacccatcccagctccagcatgctttgtgctgagatccacctgtgacactggaagattactttggatactggagctaactcattcttaagatagttggaaatacctgggagctgtggcttttgtagtggactgagtacaaagccctagcgtctaagcagagacgttcccaaagcattacatatactacagagctttctgagggacttgaaattacatgcttgcctgactccttccccatttctgtyctttctcctccattccctctgcttgctcctgggagtaaatctttaataaatcatttgcttctgaaacattgtttcagggtttgcttctggaagaattcaacctaagccaccaggctagccttggttaccttcagggataaggaatgtacgaattattacttatatatgtttgcattgttgcattaattacactaaatcttacttttcatttaaaaagcaattcaaacattttaagagaaat

SEQ ID NO: 455603 - DNA, 519 bp, Homo sapiens
ctagatgccccggatcctttggtagctctgtgcacccatcccagctccagcatgctttgtgctgagatccacctgtgacactggaagattactttggatactggagctaactcattcttaagatagttggaaatacctgggagctgtggcttttgtagtggactgagtacaaagccctagcgtctaagcagagacgttcccaaagcattacatatactacagagctttctgagggacttgaaattacatgcttgcctgactccttccccatttctgtcctttctcctccattccctctgcttgctcctgggagtaaatctttaataaatcatttgcttctgaaacattgtttcagggtttgcttctggaagaattcaacctaagccaccaggctarccttggttaccttcagggataaggaatgtacgaattattacttatatatgtttgcattgttgcattaattacactaaatcttacttttcatttaaaaagcaattcaaacattttaagagaaat

SEQ ID NO: 455604 - DNA, 462 bp, Homo sapiens
ctggggcaagcacctttgggtaccatcaagagcaaactccatactggccccacggcagcatctagggaagggtgcctgagatcccagaagccccagaagaagtgttacagtgccctattagcttttctgtctgtggatggcttaagtgttaacagctcattggagggtcagtgtcacagccttttgcaccgacactcatggcacccgagttcttgtccggcatccaggaggaatgaggttgcttggatgaattgaagatggtaaatgcagaagattttattgctggtgaaagtggctctcagtgggaagcagagctgaaaagaggaccgtgtgggaaggtaatcttcccctggagtccggccagggacagactcttctctgaagctgttccaccaagctgtccatctgaagtyaagcagcttccctcggacatcgaactgtagtcccagatgtccagttcct

SEQ ID NO: 455605 - DNA, 628 bp, Homo sapiens
cttcagagtgctgtcaattgaaaatatttagctcagactgtctatcataaattccatgtctgaaataactatatttgttaaaataatgtagggttcttaattatttaaaacatcatcaaaacacttgatatttttaaaatggaaagtctgtaactacactcataataaatgcataatttgtagacattaaaagtgttgtcttcctttaatcactatcctggagttagattctgattcttcctgttttgttcctcaatgctggaaacattctgaagcatttaccttgttcaagagttatatattctaaatttcatgctcttttcctgaattatgtayatatgaatatatataattatatataatgatgctaatttactatgaatatatatttgatagtaatatatattcatagtatatatgtatatatactactcataatatatacatacacatgtatatcttatatactatgaatatatatattcatagtaatatatattcattgtgtatatgtatatatatacactactcataatatatatatatacatatatatatcttatagtaaattatttagcatcattcatgagtaatttgatgcttcctcctttaatgttttggaccaaga

SEQ ID NO: 455606 - DNA, 628 bp, Homo sapiens
cttcagagtgctgtcaattgaaaatatttagctcagactgtctatcataaattccatgtctgaaataactatatttgttaaaataatgtagggttcttaattatttaaaacatcatcaaaacacttgatatttttaaaatggaaagtctgtaactacactcataataaatgcataatttgtagacattaaaagtgttgtcttcctttaatcactatcctggagttagattctgattcttcctgttttgttcctcaatgctggaaacattctgaagcatttaccttgttcaagagttatatattctaaatttcatgctcttttcctgaattatgtatatatgaatatatataattatatataatgatgctaatttactatgaatatatatttgatagtaatatatattcatagtatatatgtatatatactactcataatatatacatacacatgtatatcttatatactatgamtatatatattcatagtaatatatattcattgtgtatatgtatatatatacactactcataatatatatatatacatatatatatcttatagtaaattatttagcatcattcatgagtaatttgatgcttcctcctttaatgttttggaccaaga

SEQ ID NO: 455607 - DNA, 606 bp, Homo sapiens
aacagcagcatgtgacctaagatagttgtggtgcattagagacataattattactgctcaccatctagggactgggtcacaaaataggaacttcaagctttttctaatttaattttttggttttaccagttagtagcagtacgttagctgcctgattcccatagtcctaccttgcaggtccctgcacatcttcatccctcttccagctccagccagacagcgccagctccttatctgtgacctctgaatggtgctgtgcaaggtcacttctctgtcatgcttacttctgagccttggtgaattatttctgcacattatgtcattataactggggggtttcctttttagtgcctgtttatggwggaacttgttagcatgcttaaacctgttaaagaaccaaaaatagctacacctcttgagcagttacattctgaagctggtttaggttttatgtaactgctctctctttcttgaatgtgtctatttctgcctcaaacttttcctgttcataaaaagcatagctattttgattggatttgcatttgttctgtcacgcagaagcacactgacatccctcaggggcaatgctggattcacagtcaaatg

SEQ ID NO: 455608 - DNA, 430 bp, Homo sapiens
ctattttgattggatttgcatttgttctgtcacgcagaagcacactgacatccctcaggggcaatgctggattcacagtcaaatgagcacgttcttcttcctctccctagcatttcatctctgtaagaaagtgaccagccactagaatagtagcatcattagaacagccacacttatcacagagatgttttaaaacagacaaattaaaacaagtcaggagraggtggctaatccaattaattaggaagagataacttccagcagaagaaggcaaagtgggagactcaccatgaggcttagcgcagccgtgctctgtgaaacatagatgtgcaactgcctatgtttttcacagccatcctgcttctcttcagacaggcatcaatcaatagcctataaaacaggttttattttttctgtctgtgctttttca

SEQ ID NO: 455609 - DNA, 444 bp, Homo sapiens
ggaattaatctctatgagaattggaagcatgactggctagctctatgttaacatctctctggacaaaggagagtgtgtcagtcaagtctcttggttgcaaacttcagagtccaactcaagcttgcttaactgaaatggggaattattgagggaacataaaggggctgtcagaagtggtggaaaaaatggatggcaagtctgggaagacagacaggaaacaagatggttcctaagaccatgcagcagcaaaaatctgaccaagaagccaccagatcatcwtttctctaagccataattgcttctggggacactgcctccatgaatgaatgaacctcagcctggcagagtcactcatagactgtctcacatcaatcagaccaattctgacagtcctgtgcactttggatcactcccacaagcttcaaagtctcaggcaggtatatc

SEQ ID NO: 455610 - DNA, 624 bp, Homo sapiens
atgtagtaaaagtagaactgtatacttaaaaatgattttaaaaagataatttaaacatgaaaagatattcagtattgtggttactttggaggcaatggaggtagaaattagatcaaaaaggagtttcatattttagttcagataatgaaaaaatggattttcagcacattaatcttttttcatcttttatgtttgaaatattgttactgtaaacattttttatgagtgaggagaggtaacaaagagaggagtaaagggragtaaatttgatagagttgagaggctgtatgtcccaaaatgtttgaaagtttcttcggctagcaatagcagaaaaagtaagctaaaaatgttatcgaccatgggctgttaggctctcaagcaatagattctgaatttacatgaggccaaaaagtttcccagacaaggctttattggggcttatgcttgagcacaagggagtcagcataagaggaaaaattatctggctggcttcccaaagggagctggaaggacagtataagaggggctatagcaggaaaggagagatgttttagcatgcagaggcaggatctatcagcgcctgtgcagttggataacatgcttcttcatgtgttgcatgcctca

SEQ ID NO: 455611 - DNA, 607 bp, Homo sapiens
ccgccccccgtcaccttgggcttcccctaccctgaagggcttgggcgagttgtggccccagcgggttcgggggcgtgtgacggcgttagggaggggcaggccgggctgggcggatgcaggccggcccggcatagggcgctttctccgcgcttcctgggggtgaggggcgtggggcgagggcagggctgtggctccctggccccggggctggaatgtctcatctgcctggggatgggcttctctcaggttgaggccgcgcactgccaagcctcggccgccggcctctgaagcygttgcgagcggccggttgcggtagtcgtctgcttggctgcgaggttgggtgtgtgcagatgatttctctttcccagtccccatgagctgatctgggtgcacgttcagggaaagacgggactaaactgcttctcatttccctacctgttgctggcgagaggacgcctctgtgttttaaagaaaagggtggttaaacctcgcgcgctgaagtcggggtattttcctgtattactcttattttgtttttaaatatgggaagacaatgcagaactcttgggaattatcgagttctgataccccaaaagaatgaaatcaa

SEQ ID NO: 455612 - DNA, 496 bp, Homo sapiens
tattccaggaacagaaggagcgagctggaggcccgcaggagaaggggcgctacacttccaaggagcggactttggaagcccccacctccaccacagcactattggtggccggggtcagggacaccagagagcgctcggcgggggcttccacagtgacagggcgccccctgtcggccgccaggcccgcgggaccgacccgagtcctcatttacccccgcgatcccaaccccgcagctccggcaccggagcaccttctcccccgctctcccagtctctccgaaaacgmcttcggggggactcggccttttttggagccccaacccctaggttctgcgcgaacccaaaacggcctcctgcaccctggcgaggttctgggagctccggtagggtagggctggatgacgcctcctagagtctcggagcagccgctcccgcaccctcccggcacgcctgcccatgggaatgcgagcggggtctacggttagctttaggtagc

SEQ ID NO: 455613 - DNA, 552 bp, Homo sapiens
catgctatttttattttggatgttgcctcaatggcaaagtcataagactcgagttcaaatccaggcctcctctgctctccctgggaagaaaacacccaggccatccaggtctcctaggccttcatcttgctggaacaatctgcgttcccctagcaaaagtcctccctagagctctctttgtcacatgaaaccaaccagtgcagaaggggcatcattgaacagaactcaattttcctaagtgagaacccatgaaatacctaaggagaaaaacaataaaagtcccattaatactccaattcctaaaacctttcagagaataaatacccaggcaaggccttgctcaaagttccccagcgtgtttagggcaacataaggcagatatgtaggcaagatgaaggcagaggggatggaaaagtgacagcacaktcttgggaaagtatgcatttttactttcttataaactttttaattggtaaaaaagcagatgtccaaacaccccttattcattctctggatgaatctcaagtctcaatgaagaaaaggcatatcgtg

SEQ ID NO: 455614 - DNA, 564 bp, Homo sapiens
gtctagctgcgggcagagatggactaaaacccaaggcgaagagcctggtttgacccagaatcaatagaaaaaacaagggctcagctgtcatatagacaagcagccctgcagtagcccaattctctcctgtcrccattggcaattcctgtacaatatcagtttcctatcaaagggataactaggggtttctagcttccaggagaaagaaggatgaaggtggccagaggtactgctgcacgcggtggatgctgcttgggagcctcgtcctgtgtcaaacatagctcctaatgctttgtaatgcacgcatttgcattatttagctctttgttaattttactcccaagagtaattccagaggaaggattgtggagttctctgcaaaaaggagagcttcagggaggggtaccatatgacagcaacagtgacccactaggactgggcaaatgaactaggactgggatggcccctcacacccttatgtgcataggaatcccttggtgatcttgttaaaatgcagattctgattccgcagggaggggcttgagttttgcattcctaacaagc

SEQ ID NO: 455615 - DNA, 564 bp, Homo sapiens
gtctagctgcgggcagagatggactaaaacccaaggcgaagagcctggtttgacccagaatcaatagaaaaaacaagggctcagctgtcatatagacaagcagccctgcagtagcccaattctctcctgtcaccattggcaattcctgtacaatatcagtttcctatcaaagggataactaggggtttctagcttccaggagaaagaaggatgaaggtggccagaggtacwgctgcacgcggtggatgctgcttgggagcctcgtcctgtgtcaaacatagctcctaatgctttgtaatgcacgcatttgcattatttagctctttgttaattttactcccaagagtaattccagaggaaggattgtggagttctctgcaaaaaggagagcttcagggaggggtaccatatgacagcaacagtgacccactaggactgggcaaatgaactaggactgggatggcccctcacacccttatgtgcataggaatcccttggtgatcttgttaaaatgcagattctgattccgcagggaggggcttgagttttgcattcctaacaagc

SEQ ID NO: 455616 - DNA, 564 bp, Homo sapiens
gtctagctgcgggcagagatggactaaaacccaaggcgaagagcctggtttgacccagaatcaatagaaaaaacaagggctcagctgtcatatagacaagcagccctgcagtagcccaattctctcctgtcaccattggcaattcctgtacaatatcagtttcctatcaaagggataactaggggtttctagcttccaggagaaagaaggatgaaggtggccagaggtactgctkcacgcggtggatgctgcttgggagcctcgtcctgtgtcaaacatagctcctaatgctttgtaatgcacgcatttgcattatttagctctttgttaattttactcccaagagtaattccagaggaaggattgtggagttctctgcaaaaaggagagcttcagggaggggtaccatatgacagcaacagtgacccactaggactgggcaaatgaactaggactgggatggcccctcacacccttatgtgcataggaatcccttggtgatcttgttaaaatgcagattctgattccgcagggaggggcttgagttttgcattcctaacaagc

SEQ ID NO: 455617 - DNA, 612 bp, Homo sapiens
gataaaatgggaaggaagtcagtgacagtgtagtcaccgtaagccagaggtagaaagtccagtcagaaccactcactcataagcatgctgaaaagtggaaaagcaactatgcaaataaacttcagcaaaaaagaagagacatagtgtgctctgtccattaggatgattccagctgcaactatcagaacatcttgcaagaaacgtctgagacaaacaggrattttttccctcatataacaagtctggaggtggggagctgattgatctcagtgctctgggtcagcagctgtgcggttctctcagaactggcctcctgatcactaaatgacttcagtagcttagtgcatcgcatccccaccgcacagtcactggaaggggtaggggcaatgcggggctgttctcctctgctcacttcctattctctcactgcagagaatcagtccttcccagaatcttcccagcagagctcagaatttgccttaagtcactttggccaggactgtgtcacaaatcactgcagcccactggtctggcacatcttatctgagatcaaggatctcccctcaaggcctgaataaggttggggttctgtaagtaaaaaaggggggaata

SEQ ID NO: 455618 - DNA, 612 bp, Homo sapiens
gataaaatgggaaggaagtcagtgacagtgtagtcaccgtaagccagaggtagaaagtccagtcagaaccactcactcataagcatgctgaaaagtggaaaagcaactatgcaaataaacttcagcaaaaaagaagagacatagtgtgctctgtccattaggatgattccagctgcaactatcagaacatcttgcaagaaacgtctgagacaaacaggaattttttccctcatataacaagtctggaggtggggagctgattgatctcagtgctctgggtcagcagctgtgcggttctctcagaactggcctcctgatcactaaatgacttcagtagcttagtgcatcgcatccccaccgcacagtcactggaaggggtaggggcaatgcggggctgttctcctctgctcacttcctattctctcactgcagagaatcagtccttcccagaatcttcccagcagagctcagaatttgccttaagtcactttggccaggactgtgtcacaaatcactrcagcccactggtctggcacatcttatctgagatcaaggatctcccctcaaggcctgaataaggttggggttctgtaagtaaaaaaggggggaata

SEQ ID NO: 455619 - DNA, 592 bp, Homo sapiens
gttggcaggtctttggaagtttgaatgatggttccaggcatggatccgaaattctgaatatgaagaaacccttagttgaaaaaatcgactctttcacttaagaacagtccctttggaagttttcattaaattacttgtttcagattttgagtatatatactgtgttatttttcagatattatttttaggcttttgaacagagagaaaaataaaacagagactattttacctataaccatgtgtgacttttaaagcaacagttatatctccagagagatttcagaaggtggcaataacatgtttgccatgctatagtgtagtgtactaagcaagtcatagttgatgttggtgtgcactgctatcaaaggatatgacatagtttagatacttgcctgtaataagtgtaccttgccttgcagacaatattgtcatcaatttaggaaacatgcttcagtgaagattaatttggaataacctataagcaaaatgactgtgtggtttatgaaaaaatatgaaaaractaaaaaacaaaataaatagcatgcatctgttgactgtttgctctagctcacgtgatctcctcggctttgat

SEQ ID NO: 455620 - DNA, 484 bp, Homo sapiens
acagtgtctgttgcacaaataagtagctaccaggagacttcaggccgggaagtcctagaaataatattgtccccaaaatcaactgaaacaaaaccattaaaaactatcaaaatctacccagtaggaagtataagaagaaactaaacgggactacaaatgtcttttcaggatttctggaaaagtcttacaggtatacaaatattaactgaagaagctgagaaatcacagataaatgaaaaatgataccaccactcaggaattatggctaacactcaggaatactgctattttggtattctacatatargaatgtatatgtagacttctgtgaatatgtatgcaaatttaaccacaaaaaaattacagtagacttttttgtaatctgctttcatttaatcataaatgctaaccacagagttagcatttgctatgctattaagcaattcacaaagtagttttacttattttatttattgtatttcac

SEQ ID NO: 455621 - DNA, 518 bp, Homo sapiens
ggctcacagagactagaacaccatcacagagccaccattcgagttgagaggagggtaagtcctccaggccaccccacacatcagctctgcagacctctctgagcctcagcycctcatccggacagcggtgctcatgacagcagctgaacaggggtgctgtgaggattcagtgagattaggtgatggatgagaatgtgttttggaaagtctctattatcattattttacccatctgtcctagagaagagagattgctctttcaccggctgatagagtgtcacccacacgagctggcagaagtgctctctgccaaagggcatgctggatggagtggcagtgcagcctcagactctctcgctggcatgagcgatggttctacaggcagatggtgctgggaatgaattgctgagagggtctgccagaaacagctgcctgcaaacacagtccccctcccagctggtcttctagacacacgtgttcccttaggctgcaggaagtaccaatgatgatgcttcaca

SEQ ID NO: 455622 - DNA, 604 bp, Homo sapiens
acctcgatgctccctacttagggtccatcatcccaagaggctaggactcaggccccaccagccttggctattggcttgagcttgagggcttgggctcaagacaatcaactcagtccaaggtcagctttctttcacttgcatgaatgctatcattttctattttgcaatgggaattgtgagaaaaatgtgagcaagactgtaataatgcatgctcaacagaggaaagccaattccaagctcatgctctataaatggggagactatattgttgttttagtatacaccagacagaacacagcaattgatgtcatgttttacctggtggagcactgggctttgagtcaggacacattggtttgagttccagctttgctggcagccagctgtgtgtcttgggaaagtccctggccttttctctttaactaaaacataataggcatgatcatcaaggccacctacttacacatcaaagtcaatcttcacagcaagctgggaagtaggtgtctatggttcagatgtggaaaccaagggcacaaagtmggggagtagaggagtgggatgttgagggacctgccattctgaagggaaacttctgtagccacag

SEQ ID NO: 455623 - DNA, 585 bp, Homo sapiens
tgcggtaagttgagtggagccaggactgggcctcatctttcagcaggctcggggacccccacgacccttctgaacctgaatgttctggtggacagcagccaccgcaaagtctgggcccatcctgcttctttcccagtcgtggtttgcagctagccttcgggaatcagttcccagtcatcacacatactttccccaaaacttgcagctttattaaagaaaatcttcatgacaggaaaatacgtgtggctayggaggagcacaaataaaaatttaaaataaattaaaaactgaacaagtgtatttgtccctggattccagggaaaattccagacgcgcccacagccggtggcagcattgatcctcagcccaggtggtcaacaaaagaagaactcaggcacacttccctggggcaggagtaaaggaacacactgtgcacacctaacaagaaatgacaggcaggtgtgagacagaaggttccagaagtagagcagaggcaggacacaagatggtccaaggctcagccagagggaaggttacctgctgcatttgggtctacagtccttggtcctatagctgtcagcagag

SEQ ID NO: 455624 - DNA, 585 bp, Homo sapiens
tgcggtaagttgagtggagccaggactgggcctcatctttcagcaggctcggggacccccacgacccttctgaacctgaatgttctggtggacagcagccaccgcaaagtctgggcccatcctgcttctttcccagtcgtggtttgcagctagccttcgggaatcagttcccagtcatcacacatactttccccaaaacttgcagctttattaaagaaaatcttcatgacaggaaaatacgtgtggctatggaggakcacaaataaaaatttaaaataaattaaaaactgaacaagtgtatttgtccctggattccagggaaaattccagacgcgcccacagccggtggcagcattgatcctcagcccaggtggtcaacaaaagaagaactcaggcacacttccctggggcaggagtaaaggaacacactgtgcacacctaacaagaaatgacaggcaggtgtgagacagaaggttccagaagtagagcagaggcaggacacaagatggtccaaggctcagccagagggaaggttacctgctgcatttgggtctacagtccttggtcctatagctgtcagcagag

SEQ ID NO: 455625 - DNA, 585 bp, Homo sapiens
tgcggtaagttgagtggagccaggactgggcctcatctttcagcaggctcggggacccccacgacccttctgaacctgaatgttctggtggacagcagccaccgcaaagtctgggcccatcctgcttctttcccagtcgtggtttgcagctagccttcgggaatcagttcccagtcatcacacatactttccccaaaacttgcagctttattaaagaaaatcttcatgacaggaaaatacgtgtggctatggaggagcacaaataaaaatttaaaataaattaaaaactgaacaagtgtatttgtccctggattccagggaaaattccagacrcgcccacagccggtggcagcattgatcctcagcccaggtggtcaacaaaagaagaactcaggcacacttccctggggcaggagtaaaggaacacactgtgcacacctaacaagaaatgacaggcaggtgtgagacagaaggttccagaagtagagcagaggcaggacacaagatggtccaaggctcagccagagggaaggttacctgctgcatttgggtctacagtccttggtcctatagctgtcagcagag

SEQ ID NO: 455626 - DNA, 566 bp, Homo sapiens
agacagaggttgcagtgagctgaggttgcgccactgcactccagcctgggcaataaagagagaccctatctcaaaaaatgaataaataaatagttaaaataaaataagataagagaggttgaatgctggtttgaggccacataccttagaggactggctggttcacagacatcttttcactgcatgccaagctaagtcaaataagctagagtgacagtagaatcccaatctatgacttctggtgttctakgtcttgtaacctaagcaggaggttggaagtgggaagatgctgaaccttcagggaaggtgttgtcagcgaggaggtcggcatgggatttttgtggtgaggaatgagactaaaacagtagtttgagatcaaatggaggatggtggagaagtaagtttagaatttctttttctttctttccttttcttcttttttgacaggatcctgatgtgccacctaggctggagtgcagggacacgatcacagcttactgtagcctcagcctcctgaggagctgggactacagacacttgccaccatgcttggctatttttttttt

SEQ ID NO: 455627 - DNA, 587 bp, Homo sapiens
ctgtgtcctcatcaaattattggacagtggttcttgggctctgtttacattagtgtcaaccttaatttaaattccgcataactatatttgcttcgctaaatgcattcaccaggaacacaccacaaattactttgcattatgagccgagtctctttgtctattgcaaagtgttttgaaattagcaccataagtaactagctgtaagtgtcactccatctccttaatgcctcattaatcaaactccatggcagctgatgtgatgtccaagcccctaacatataagatcagtatcatttactccttgcatttgaccacggtctttaaacttgatttgttatttgtgcatttgccctcgctggagctctgctcctccctcagtggcctcccaacacgtggggctttgtatggataccagttgcatgtgtactctttgcagaaattggaaataaaaacccatttcccatgttgtggaaatgcatagcctcaaagtcaggaaattcttttaatggaagaagagttccacttattcccctgagttatccacagtgmttccccatgattttcagattaatgctaaaatgccataa

SEQ ID NO: 455628 - DNA, 546 bp, Homo sapiens
ctcactggtgttaaaactaacagctctactggacaatggcttcatggacattttagaggcagtcttaagtctggtgtgggcacaggcatgtcggatatgatttccctgcagggatgccctctcggtggctgtgggggatgcttgcggcccctcgcctgccagcgctgagctcagcctcacagtgagccgagatgaacaggtgctctcttctctggcggcggcggcacgtgaggtcggctccttgcagaacagcgtctcagtgggagacctttaacttcacggcctttccttctgaccacccagcaggaaaaatatacgaaagcgtttttttctgccagttttgtcgatgagacaaaatacaaaaacaaaaaaacacacagcattaaaactttgtatttcccacaggtgggcttyggaaatgtttaccacagtcatagtaaaacactagttttcttcggaattaaattttttgcctttccaccttataaaaccattcaggctaaataaccacattacaatagaattaaacattgaagcctggctccc

SEQ ID NO: 455629 - DNA, 522 bp, Homo sapiens
ctccaagctgtctctgggtggtggcttttctatgctgccaccctctcacccctggcctcttaatgctcaggaggggattgcctctttcagtcatcatgacaaaatttagaattgcccgggatgaaataaatatccacctatgtcacagggtgtgcacggcggatatctttgtcctgactcagaaagagttatagaagccctgtgtgcaacctacaagtggtctgggggagagcaaaaagcagccaggacccccctctgtgaaagctcatttagccaatacaattagcaaaaggagcaggagaaatcggggctttggcttccsctccctacctcctcctccaaaagaaaattcagtgaggctgacaacacaatgcattttgaagttttcctggtaccaaaaaaaagcctctttaatagaatgaaataataaaccaatttatataccgatataagactaggatcgtgaatgccattgtgtaattttccacttgacttttcgttatctacctgaacaaaatcaat

SEQ ID NO: 455630 - DNA, 594 bp, Homo sapiens
agccaggacccccctctgtgaaagctcatttagccaatacaattagcaaaaggagcaggagaaatcggggctttggcttccgctccctacctcctcctccaaaagaaaattcagtgaggctgacaacacaatgcattttgaagttttcctggtaccaaaaaaaagcctctttaatagaatgaaataataaaccaatttatatacygatataagactaggatcgtgaatgccattgtgtaattttccacttgacttttcgttatctacctgaacaaaatcaatctatatgtatgggatcaacatacaattccagagataaaagctgaaaataaatgcgctttgcatatcctggagataaaagacacaatccttggtactgccttttcttctccagcagatgcatttataaaataaattgttgtgtcaaggaaaaagtgagacgtagcagtgtatcttgagtgtggactcctttgctggaaatattgatcctgcaaatgaacagtggttaataagtaccctgcagacgatatcaggtcttttgccctagtttacccagagtgcactctgggtcaatgtttctcccaaccaaagctc

SEQ ID NO: 455631 - DNA, 594 bp, Homo sapiens
agccaggacccccctctgtgaaagctcatttagccaatacaattagcaaaaggagcaggagaaatcggggctttggcttccgctccctacctcctcctccaaaagaaaattcagtgaggctgacaacacaatgcattttgaagttttcctggtaccaaaaaaaagcctctttaatagaatgaaataataaaccaatttatataccgatataagactaggatcgtgaatgccattgtgtaattttccacttgacttttcrttatctacctgaacaaaatcaatctatatgtatgggatcaacatacaattccagagataaaagctgaaaataaatgcgctttgcatatcctggagataaaagacacaatccttggtactgccttttcttctccagcagatgcatttataaaataaattgttgtgtcaaggaaaaagtgagacgtagcagtgtatcttgagtgtggactcctttgctggaaatattgatcctgcaaatgaacagtggttaataagtaccctgcagacgatatcaggtcttttgccctagtttacccagagtgcactctgggtcaatgtttctcccaaccaaagctc

SEQ ID NO: 455632 - DNA, 576 bp, Homo sapiens
tgataccagggagggaaacaggttcgttttagagaaatatgaaaacagttgttctgttacataactggggtaataacagtattatggcaattccctttaaaatagcatttgatacacttcaacagagggagtgtcaggcattctgttttgtacaacttccggctgcaccagcaccagttgtgtcaaacatgttgatataacatggtgtttataaaagtcgagttagctgttcaaatgtactttatttttcttttccagaaattctacaagacagagatgtggattcacagtcaaacacagaaaggatacttagttctcaatgaagccggggggagggggtagtttatgagagcttccttctaaaaggagctgtctgttccctgaagaaatgacaattccttgtcccaagcatcactcaaagttcaaaaraagcatctgcagcccagcacaagaaagtgttttgctaccaacatcctgatgccacttgcaccttaaaagtggttaatacctgctgtggattgactcagataaaccaggaacagcatcccagaatctctgcacactgacctgtgaatt

SEQ ID NO: 455633 - DNA, 528 bp, Homo sapiens
ccagcacaagaaagtgttttgctaccaacatcctgatgccacttgcaccttaaaagtggttaawacctgctgtggattgactcagataaaccaggaacagcatcccagaatctctgcacactgacctgtgaattgatgaagccaaagaccattggtgaagtccatttctctccctttgctttcctccaagacaaagaagagtaggaaacacactgggagttttttgttgttgttttattttgttttgtcttttctttgaaaaaaaaaaaaaagataagcatccatttccaagtaatttgaagcgagataattctagttagtgaagaatttcaataacggctttcctagaaactcaagactgattcaaacagcaaatactgagatgcggttccatcccaatttatggggttttcttttcctttttgaggaaataaataattttaaagagccacaaaagaagggaggcaaattattagatattttgcttgacatcaaagtgattttacatttataaaggcatactggctt

SEQ ID NO: 455634 - DNA, 561 bp, Homo sapiens
gagatgtggattcacagtcaaacacagaaaggatacttagttctcaatgaagccggggggagggggtagtttatgagagcttccttctaaaaggagctgtctgttccctgaagaaatgacaattccttgtcccaagcatcactcaaagttcaaaagaagcatctgcagcccagcacaagaaagtgttttgctaccaacatcctgatgccacttgcaccttaaaagtggttaatacctgctgtggattgactcagataaaccaggaacagcatcccagaatctctgcacactgacctgtgaattgatgaagccaaagaccaytggtgaagtccatttctctccctttgctttcctccaagacaaagaagagtaggaaacacactgggagttttttgttgttgttttattttgttttgtcttttctttgaaaaaaaaaaaaaagataagcatccatttccaagtaatttgaagcgagataattctagttagtgaagaatttcaataacggctttcctagaaactcaagactgattcaaacagcaaatactgagatgcggttcc

SEQ ID NO: 455635 - DNA, 483 bp, Homo sapiens
gagagcgatggggagggcgggagaggaatacagctgacagagcccatggcgactggggtgggataggtcgggtccgrtgtgaactggctgcctagggtcggttccctgcgctttctagaatttgtgggggaaaagcaagaatgaccgtccctctgcctcgtgctcttttcgatctctcccccgacccccagtgacatttagcaggcattttcctttcgtggcctcctccactaagacccttggaagtcctatgtcagcgaagtgagcgttgggaggggacgagaagaaccccccggagggccaacccgggttccgcgtttggcgcatctcggcagccggagctcgccaaaccgggacagccccacggacccgcggggactgggggctcggccggctgctctgacgacctcggcgcgcccgatcggccccggctgcctggccccgggtacccgggcacacgccgccttcccggagcccgagcac

SEQ ID NO: 455636 - DNA, 483 bp, Homo sapiens
gagagcgatggggagggcgggagaggaatacagctgacagagcccatggcgactggggtgggataggtcgggtccgatgtgaactggctgcctagggtcggttccctgcgctttctagaatttgtgggggaaaagcaagaatgaccgtccctctgcctcgtgctcttttcgatctctcccccgacccccagtgacatttagcaggcattttcctttcgtggcctyctccactaagacccttggaagtcctatgtcagcgaagtgagcgttgggaggggacgagaagaaccccccggagggccaacccgggttccgcgtttggcgcatctcggcagccggagctcgccaaaccgggacagccccacggacccgcggggactgggggctcggccggctgctctgacgacctcggcgcgcccgatcggccccggctgcctggccccgggtacccgggcacacgccgccttcccggagcccgagcac

SEQ ID NO: 455637 - DNA, 572 bp, Homo sapiens
acatgtaaacacggttaggtcgtgtttttcgccacttgcaccaaacagaatgtcgcttgtctcggtgccatgggaggttacacgccgcgtcctcaaaatatctgcaagtttctcctaaattatttttcaaaacttggcctggaaatttgtctgagcttcagaggtgacgaactaaaatatatctaaactgaatatatctactgaactagccaaggtgtgggaagacctgcacagacattgcaaaaaggaaggcagtaaaggaaacaaattcctatttgatatagaatcaatcctatttttacccggcattatttttcyatattgtattaatagttttaaacaatccaaaaataacaaagaaattatcttctcccagaaatgtttttaatgtggatttcattgctagaaagacaagcattgagaaatatatagctatacctttataaggagaggtttaattaccactattgagctattttatcaaacataaaaattagaagaaaatgcaaggtgaaattgagaaataagcgttagtcatatcaaaactgatattcaacaaaatagcactgcca

SEQ ID NO: 455638 - DNA, 563 bp, Homo sapiens
gttagtcatatcaaaactgatattcaacaaaatagcactgccaatgacaatgaaagtaggatggtgtgacctgcctgtgagcagctaccacaaaactgtaatgcaagcatatcacacattgttttgccctcaggacacaaactagacagacattgtgcaaagaaatgtttggcacctaataaatttattaaaactccaaatacattttatactccatttacgaaactgtgctggaaaaagtgaggacacacttttttggtttgtccaagaataccttatgtaataaaatggctgtctaatttccagagctacccttcatttagaaatatatatttatctgcttgctattgactaatgtggaatattcaatactgtgagcaatatttctatctcaaatcttaagaatttacaaactacaatgtttgttttattttaaaaatccttaaaaatgaaaagratccgtgaaaattctaaatcctaaaaaataaaatagatctgtgagacttcttaaaatgctttatgctccaggctggctgataataggtaactgtattttaaattga

SEQ ID NO: 455639 - DNA, 533 bp, Homo sapiens
tcccccttccctagggagatgcagctctgcatgcacccatatgtttggtgggtggagtgcaaactggcttcccgttgcatatgcctctctgtctaggagaacagaaagatgataattacatgcatattggtccaccaagcacaggcacacatggaacatgtactggcacaggcctactactgcccagggctggtggaagctggctgacattgtcccttaccatgtaaccttctgtcttcttctggtaccatttcagtacagcattgcacttgaaaccgccatattcccgggccaaggccaccagagggtttcttctttccacactggttagagagaagagcacatgttaaggagaagatgctaatgtttagaatcctcaaattcacaagaamtaaatacctactttagaaaagcaaatgtctggtttattcagccagaatctgaagaaacaaccacattagttacattaataatgtatttgatgtctcacagtgtgaaacaaacatgaaattgtgcctcctgactgtcatgag

SEQ ID NO: 455640 - DNA, 533 bp, Homo sapiens
tcccccttccctagggagatgcagctctgcatgcacccatatgtttggtgggtggagtgcaaactggcttcccgttgcatatgcctctctgtctaggagaacagaaagatgataattacatgcatattggtccaccaagcacaggcacacatggaacatgtactggcacaggcctactactgcccagggctggtggaagctggctgacattgtcccttaccatgtaaccttctgtcttcttctggtaccatttcagtacagcattgcacttgaaaccgccatattcccgggccaaggccaccagagggtttcttctttccacactggttagagagaagagcacatgttaaggagaagatgctaatgtttagaatcctcaaattcacaagaaataaatacctactttagaaaagcaaatgtctggtttattcagccagaatctgaagaaacaaccacattagttacattaataatgtatttgatgtctcacagtgtgaaayaaacatgaaattgtgcctcctgactgtcatgag

SEQ ID NO: 455641 - DNA, 577 bp, Homo sapiens
taacttgcatgaagtgcttaggtataagttcactctttttagctgaaatgtcatattgagtttaggtgtcttagacaaccacccaattgttccgtttagatgttataggagaaatttctggcaaactgtttagtatggggtttgttattaccccgtgaacactcagattgttagacattttgatgacaggcaagtttgactctgggggtataattgaattttcagtgagcactgtcaaaataaatgtctaaccacaccctacaatagattaactgttaaattttcaacagtatcttttaagcttttaagtaaataaaacagaagtcttagtcctttatttaaatagctttaagatttcaaatagcttgctttatttaatgaaagcttcaacaacttgaaatgactcgtaattatmctttaccatctaccaaaatgttatttcttccagctttaacactctctgtaaccgagattggaagttaaattgagataaaaaccagtgagccaaagcgaagctaagtctttagaatagctttttctcctttctgtcagctgaacatgtgaataatcacatgga

SEQ ID NO: 455642 - DNA, 610 bp, Homo sapiens
aacacctgggcccactgacctctgcaggatttgtggataaaattcgggggctgggggtgaaaacttggrtgagaaaatagctttattttcttcgactccttaattgaagtttagcaaattcttcaacaatgagcacaaaaagcaaagccgtgatgtcatcatcaataaaagtcctgacattttcatatcactgttcggttgcagcaaatacctcaagatagcattcatggtcaatgccaccttaaaatcatggtaattactagatctgttgcttagtggaatgatatagaagcacatgcattatatatcacacatttacttttaatattatgatgactgtatttcaacataatttattttctaggcaccatttttattgcattttaaacattattttgaaaggtgatccatgggttccacccaagggtcactgggaagtatggcacaaaacttctacaactcctgacttgagagttttaattataatatgggattggacactttaatttgaggttggtttgtgacataaagtgatcacagaagttgtattctttaaaaatgaccataaaatcaatggctgtctccatccataactaagggatgaaccagc

SEQ ID NO: 455643 - DNA, 610 bp, Homo sapiens
aacacctgggcccactgacctctgcaggatttgtggataaaattcgggggctgggggtgaaaacttgggtgagaaaatagctttattttcttcgactccttaattgaagtttagcaaattcttcaacaatgagcacaaaaagcaaagccgtgatgtcatcatcaataaaagtcctgacattttcatatcactgttcggttgcagcaaatacctcaagatagcattcatggtcaatgccaccttaaaatcatggtaattactagatctgttgcttagtggaatgatatagaagcacatgcattatatatcacacatttacttttaatattatgatgactgtatttcaacataatttattttctaggcaccatttttattgcattttaaacattattttgaaaggtgatccatgggttccacccaagggtcactgggaagtatggcacaaaacttctacaactcctgacttgagagttttaattataatatgggrttggacactttaatttgaggttggtttgtgacataaagtgatcacagaagttgtattctttaaaaatgaccataaaatcaatggctgtctccatccataactaagggatgaaccagc

SEQ ID NO: 455644 - DNA, 460 bp, Homo sapiens
gctgtaatgagttggagaggtttataagcaatgtgaatgcatttgcaaataaatgtcgttttattttctaaaagaaacatttattactgtagcttttaaaaattcagaacaacagaaaaagcaggaaataataacatagaactggcacagctaaacaaaacatggtcaagtactttttaaaaatttgacatcactggttttatttttttaaaccattyattgcagtatgaccaacataccaaagctgtacatatttattgtatacagcttgatgtttgtaagtatacatccctgaaaccatcaccacattatatgccataaatatatccatcaccttcaaatttcctcccacactctttatttactgttatttttactattatttggtgataacacttaacatacaaactatgatctcagcaaatttcaaagtatgcaatacagtatcattaactatagg

SEQ ID NO: 455645 - DNA, 582 bp, Homo sapiens
aattctttttaactaaattttctgaccttccttttcaagggtttayatagttacaaaatcactatactcctacttaccttacctaccttcaatcattccagatagatatttgtgagagactccttctttccttctctccctcccttccttccttcctctctttctttttcttcttcccttttctttttccctctctttgtttaattgaagagatgcaaaaagcctaatgaatgagtcggtcactgggcagttttttttttttttaaatcagacgtcagtaattttatgactaacatacctgagagctcatggtcttcaatcttccatgattactaactttcccaacatttgaaaaaaatgccttgctttcattctttaaactacacaaattcattctaatatatcttcatttttcttctaaattttaagcccagggagttgtttctcatactgcctttgtgatggcacaaactttggctaaacaaaaaatgaaaaataatgttgctactgtttctttgagctgccacacatgacacttaaccaaaaggaaaggacgctttgctcttcttaccccaccatggt

SEQ ID NO: 455646 - DNA, 582 bp, Homo sapiens
aattctttttaactaaattttctgaccttccttttcaagggtttatatagttacaaaatcactrtactcctacttaccttacctaccttcaatcattccagatagatatttgtgagagactccttctttccttctctccctcccttccttccttcctctctttctttttcttcttcccttttctttttccctctctttgtttaattgaagagatgcaaaaagcctaatgaatgagtcggtcactgggcagttttttttttttttaaatcagacgtcagtaattttatgactaacatacctgagagctcatggtcttcaatcttccatgattactaactttcccaacatttgaaaaaaatgccttgctttcattctttaaactacacaaattcattctaatatatcttcatttttcttctaaattttaagcccagggagttgtttctcatactgcctttgtgatggcacaaactttggctaaacaaaaaatgaaaaataatgttgctactgtttctttgagctgccacacatgacacttaaccaaaaggaaaggacgctttgctcttcttaccccaccatggt

SEQ ID NO: 455647 - DNA, 582 bp, Homo sapiens
aattctttttaactaaattttctgaccttccttttcaagggtttatatagttacaaaatcactatactcctacttaccttacctaccttcaatcattccagatagatatttgtgagagactccttctttccttctctccctcccttccttccttcctctctttctttttcttcttcccttttctttttccctctctttgtttaattgaagagatgcaaaaagcctaatgaatgartcggtcactgggcagttttttttttttttaaatcagacgtcagtaattttatgactaacatacctgagagctcatggtcttcaatcttccatgattactaactttcccaacatttgaaaaaaatgccttgctttcattctttaaactacacaaattcattctaatatatcttcatttttcttctaaattttaagcccagggagttgtttctcatactgcctttgtgatggcacaaactttggctaaacaaaaaatgaaaaataatgttgctactgtttctttgagctgccacacatgacacttaaccaaaaggaaaggacgctttgctcttcttaccccaccatggt

SEQ ID NO: 455648 - DNA, 582 bp, Homo sapiens
aattctttttaactaaattttctgaccttccttttcaagggtttatatagttacaaaatcactatactcctacttaccttacctaccttcaatcattccagatagatatttgtgagagactccttctttccttctctccctcccttccttccttcctctctttctttttcttcttcccttttctttttccctctctttgtttaattgaagagatgcaaaaagcctaatgaatgagtcggtcactgggcagttttttttttttttaaatcagacgtcagtaattttatgactaacatacctgagagctcatggtcttcaatcttccatgattactaactttcccaacatttgaaaaaaatgccttgctttcattctttaaactacacaaattcattctaatatatcttcatttttcttctaaattttaagcccagggagttgtttctcatactgcctttgtgatggcacaaactttggctaaacaaaaamtgaaaaataatgttgctactgtttctttgagctgccacacatgacacttaaccaaaaggaaaggacgctttgctcttcttaccccaccatggt

SEQ ID NO: 455649 - DNA, 374 bp, Homo sapiens
cttgagccctgaagtcaccctgagtcttcctcgccaggggaagcagcttgacctcctgtgactgaggagatgtcccattgttcactgaaaaactgtgatgacttcaccgggaaaaaatgccttgaaagaggatacttattttcttctagtcccaccgtaactaccccctgtttctgctagattcatgcctagagtgaaatcccagtatcgtctggggaaagtaaatattaggactctgcaggaggcmgctgactcatcaagagaactgaaagattttacatttatatgacatatatctttctctaggagccagaatttccaccaataattttaacaagagagactggatatgaataattaacgagtaaaaagga

SEQ ID NO: 455650 - DNA, 508 bp, Homo sapiens
acagtttcatcttgtattttctactaccttgcattcatcaaggcagtaggctgatgaaactattagaaaatggaatatggaaactccaagagctgagtaataggaacacaaaggagccgaggagtgctggagccaggggcggtaggaaaagattcaaacggacagagaggaaaagagggagaagatgacacatggcatagtgaaaaggaataaggcttggagtctgagaagcctgggctggaatctcaggtttattactcgctggttctgcaatcggagcagatcacttcactctatgcttccatttgcaaactacagacaactgttagtatttaatgcacattgcagtaaatggtcagtataagcccatgaaatacccagcccattacttggcaatacagtaygcagctaacaaattgttgctacatgaataaaacagtggtaagggaaagaataccatattaaagtgtatttttgcaaagacaatcatgaaccaatatatcaaacc

SEQ ID NO: 455651 - DNA, 609 bp, Homo sapiens
ttacatttgctcttcgtttctattttctcttcttcttttgccaccattgatttaattgagcatattatatgattccattttatatcctgtcttagcacgacaattatacttttgaaaaatttttactggttgttctaaagtttccaatatacatttttaactaatccaaatctaccttcaaatgacactatataaattcacatgtagtacaggtatcttataagacagcattcccacacccttctctgtacccgctatgatattacagtcattcgttttacttatccttaygctataataacccaatatattgttatcattactttaaatagacatttttagatgaatttcgaataagaaaaacgaaagtcatgtggagttaattttgtctttatttcttcttcaatgttctctattcttcatgtagtcaaagattctgacctatacaattttcctgtttatgttgtttaacaacttattttaacatttcttgcaaggctggaggtctgctggcaatgtgttggctcaacttttgtttgtctgagaaactttattctttttcacaggataattgaaggataattttgctggaaataaaattctatgttg

SEQ ID NO: 455652 - DNA, 583 bp, Homo sapiens
atatgcatttaatctggttctctccaccccggtggtaagcaccctcagcaaagccattaccttcccttctctaacaacctcctaactttctaggggaggcttyatcattctttttcaatccaatctcacaatgaactagagtaagttttataaagcacaaatgtaatctcaaaactcccagtcttgaatcttctctacggcccaccacttttcatggaacaaagagcgcaacccttcttccagaggctagaatcctcatgatatgccctgaacagtcactgaggactcttcctcacttatatctaaattacctgattattgcctgccttcctgcatcaaggactttccttagactatttttttgtttgtttgtttctcctagagttatctttctgctccacaaaatagttagctttataaactcccactcaaataatcccactctttaagtaaaccttcccagagcttctagattacatcatcatggactatctgcctttagagaatttatcacagttggttattctgtaactcattggtagtttgttaacatctggttcctggtctgctcaaaagccaaaca

SEQ ID NO: 455653 - DNA, 583 bp, Homo sapiens
atatgcatttaatctggttctctccaccccggtggtaagcaccctcagcaaagccattaccttcccttctctaacaacctcctaactttctaggggaggctttatcattctttttcaatccaatctcacaatgaactagagtaagttttataaagcacaaatgtaatctcaaaactcccagtcttgaatcttctctacggcccaccacttttcatggaacaaagagcgcaacccttcttccagaggctagaatcctcatgatatgccctgaacagtcactgaggactcttcctcacttatatctaaattacctgattatygcctgccttcctgcatcaaggactttccttagactatttttttgtttgtttgtttctcctagagttatctttctgctccacaaaatagttagctttataaactcccactcaaataatcccactctttaagtaaaccttcccagagcttctagattacatcatcatggactatctgcctttagagaatttatcacagttggttattctgtaactcattggtagtttgttaacatctggttcctggtctgctcaaaagccaaaca

SEQ ID NO: 455654 - DNA, 583 bp, Homo sapiens
atatgcatttaatctggttctctccaccccggtggtaagcaccctcagcaaagccattaccttcccttctctaacaacctcctaactttctaggggaggctttatcattctttttcaatccaatctcacaatgaactagagtaagttttataaagcacaaatgtaatctcaaaactcccagtcttgaatcttctctacggcccaccacttttcatggaacaaagagcgcaacccttcttccagaggctagaatcctcatgatatgccctgaacagtcactgaggactcttcctcacttatatctaaattacctgattattgcctgccttcctgcatcaaggactttccttagactrtttttttgtttgtttgtttctcctagagttatctttctgctccacaaaatagttagctttataaactcccactcaaataatcccactctttaagtaaaccttcccagagcttctagattacatcatcatggactatctgcctttagagaatttatcacagttggttattctgtaactcattggtagtttgttaacatctggttcctggtctgctcaaaagccaaaca

SEQ ID NO: 455655 - DNA, 584 bp, Homo sapiens
ctagccatattcagaaaaattacaatggacccctatctttcaccatatataaaaattaactgaaaatgaattaaagattcattttataatacctggtaattcataaatgtaatacctgcagcaataagaatcctagatgaaaacctaggaaatgccattctgggcatggaccttgagatagaatttatgattaaatcctcaaaagcaactgcaacaaaaacaaaaaytgacaagtgagagagacctattaaactaaagagcttctgaacaacgaaaaaaactatcaacagagtaaacaggcaacctacagaatggaagaatatatttacaaactatgcatttgacaaaagtctaatattcagaatctataaggaacttaaacaattgaacaagcaaaaaacaaataacccctgtgaaaaatgagcaaaagacatcaacggacacttcacaaacgatgacacccaagcagccaacaatcataagaaaaaatgcttttcatcattaatcatcagagaaatgtaaatgaaaatctcaattagctaccatttcataccaatcagaatggctattattaaaaagtcaaa

SEQ ID NO: 455656 - DNA, 608 bp, Homo sapiens
tcttgtgctcttttcccaccaacttctcttcagaacaggattcatttcccatattgtttcttgttctcatcctaatgcaaatctggacccatccctgtggcagagacacactaaaccaggcagttagcagaagtgcaaacattgagaatacattcttcactcactgtctatacagcctgtcactcccatcattctcctatgaccaaggcatcctaattttaacacaagtgctttctgcytccattaaaggaaatcagcccctgaggttatgtgtgctgtgcatcttaatccatgatgtaccttcatccaacaccaatgaataatcatacttactcaaataacattgcccattatctcaaaacagggccatggattaggagtgcataactcatgttatagccaaaatacttaaaaggagtataggagtttatatctgcacaagttttttctgatctgaaaactagtaaaatataagtttgttcacacacatacaacttcacccattcaagaaacagtgggaaccttgttatgtggatggtttcaacctaacagtatccaacagttatcttttactcaccattttgtctctgaaaagtaagaagataatt

SEQ ID NO: 455657 - DNA, 608 bp, Homo sapiens
tcttgtgctcttttcccaccaacttctcttcagaacaggattcatttcccatattgtttcttgttctcatcctaatgcaaatctggacccatccctgtggcagagacacactaaaccaggcagttagcagaagtgcaaacattgagaatacattcttcactcactgtctatacagcctgtcactcccatcattctcctatgaccaaggcatcctaattttaacacaagtgctttctgcctccattaaaggaaatcagcccctgaggttatgtgtgctgtgcatcttaatccatgatgtaccttcatccaacaccaatgaataatcatacttactcaaataacattgcccattatctcaaaacagggccatggattaggagtgcataactcatgttatagccaaaatacttaaaaggagtataggagtttatatmtgcacaagttttttctgatctgaaaactagtaaaatataagtttgttcacacacatacaacttcacccattcaagaaacagtgggaaccttgttatgtggatggtttcaacctaacagtatccaacagttatcttttactcaccattttgtctctgaaaagtaagaagataatt

SEQ ID NO: 455658 - DNA, 363 bp, Homo sapiens
tgaggaaaaaggggtcttaaaaattcaatatagcattctrtgagcaggatagaaactttcagaccaagaagtattattcactgcatcgtcgctattactcatcaattttatttcttaaaatatgagcagttcagtaaaatgttctcctctcccacaggtcgtgtgcatcttagaagcctttggacatgccaagaccacacttaatgatttgtccagttgcttcatcaagtattttgaactgcagttctgtgagaggaaacaacagctaaccggaggtaagtgcagtatttgacaacgtggatttcctgtgccgagccagcatgcgaccacgtcacacacaggcacgctatggacacactgtgt

SEQ ID NO: 455659 - DNA, 615 bp, Homo sapiens
atgaaacgaatataaaactacaactacttaacaaaatgtaaataccccatggcattctttcactgtacgttgtcatccatgagtcaagattaaaatgctaaataaactatgcaataaccagttttttatctttaattagccacttggccgataggtggcactaaataaatgtattaagagaaatactgagctaaacaaaactggcattattccgctgctcaccttgatttcaaaaacaacaatgacaacgttgcacagtaacaaaatttaaataaaaatataaatgaagaaaattaaatatatatattttcctcaatatttacttattcaaattttattgactttttttttstatttataatgtatggtattttttctataaatttatgtccctatataagtcatggactattatggtaggagttaatctactgtattttctgaaagtaaagacttgtggcatcctctataaaaaatattaactcaatcgatatcaacccatcagtctgctctctgaaagctattgcatagtgaatgcttatttaagtgatttcaatggaattgaatattcttaaagttgaaattcatttggaccagagttggtgaaggttccag

SEQ ID NO: 455660 - DNA, 525 bp, Homo sapiens
acctgctcacagtgacattttgaggattaagatagtgcaggtgaacgcatttctaagctttgaaatgttaaccaacataacacattattttgcattattattttctaaaataatctacatttacattgaaaagtataaagtcctgtggatatgttgagtggaactacatgaatttagaacagatccgggcagggagtagaagactactgctctggcaaaaccggagtatgcaattccagtcagtcacatacagtcagtctatataataatgayagtacaaataatacatccatctcctgtcatcttcctaacaaccatacaagcccagtcctatgtacccattttgcacatgaggctcagtaaggctatgggacttccatagagctccagagctgcagacctgaaccacggcaaagctgcacgcctctttcccgctctctctctactccaggctgtcataacttcaccaaacggaatgaagacttgacttcaatttcaaccttaaacctaatttaaataaaaatg

SEQ ID NO: 455661 - DNA, 540 bp, Homo sapiens
aacgcatttctaagctttgaaatgttaaccaacataacacattattttgcattattattttctaaaataatctacatttacattgaaaagtataaagtcctgtggatatgttgagtggaactacatgaatttagaacagatccgggcagggagtagaagactactgctctggcaaaaccggagtatgcaattccagtcagtcacatacagtcagtctatataataatgatagtacaaataatacatccatctcctgtcatcttcctaacaaccatacaagcccagtcctatgtacccattttgcacatgaggctcagtaaggctatgggacttccatagagctccagagctgcagacctgaaccacrgcaaagctgcacgcctctttcccgctctctctctactccaggctgtcataacttcaccaaacggaatgaagacttgacttcaatttcaaccttaaacctaatttaaataaaaatgtctgaagggagaaagagaggaaagagggaaaataagaagttagggaaccaagaaaaaa

SEQ ID NO: 455662 - DNA, 540 bp, Homo sapiens
aacgcatttctaagctttgaaatgttaaccaacataacacattattttgcattattattttctaaaataatctacatttacattgaaaagtataaagtcctgtggatatgttgagtggaactacatgaatttagaacagatccgggcagggagtagaagactactgctctggcaaaaccggagtatgcaattccagtcagtcacatacagtcagtctatataataatgatagtacaaataatacatccatctcctgtcatcttcctaacaaccatacaagcccagtcctatgtacccattttgcacatgaggctcagtaaggctatgggacttccatagagctccagagctgcagacctgaaccacggcaaagctgcacgcctctttcccgctctctctctactccaggctgtcataacttcaccaaacggaatgaagacttgacttcaatttcaacyttaaacctaatttaaataaaaatgtctgaagggagaaagagaggaaagagggaaaataagaagttagggaaccaagaaaaaa

SEQ ID NO: 455663 - DNA, 540 bp, Homo sapiens
aacgcatttctaagctttgaaatgttaaccaacataacacattattttgcattattattttctaaaataatctacatttacattgaaaagtataaagtcctgtggatatgttgagtggaactacatgaatttagaacagatccgggcagggagtagaagactactgctctggcaaaaccggagtatgcaattccagtcagtcacatacagtcagtctatataataatgatagtacaaataatacatccatctcctgtcatcttcctaacaaccatacaagcccagtcctatgtacccattttgcacatgaggctcagtaaggctatgggacttccatagagctccagagctgcagacctgaaccacggcaaagctgcacgcctctttcccgctctctctctactccaggctgtcataacttcaccaaacggaatgaagacttgacttcaatttcaaccttaaacctaatttaaataaaaatgtctgaagggagaaagrgaggaaagagggaaaataagaagttagggaaccaagaaaaaa

SEQ ID NO: 455664 - DNA, 524 bp, Homo sapiens
tttgttgcatctttgaacataatgtctttttccaacaaactgtcttgcttggcaattggtaacaccaggggactgctacaggaaaaaaaatcaatactacaattagtctctttctaatgttttatcaatcgaaaattaccaatacaggatagttggactatgacggtggttttattcagataagaaatatttcttataaactgcaggaaaaaaattagtaagaaatctgtaaacttttaaaaaattaattccaaactttattcaactttaattttaaaagaaaaaartatatacttatttgaactccagaagaaaatgtttacacatgtatatctgactataatagatgaatcaataaacaacttaagagctgggattgaaatgcatggctgaactagacaagatttaacatgtaaatgcaaaaatggattgcaaacaactgaataaaggcataattgtataattagtttaaaaattactcatttaggatttaaaatacaaaatcatgggcaaaacttcaagtt

SEQ ID NO: 455665 - DNA, 599 bp, Homo sapiens
tgtgtctggcttacttcacttggcctaatgtcttccatgttgatccactgcaaatgatagaatttctttttattttttggtagctgaataatattctgtagatatgtaccacaatttctttaccctttcatctgttcgtgggccttagattgtttccattattactatcgtgaataatgctgaaatgaacatgggacagtacacacctctttgagatcttgatttcatttcttttgaataaaatatccagaattgcaatactggatcatgtggtagttctattttttaattttttgaggaaactccatacttgtttccgtagcaactataccactttgcatccccacaaacagtgttcaaggggtcccttttctacacaccctcaccaacactagttatctcttgtctttttgataattgtcttccttacaggtgtgaggtggtattttgttgtgctttaaatttaaatttctctratgttgagtaccttttcatatacctgttggacaaaattgtatatcttctttggaaaaatgtctgttcaggttctttgctcatattaaaaacttagaggtttttttttacagtgagctgtgtga

SEQ ID NO: 455666 - DNA, 554 bp, Homo sapiens
gttgacaatatatgcttgggtttatttctgcactttccattctgttccaatggtctatgtgtctgttttattgccactatcatactattttgattactatagctttgtaatatagtttgaaatcaggggatgtgatgctttcaactttgctccttctgaaataaatagcttttgctatttagagtttttgtagttccatacaaagtttctcttctttggtaaaatgtgggctcaaatcttttgactatttatattggtttctttgttttcagattattgaytttatatattctgtatccaactcatttatcagataagctcttggcaaatattctctcccactcagcatctttgtagttttatttgcataattgtgtttcaaagaaaaaaattctcttacagtttgtgcttctgtgacttatctaagttcctttcataacccaatgttaccaaaaatttctcctgggttttactctaggatttgtacaattttaagctttacactttgacctacgatccattgtgagttgctttttgtatacagtgctgtatat

SEQ ID NO: 455667 - DNA, 591 bp, Homo sapiens
ctgcagtgaactgtgattgcatcagtatgctccagcctgagtgacagagtgatacctggtctcaaaaaataatgaaacaaatgaataaataagaataaaattccaatttccatttattgaattttagtatataaatacacaaatgattttgtatattaaccttgacatagcaagaagagagtaaattgaagggttgctttcagtaaccaccacagtctcaccactttgcagcccatctctatgccctgccttccaactgaaccatagaacctaggaaagcatgaataaaaaaagagactaccaaataggtcaggcctgatggaaagtcgggaatattaagaaataaatttacagaaatgcaaggtgagttttccttagtttgaactctggataatgatgttttatagtgttttagccaatgaaaatacttgcaagtaggtgaggggacagaggatcatatattaayatgagatagcatggtacagtacagatgtatgggcatgcattttcaagtcagtaaaactaccatgtttgatgtctggttctaccagtttgggtgagttatgtagccattctgcaaaaccaaattgc

SEQ ID NO: 455668 - DNA, 600 bp, Homo sapiens
aatgttatattaattatatgacatttaacatgtgatagtcttctgttctaaacacgctgcatgtattaaatttttttttcattttcacaacaacattataaagtgttcattattttataatgtctgtttgttttatgaatgagtaaactgagggcacagaggagaagaacttgctctggacacacagcaggtgctactggagctgaggtttgaatctgtcagttctaagctcmagaacctgtgtgcttacccatgtgccacactgtctacatctactctcatataaaaatattttctgtatttttcttcatctatcaatcatatttttttcttctttatcagagagttttataaactaaagacagggtttgcatataccaaattttttgagtctagggtgattaataaaagagtagattggtcaagctacgaacaaagaagatagtttatgaagtacaaaaaaaatcaccaagtagaaagatttctttagaataaatacttttctttagaagaagtactgagtttagtaaaatagttgaaatattcctttcatatctcaaatctaagtgcagtatcactggcagactccatgagagctat

SEQ ID NO: 455669 - DNA, 600 bp, Homo sapiens
aatgttatattaattatatgacatttaacatgtgatagtcttctgttctaaacacgctgcatgtattaaatttttttttcattttcacaacaacattataaagtgttcattattttataatgtctgtttgttttatgaatgagtaaactgagggcacagaggagaagaacttgctctggacacacagcaggtgctactggagctgaggtttgaatctgtcagttctaagctccagaacctgtgtgcttacccatgtgccacactgtctacatctactctcatataaaaatattttctgtatttttcttcatctatcaatcatatttttttcttctttatcagagagttttataaactaaagacagggtttgcatataccaaattttttgagtctagggtgattaataaaagagtagattggtcaagctacgaacaaagaagatagtttatgaartacaaaaaaaatcaccaagtagaaagatttctttagaataaatacttttctttagaagaagtactgagtttagtaaaatagttgaaatattcctttcatatctcaaatctaagtgcagtatcactggcagactccatgagagctat

SEQ ID NO: 455670 - DNA, 603 bp, Homo sapiens
tttctggaccagttgcaggaaaggggaattcaatcagagtatggcagtctcattgactcaaaaagtcagagactggagttcaggaaggctgaggcagctggatggaacttgtgagacagagtagcagagtgaaagagcaacacagaataagttccagaaatctgcagaggatcctcttgaatctttggctaaataataagatgtatatgtttaaagtgaaactccataaaccctgggaaataataaatgattaaggaaagataaattatggggaactataaactgagcaactaccagagcttgcacaggattgggagatacttgagatcaggccagccagaasggaaagacctcattgggtacttgatgcattcaggtgaaatcccagaaacagtatgtcttactagtagggctaaactagtcctagagcaaaggatactctagactctttctaaaaaagcctcaaagggataaagctgatctgaaattaatttattgcaagaacaaaaatcaataagttttaaagaaacacaagaaaatttaggcaaacaatggaatattcacaattgccagtatccagtcaaaattattagacatgccata

SEQ ID NO: 455671 - DNA, 258 bp, Homo sapiens
gcccagatgctgttaaggggctctccaggcacgccctcctaattaggggcaagatcagagaagcctctttggaagaagacaaaaggcacaatgagatgyagtctcctgaagtagaggctttctctctggttatcacctgaaacaggaaataaggactgagtgcctgctgaattccaggtactagccaaatctgcagcaaactagcatttccaaaggtgtcttcttactttaatctcacagccaccctgtgagggaagt

SEQ ID NO: 455672 - DNA, 258 bp, Homo sapiens
gcccagatgctgttaaggggctctccaggcacgccctcctaattaggggcaagatcagagaagcctctttggaagaagacaaaaggcacaatgagatgtagtctcctgaagtagaggctttctctctggttatcacctgaaacaggaaataaggactgagtrcctgctgaattccaggtactagccaaatctgcagcaaactagcatttccaaaggtgtcttcttactttaatctcacagccaccctgtgagggaagt

SEQ ID NO: 455673 - DNA, 258 bp, Homo sapiens
gcccagatgctgttaaggggctctccaggcacgccctcctaattaggggcaagatcagagaagcctctttggaagaagacaaaaggcacaatgagatgtagtctcctgaagtagaggctttctctctggttatcacctgaaacaggaaataaggactgagtgcctgctsaattccaggtactagccaaatctgcagcaaactagcatttccaaaggtgtcttcttactttaatctcacagccaccctgtgagggaagt

SEQ ID NO: 455674 - DNA, 258 bp, Homo sapiens
gcccagatgctgttaaggggctctccaggcacgccctcctaattaggggcaagatcagagaagcctctttggaagaagacaaaaggcacaatgagatgtagtctcctgaagtagaggctttctctctggttatcacctgaaacaggaaataaggactgagtgcctgctgaattccaggyactagccaaatctgcagcaaactagcatttccaaaggtgtcttcttactttaatctcacagccaccctgtgagggaagt

SEQ ID NO: 455675 - DNA, 559 bp, Homo sapiens
ttaggctgcagggggtgtattttaaagataatggtgaytgtgtggctaatgggataaatgcttgggataaagagaaaactccaaactctagcagtgctagtaagtggattttcaggctttgggcttgctttacttggctttgaggctaaacatcaaaatctttatgatacctttttcctctctattttttttcctgcttatgtattcattgaagtctatttttatcatattttcagttgctggtcatttactaatgttcagagaaatatgtacttttatggcatatgtacacattacattgaaagtctttcatgtttattatttttacaatgtgctttgaactagttttttaaactgaaataaatttctatatgtattatggctatgtccatgggaatggcttcaagttcattatattttgctgcctgctttatacagatttatactatttgttttgtacgtgtgctatataggagttcatgcaaatgtattttgtattatggcttgttttcttagttacgagcatctgaaatatagtatctttatttaatactatcac

SEQ ID NO: 455676 - DNA, 462 bp, Homo sapiens
ggactggaatctgtccttttaaaaactgctgtataatttacattcaataagacacagaccttcagtattcagtctgatcaattttgacaaagggatgcactttgtgtaactaccaccccaaaaggggaaagatgtttccatcactcagaacgtctccttgtgccctttctcagtaaaccccyggccccttctgactttgacacaaaagattcattttgccttcaacataagtctgactccaaacttctgtatttgaaattccatcctttttctcctacaccatgctgtgtctttggaattaacaaaatgggcaccatgggtcccacctggctggaatctatagatatacgactttaggaggccaggccatggtcttttagctgaaaaactaggtcagctggtggagtggacctcgaagctttcagtttttggaatgtttggagagcaattccaaaaatacac

SEQ ID NO: 455677 - DNA, 461 bp, Homo sapiens
gactggaatctgtccttttaaaaactgctgtataatttacattcaataagacacagaccttcagtattcagtctgatcaattttgacaaagggatgcactttgtgtaactaccaccccaaaaggggaaagatgtttccatcactcagaacgtctccttgtgccctttctcagtaaacccccggccccttctgactttgacacaaaagattcattttgccttcaacataagtctgactccaaacttctrtatttgaaattccatcctttttctcctacaccatgctgtgtctttggaattaacaaaatgggcaccatgggtcccacctggctggaatctatagatatacgactttaggaggccaggccatggtcttttagctgaaaaactaggtcagctggtggagtggacctcgaagctttcagtttttggaatgtttggagagcaattccaaaaatacac

SEQ ID NO: 455678 - DNA, 466 bp, Homo sapiens
gccaggactggaatctgtccttttaaaaactgctgtataatttacattcaataagacacagaccttcagtattcagtctgatcaattttgacaaagggatgcactttgtgtaactaccaccccaaaaggggaaagatgtttccatcactcagaacgtctccttgtgccctttctcagtaaacccccggccccttctgactttgacacaaaagattcattttgccttcaacataagtctgactccaaacttctgtattygaaattccatcctttttctcctacaccatgctgtgtctttggaattaacaaaatgggcaccatgggtcccacctggctggaatctatagatatacgactttaggaggccaggccatggtcttttagctgaaaaactaggtcagctggtggagtggacctcgaagctttcagtttttggaatgtttggagagcaattccaaaaatacac

SEQ ID NO: 455679 - DNA, 340 bp, Homo sapiens
gctcatgctggagtgcagtggcgtgatcatagctcacwgcagcctcaaagtcctgggctcaagtgatcctcctgcttcagtctcctgagtagctgggactacaggcatgcaccaccaggcctggctaatttatttatttttattttaattttgtagagacaaggtctcgtcccttccccagactgatctcgaacccctgggctcaggagatcctcccacctcggcctcccaaagtgctgggattacagatgtgagccaccactcctggcccacacctactctttatcctcaacccacacccccaggctcaaactcaaaaggaaggagcaaaccctagaag

SEQ ID NO: 455680 - DNA, 545 bp, Homo sapiens
aatgagaacacatggacacagggagaggaacaacacacactggggcctgtcaagggctagggttgggagagagagagcatcaggaaaaatagctaatgcatgctgggcttaatacctaggtgatgggttgataggtgcagcaaaccaccatggcacacgtttacctatgtaacaaacctgygcatcctgcacatgtaccccagaactaaaaataaaaatgattctaaaagtgccatcttatcttattctcttattcattcttttaagcagtacattttttccaaaatttgttaggatggtcttgccaagacaagagtccgctcactacacacaaacagtcatttccctgaaagcatggagtctccagtttactggttctcctctcccctttgtctttctcgcaccacatcttttgtgatttcctcaatgtctctgagggtaagtgactctcttccattgttgccagggttcatttgcacttctcccctaccctattatttgggtcacttcaattggcatttgtaagagcagagtaattaaatcat

SEQ ID NO: 455681 - DNA, 479 bp, Homo sapiens
tgggagtttaaattggtatcyatactttgaagtacaatttggcaacgcctagtaaagctaggacgtttgagcattggataccgttggatgcctactagtatcttttctcaatcccgtaccttttttatagaaagctgattttgtttgcctagccattccttccccagtacagttatgtgtttcaatggaagaagatataaccctcagttctaggaatggggttgatttttttttctaaaatgattatattgccactggcagtgacacaattgcagctaataaattataaggggaggtcttctgggagtattctgcagaaagattataattcctaaatgattgtcctaggaaaaacagccttccctcttcttgtgggcacttttatttggatgtcacatttgcaaatgttttaatcattccactactagcctgaaaagaagccacacccaggatgactgggtggaagatggaagggaatg

SEQ ID NO: 455682 - DNA, 620 bp, Homo sapiens
caaattactgaggcataagttattaaaattataatacatgacaccaaattgctctccctcaaaactaaaatctttgcttatttatattgtcaccaatatttcacaatagtgttcatttatccaaatactggccaccaatggatgttgtcatttagattttgccactatgagtaaaaraagtggtagcttattgttttaattgacatttctctgattatttgtgaagtttgtagcatattttcatgtgtttattactacttgggtttcttcttcagtgaattcactattgataatcctttttagaaaaaattttattagattgtctctttgtgtttattgttttgtggcagctctttgcattctgaatattaatttgttgcctgttctatatgccacaaatactttttttctagtctgtggtttgtcctttattcattaattaatttatttaaaaggtatttattggaaactttgtgccaggcattgttactaaataccgggaatacagatgtgagtaagacagagtcccactctcttggacttagtttattgtggaagatatacagtaaacaatgaaagacagatgtaatgttttataagtgttacaaagagtaatagag

SEQ ID NO: 455683 - DNA, 620 bp, Homo sapiens
caaattactgaggcataagttattaaaattataatacatgacaccaaattgctctccctcaaaactaaaatctttgcttatttatattgtcaccaatatttcacaatagtgttcatttatccaaatactggccaccaatggatgttgtcatttagattttgccactatgagtaaaaaaagtggtagcttattgttttaattgacatttctctgattatttgtgaagtttgtagcatattttcatgtgtttattactacttgggtttcttcttcagtgaattcactattgataatcctttttagaaaaaattttattagattgtctctttgtgtttattgttttgtggcagctctttgcattctgaatattaatttgttgcctgttctatatgccacaaatactttttttctagtctgtggtttgtcctttattcattaattaatttatttaaaaggtatttattggaaactttgtgccaggcattgttactaaataccgggaatacagatgtgagtaagacagagtcccactctcttgsacttagtttattgtggaagatatacagtaaacaatgaaagacagatgtaatgttttataagtgttacaaagagtaatagag

SEQ ID NO: 455684 - DNA, 547 bp, Homo sapiens
tgtgttggtcagagaacaaggaattgtttaatttattaattctattttctcagtgaaataagaagatcatcagctgagaatgagaaggaaggagtgggtgttagaggtttgtaaagaaacgggaatgaatgggctgtttgacttgggcaatgtaacttcagtacaaaacttttcaaagcaccctgagcggcagctagagatgggtgatcacattaaagttggtctggtgtgttsttattcagccatttttttagtctccagctgcatggtttatgttaattatggcatctttaatcacatgtaagtttttttttctcttcgtgccgttaactcagattggctaatttttcctgtatggattcttgaatttgtacattcttaagaaggctccacttctaccttgaaattacaaaacaaaatgaacagaaaacttcactattttcttataatcttgtcataataaatactaacattttattccacgtggccttttctgtattcataagtgtgtgacttatttttctcaaaatggataatatgatgtttc

SEQ ID NO: 455685 - DNA, 606 bp, Homo sapiens
cttatgcactcctaaaccatctgcctgatacctgtccctccctgaaatgtttatgtctcaaaattcttcatttcttcttttttagagagtagaatcatcaagatgcaagtatgtttgagtgaaaaacataacaatgttgaatcagaaggagagaaactrctgcagtggcccagaggactgcaagtgcctgaaagctcactggggatggaaaatatgacttccctctagtttcttcattctgggtttgtcaaggatacacaccctacagagagacccctcacctttccccacaaacggtacctccttttccttcccctactcagtaggaatgtgctctttaaggattctgcaagagcagaactggtgagaaaggtgcttttaaaaacagtgctgtggacttccatcctaacccagtgcagagcactggcacagtatgtaaatgcttagtatatttcttttcatgtttgttatgatcaaaaagtcattactgacttcaccattgtaaacaatgaaacaccaagctatgagtgatgatttaaagtgaaaatacagcacaggagcccccaaaacaccttatactacatcatgcaataatgtaataatccc

SEQ ID NO: 455686 - DNA, 587 bp, Homo sapiens
ccagagtgctcaatgttaagtcatattaaaatggaaatgtaatagtttctccaacacgtgactcttcctcatttctttacctcttacagtaaacagacttgatgtgttctcctctaaaagcagggctttaactggagggaaaggagtgagagggaaagtgcgtttcacagtgcatggtacatagcaggctctcaaaaaggttagtcctctagctgggctgctggtggaaaaaggtggaaaaaggaaaactaatgttttcagccctattagattttgtacttaccagacratttttattcaagccaggcctgattgtgggtctctaaccctgatggggaaaatcccactgggctgattatccataggaaactaaagttgttaccagcaaagagaagaaatatgataagagacagggagttagtaggatttttggccctaatattttgattaagatttttttaaaggtgctattatcctgaatctttgtatattttatttattttgcatgcctgtttctccatggtgtattcacatgcaagctttttgaggacagaattgggtgttctacttgaaagcatcaatgacag

SEQ ID NO: 455687 - DNA, 562 bp, Homo sapiens
actgttcttaggttgttttatcatagtttgagtatacaatagattggttcaaattacacttcatgttggatggaaaagaaatatatatccctctggtccatttgcccagcaatgcatactttttggataaagtgagtaactaataatacaaatcctaaatagagtacaaaatgctctgtttaaagcagtacatgttgatcacatcatgaataagctttgaatcttttaaatctattaagaactggagctatgggaaatcaattgcctatgaattttaaaataacgtttgcattgctagatattgttaatttttgtaaaaaaagtgcggcaaacttgaagaaactctactagaaygtatatagtgccttttagtcattttcttcatttctgctggggtcttactttagaccccagccacttaagtgcaaatctattaatgaacatgtgcattcttaagagtttacaacacctaaaagcttgagactgtctactttctacaacacagctcctagatgtgctaaatttataattcatttctagctactttaaaactacaaaatcc

SEQ ID NO: 455688 - DNA, 572 bp, Homo sapiens
atgatgagacccatgtgagtcttcttctcatccttctttctccctctctctcccacttttcatgttctcatgcctcagcatgccttctcatcaccaagtaaggtaagctcacttatttgtttattcaacaaacatttattgagcacctaatgtgtgccaggctcaaaattagctccttattgcaaggacctctttatttagcaaagtaaagtgacatggaaaccgctgataaaacattgacttcagtactaaattagaggtttattaaaagcattgataatacatagaaaggagtaaacaattgtgcccgctggaggggggagatggcrgaccagaggagagtaagaaagaagaagtattagagcaggtttgagagggaagcacgtttttgctaggcttgcgaggaatcacaggagtttgctaataaattaatgtatactctaagtgacataatggtttttctgcatgtctcatacaagtttgaaactgagctaactagcctgaaccacacactgacccatgcccaacctactctccttcttgatttctctgtgttgatttttggtatcatt

SEQ ID NO: 455689 - DNA, 572 bp, Homo sapiens
atgatgagacccatgtgagtcttcttctcatccttctttctccctctctctcccacttttcatgttctcatgcctcagcatgccttctcatcaccaagtaaggtaagctcacttatttgtttattcaacaaacatttattgagcacctaatgtgtgccaggctcaaaattagctccttattgcaaggacctctttatttagcaaagtaaagtgacatggaaaccgctgataaaacattgacttcagtactaaattagaggtttattaaaagcattgataatacatagaaaggagtaaacaattgtgcccgctggaggggggagatggcggaccagaggagagtaagaaagaagaagtattagagcaggtttgagagggaagcacgtttttgctaggcttgcgaggaatcacaggagtttgctaataaattaatgtatactctaagtgacataatggtttttctgcatgtctcatacaagtttgaaactgagctaactagcytgaaccacacactgacccatgcccaacctactctccttcttgatttctctgtgttgatttttggtatcatt

SEQ ID NO: 455690 - DNA, 572 bp, Homo sapiens
atgatgagacccatgtgagtcttcttctcatccttctttctccctctctctcccacttttcatgttctcatgcctcagcatgccttctcatcaccaagtaaggtaagctcacttatttgtttattcaacaaacatttattgagcacctaatgtgtgccaggctcaaaattagctccttattgcaaggacctctttatttagcaaagtaaagtgacatggaaaccgctgataaaacattgacttcagtactaaattagaggtttattaaaagcattgataatacatagaaaggagtaaacaattgtgcccgctggaggggggagatggcggaccagaggagagtaagaaagaagaagtattagagcaggtttgagagggaagcacgtttttgctaggcttgcgaggaatcacaggagtttgctaataaattaatgtatactctaagtgacataatggtttttctgcatgtctcatacaagtttgaaactgagctaactagcctgaaccacacactgacccatgcccaacytactctccttcttgatttctctgtgttgatttttggtatcatt

SEQ ID NO: 455691 - DNA, 559 bp, Homo sapiens
gtttaagggctactgcttgtgtgttctctccccacagcttaactacaagctgttttagaaccatcaaatagcctagtgcctgacttggcacaggttaggggctcaaacaatgaactgaagttgcatcctctattattcactgctattgaaattgaaagggaagtgtgagttcttgctgtcaggtgccctgggtgcctccccattcctgatgagctccttcaatactgttagcatattttattaaaacctttctagtgaaaatgtttggagcatrccatctgtttcctgtcagaaccttgatgaatacaatgtcccaatagtatatttatttccatgaaggaccacaaaaaggaatgctattccaaaggagaaaattgctaatggtgtatatttaggcttcggttaattgaggatgaataacttccctatactcctctaaagatatagatgtgtttgttttctacattgcatatgccaaaactatgctaatagtttattataaatagtttatgtataaatgtttattatacattatccttttaattctcacaataagaac

SEQ ID NO: 455692 - DNA, 612 bp, Homo sapiens
aagttccacttttctttctacactacaaatcayctgcttatatttaaatcctgttcttctctagtggtgctagagttttttttcttttttcattttacctgcctctagctaaatatgtgccacaaggccacgtaaaatagaaaccctataaatctggggatattggaaagaaaatccttctcatattacccttaggaagacaagtccagctcagagaatgaatacagatacgtagattggcaagaaacctgtggtgataagcatctcatttcaatatatctgtatagaaagcaataaaatatccaggctgggtttctacggtgagccacaggggtaagatattcagtggcactaaatggctcactcaccctgatgaagcaagtatctttcatgcttggtgtcttacaaaagataataagcaaaagaagctccctgttgtaatacataatctcacacgcagacagcttaaaacagcaatattttgcagagaactgcaccttaatgtcttaaggatagaaatatcttgacctggaagcactaacatagtgattgcggtgcttcctcttaccaagtaattaaacaggagctccttgcaatgggcagggtcctcaa

SEQ ID NO: 455693 - DNA, 597 bp, Homo sapiens
atttaaatcctgttcttctctagtggtgctagagttttttttcttttttcrttttacctgcctctagctaaatatgtgccacaaggccacgtaaaatagaaaccctataaatctggggatattggaaagaaaatccttctcatattacccttaggaagacaagtccagctcagagaatgaatacagatacgtagattggcaagaaacctgtggtgataagcatctcatttcaatatatctgtatagaaagcaataaaatatccaggctgggtttctacggtgagccacaggggtaagatattcagtggcactaaatggctcactcaccctgatgaagcaagtatctttcatgcttggtgtcttacaaaagataataagcaaaagaagctccctgttgtaatacataatctcacacgcagacagcttaaaacagcaatattttgcagagaactgcaccttaatgtcttaaggatagaaatatcttgacctggaagcactaacatagtgattgcggtgcttcctcttaccaagtaattaaacaggagctccttgcaatgggcagggtcctcaatacccagatggcattccaactaacag

SEQ ID NO: 455694 - DNA, 597 bp, Homo sapiens
atttaaatcctgttcttctctagtggtgctagagttttttttcttttttcattttacctgcctctagctaaatatgtgccacaaggccacgtaaaatagaaaccctataaatctggggatattggaaagaaaatccttctcatattacccttaggaagacaagtccagctcagagaatgaatacagataygtagattggcaagaaacctgtggtgataagcatctcatttcaatatatctgtatagaaagcaataaaatatccaggctgggtttctacggtgagccacaggggtaagatattcagtggcactaaatggctcactcaccctgatgaagcaagtatctttcatgcttggtgtcttacaaaagataataagcaaaagaagctccctgttgtaatacataatctcacacgcagacagcttaaaacagcaatattttgcagagaactgcaccttaatgtcttaaggatagaaatatcttgacctggaagcactaacatagtgattgcggtgcttcctcttaccaagtaattaaacaggagctccttgcaatgggcagggtcctcaatacccagatggcattccaactaacag

SEQ ID NO: 455695 - DNA, 597 bp, Homo sapiens
atttaaatcctgttcttctctagtggtgctagagttttttttcttttttcattttacctgcctctagctaaatatgtgccacaaggccacgtaaaatagaaaccctataaatctggggatattggaaagaaaatccttctcatattacccttaggaagacaagtccagctcagagaatgaatacagatacgtagattggcaagaaacctgtggtgataagcatctcatttcaatatatctgtatagaaagcaataaaatatccaggctgggtttctayggtgagccacaggggtaagatattcagtggcactaaatggctcactcaccctgatgaagcaagtatctttcatgcttggtgtcttacaaaagataataagcaaaagaagctccctgttgtaatacataatctcacacgcagacagcttaaaacagcaatattttgcagagaactgcaccttaatgtcttaaggatagaaatatcttgacctggaagcactaacatagtgattgcggtgcttcctcttaccaagtaattaaacaggagctccttgcaatgggcagggtcctcaatacccagatggcattccaactaacag

SEQ ID NO: 455696 - DNA, 564 bp, Homo sapiens
accttcacaaccccatggatgattgaaagcccctgttatcactaacagaccaagctggtgtttttgaaaggtaataaacttcattctgttgacataaagccatgagaagaaggtcctaggaaatcaaactctctggaacctggacaggttgtgagcagcgtttgcttctgtgactgcagcttggctctaatgaatgggagacagttccagagctgcttaatggccatgtcaggctgggtatgcccggagcagccctggcacctccctccagcctctaatgaacagtgctgctggcaggcactggtgattctttgggctcctgtctcattagaatgtcaaccaaagctcagctgcctcaagccccttgtggaagtaggcaggttgaaattataaataaatacaatcacaaaaggttcgtgcatacagactaactcttctttctctgaatgaaaggggctttactctttctaatatatatgtcatttagtaccaagttcaagyatgcaagaaatctgacaatttttttctataactgaacttaatttctattttgagcccacattc

SEQ ID NO: 455697 - DNA, 581 bp, Homo sapiens
gtgctgggaacaaatgcagctcccactgattctctttgaagcttacaatagtatgcccaaagttgctggtattgacaagcaaccaaagtgagacatataccatatcagaaaacctgagaactgtagctttgctgccttttatagccacagccacgtcagcatccagaaaaatcatatacactatataagaaatcaattttgcaactcaaatgggtgagccccatccagcttaaggaccaagttccctaacctcaaatgacttaccacatcagccctgggtcaaacttcccttatttatacttatgctttagggcctaggaattttctagtatgtctacttcaaattttctcatggccaaaacagrcctatatgaatttcataaatatttaatgaatatattggtaaatgagtaaatgaccacttggttaaaataaagcattgactgtgtaattcatcaccgagtcacccattgacagtgggtgcaagacagcttcactgagtacaactagcaaaatttctcatcacagattatttgagacgagcagttatctgagacaacccaggaagatgagtctaggaa

SEQ ID NO: 455698 - DNA, 577 bp, Homo sapiens
gtctaccaaaagatgaccatttaaagggattttgtgcctgctggcaaatttctctttatttcatagtgaaaattaacacgtataaactaatgttcagtttccaattgattatggagtgacaatggtcctgttaaaatccctaatccacattggtcccttattttccacttactgagacatagagttgacaacacatatggttaattattaaattctgcatagattaaaaatattctgtacatgggcacaacagacagttacgtgaagattctgtgggccagcaaactacgtaccagacctcagaagatcaaactgctgataaaaccagttctcactccaaagacccagcagatcaaatacaaattccaatattaagctcagagcaaatgaaagaaatatttcctgaacargatgatcaaccctatgtagtagacaagtaggcagaacctcagagagaagagcccatcacagagttctctgtggaatgccttgtctgttaggggtcatcagtagggaagcacaagtattatttgtcaaaggctccattattgaataatcatgtgtttggaggctaaca

SEQ ID NO: 455699 - DNA, 407 bp, Homo sapiens
ttgatctccctgacttcaatttctatccttcccaggtcaacttcaacagtttctagattygttttatttaatgtcactccgctgcttaaaaactttcaactgtttcctattgccttataataaagtcaaactcagaaaagcatgtcagggtttctagggaaaatccagaaatatgaggcctaaaacaaagccaaatgcaagctgaatgtcacagggtgggcaaaggatgctcctggaccagggcagattggctctgtgctgcaatgatctgatctggtgagaaaagcagaactaaccaccctcctccacgcacacatacagacacacacacacacacacacgcataccccagagactgagaaggagtgtagcatcttgtccaagaatttattcaggcttttacaggt

SEQ ID NO: 455700 - DNA, 391 bp, Homo sapiens
acatcacataccagggcctgttgggggttggtggacaagaggagggagagcattaggaaaaatacctaatgcatgcaaggcttaaaacctggatgatgggttgatgggtgcagcgagccaccatggcacatgtatacctatgtgacaagcctgagcattctgcatatctttatatatagagtgtgattgtgttataggcaaaggacaaaaccctctttgctccattaaamaaaataaggaggaagaaatgctcaggtaccttatatttcataacttgcctctttgtgattgccatttcagctttgggctgagacttaatccagggacactggcacttctgtattgttatccttttatagagaaatcatgaattttctgtagaggtgactgt

SEQ ID NO: 455701 - DNA, 495 bp, Homo sapiens
tcagctatctttaaaaatagtaaaactaatttttaaaatatttgaaaggggataatatggtagaaagaacataggctttcaatcagcactgaattcaaactctgtctctgccaattattacctgtatgactttggacacrttatgtaatgtgacagatgccacacaattaccaaaacccatttcatctccctactgaaaacccaactctgtgatgtcttccagcctctctggcagcctaaagtgtctgtgtgactaagctctggcaaatgcactgtggacagaagtgatatatgtcacttccaggtctaggccattaaaacttcttgtgccctggaagcttgccttaatttgaacatcaatctgaaatgtatataactcagaaaagtcaagctgaaatctaattttgtctcacctataaagcctttattgattgtataaacagtatttctaacaggaacattcagaggattcagttgaagactttacgtccttaa

SEQ ID NO: 455702 - DNA, 495 bp, Homo sapiens
tcagctatctttaaaaatagtaaaactaatttttaaaatatttgaaaggggataatatggtagaaagaacataggctttcaatcagcactgaattcaaactctgtctctgccaattattacctgtatgactttggacacgttatgtaatgtgacagatgccacacaattaccaaaacccatttcatctccctactgaaaacccaactctgtgatgtcttccagcctctctggcagcctaaagtgtctgtgtgactaagctctggcaaatgcactgtggacagaagtgatatatgtcacttccaggtctaggccattaaaacwtcttgtgccctggaagcttgccttaatttgaacatcaatctgaaatgtatataactcagaaaagtcaagctgaaatctaattttgtctcacctataaagcctttattgattgtataaacagtatttctaacaggaacattcagaggattcagttgaagactttacgtccttaa

SEQ ID NO: 455703 - DNA, 636 bp, Homo sapiens
tttaacttacagggtaatttaagaatcaatgatagaatctggctcacagtaattgctaaataaatagtagatattattatataatattttrtttaggttgtccctttagatctctctctctctctctgtctctctccctcatggttggtgagttaataagtgtttttaccccatgtggaggaaaataaatcatatttatgaaagcaaaaacagagcatcagtctttaatggggaaacagcaatttgatgaactactacaggcatcatttgcaagatatgtgattatggataccaatcttaagttttctgagcctcagtttcctcacttataaagcaggtataagaacctataccccacagaggataagaaaggataaaatgaggaagccaaatgtaaaagcatctcatagactttggaatttaatgaaaacatataatactattattatagattatcattttaagtccacaaaaccaaataggattaatacaaacattattatctaacatggcatttaatttcccactggaccaccaatgctggtgcattttattgtgatgtctttaatgtgggtggatgtgttactaacattacctttctgtttcctcatgtgtttaagttgatgaaccaactac

SEQ ID NO: 455704 - DNA, 622 bp, Homo sapiens
caaaccaaatcctagcagatgtcagtttaaccaggcttgcagggaatctatgatccactttaaacttttcaatatattctcttaatttcacaatttataacctctgaatactcctcaggtgaactttatgattgtgaatttaaggttatcaagaagtcaagctattcctggaatagtgtttggtatgttcctcagccacaccatgtcacacacagaggggcctgttcttctccagatggagggtcaaaactcagagtatttcaaatagtatgcctgggmctgaaggaagaaagctgcagtccctaagggacctcctagtgtcttaaaggggattgaggaaactattcagtgggtggtatttggagctgtgtgaaggagagtgaaaggtaaacactttcagttaataattcaacaaaaatatatggaatcttaaccaagtgaccaaggttgacatcacaattgatgtcatgtgaatctcatgacccctgtgcttgatgtgatgagaacggcactgcaccactgtggtatttttcaaaactcaaccccctcatataataatgtgtcaggaatgagacaaactcgaagtgaggagcattctgcaaaatgcgtggcccagtacctt

SEQ ID NO: 455705 - DNA, 637 bp, Homo sapiens
tacatacatagaataaaaacaatatttcaataaattttaaaataatttttataaataaaacttttagtaatacattaaaataaatttaaataaatatatattttcaataaatacatttttctttatatatgtagaagaatctaacattctggaaagatagtggtgacaaagcaactcagtagtaaaaccaaaaaccaatggaaaaaaattataataaatctaggtgacacattatctctatcaaccccaaaatgccagaggtggagatgaatcaccaacagccagccgatctgcaggctaccagaatctgtgcaagaggaagcagaggcaagcractgatggatctgtggataggaaaaccccgaaagggccaacaggtgtttactgcaaagcatgaccaactaatatgaaagcagctgaaactgacagaggttttcctaatgtaatagtgggtgcgtttgtgccaggagccctcagtagggtgtgaagggtcgggaagagtcagacatatgaactccccaggctgacacacctaccagggctcccctccataacaaagccatctgctggggaaaaactgctaggagtgaaattaaaattgaccaaggcaaagacaattaagatgaaagaaagagaa

SEQ ID NO: 455706 - DNA, 629 bp, Homo sapiens
gtgcagtggcttacgcctgtaatcacagcactttgggaagccgaggcaggcgaatcacgaggtcaggagatcgagaccatcctggctaacatggtgaaaccccgtctctactaaaaaatacaaaaaattagccaggcatggtgggggctgcttgtagtcccagctactcaggaggctgaggcaggagaatggcgtgaacccgggaggcagagcttgcagtgagctgagatagcgccactgcactccagcctgggcgacagagcaagactccatctcaaaaaaaaaaagaaaaagaaaaatagtaattatgcatccaatatgtgccaggcactccattaattccttggaggtataaggataagatatggctcttgttctcaaatatctcacagtctagcagttgtgctggacatttcattttagacatgtaagtgtaaattttagtgattatttacaatcctccttcaaaaagtattcatatcttaatgtataaaaataacagcrggttatttagctaaagatgtaataatcaaaattcaaattgaggatgggcctgatactactacttaggcatagaagtttaggtagtaataccttaaagccaaaacaaatgcatcaaactacaaatt

SEQ ID NO: 455707 - DNA, 552 bp, Homo sapiens
ctcacagtctagcagttgtgctggacatttcattttagacatgtaagtgtaaattttagtgattatttacaatcctccttcaaaaagtattcatatcttaatgtataaaaataacagcgggttatttagctaaagatgtaataatcaaaattcaaattgaggatgggcctgatactactacttaggcatagaagtttargtagtaataccttaaagccaaaacaaatgcatcaaactacaaatttcccttttaggtatttaggaaccttatagtggcagtgaaacaaagcaggatatgtccatgtgagatggatatatctaccattattggagccaaaagaacacagacagaggcacattgacattgttaacattttcatacttaacagcacttttgcaaaaccttataattatcacattatggtataattttatatatctctattatctatctatctatctatctatcatctatctatcatctatcaatctatctttgtctttggttcctggtacaaagcttagaatctcttggaatttcctgagtaacag

SEQ ID NO: 455708 - DNA, 533 bp, Homo sapiens
ttttgtgtctaatacaaattaggaatacaaatttagaaatgtgttatatgatgataattcaagccctaagagtcargtgagatcttctattttacggagtgtcaatgacccagttatgtcaactccaacatttagagatttcacagaagacaagccaccaaaggtagaggtggcaaaacaaaccaacaaacaaaccaacaaaaaataggtggaggccaagagaggaaacattttgagaaaggaatgggcaacaggttttgatgggcaacaggttatggagctgtaaagtaagacattgatgttcactgatctttagatgaaaaaactagttgatggtggctgacctgacagttccaggaagagtgtctattatagagaaaataccatacccagcatagctcttctctgtgggaaatgtgccccaacattatttgttactggcacaatttagatattaactaagaataaagacaaggatattaatgaagaataaagataaggaattttttttgctccttgttccatctgccaat

SEQ ID NO: 455709 - DNA, 533 bp, Homo sapiens
ttttgtgtctaatacaaattaggaatacaaatttagaaatgtgttatatgatgataattcaagccctaagagtcaggtgagatcttctattttacggagtgtcaatgacccagttatgtcaactccaacatttagagatttcacagaagacaagccmccaaaggtagaggtggcaaaacaaaccaacaaacaaaccaacaaaaaataggtggaggccaagagaggaaacattttgagaaaggaatgggcaacaggttttgatgggcaacaggttatggagctgtaaagtaagacattgatgttcactgatctttagatgaaaaaactagttgatggtggctgacctgacagttccaggaagagtgtctattatagagaaaataccatacccagcatagctcttctctgtgggaaatgtgccccaacattatttgttactggcacaatttagatattaactaagaataaagacaaggatattaatgaagaataaagataaggaattttttttgctccttgttccatctgccaat

SEQ ID NO: 455710 - DNA, 562 bp, Homo sapiens
cagtgtgcttggtaacactaaccccaggttcgcattttgaaacatagctcccatttttcttaggtcttcgacggtagcatcatcttgaagcaattagatgaaactttcttattttcattagaagaaacacttaaagtcacatgcattttaatgaagttatcaagagcattatctctataatgcagaagcaagaaacaccgtttatttgacatacataattttttactgtctatatatttatagccctggtttaaatataatgatgacacagaaaataatcagtagattctctctttatgtgtttatattctttagaatagataagacaaacaaatgattttacaccagcagtatagcaaataacgtataatctgcgaagggaaattagagaaagaaaaggtcatttctagtgggaaagatygcagctacaagacgaaatctaggttcattagaatctaaactacattgcagtcttcatcactcgtttgcctatttccctgtgtactggtgtttaggtattcctctaatatctattcccaaataaccgtatacttttgtgtct

SEQ ID NO: 455711 - DNA, 607 bp, Homo sapiens
catacctgactttatcactaattcattctcaccagagcccttggaggaaggtagggaagggatgattatcccatttggagccctagagagattcaagccagggtcacaaagaatgcaagaactaaggccagaactcagattttctgactcatatattttttctgtmctctttgctgcctgctgtgcttgagttatacacccccaaacataactgattatgccgctgttctgattaaacaccttcaacgattccctccttcattttgcatcacatcagccctcctgagtttgttacataaaagccgtctgcacagtggctctgtcttgggagtctcactgtgctgcccaggctggagtgccgtggcatgacctctgctcactacaattccacctcccaggttcaagcagttctcccaccttggcctcgcaagtagctgggattacagtcatatgccaccccgcccggctaatttttgtatttttaggacagacagggtctcaccatgttggccaggctgatctcgaactcctgacctcaaataatccagccacctcaatctctcaaagtgctgggattacaggcgtgagccaccatgccatggctgtg

SEQ ID NO: 455712 - DNA, 487 bp, Homo sapiens
agaaaggcctctgataaaaataaagtcctggaaaatcactggtgccccaggcacattcaactatggagaggagatgagaaatgargtcctcctccctgggacttatatcacccgggcctgagacttcagaagatattctctccttaggagtgagttttattcattacatattttagatgccctaaggcactagggctgacttctctcagggatccctgattgagagagtctacaccaatgattgcagttccccataattctattccatgcatctcatctctgatgacattctatctttccagcacattttcactagtagccttcctatcttaagacccttaatcacatctgcaaagtgtctattgtcacataaaggtaacacatccacagattctgggagttaggacataaacatttttacagaccttaattttgtctacaacacagcccagtgtcaacaatcattgtcaggatgatagatgatgtt

SEQ ID NO: 455713 - DNA, 487 bp, Homo sapiens
agaaaggcctctgataaaaataaagtcctggaaaatcactggtgccccaggcacattcaactatggagaggagatgagaaatgaagtcctcctccctgggacttatatcacccgggcctgagacttcagaagatattctctccttaggagtgagttttattcattacatattttagatgccctaaggcactagggctgacttctctcagggatccctgattgagagagtctacaccaatgattgcagttccccataattctattccatgcatctcatctctgatgacattctatctttccagcacattttcactagtagccttcctatcttaagacccttaatcacatctgcaaagtgtctattgtcacataaaggtaacacatccacagattctgggagttaggacataaacatttttacagaccttaattttgtctacarcacagcccagtgtcaacaatcattgtcaggatgatagatgatgtt

SEQ ID NO: 455714 - DNA, 539 bp, Homo sapiens
ctgggaggaattaccaagtcaggtgaccttataaacaattcacaaccttcattcattggtgggactcaaaatgcactatttggtttctcataggttaattcagtcccttgattcttaaaatccttcatggttagtttgtaaattaatcaaacttcaaggtcactttccatttatctttgttgatttcatagawtatttgattacctgaagttgttcaaagacctaaaaagacttatgaatactaggtgttttgaataagataataatggcaaagaaaggtgcaatttctgtagggaaaaaagccatagtcatacattttttaataaaaaaaaatttgttttttaattgaagaaaaagagtgactatcccagaattaaaaaggccttgaaagagcctagccaaacctgaactgtcagaatagttctcaagcagactttgtttaatttataagtttgtaaattatatcgctgcccctgccttttctttcaaggccacagtcaatgcctataagataagaatcataagttcccacagagaat

SEQ ID NO: 455715 - DNA, 639 bp, Homo sapiens
attaagcttatagtaaggagtaagaaagagagttctaaggcaaagggtatcttggatgggtggagggtcagaaaaagcctttccaaagaaatggtattaaagctgagacctgaagaattaaagaaataaaggagccagtcacacaattctaacatatwttagtagcagaactctttttaaaaatgaaatcattagtagaataccactcaaaagcaagtaaaatagacttgctctgatggaagctatttagggcttctgctctgctcactcagcctctcttaaccaaacccaaggaggccctggatattcttggagacctttttctagtatcaggatgagctgtctcaataaataatcctcaaaaaataatccagggcttcgtggaacgtggtttgaaaaccactggcctgggtgaagccagtaggaaattgctttatgctgtcctgccctgataatcagatacaaagataagtacctttcactcagcagttgagcctgcgttcagcaccgacacagattttaatctttcccttttatgtcctgaaagtttagatacacaaagcaccattgctatgttctttgtctaaagcttcagtgatcagtaacctagctaaaatgctttggatactttaattaaca

SEQ ID NO: 455716 - DNA, 580 bp, Homo sapiens
aaaatgctttggatactttaattaacatgagatcattaatgataataataaatgcctcttaattgtatctaaatatagtaagccttagttaaatactgagaggataagcacttcccttggacatctccttttggacatagtggaagagggcttcacttccataccctctgccgtttgtttawtcattcccattttgcactgcataaggcaaacataagcaatttgtacttttgagtagtcaacatgttttcttttcttattttaatttcattaacatacgccaaagaacgaaatacttcaaaaatatagtacttaatttaggctggttgttgtttttgttaatttgttatggcaggagtatccaagcataaagaaaggataatttaatcaattcactcacacaaggtttaagaagcagtatttgtctttgtgaactatctagccaattaccttacactgccatttaaatagtgattcacaaacaaacatctagatttttcttatggaatccagccaaactacatttcctttgcactgaaaaatttttaaagtcatgaatgattaaagtccatcaactacg

SEQ ID NO: 455717 - DNA, 553 bp, Homo sapiens
tagacagtctacatcacaacacttttgtgagaattaagtcacataattctacttagagtactgtatcagttcattctcacactgttacaaagacacacctgagactaggtaatttataaagaaaacaggtttaattggcttatagttctacaggttgtwcaggcttctgcttctggggaggcctcaaaaaacttacaatcatggtggaaggcaagggggaagcagtcacatcttcacatggctggcgggagagaaagagtgaatggggaagtgctcacactttcaaacaaccagatcttgtgagaactctatcataagacagcactatggggatggtgctaaaccattagaaaccacccccatgattcaatcatctcccaccaggcccctcctccaacactggggattacaattggacatgagatttgggtggggacacagagccaaaccatatcaagtacttagcaccacataataatctgtcttaatgtatgcttactgttattataaaacaatcatgaaggtttattatatgacagctactggcataaga

SEQ ID NO: 455718 - DNA, 553 bp, Homo sapiens
tagacagtctacatcacaacacttttgtgagaattaagtcacataattctacttagagtactgtatcagttcattctcacactgttacaaagacacacctgagactaggtaatttataaagaaaacaggtttaattggcttatagttctacaggttgttcaggcttctgcttctggggaggcctcaaraaacttacaatcatggtggaaggcaagggggaagcagtcacatcttcacatggctggcgggagagaaagagtgaatggggaagtgctcacactttcaaacaaccagatcttgtgagaactctatcataagacagcactatggggatggtgctaaaccattagaaaccacccccatgattcaatcatctcccaccaggcccctcctccaacactggggattacaattggacatgagatttgggtggggacacagagccaaaccatatcaagtacttagcaccacataataatctgtcttaatgtatgcttactgttattataaaacaatcatgaaggtttattatatgacagctactggcataaga

SEQ ID NO: 455719 - DNA, 553 bp, Homo sapiens
tagacagtctacatcacaacacttttgtgagaattaagtcacataattctacttagagtactgtatcagttcattctcacactgttacaaagacacacctgagactaggtaatttataaagaaaacaggtttaattggcttatagttctacaggttgttcaggcttctgcttctggggaggcctcaaaaaacttacaatcatggtggaaggcaagggggaagcagtcacatcttcacatggctggcrggagagaaagagtgaatggggaagtgctcacactttcaaacaaccagatcttgtgagaactctatcataagacagcactatggggatggtgctaaaccattagaaaccacccccatgattcaatcatctcccaccaggcccctcctccaacactggggattacaattggacatgagatttgggtggggacacagagccaaaccatatcaagtacttagcaccacataataatctgtcttaatgtatgcttactgttattataaaacaatcatgaaggtttattatatgacagctactggcataaga

SEQ ID NO: 455720 - DNA, 623 bp, Homo sapiens
actgacagctacaccaacaatctacatgtaagcagaagagccttaggaatcttctggaaaatggctcctttccactaaaatgagatgcaattaagtggaaagttcagttcacctaggagttcactcacagagatttccttctcacagagattttcaccatcctcacaattcagaatatttcttataaccatactgcctgagaacccttcacgtggactcacttgctcagatacaaatgaacaaaaaccagaaacttttcccaactctcctactgcactcactttgcagcaggcaatggtgacacattcagtccctatccccaatttgaccattgttccctaattttcattttcccaatgagagcccatcacccttctcatcaactcctgtttcaaacttaagtggcatgttattctaagaaactccaaaaggaacttttgagacttcagtgcccaggtcaggacagatgtcctattaagttaaaacttacaattcctggtctacctcaatagaattacataatctttcattaattcaccaggaaaatgyatcagcagagctcattaatttctaaagttaaattcacagggggaaaaatttaaggtacagtttgctcatgaatt

SEQ ID NO: 455721 - DNA, 599 bp, Homo sapiens
ttctttaaacatatttaccatatgacctatcacatatttatagttgaggtctctgacttcagttttcattttgaataatgttgaagatcaccataagtcaagtcttttttgattctgctctatttagtgaaattgctatttttaaattaaaatttcaaattacttaaatgaaagcaagaaagtcatatatgtagatcttatgtcaagtgtttgtcacacctgatcatgaagatctaagcagacttttctagacaaattttactttaaacaatgtcctaccctgttgttatccctacatgtaaacagaaaccacatacacattgctaggctctctttatcctcttaccccctaaaccagttcccctgcttcycaggtactaggctggctctcctatgaatcctggcatctttgaacagacgggctcaaggaacatctctacaagtaacttctttctgtgcttcatccccaagggacacaacagtgcaaagaatgaggctgagtgtggtgtggatctctgctgctgagagagagaattgaaggctcttgcttgattatagcacttgagttctgaagaaattaggtgcgagtgtaactatgg

SEQ ID NO: 455722 - DNA, 538 bp, Homo sapiens
gtgcaaagaatgaggctgagtgtggtgtggatctctgctgctgagagagagrattgaaggctcttgcttgattatagcacttgagttctgaagaaattaggtgcgagtgtaactatggtagctaactcaactcaggattcttgacctcttcccagagaaatgaaagccgagtccaagacccacctgtctccttggacgatatttaaggacacagacttcatctgctttactcgtttgttctctatgcctaacacagtgcctgggccttgttagatgccaaataaatgattatgtgaaagattttaaaaatggaattttctcatgtttgagcctccaggcctaaactgtgacatgtttggtccatttcactaaactaagcaacctataaataattgtgggaaaatgtttgcttcaagcagtgtaaacacaggccaaaattatagcccaaatgggaactttataatatcctttatatgtaccctttctctctctctttgtgtgtgtgtgtgttatatgttccttaaaaagtttattgtac

SEQ ID NO: 455723 - DNA, 538 bp, Homo sapiens
gtgcaaagaatgaggctgagtgtggtgtggatctctgctgctgagagagagaattgaaggctcttgcttgattatagcacttgagttctgaagaaattaggtgcgagtgtaactatggtagctaactcaactcaggattcttgacctcttcccagagaaatgaaagccgagtccaagacccacctgtctccttggacgatatttaaggacacagacttcatctgctttactcgtttgttctctatgcctaacacagtgcctgggccttgttagatgccaaataaatgattatgtgaaagattttaaaaatggaattttctcatgtttgagcctccaggcctaaactgtgacatgtttggtccatttcactaaactaagcaacctataaataattgtgggaaaatgtttgcttcaagcagtgtaaacacaggccaaaattatagcccaaatgsgaactttataatatcctttatatgtaccctttctctctctctttgtgtgtgtgtgtgttatatgttccttaaaaagtttattgtac

SEQ ID NO: 455724 - DNA, 475 bp, Homo sapiens
atttgagcctgccaatcaatggacatagtatatagttccacttatataggaatttattagtttctcttaacaacgtttacagttttgtttataaatattgcacttagttaaattttttctaagtattccatgttttgaaaatataaattgtattttgatttcaatttttaattttttatttcaaatatatggatatttaattgagttttaaatatttattttatattctatcaccttactaagctcacttattcgttgagtagctttttaaaaaattccgtaagattttcaatctaggtaatcaaattacctgcaaatatagttttactttttcttattcaatyttcatatttttatttctttttaatttcttattgtattagctaggacttgctatataatgttgaataaaagtggattagaatggacatatttgctttgcttccaattgtaggtagaaaccatttgatactcc

SEQ ID NO: 455725 - DNA, 510 bp, Homo sapiens
aaggaaccaggacctaacttctgcagtggaaatgaggcattatttctcccacggtgacacagaatcaagaagtgtttayaagggggattaggaaggagagttgtgaagagataatgcactgtcagaaaaatgacaaaattcactacaattgcataggagagttgagactcacagagatgacagaaaggaagaaacaaaaagaaagtagaagctgcattcaagagccagagaaaaaagagtagtagtcagttactcattagccgaaacaaaataaacaaaaaggagaggagaactgagttctgagcaactggagtggttgttatgtcatttgcagtgttgcaggctaactagagctactgctgtgttctggatagcaatgactgatgttcccactgcttaggaggactggatttatgacagatatgacatatttctctccctttctattcccatatgtatttgtgaacctgtccttgaaaaaagaaactggagtatatcttctccttgata

SEQ ID NO: 455726 - DNA, 565 bp, Homo sapiens
gactttcattttaaaggatatagcaaaagatatcaatgttgtactattgtttcactgttgacttcccagaaaacataatttactcaaaataagtcactgggcatggaaattttcaagaaattaagtgtactactttgatttaggcttttctttttttgccatatcagagggttagacacagtggaagtcctctccaaagaatccactcttcccttaagcataattggctggaagttgggagtttgaaaagtggagaggacaattaaaatcaatgacaaaatttagattcctgccaagactagctcgcccagttaacaaacggcactaagatgcctgtggtgcaccgagaacaccctgggctagctggctgctyagctggcgatgcactaattgcttttattaatgaggtgaactccccttcctccactgatgtttcttgaacttccatctcatgctcagttggtgaagcataaccactacaagccaaaccaaaattatagtatttttctcctcatcaaaatcagtgagcatgttttgaatgaagaaatgggaaaaaaggtaaatt

SEQ ID NO: 455727 - DNA, 552 bp, Homo sapiens
cagtttcctcttttctcagttgtgataattttagtaattaagtaaaataacacctataaagcatttgaaaattgccttgaaagactaggattcaataaacrtttgctatgatgatgatgatgattaaatgacttaccacaaggtgcctccaaatcactaaacatcccagtcatagacttaattcattacaggagctgctagaccttaggaaaacattattaagatagaagccctggctgggcatggtggctcacacctgtaatcccagcattttgggaggctgaggcgggcggatcatgaggtcaggaaatcaagaccatcctggctaatgtggtgaaacccagtctctactaaaaatacaaaaaattagctaggtgtggtggcaggtacctgtagtcccagctacttgggaggctgaggcaggagaatcacttgaacccaggaggcagaggttgcagtgagccgagatcgcgccactgcactccagcaaggacgacagagtgagactccatcttaataataacaataataataataataataataataata

SEQ ID NO: 455728 - DNA, 629 bp, Homo sapiens
tcaaaaaaaaaaaaaaaaaaaaaggtaaaccatatatgcataatgaaaaaaacaaaagaagagagaagaaatatctccagtaaaagtggctatttccaaaattaatggcagatgccaaactacmgatccaggaagctcagagataaatacaaaagcagaataaattttttaaaaagggtacacctagacatatcacatttaaattgcagaaaattagactcagaaaaaatcttgaaagaagccacaggaaaagaacattttacctgctgagaaacaagggtaagaattatatcaaactttcttccagaaaccatctaaggaagaaaagaataatgtaaaatatttaaagtgttgaaagaaaaagccagcaacccagaattctgtatctcataaaattatccttcattcgtgaaggagaaataaagactttttcaggcaaacaaaaattgagcgaattcattgccagtagacctcccttgcaagaaatgttaaaagttcttcagaaagaaggaaaattatataggtcagaaattcaggtctacttaggaaagaagaacacagcactaaagtgtgagtttttgtgctgttacaacagaataccacagactgggtaatttatagagaagaga

SEQ ID NO: 455729 - DNA, 345 bp, Homo sapiens
ctgaatttaaaataaaagttgacattgtaaaacaaaaagataaatatataacttgaaatctaaamatataaaataaaaataaaaacatatcacttgagacataaagcataacaataataaaattcctgatcaactgagaaatatagttgagaaatagagttgtacagtaaaatatgtatttcaaataaatcatagaaaacatattattgatttcttcactaagtcattaccagtacaggagaacatattgaaaaaaatcagatgtagcttttgtcttatccttgagactgggacaaaagtaggggcactataacataggtttaagaagaaagcagttgttcactc

SEQ ID NO: 455730 - DNA, 345 bp, Homo sapiens
ctgaatttaaaataaaagttgacattgtaaaacaaaaagataaatatataacttgaaatctaaacatataaaataaaaataaaaacatatcacttgagacataaagcataacaataataaaattcctgatcaactgagaaatatarttgagaaatagagttgtacagtaaaatatgtatttcaaataaatcatagaaaacatattattgatttcttcactaagtcattaccagtacaggagaacatattgaaaaaaatcagatgtagcttttgtcttatccttgagactgggacaaaagtaggggcactataacataggtttaagaagaaagcagttgttcactc

SEQ ID NO: 455731 - DNA, 345 bp, Homo sapiens
ctgaatttaaaataaaagttgacattgtaaaacaaaaagataaatatataacttgaaatctaaacatataaaataaaaataaaaacatatcacttgagacataaagcataacaataataaaattcctgatcaactgagaaatatagttgagaaatagagttgtacagtaaaatatgtatttcaaataaatyatagaaaacatattattgatttcttcactaagtcattaccagtacaggagaacatattgaaaaaaatcagatgtagcttttgtcttatccttgagactgggacaaaagtaggggcactataacataggtttaagaagaaagcagttgttcactc

SEQ ID NO: 455732 - DNA, 607 bp, Homo sapiens
ctaaacattgggtatatatggtcataaataatggaacaatagacactgtggactactagaggggttggtttgggagaagagaagggctgaaatcctacctgttgggtacaatccaggtgacaggatcattcatatcccaaacctcagcatcacacaatatacttatgtaacaaacctgcacacgtacctcctgaatttaaaataaaagttgacattgtaaaacaaaaagataaatatataacttgaaatctaaacatataaaataaaaataaaaacatatcacttgagacataaagcataacaataataaaattcctgatcaactgagaaatatagttgagaaatagagttgtacagtaaaatatgtatttcaaataaatcatagaaaacatattattgatttcttcactaagtcattaccagtacaggagaacatattgaaaaaaatcagatgtagcttttgtcttatccttgagactgggacaaaagtaggggcactataacataggtttaagaagaaagcagttgttcactctcatarcgcacatttatcaaatgttattaaactacaattttttcttttcttatacagaagcacttagccatt

SEQ ID NO: 455733 - DNA, 595 bp, Homo sapiens
ttttaaaagagaaaaatattattttgcttcatgcttcttttctaccaattaaaacattattctcttacaggtgcaccactgtaaactcctgtcacaagaaaagtggatgtcataatgtctctactaaaagtcattatamccccattgatatcgttgtcctttggttgatatgcaaaaattcttagaattttgaataattctatccttagaatagaacagttattttacacatatttttgcacaaatctggattgatttatttaacctggccatgtcatgaccagctacttgtccaattcaattaattaattaaattgcaatagtaatatgtatcttttttctaggctatattgctaacacaattgttagtggctccatcattctccactgctccattatcctgtcctccagaacatttctatttattcttttattcattcattcattcgataataaatattacattctactggcaccaggcaccattgtataatctgggcactatccaaggtactgtgtttcccttgatatgtctctcaaacccacttctaactttatgtgcctagtggtcccttacaaatttcaggtttttatt

SEQ ID NO: 455734 - DNA, 595 bp, Homo sapiens
ttttaaaagagaaaaatattattttgcttcatgcttcttttctaccaattaaaacattattctcttacaggtgcaccactgtaaactcctgtcacaagaaaagtggatgtcataatgtctctactaaaagtcattatacccccattgatatcgttgtcctttggttgatatgcaaaaattcttagaattttgaataattctatccttagaatagaacagttattttacacatatttttgcacaaatctggattgatttatttaacctggccatgtcatgaccagctacttgtccaattcaattaattaattaaattgcaatagtaatatgtatcttttttctaggctatattgctaacacaattgttagtggctccatcattctccactgctccattatcctgtcctccagaacatttctatttattcttttattcattcattcattcgataataaatattacattctactggcaccaggcaccattgtataatctgggcactatccaaggyactgtgtttcccttgatatgtctctcaaacccacttctaactttatgtgcctagtggtcccttacaaatttcaggtttttatt

SEQ ID NO: 455735 - DNA, 456 bp, Homo sapiens
tgggtccttgcccctgcaattttctggaatgagtcaagcatggacacctgtcctatgttggaggcatatctatgggggccagggatggagacakcgttgttattgtggctagggaagtgagtgtgcgtgcgcgcgtgcgtgagggagaaactggttctgtcgccaaaccccgcagtctctggacctttcttcattttgcccctggctgtgagaggaacaagaaccctcctcccccctttgcttaggagggaaaagggacattttgtccccacaaagaagccagcaacccttttctgcatagacaaggctatttattcataagtccagcaatttcttattcccaactcttctcagtaagccctacccaaaatgccaaatccacctcttgaatccactccctactgctcccttctcctccccccacccagcccccacccccagtcactgccaccaact

SEQ ID NO: 455736 - DNA, 456 bp, Homo sapiens
tgggtccttgcccctgcaattttctggaatgagtcaagcatggacacctgtcctatgttggaggcatatctatgggggccagggatggagacatcgttgttattgtggctagggaagtgagtgtgcgtgcgcgcgtgcrtgagggagaaactggttctgtcgccaaaccccgcagtctctggacctttcttcattttgcccctggctgtgagaggaacaagaaccctcctcccccctttgcttaggagggaaaagggacattttgtccccacaaagaagccagcaacccttttctgcatagacaaggctatttattcataagtccagcaatttcttattcccaactcttctcagtaagccctacccaaaatgccaaatccacctcttgaatccactccctactgctcccttctcctccccccacccagcccccacccccagtcactgccaccaact

SEQ ID NO: 455737 - DNA, 348 bp, Homo sapiens
cattggaaaagcagtcaggggagaggagaagggggagagcgcgcgggggaaggagcagcgggagggagggagggagggaggcaggcgggcaggctcaaagccccagttactcgggcactgcctrcccaggaagctgacggctcccgggcaggcgcagccggggctccgggcaccgaagcagggacccggccgtcaggcctccccggtcaggcaagggtaccaagcacccttggcccacctgggagcggccctcgctctgtgacctgctggagggacgaggtgggaagggaaggcagagaaggaaaaagtttgctgcaggtagaggggtagggctgggcggcagtgccg

SEQ ID NO: 455738 - DNA, 633 bp, Homo sapiens
acctgttgcctactgttaatgaattgtgttttaacaagtatataacaatgtaaacttatttgatatagtcttattttatcatttcagtaaacctaacgtctgtcgctgacattctaaaaaggtatctctttagtctcttaagaaatattgagaaacggtttctgttttacctgagataagcttccttaaaggtacaagggtccctgctgtagttatcactaaccaatacacagtttcagcacaaaacactycctggactgcctcaactctaagatagaacacgtaatagaagagaaaatagaatagcctaaaataattgctttctatattctgttcccccatcactgacagaaaaaaagcatgtcaataacttacatgaatattttctatattttaaagtttgagttaatgcatgcagatcatttgaaacagtgctagcaccctacaagcatccaataaatgtgagttgttaatatcatcattagtcattattatttatccaaatcaagacagaggcaccatagaggcaagaaactattacctatgccctatcaaataaatagtgtatgtgtatccatcagatattggcactgaagtgaggaaacagataatggctctgagctgcaggtgcca

SEQ ID NO: 455739 - DNA, 574 bp, Homo sapiens
agacaaatgtaccaggcatttacctcaacaagagtaatttgctcagctgcaaaattagaatactaataattatgttacatggggtttggggagaggtaaggatttagtacgataatgaatataaaaatgtcttacatatcttcaacaattggkggatattatttctaattcaccaatggcaaactgagactcagaaaggtgaatggagtttcccagggtcacacagttagctagtggtaatgcccaactggaatccagctcttctgatcctgagcccatggccctttccactaaaccttgttccctctatctagctgaaatcaggaaaagtcagaaatctcatgggtgcttgttttcttttgtgactgggcacaggaatgtagccatcttaaggtcaccagtctttagagagatgatccaccgcaatgctctcacatgagaagaagtgagaggtggtagagtggtgtggggatgagtacaagctgtagggttgaatcgaatggtcttcagctccaccacttagctttctatgatcttcaccaatttgcttaatatctctgtctcattgtccttg

SEQ ID NO: 455740 - DNA, 655 bp, Homo sapiens
ggacatgagcaagggactgtgataggtagtcacctggaactgtgcccagaaacatggagagccagagaagggatgaaaatcatcactgtcaacacacacacacacacacacacacacacacacacacacacacacacacacccctgatatctgggctgaagaagctaagggactgtccagacccagaggtgagcatgagagataaagccaaggctagaaatctagatatggtctccacatgttcttctagctatcaccctgctgccatttgtcytccaaacttctcaaaaatgtggtttacagttgctggctttatttcctcatctctcagcactccttaatccacccacatctggtgtgcatctccattactccacaaaacagctcctgatagcattatcaatgaagttgctaaattcaatgaatatttttttcaatacccattttatttgaccactcaacagtattcttaacaggacttcttccttcttaaaggattctcaccttctgttttccataacaccctggatttctgagtttcctctgactttctaactacttgattttagtctcctcttcaaatctttccatctttatggcaagtaaatatgtgagttctttaaggctcaattctagactatcttccttcatttta

SEQ ID NO: 455741 - DNA, 475 bp, Homo sapiens
tatagtaaaggaaagtgcctggatttacaaagacagtaagggttagaactctgattcaaacctaaatcagccttattggattctacccaagtgcattctcaaaagcaagacattgcattgcctccccaggacgtaggtcagaccctagtagcccgtgtgagaacagagctactgtgtcagagacactgctgtgtgtttccaaaattcattttatttcctcctggttacaaagctaaactttaatttccaggcttcgtgagatatgctggagccatatgacagagtctagrtcaatggaatgaggtcagaagtaatgtgagccacttccaggcctagcccataaaaacctccatgcccaatcttctattcacttttctcttttcacggtgactttggaaaacatacttcaaatgttgaggtaccataaaatcaaaggaatctgggtttctaaatgattgtggttaagccacagaaa

SEQ ID NO: 455742 - DNA, 576 bp, Homo sapiens
tttttgtctcttagcctggctattagaatacaaatgaatattctaaaaatctccactgtattcaaaatatataattgtagatccagaatatagtcaaaaaagaagcttggagttgtgtaaataaagaggtctttgatacccctgttctcattatattagacctagaaacaagggaatcatgcccattgtgaagtccaattttccatttgaaaatgtgtaatgccatcacccttactgatcaggtctggtttccaagggacattgggaaagtgacattttatatgctgtgttccctttgctctgattttttttgggttttagggtttccttaggcttstaaattaaaagaaataattagtgtataattaaggatctgacagcaatcccaagcttaccttacaataagatagagtcccatatcatccagaagaaacaaaagaaaaactctgagttaataaaatacaaatgccacaaactcactcacattctctcaggggattctgaaaaacaaccttggctctcttcccagctcatttaaaagtgagaagtcaatggaatgaagctgtttgtgccaag

SEQ ID NO: 455743 - DNA, 565 bp, Homo sapiens
gattgagtcttgtccctgcaggtgattaatgtaacactccctgagcttctgtctgacctcatctctactggtttgagtatctccagggttggttccctgcagtatctgagtcactgcatttttgtttttgtttgatttaggttttttttaatacatatatacaaatgtactctttcttcttaaaaagacagcagatatctgagaatgcccaaggacctcttttattctctccctggctgaagagactgagaaaaaacaacatactgtttcatgrtgcacaagccatgagatttgcttctagcacaacaacttttgggagacaggcataccaactgaagcagcaaatattttccaagaactgaaggaaagtcatggagaggagccagaaagcaggacgttctgagttacgctgtctaagtctcatcccaacccctaacctccaacctgacctccttagttgctgtatgaccctcgacaggtgacataactcctttatagttcaatttcatcatttgaaagtggagttgataatactgttcttaccatattgggttgagggtaaagt

SEQ ID NO: 455744 - DNA, 445 bp, Homo sapiens
gtaaaggtctgtccaatgttacatgtgcttttacaaaggtttattttcactccatgtggaacaatttcttcctaggttggctcctttgtctcatcaccttaatagctcatgtcttgtgacaagcagctgagatttgtcagtaatagcaatctgagttctctcattgccccacgtaagaaygtccagcaaatcttacatggaggacccatgtttgtctgtttcatatactgagattttaagcatgatagtattttcataaggtgctccataaaatttaaaaagaggtttacaaaccattatctgaattaatatgtaggacttatgtaatttttgcatctgtctgatttcttaatatggacgaggtccagatgattacttgataccaagattgaactagcaccaaggcacaccatttttgctgatctctggaaatctccttagattg

SEQ ID NO: 455745 - DNA, 626 bp, Homo sapiens
gctaacagttaacattcatgtttttgcttattggatattaagtttttcccagagccacttgtataaaagattatcctattcccattagataaccttggctcctttgtggaaaaccagttaaccatatgtacgtagacctatttctagacactccatggtgttatatctgtatttctaattttataccaataccacactgtcttgataactgtagctttatgatatgcattgtaatcagattgtgtaagatctctaattttgttccctttcaaatagcctaagttataacargccttttccatttagctattaagagtttaataagtgtatagatttctataaaaatgatccagaaagaacctatagatcaatgagaagaaaattaacatcctaacaaaaagtaatatttttgatccatgaacatggtatatatccacaatttaagtcttctttaattcctctcattaatatttcgaaatttttgcctaacaggtcctgcatatatgtggttgaatttatacttaaatagttcatgatttgcttgttagtagttttgtgtgtgtgtatgtgtgtgctattgcacatagagctgctttctaaatttaactagaaaatcttttattgct

SEQ ID NO: 455746 - DNA, 475 bp, Homo sapiens
taaggataacaatatcccttcttcataggataaaatgagataaagaaccaagcctagcgttgggcacatgttaaatgttcagcacatgtttatgatgatgatggtagagataataatgataatgggattaatactgtgtcatcaatgcccagctataaaccaaggtgttagaattctgttccatagatgatagggaactactaaaggggagagtgttaatgatcaaattgactctttatgaagatgaatttgactatgtcttcaaaatggrctaggagatgtagatcagaggggcaggaaataaagccaaaattttctgtctaataaaagttccgacatggaaaaaaaaaaagcatggagaaaaaacaataatgtacatttttctctccaacgagaacactgtttttctacctgaggttttgtcctggttgagcatatatacatttggatattttcctaccaactcagaatcaat

SEQ ID NO: 455747 - DNA, 475 bp, Homo sapiens
taaggataacaatatcccttcttcataggataaaatgagataaagaaccaagcctagcgttgggcacatgttaaatgttcagcacatgtttatgatgatgatggtagagataataatgataatgggattaatactgtgtcatcaatgcccagctataaaccaaggtgttagaattctgttccatagatgatagggaactactaaaggggagagtgttaatgatcaaattgactctttatgaagatgaatttgactatgtcttcaaaatggactaggagatgtagatcagaggggcaggaaataaagccaaaattttctgtctaataaaagttccgacatggaaaaaaaaaaagcatggagaaaaaacaataatgtacatttttstctccaacgagaacactgtttttctacctgaggttttgtcctggttgagcatatatacatttggatattttcctaccaactcagaatcaat

SEQ ID NO: 455748 - DNA, 606 bp, Homo sapiens
tcacttcctagagcactgtttgcttatgaagtataaccttgtttagccacactgagaaggagctcaccagtctgatgggaccaattaatgaggccaaactggcaaagacttaagacagccgctttctatagctgactaggaggaaataaacatactcagtttaggaacagtagttcaactttctttttgccagatagtcgttaatgcacaagatggccatttaattcatcaagatggctgctttgatattttctccattagtaggtatgagtttttactgaattgcctacaaatctcttggatcacctttccaccaaaagtatatgtttctgaactggaaaactgaaaaaaacaataacagtctgtgtatagtcagtagagctggtctgtgtctaagaaaccaagtggacaataaatggcctgcatcactaccctactgtgacattgccttcgaaattgaaatttgatctggcttccttgggacttggactgtatctctgcggatccttttaaaccttatctcctagtgccaaaacataccaccaccctttccccaaaccactggcwaagtcaaaaattacaaaagataccttttcatcctcgatc

SEQ ID NO: 455749 - DNA, 540 bp, Homo sapiens
ttaagctacattcatatgacccaagtctgattttagactcttttattggtctatttatcaagcctttttacatggtaagtcactggcatctcataagcccagcctcatctcataaatcactattccctaaagtagagaggttggctacagtggactacctggctctctggaaaatgacaacctctgggtcctatgtccttcaaaagagacttcaaagatatattgagatgcatttcccctaggtatttgctgaacatactctgggtttcctgggcttggagaaccaaggacatttggcattaaaatctgtcttctgactctctgcatgagacttcctggccrctcagctacttgtaccactcagctccatccacctcagccatctgtctttcaagctgtgggtagatttgaccaagcagacaggcctgccctattctttagccataaattccctgtcaagggaaatcatgagtgagacaaagacctgagtcagtagggagtggttgtctgaacactttacaaagataaatacagctatct

SEQ ID NO: 455750 - DNA, 575 bp, Homo sapiens
ctgattttagactcttttattggtctatttatcaagcctttttacatggtaagtcactggcatctcataagcccagcctcatctcataaatcactattccctaaagtagagaggttggctacagtggactacctggctctctggaaaatgacaacctctgggtcctatgtccttcaaaagagacttcaaagatatattgagatgcatttcccctaggtatttgctgaacatactctgggtttcctgggcttggagaaccaaggacatttggcattaaaatctgtcttctgactctctgcatgagacttcctggccactcagctacttgtaccactcagctccatccacctcagccatctgtctttcaagctgtgggtagatttgaccaagcagacaggcctgccctattctttagccataaattccctgtcaagggaaatcatgagtgagacaaagacctgagtcagtagggagtgrttgtctgaacactttacaaagataaatacagctatctcattgttcttcatccttcagtcagggactcggtcaccataaaactcattaaagctggacac

SEQ ID NO: 455751 - DNA, 566 bp, Homo sapiens
gatcaatatcatattataacctagatgagattaataagtactgtggttcatacggagagggactcctgaatgcagataatgaaccattactgatatgccaaaaagcaatgcctgttctattttttaaaaccacaaagtgaaaagaaactaaaatttttatcaaaactctttttcatgatagttttagttgctgcatctgtagttcttgaaaatcgaatgaaaataatagttacaaatatctgacttctttaccattcagttatgtgaactcccagaccccatgaaagtccttccaattactcctgggtatttccacagtggtgaattcctgccttgtaatgtctactattttctcttctctcctaaggtcatgtcttctgtttcttccaatatcctgatgctaacatatgagcacaagttggaccagcttactctttaatgacattgtccattcctcacttttacgtgcccagaagtcctctactggtgtgagtttccaaaggaaartaagtagttggtgcattttttgagctagacaggagatccatttaccaacacctctatct

SEQ ID NO: 455752 - DNA, 621 bp, Homo sapiens
actatataaaaaatatatcagaaactattaaaagctgttatctctagcatagaagtgggaatggattggggaagatggaaacaggagcaggaattctccaagcagaacttccttgcttttgcttttgaaacaagtgagataaaaagtgatggggaaaaaaagcaaactctgaaattgaagacaaacagaaaaaaatgaaactgtattaaatcaatggcataagcacacaaaaagttaattcaagtaacttctggatacaattgtctgattatagttagagggagaaattctaagataaaaagaatggcaaaggtgggagcctttggtgatggaatactttttagaatcttgattctggtgttagttatagaaatctaacctgtggyaaaatcacataaaacttctcacatccacatcccacccccccacaaacacatatccatacatccccccatcccacatgagtgtaggtaaaactaggaaaatctgaataaattccacggattatatgaatgttaattttctggtcttgatactgtattgtaagttaagcaagatataatcagtgggataaatatggtgaagtgtacacaggatctctcggtatatttcttcaacttc

SEQ ID NO: 455753 - DNA, 621 bp, Homo sapiens
actatataaaaaatatatcagaaactattaaaagctgttatctctagcatagaagtgggaatggattggggaagatggaaacaggagcaggaattctccaagcagaacttccttgcttttgcttttgaaacaagtgagataaaaagtgatggggaaaaaaagcaaactctgaaattgaagacaaacagaaaaaaatgaaactgtattaaatcaatggcataagcacacaaaaagttaattcaagtaacttctggatacaattgtctgattatagttagagggagaaattctaagataaaaagaatggcaaaggtgggagcctttggtgatggaatactttttagaatcttgattctggtgttagttatagaaatctaacctgtggcaaaatcacataaaacttctcacatccacatcccacccccccacaaacacatatccatacatccccccatcccacatgagtgtaggtaaaactaggaaaatctgaataaattccacggattatatgaatgttaattttctggtcttgatactgtattrtaagttaagcaagatataatcagtgggataaatatggtgaagtgtacacaggatctctcggtatatttcttcaacttc

SEQ ID NO: 455754 - DNA, 621 bp, Homo sapiens
actatataaaaaatatatcagaaactattaaaagctgttatctctagcatagaagtgggaatggattggggaagatggaaacaggagcaggaattctccaagcagaacttccttgcttttgcttttgaaacaagtgagataaaaagtgatggggaaaaaaagcaaactctgaaattgaagacaaacagaaaaaaatgaaactgtattaaatcaatggcataagcacacaaaaagttaattcaagtaacttctggatacaattgtctgattatagttagagggagaaattctaagataaaaagaatggcaaaggtgggagcctttggtgatggaatactttttagaatcttgattctggtgttagttatagaaatctaacctgtggcaaaatcacataaaacttctcacatccacatcccacccccccacaaacacatatccatacatccccccatcccacatgagtgtaggtaaaactaggaaaatctgaataaattccacggattatatgaatgttaattttctggtcttgatactgtattgtaagttaagcaakatataatcagtgggataaatatggtgaagtgtacacaggatctctcggtatatttcttcaacttc

SEQ ID NO: 455755 - DNA, 563 bp, Homo sapiens
ggagaagtaggttagtgacttttgtaggttccagaacaatttctgactatcatagggatatttaatacatttttctttattcccacataaagcctggtcttttagaaatatacagcaaatgcactcacgtaggagaaacctgcagggcagcataatctagcaaactacatgagcaaagggaagtcttccagtactgatgggttttyttctttgcggtgacagcctgccattttggagacgtgattatgtcagaaaacattctttcttctctgtgtctattttcaacacaaatacataaatgaatgacaatatctcaaacatattattactaggtgtgtgatgcagaattatgtctctgagaaaacagttaccttcactatccacaatcctgcttgtaattcttattaaactattgtagctattcaaacttgtgtgtgatgtttgtgcacatatgcttgcataagaatgaaaaaggtgtctgcccatacaaaggaagtcctgatgaaagacaacttcatttctttgtcatataaaatagacatgacctcagaaaagtggctaaa

SEQ ID NO: 455756 - DNA, 563 bp, Homo sapiens
ggagaagtaggttagtgacttttgtaggttccagaacaatttctgactatcatagggatatttaatacatttttctttattcccacataaagcctggtcttttagaaatatacagcaaatgcactcacgtaggagaaacctgcagggcagcataatctagcaaactacatgagcaaagggaagtcttccagtactgatgggttttcttctttgcggtgacagcctgccattttggagacgtgattatgtcagaaaacattctttcttctctgtgtctattttcaacacaaatacataaatgaatgacaatatctcaaacatattattactaggtgtgtgatgcagaattatgtctctgagaaaacagttaccttcactatccacaatcctgcttgtaattcttattaaactattgyagctattcaaacttgtgtgtgatgtttgtgcacatatgcttgcataagaatgaaaaaggtgtctgcccatacaaaggaagtcctgatgaaagacaacttcatttctttgtcatataaaatagacatgacctcagaaaagtggctaaa

SEQ ID NO: 455757 - DNA, 563 bp, Homo sapiens
ggagaagtaggttagtgacttttgtaggttccagaacaatttctgactatcatagggatatttaatacatttttctttattcccacataaagcctggtcttttagaaatatacagcaaatgcactcacgtaggagaaacctgcagggcagcataatctagcaaactacatgagcaaagggaagtcttccagtactgatgggttttcttctttgcggtgacagcctgccattttggagacgtgattatgtcagaaaacattctttcttctctgtgtctattttcaacacaaatacataaatgaatgacaatatctcaaacatattattactaggtgtgtgatgcagaattatgtctctgagaaaacagttaccttcactatccacaatcctgcttgtaattcttattaaactattgtagytattcaaacttgtgtgtgatgtttgtgcacatatgcttgcataagaatgaaaaaggtgtctgcccatacaaaggaagtcctgatgaaagacaacttcatttctttgtcatataaaatagacatgacctcagaaaagtggctaaa

SEQ ID NO: 455758 - DNA, 488 bp, Homo sapiens
ctggacagacattctgggaggcgtgccctacagaaaagaaagtgaagtgaggtgagggagtcttcagtggcttaatacctcctgctccttcacagtccctgctgggatctgatccttatttgcgggtagcaaagacaaaggcaggtaaatccattctctttgatctaagttctgaagccttcttgattttcccaggggtaaggagaaaaaaaaattactcctgtgtgcatttgttttatctgcaactttgaaaacagtaccccagacacaaggaaattgtggttataattatgggtttggggagtttggtaagaagccatttttcttaggcgaaactctaagaagaaaacaggcaagaggctttgtgacttggttawacatgttgaagtaggcatcctgtgtgggtaatgccaccttcttagtcagattatattcatgtgaaaggtggcctgaggaggggccaggaaatggcacacaacccctgcaat

SEQ ID NO: 455759 - DNA, 552 bp, Homo sapiens
tcaaaattcatatgtggaaacctgaccaccaagatgattgtattagcaggtgaggcttttggggggtgcttaggtcatgagggctccaccctcttgaatgagattagtgtccttataaaagggctggagggagctagctaggtcctctgcccttctgtcttctgtcatgtgaggacacagcaataaagcaccatcttggaagccaagagcagccttcaccagacactgaatctgctggcactttgaccttcgacttctctgcttacagaactgtgagaaatacatttktattatctataaattgccgagtctgtggcattttgttagagcagcagggatagactaagatagtccttcaataaatatttttaattgcctaccacatgccaggcatcatctaaagtgctataagagaaaaatagaagaaaaagctttgcttcaaaagctattcacaaataacccttgctcagggcagagtagatcataaataccatgacacagaaaccaacaaggctgaggttctgttcctgccccagacggtgactgagcaag

SEQ ID NO: 455760 - DNA, 552 bp, Homo sapiens
tcaaaattcatatgtggaaacctgaccaccaagatgattgtattagcaggtgaggcttttggggggtgcttaggtcatgagggctccaccctcttgaatgagattagtgtccttataaaagggctggagggagctagctaggtcctctgcccttctgtcttctgtcatgtgaggacacagcaataaagcaccatcttggaagccaagagcagccttcaccagacactgaatctgctggcactttgaccttcgacttctctgcttacagaactgtgagaaatacatttttattatctataaattgccgagtctgtggcattttgttagagcagcagggatagactaagatagtccttcaataaatatttttaattgcctaccacatgccaggcatcatctaaagtgctrtaagagaaaaatagaagaaaaagctttgcttcaaaagctattcacaaataacccttgctcagggcagagtagatcataaataccatgacacagaaaccaacaaggctgaggttctgttcctgccccagacggtgactgagcaag

SEQ ID NO: 455761 - DNA, 552 bp, Homo sapiens
tcaaaattcatatgtggaaacctgaccaccaagatgattgtattagcaggtgaggcttttggggggtgcttaggtcatgagggctccaccctcttgaatgagattagtgtccttataaaagggctggagggagctagctaggtcctctgcccttctgtcttctgtcatgtgaggacacagcaataaagcaccatcttggaagccaagagcagccttcaccagacactgaatctgctggcactttgaccttcgacttctctgcttacagaactgtgagaaatacatttttattatctataaattgccgagtctgtggcattttgttagagcagcagggatagactaagatagtccttcaataaatatttttaattgcctaccacatgccaggcatcatctaaagtgctataagagaaaaatagaagaaaaagctttgcttcaaaagctattcacaaataacccttgctcagggcagagtagatcataartaccatgacacagaaaccaacaaggctgaggttctgttcctgccccagacggtgactgagcaag

SEQ ID NO: 455762 - DNA, 583 bp, Homo sapiens
aaaggaattatgtcaacctcaggatagaatcccaaactgtagcttgcttagtatatgaaaacttttatgtgcactgataaaaggatagaatcatggaatagtggtagaaaagactggaaaagcaacatcaaatacatgtatacatgcacacatacacacacaatgaacagttttagcagaattcctcatcaatgttttaagacatatgctgtagcacaggactaaattcgagtagaatttgtgataaggaaggaagggagaaaaggaggaagggagaggtagaggaagggagggagcagmtaaaagagtagggaaggagaaagaaacgtaagagatagaagctgccaaattaaggttaagagattaagtgtgtgttaaagttacactgaaaaatcaaacaaaagcaacctgcaggcaatccacagagttctattggcgatagactacagtgccatctcctgactggaagactttttagatgttcacatgcaaaggctttagaagcaagccattgtttctccagcaagagaaagatgggctgttgggctgtttgcttttcaatactgatatcttctttaactga

SEQ ID NO: 455763 - DNA, 556 bp, Homo sapiens
taaatgtctatatcaaaaatattgaaagagtacaaactgacactctaaggacacacctcaaggaactagagaaacaaaaacaaaccaaacccaaacccagcagaagaaagaaataacmaagatcagagcagaactaaatgaaattgaaagaaaagaaatacaaaagataaaacaaaaagctggttctttgaaaagataactaaaattgatagaccattggcaagatcaatgaagaaaagaagagagaaactccaaataacctcattaagaaacaaaacgggaaatattacaactgacaccactgaaatacaaaagatcattcaaggctgctatgaacatctttacacacataaactagaaaacctagaagagacagatgaattcctggaaaaatacaaccctcctagcttaaatcaggaggagttagataccctgaacagaccaataacaagcagtgagattgaaatggtaatttaaaaattaccaacaacaaaaatgtccaggaccagacagattcactgccgaattctaccagacattcaaagaagaattggta

SEQ ID NO: 455764 - DNA, 555 bp, Homo sapiens
tgtgccattaagtttaattctactcacaaaagcaacagtacagagtttgaaattctatccctaatcaagtaggtgtaccacataccgggagggctcattatgcacaaggtcatatatacaattcacagacctctgcatatacccaacggagtgatctattcattacatttcacctctgactttgaactccctaatgttaaaagatttgaaaagaaccgaatgttctgattaagagattgaatatttctaacttaatgttttcagtatgttgaaagtgatgatgacttgggggaatcagcagatctctacattacctaattcttttctcttacatttgaatgcaaatgtatattcaygtgcggttatgactcaagtcattcttgctaaatttaatgacgttgtaggtgaatcacattcagatttccttttgcaggttttccagtaatctaaaacaatgcttctagtaggtaacttaagcatgcaaacctcaataaacctgtcaagaacggcaattctactgttttattttgtttttttttttgtttgtttgttttt

SEQ ID NO: 455765 - DNA, 555 bp, Homo sapiens
tgtgccattaagtttaattctactcacaaaagcaacagtacagagtttgaaattctatccctaatcaagtaggtgtaccacataccgggagggctcattatgcacaaggtcatatatacaattcacagacctctgcatatacccaacggagtgatctattcattacatttcacctctgactttgaactccctaatgttaaaagatttgaaaagaaccgaatgttctgattaagagattgaatatttctaacttaatgttttcagtatgttgaaagtgatgatgacttgggggaatcagcagatctctacattacctaattcttttctcttacatttgaatgcaaatgtatattcatgtgcggttatgactcaagtcattcttgctaaatttaatgacgttgtaggtgaatcacattcagatttccttttgcaggttttccagtaatctaaaacaatgcttctagtaggtaacttaagcatgcaaacctcaataaacctgtcaagaayggcaattctactgttttattttgtttttttttttgtttgtttgttttt

SEQ ID NO: 455766 - DNA, 619 bp, Homo sapiens
aattagaagcccaaacctgaatatcatgcaaggtatccatgttataaatttttatcttacaccccatgaatcctgtattaaattaaacttataagaagaaagtactgtaaagagtaccatgactgaagctaaataaatttgctgatttgagtgaagatctgccattattattttttctttttatttaacttttattttaagttcagggttacaagtgcaggttcgttgcacaggttaatttgagtcattaagatctgttgtacagattattttatcatccaggtattaagcttactacccattagttatttttcctgatcctctccctcctcccacccatcaccctccaaaaggccccagtgtgtgttgttctcctctatgtgtccatctcttaactaatagtaaacgctgtaagaacaatattgcrtctgaatctttcattttatatttgttcctctggaaggaatatttttaaaagtttgggtgagagatctgcaagaaatggatcaacataggactttggagtcatacacacctatattctaatcctaatcttctccctcaggtagcataacctatggctacttaccctctcagcccctttcttcaattgtgaaac

SEQ ID NO: 455767 - DNA, 562 bp, Homo sapiens
gaatttttgctaatactatttagttaccttttattggaggtttattccttgatatctcattgctttcaccatttccacgctataattctagtcacaaagattcacacattctcctttaacatagttatttaaattctcacactaccattccatgacaattactcctctataagaactcactcatagaaatgtttttctcactagtagtgtttatgataaagtgtaaagagcatagaatttgctgaccaaaatatttgagtttgaattcctgtcgcagcacattatggccggggtgaattccttaaactctctcagggcccatttagccatctgtaaaacaagaataataatattgaactcatagagttgttataaaaattaaaattagataatctgtgaagtgcttagcagaggaatygtcatacagaggatgttcaatgactgttagcttgctcccatactgcatatttctaaatcccaaagcctcatgcttgcacattggtaaaaaataactttctggtattttcttcacttccagttttttcttcttttctatttttat

SEQ ID NO: 455768 - DNA, 486 bp, Homo sapiens
gctatccctccccactcccccaaccccatgacaggccccggtgtgtgatgttccccaccctgtgttcaagtgttctcattgttaaattcccacctgtgaatgagaacatgyggtgtatggttttctgtccttgcgacagtttgctaaatgaaacaaagaagaaattagaaggagctcaaaattgaataaatactagaataaacaataaaatagtaatggacacaagagagaaatgagaaaaagaaaatacaatcaagataaatagttaaaaagaattagaaaatgttgaaatagaaaatagtaaaaggaggcagagacacataatatgcataattggattctgtataagagggaaaatgtaacagaacaaatatttaaagctacaattcaagaaaacttttctagagtaaaacaaaagcatgagtctaaatacaaagagaaggtcatgtgtaatggatattcaacacctgaacatttttagtaaag

SEQ ID NO: 455769 - DNA, 543 bp, Homo sapiens
gaaatacaaactaatgtggagaaagaaacatccatttttatgctattgcttttgctttttatttgttttaggagctaaattctttctgtatcaaagattatattttagataatagaactgaaggttttcttttgacatagatactaactgatatctagctggaaaacagaataggataaatggcacatttaaggtttggtatcaaacagtgtactggaataaagaatagacatataatattttgaatatctaaagggagaagtgttcaattaagtatttaatctttkaggtgatattaagccactctactttgtaagatgccaagtaaacattcggaagaatgttttaaggtgtgtgcatgaacaactctatgcaggtgaatttcaggacgtaaattgaaaggcagacttagcagaaagtaccacaaacaatactttgggatgatgccttctaaattattggttacaaccctggagaaatagctattgtaatgagatgctttcctgaagacattggcctaagtgctggtgaaaccatcgcaaa

SEQ ID NO: 455770 - DNA, 543 bp, Homo sapiens
gaaatacaaactaatgtggagaaagaaacatccatttttatgctattgcttttgctttttatttgttttaggagctaaattctttctgtatcaaagattatattttagataatagaactgaaggttttcttttgacatagatactaactgatatctagctggaaaacagaataggataaatggcacatttaaggtttggtatcaaacagtgtactggaataaagaatagacatataatattttgaatatctaaagggagaagtgttcaattaagtatttaatctttgaggtgatattaagccactctactttgtaagatgccaagtaaacattcggaagaatgttttaaggtgtgtgcatgaacaactctatgcaggtgaatttcaggaygtaaattgaaaggcagacttagcagaaagtaccacaaacaatactttgggatgatgccttctaaattattggttacaaccctggagaaatagctattgtaatgagatgctttcctgaagacattggcctaagtgctggtgaaaccatcgcaaa

SEQ ID NO: 455771 - DNA, 563 bp, Homo sapiens
gaattggctgcaccactagaaatcgtatgactgaattttatttttcacagataaggaaaccaaggctgaaataaggtcaatgacttctccaggattccatgtctagtttatagaagaagcaggtctagcacagctcctagcccagctcttctgaaagtcattgcagactttctttctttttactttttcttttcttttttcttttcttttcttttytttgagacagagtctcttctgtctcccaggctggagtgcagtggtgtgatctcagctcactgcaacctctgcctcctgggttcaagtgaatctcctgcctcagcctcctgagtagctgggactacaggcgcccaccaacacgcctggcttatttttgtatttttagtagagatagggtttcaccatatcagccaggctggtctccaactcctggcctcaggtggtctgcccatctcggcctcccaaagtgctgggatcacaggcatgagccactgtgctcagccttcaaactgttattgaacactgcatttgtgatgcatgctgtgagtgtttccacaaacttgtag

SEQ ID NO: 455772 - DNA, 563 bp, Homo sapiens
gaattggctgcaccactagaaatcgtatgactgaattttatttttcacagataaggaaaccaaggctgaaataaggtcaatgacttctccaggattccatgtctagtttatagaagaagcaggtctagcacagctcctagcccagctcttctgaaagtcattgcagactttctttctttttactttttcttttcttttttcttttcttttcttttcttwgagacagagtctcttctgtctcccaggctggagtgcagtggtgtgatctcagctcactgcaacctctgcctcctgggttcaagtgaatctcctgcctcagcctcctgagtagctgggactacaggcgcccaccaacacgcctggcttatttttgtatttttagtagagatagggtttcaccatatcagccaggctggtctccaactcctggcctcaggtggtctgcccatctcggcctcccaaagtgctgggatcacaggcatgagccactgtgctcagccttcaaactgttattgaacactgcatttgtgatgcatgctgtgagtgtttccacaaacttgtag

SEQ ID NO: 455773 - DNA, 563 bp, Homo sapiens
gaattggctgcaccactagaaatcgtatgactgaattttatttttcacagataaggaaaccaaggctgaaataaggtcaatgacttctccaggattccatgtctagtttatagaagaagcaggtctagcacagctcctagcccagctcttctgaaagtcattgcagactttctttctttttactttttcttttcttttttcttttcttttcttttctttgagacagagtctcttctgtctcccaggctggagtgcagtggtgtgatctcagctcactgcaacctctgcctcctgggttcaagtgartctcctgcctcagcctcctgagtagctgggactacaggcgcccaccaacacgcctggcttatttttgtatttttagtagagatagggtttcaccatatcagccaggctggtctccaactcctggcctcaggtggtctgcccatctcggcctcccaaagtgctgggatcacaggcatgagccactgtgctcagccttcaaactgttattgaacactgcatttgtgatgcatgctgtgagtgtttccacaaacttgtag

SEQ ID NO: 455774 - DNA, 563 bp, Homo sapiens
gaattggctgcaccactagaaatcgtatgactgaattttatttttcacagataaggaaaccaaggctgaaataaggtcaatgacttctccaggattccatgtctagtttatagaagaagcaggtctagcacagctcctagcccagctcttctgaaagtcattgcagactttctttctttttactttttcttttcttttttcttttcttttcttttctttgagacagagtctcttctgtctcccaggctggagtgcagtggtgtgatctcagctcactgcaacctctgcctcctgggttcaagtgaatctcctgcctcagcctcctgagtagctgggactacaggcgcccaccaacacgcctggcttatttttgtatttttagtagagatagggtttcaccatatcagccaggctggtctccamctcctggcctcaggtggtctgcccatctcggcctcccaaagtgctgggatcacaggcatgagccactgtgctcagccttcaaactgttattgaacactgcatttgtgatgcatgctgtgagtgtttccacaaacttgtag

SEQ ID NO: 455775 - DNA, 649 bp, Homo sapiens
cattgtgtgtgatgggctaagtgctataaatgaatgtatatataatataaatgcattaactcatttaattctcatgacgatttgatgaggtgagctctatctcccagtttctagatgagggattgcccaactgtgggtaggggagcagaatcttaccccgggaagtgtggcttaagagttgacaattgtaactgctgaacagatttgttaaaaaataccttatttatttttcagtcctcccaccatgacttgtgccttcatcaaaaaagtttgaaagttttcagttcatacataagaagaaaaaaatttgatatgggtttattttcccctattaacattttctttgattaacaatctgttgtatcagacatgatgtgaaaggggtagacaacaacctagactatatttatttttcaatctgctaatgtgaagaaaaaaggggaggagttaggtgagatttggagtctgtaatggtttttctacaccagggtttttagggagattctaaatagagcacactctcatttgtttcaattaaatgccttgcccacttaatctccttttcgtattgccatgcytgatacagagggctccaggactagtttactaggtggtaggacctttagagattatgctgtccaaatccttt

SEQ ID NO: 455776 - DNA, 610 bp, Homo sapiens
aaggtgctaccaactccagcttcctagcaatgcaaggattcttcctttagccacttataaaagtggtcacctcagctcactctctgtaggactgactgcttcccctttcttctgtgatttgcatagtattatccacattgattcatgtttggggtgattgtttycatcctcactgtgagattatgaacttcttattttctttccatgaaataaagttttcattggctgggatcccagctagactgattttttttttccttttttcgtttgtttgcttaatattttagattttgaaagtccttcaaaattaaagtacttgcatactatcctagggcaataatttgtgactgaaaatctttgtgaaaaatcctaagaggtatttaaaagtttatgttaagtaagttgttatcagtggttaagaggcctttccagagtgcttgtccactggacatttatatggaacttactgtaatagcatctgcttaatttttggatgatgcagacacattccgttgcacaaaattactctgcaaaagtaagtcaggaatcactcatgataatttcaggttatgcatacttactttagaatgttgaatcaatttgctaatct

SEQ ID NO: 455777 - DNA, 574 bp, Homo sapiens
cattatacatgatatgtatcaaaatatcattatgtatcctttaaatatgtagagttattttatgtcaatttaaacaaataatttgaaaataccaaaacatttattttatgctttgtagttggtatatagaaatgaaattgaatttaattactgatcttacatcagcaaaatagcattacgattattaattctgctaatatatcttaaattatttagggttttctatgtagatgatcatattatatgggaataatargagtttattacttattttccagtgtttgatattttatttattttctaaccttacattggtcaaatcttacaatgtacaatgctgaataaaattgatcatagcaggtattcttgttcctgccattaaagaaaatgtttaacactttactattaatatcatttattataggatattttcagataggatatttatcaatttgagaaagtttgctgaaggattttggtttgttttgttttaaagcatgaataactattgaattttgttgaatgtttctaaataagagagaagtatatgtttttcttttgatctattaaagta

SEQ ID NO: 455778 - DNA, 535 bp, Homo sapiens
gaggtttatggtcttcataattctagttttctccagaaacagaccttgatctctttggttgccttctgctaagatcgatttcatgttattttgaagaatttttaaccctcagaattatagatttcatttgagagaaagcatgttctgtatttgtttgtgtcagtgtttcaaaatgtgaggaccaaaaatcccagatgtatctattaaaaatatacgtggccttttgctgagggaaattacatcttttttttcaggcacaattgaggaagtaaaaaaattttgtttagtttttagtggtttgtttttaggcattttccatacaaagatkagcaagacccttcaaaaaccaccaatttgcttatttaggggggaaagtcttcctatgtccagaaataacattaaattaagattattgtttccaatagtttcaaaaattgtggttttattttcttgtatgagtcattttttagcatagtgcagtacatgattgcactacatcatgacaaagcatatttgctctgtgtttcagtgggtc

SEQ ID NO: 455779 - DNA, 564 bp, Homo sapiens
actttacgtattgcttttccccattttctcatcttgcactctggaattccaaacagatatatgtttcacatgcttcctccaccttgtatgtctcttaactgatttttaacatttcctgtgtgtgtctgtgttctacaaacaataatttcttattcatcttccaatttactacatctctcttcagctgtgtcaaatctttcattcagcctatccactgaattctattaattattttagtttttatttatagagattctatttttctcctccaccaaaaaaaaattcctgaacatttgggatagtctggtattcctttgtgatagtttccctaccttttaaaaatgcgttaagtatatttattttataataagcctgtagtctttgtgtattttatacttttgatttgagaccttgtttgtagcactttacaggggtaatttttgtggccctgayttaatatgtatcccccacagaagataaatgtttgtttcagccaggtggctaaaggcactagcaacccaggatcaatttaaactaaattttcatcttggggtttttggacca

SEQ ID NO: 455780 - DNA, 541 bp, Homo sapiens
tgcattttcttcctcctatagggaaagtgttcagagcccagttctaacattctgatactctgtatttctacacatcagcaaatagtaaagtgcattttaatgccatgactgtgactgagctcattagaatgcttcctctgtctctagagcctttatctccagctcaacctatatatgtcatagagcctcaaatgttatagcgctgaataaatacatgttggattaataaatgagtctctcaaacaccataaccacacacaggttaactgtgcaaagatcagctaggttgctaatctggttcaggctctccmaggacaggtggatctgaaccttttctctctgaaatacacgaagtaggaagggtcattttccttcatatgcatgtgatacagggaactaaatacacaggagcaatggggaaggtttaccagaggggaaggctgtttaaaagcactgtgatagcccctttggctattgtgaattcatcagagctaacaagtcagataggatgtgctcaataagtatttgttgttgattaatg

SEQ ID NO: 455781 - DNA, 525 bp, Homo sapiens
actttggcgctcatgcccatatgctgggtccaatcgtgtggcctctcaggaaagatttttaaatttggcatgataaggaaccctaytatatcaataaacataagaaacataattagaagtcacattctaagagcattaattgactatggaaatatttaataaattagattgaaattatttgagaaacaaatgtactactttgttgtattagtggttatttcaggttaaagcttgcatcatatgatgaaataaatattaatattcctgttacttacatatttatttatcagatggtcaaaaatattaccaactctgttcctctgcacatacattctctaccctttcagccatatggtggaaatgctaatatgtaatctgagtcaggagagcattagccatgatgacagagctacaggatatatgtatcatttgccacccagtttcctaacaataaatgatttcagtgtaaagcattcatgacattgattttttaaaaccatggtaacattcaaaagccttgaactt

SEQ ID NO: 455782 - DNA, 548 bp, Homo sapiens
gacttagctggagtaaaaaatggaacagtgtaatcaccaacagaagtagaaatggaaataaaggagctgttgttgaagttcctgatttttcatcttggatagtgattcttttctcagtaagtaatgacttcaagaacactgccaggtgaatcatttaaaaaaaaagaaaaaaaaagcttagacttacaacttatagtcatattgttgtttttgcttgttttcaaatacatttcaaacatgctgcatatccctaattattctccccatcaatcaatctacgagatgatggtgatgaaattgaagacaggccagcatcctgaacatgttcaatttctcctcttttaaacaaagcacaaaattytattctactgggtattacaacaaagaaaaattattgttcaaatacaatgagtagtgagaactgcaaaataccaggctgcaaatgtcagtctccctgctgtttcaaaactagggtattttaaatcaatcaattcttcaggataccaaacacacccacgaaagccagtttaaaaagatttgctagtgga

SEQ ID NO: 455783 - DNA, 495 bp, Homo sapiens
tgtctacatagcctccatcatagattgtgtcatactgaccattatgtatatttttcctttttaaagcatcacaattttttaattttttcagttgggttacataktcaagcatttaaaaaaatgaacatagatggttgtgtgtgtgtgtgtgtgtgtgtgtgtagaatcacagctttattgatagagcattgtgtgtgtgtatatatatatttatataaatatatttgaaattttcctctgtctagcacaaagtggtctttagtaaacattcactaataaagacaagagtgcacaggtagaaaaacagtgtttgaaataagcttgggataaggcttaataaatcagaaagctcctgaatcaacagtttagatgttgaattaaaaaaaaaagggaagcatgtattagactatgaggaagaggtgaaaggatctattgaaacagaggaacgaagaagggttgaagacattttggggttatacaagatcttgaagttag

SEQ ID NO: 455784 - DNA, 450 bp, Homo sapiens
gttaagattattgaaaaagagcatagggagaaatgaaagtgttcmcaatagattgtgaagactgtacaaaagtaaagaataggctgggcatggtggctcacgcctgtaatcccaccactttgggaggctgaggaggatggatcacttgaggccaggagttcaagaccagcctggccaacatggtgagaccccgtctctactaaaaatacaaaaattagccagatgtgatggtgggtgcctataatcccagctactcgggaggctgaggcaggagaattgcttgaacctgggaggcagaggctgcaataagctgagatcatgcccctgtactccagcctgggcaacagagcgagactcagcctcaaaaaaaaaaaaaaaaaagtaaagaatatgtcattaatgtttatattgattacatattgaaatgacagtgttttagaaatagtgggt

SEQ ID NO: 455785 - DNA, 604 bp, Homo sapiens
ggtggccaaccccactacagcacttggctcctttatcctaccaagggaagtatcacctttttccttttgcctgaggacagttcccctttcccaaacaattatattacatggtttaattttctcatttcatcttctgatatggattccagagtatattcacaccagcctttgctttcacacaatacttggagactcttcatgtaccactaatctcttaggctggagcatgcttttgatcccccttatcaatgagatcttggagtctccttgagacttgaagaaatcagagaacatgccgacaggctacaccggacttttttctgttctcatgtttcagctaacatcacatttatctctacccatgattgatctctcattttatcacatacagtggtaggcagaattctaagatgctctcaacattcctgacctcctggtatacatgccctgtatcattccctctccttsagtgtgggcagaacctgtgaatggaatgggatagatgctcccttgattaggtaacattatatggcaaatggtggtggaatagtcactcttatgattatgttaagttatacaggactccatcataggactggagaga

SEQ ID NO: 455786 - DNA, 524 bp, Homo sapiens
ttcatggttgaccttcaaatcagtcagttctttgtaacattgagccataaagatagggcaaatacttaatgttttacatatattcagagattgaccctcaaaatacagcccagagaaactcaaaagaattaactctatttcttcaaattgtgtgacgccaccaaggccagatgacttcagcattgggaaggcaatatccagctgtcatcttcttgatcctcatatgctactactagcatctagcatttactgagcagatagttttattgtccagtttttaaagataagaaaattgaggtattaggaaagttaagttggttgcctagggaaacacgaagatatagcccagattcactcccaggcaggcagatgccagtgtctgctctctttaccaccraaatatcctgctacatgtacaatttcaataaatatctggacttactggaacaaaacaaatcaacaacattcttattttctttcttcagtttagattaaataatttaaatgtcttcttaagaagctac

SEQ ID NO: 455787 - DNA, 589 bp, Homo sapiens
atagtcatcctgttgtgctagcaaatactaggtcttattcattctttctacctattttttgtatccattaaccatctccacttcccctctacctccccccacccccattaccctttccagcctctgataaccatccttccactctctctgtccttgagttcagttcttttagtttttaacttctacaaatatgtgagaacatgttaagtttgtctttctgtgcctggtttatttcacttaacataatgagaggaggccttttcatacatgaaccagggagctcttacatgacaatcagtcaaatctctggcatacagggtaagaaaaaatgaggtaagattctgtccctattaagcttatttctatttcagtgtgcttctaattacaggagagcctgaaggcctctcctaggaagtaaaagtaaacagacatatttgtttttcttaaatccagagtgaaggtcatgcctgttccagaggatgaacaaactacctcaaatctgagcttcaaataagtrgagtaccacgatgtgaaatctgtcaggtgacttttatccttgcttaagaaatacactttttaaaaaggagca

SEQ ID NO: 455788 - DNA, 605 bp, Homo sapiens
aatttctattaacatattggtatacatttcttctactgttttccccattcataataatttaagttgtaaaacatgatttttaaaaagatttactgtttgttctattggagaatttaccgagttccaaatatatgtaaatcatgtgctaagcaccacggagatacraaagataaatcagatacacttcttatcctccagaaacttttgacctggagggagaaaaagtcttttacataaatatgtaaaaggtagcaagtaataaaggccataacagagatagagaaaaatggctctagggaatcacacatctgtagcgtcaccttaaaacagctgggaatcacatgccagcatgttaagtcatcaataatgtaagtactgaatgccaagtcattaatagcaatattttatttttccattccacatcaattttctaggtattacaagttttatttatttattaaaccaagtcattggaaccttcaaacgtgaaaatttcctgattacactgtatactctttgctttagagccatttctgagctataatatattcatacacttctactcagatgacttagtgtggctgaaagatattaagaaattctgt

SEQ ID NO: 455789 - DNA, 605 bp, Homo sapiens
aatttctattaacatattggtatacatttcttctactgttttccccattcataataatttaagttgtaaaacatgatttttaaaaagatttactgtttgttctattggagaatttaccgagttccaaatatatgtaaatcatgtgctaagcaccacggagatacgaaagataaatcagatacacttcttatcctccagaaacttttgacctggagggagaaaaagwcttttacataaatatgtaaaaggtagcaagtaataaaggccataacagagatagagaaaaatggctctagggaatcacacatctgtagcgtcaccttaaaacagctgggaatcacatgccagcatgttaagtcatcaataatgtaagtactgaatgccaagtcattaatagcaatattttatttttccattccacatcaattttctaggtattacaagttttatttatttattaaaccaagtcattggaaccttcaaacgtgaaaatttcctgattacactgtatactctttgctttagagccatttctgagctataatatattcatacacttctactcagatgacttagtgtggctgaaagatattaagaaattctgt

SEQ ID NO: 455790 - DNA, 368 bp, Homo sapiens
actgtaatggtggatacatgacattatacatttggcaaaacctgcagaatctacaacatgaagagtgaactgtaaagtaaactacagacctttgttaataatgatggatcartttgagttctccctttgtgacacacataccacactaatgcaaggtgttaatcatgagggaaactatctgctcagtcatctgtaaacttgaactgctctttaaaaaagtccattaattttttaaaaatcaaaagaaatgtaaaaacaatcagtgaggatggttgtcaaactggtcagtgaaaaagttaatgcaacaattagtgagaggaatgtgggttcagaaaccagtcgtgaccagaactgtctgctatgagaat

SEQ ID NO: 455791 - DNA, 571 bp, Homo sapiens
ctgtgtgtgtttattgcccccaaagaccttccagtgggataagatgtggacacggaagacaatggtattgatgatcctgaccctccgtaggcctgggctaataygtgtttgcatcttaagtttttagcaaagaagtttaaaaagtaaaaaagttaaaaatagaaaaaatcttatagaataagaatataaagaaaatatttctgtatagctgtacaatgtgtttgtgttttaagctacgttttattacaaaatagtcaaaaagttttcaaaaagttaagtttataaagtaaaaaagttacagtaagctaaggttaatttattattgaaaatggaaaaaatttataaacagtgtcacctaagtgtacaggctttataaagtctacagtagtagacggtaatgtcctaggccttcacattcactcaccactcacccactgactcacccagagcaacttcctgtcttgcaagttccattcatggtaagtgccctgaagaccttccagtgggacaagatgtggacgtggaagacaatgatattgatgatcctgacctatacaggtgtaccttttaa

SEQ ID NO: 455792 - DNA, 606 bp, Homo sapiens
caatcactgggtgggtaacacagatagtggggataagttggacaaagggatgattcacatctcaggcaggatatagcaaaacactgcaagatttcatygcactattcagaatgtcttgcaatttaaaatgtatgaattgtttattcttggtattttccatttaatattattggactgttgttgaccacagaaagtgaatccatggatgtggggactactgtaaatcaaacacattttagaactacctaagccaaatatcatgttgtttcattttgttttttgtccagtgaccaaaaaaaccccaaatatatgctttgttgaataaaatctgtattaaaaatatataggaaatacaaagtttaaaaatatttttaaaggggaaaaatccataattctactactttaagaaagccattaaatatcaaataatttaattctgccttacagagttttcatacagttttacctgatggcaaacctagcacacatacaattttaaaatctcctttttgacttattccagtgattttcccatttcattaaactctttgccagcatagttttaaaagactgcagctgattaaaccataatttatttaaccatcc

SEQ ID NO: 455793 - DNA, 606 bp, Homo sapiens
caatcactgggtgggtaacacagatagtggggataagttggacaaagggatgattcacatctcaggcaggatatagcaaaacactgcaagatttcatcgcactattcagaatgtcttgcaatttaaaatgtatgaattgtttattcttggtattttccatttaatattattggactgttgttgaccacagaaagtgaatccatggatgtggggactactgtaaatcaaacacattttagaactacctaagccaaatatcatgttgtttcattttgttttttgtccagtgaccaaaaaaaccccaaatatatgctttgttgaataaaatctgtattaaaaatatataggaaatacaaagtwtaaaaatatttttaaaggggaaaaatccataattctactactttaagaaagccattaaatatcaaataatttaattctgccttacagagttttcatacagttttacctgatggcaaacctagcacacatacaattttaaaatctcctttttgacttattccagtgattttcccatttcattaaactctttgccagcatagttttaaaagactgcagctgattaaaccataatttatttaaccatcc

SEQ ID NO: 455794 - DNA, 606 bp, Homo sapiens
caatcactgggtgggtaacacagatagtggggataagttggacaaagggatgattcacatctcaggcaggatatagcaaaacactgcaagatttcatcgcactattcagaatgtcttgcaatttaaaatgtatgaattgtttattcttggtattttccatttaatattattggactgttgttgaccacagaaagtgaatccatggatgtggggactactgtaaatcaaacacattttagaactacctaagccaaatatcatgttgtttcattttgttttttgtccagtgaccaaaaaaaccccaaatatatgctttgttgaataaaatctgtattaaaaatatataggaaatacaaagtttaaaaatatttttaaaggggaaaaatccataattctactacttwaagaaagccattaaatatcaaataatttaattctgccttacagagttttcatacagttttacctgatggcaaacctagcacacatacaattttaaaatctcctttttgacttattccagtgattttcccatttcattaaactctttgccagcatagttttaaaagactgcagctgattaaaccataatttatttaaccatcc

SEQ ID NO: 455795 - DNA, 599 bp, Homo sapiens
cacgtgcacaattttgccaactctagatcataggagctgatcatatatccttgtagctcagaaatgttatgatagcttccacagaggacctcctcagccccgctttagccccaagatcaatttactctttaagccaaaaatctcagtttatcaggagaatcatgcaccatatacactttataaaatgtacctggctatcacatatatcttacttgaagtgtgtcgtagggccacatacatgttgacaagctctgttttctttctcaacaggtcattagtgttttctgaaaaactggagagagaaacaacctctcttcccacccctttccacccatctctgttctctaggtctactttgtcagctgagtgctggcagagaattgctactggctgtctacacacatggcaaccagatctgacccatttgtttctgtgcctctgagatggagaggaagtaggagctgttcaaacttaagattagttgctttggttcccatttccastgtaaattggttcatttttgttttcttctctcacccattttagttagtgaacagaaggtcacacaatgaagaaattcatatgtcctgaaatggtat

SEQ ID NO: 455796 - DNA, 474 bp, Homo sapiens
gcttcatacttcaagaattcatttttgaagatgaacataatttccacttacttcatttggttgctgttggtcttaaatgagatacatattttaaaatgttttgttaattataaasctccatatataaatggtaggtgaaatttctccactagtgttaagacaattcatggtagatgaattgaagccctcatgaactggggggtgggggtggggggagcgagagcaaaaataaatagcagaagaagcttaaaatatttttctctttacaagaatgctaaagagatcaaactaaatagcccaataatgatacaatatatatatcttatgaatgctctataattaatttctattttccattccttttatactggaattttcttgaccatctcctactgttccattttgattagatattagtaaattaatttgctttgttgcagatgccatgcatttcttcctgtatgtagttcactg

SEQ ID NO: 455797 - DNA, 478 bp, Homo sapiens
caaatgttggaaatagcaggaaataactcaaaatcgctatcataaatatgttcaacaacttaaaagaaaagatggacataatgaatgaacaaatgaggaatagtggtagaaaaaaataaaaacagaggctgggcacagtggctcatgcttgtaatcccagcaccttgggaggccaaggtggaaggactgcttgagcscaggagttcagtccagcctgggcaacatggcaaaatccagtctctacccaaaaaaaaaaaaaaaaaaaaaagccaggcatggtggcgtgcacatactcaggaggctgagatgggaggactgcttgaacctgggaggctgaggctgcagtgagccatgatcatgccactgcactccggcctgggctggaaggaagaccctgtctgaagggtggagggaaggaagaaagacagactattaaaacaacaacaacaaccaggaatattagagctgaaaactacaa

SEQ ID NO: 455798 - DNA, 651 bp, Homo sapiens
cattagtttgctatcccttatctcaggtaatactcctatccacaattataaaatgagcggaaaaagtaaaactgaaaataaaggtaggaggaacaggtattagacactatttggatctactcatgtttcatttaattttcttatcaatttactacaaataaccagattttttttataacttgtttaaaaataccctaacatccattcaaaatgctgctgcataaacacaaatctgaaktggaatcttagcactgctatacaatcactttttaaagtgcaaataagaacaatatgtagcgaattaactgataaagatgtacaaatatgaatcaaatttattttacttaactatagaataccttcaaaatccatgaaaacataaaccagatttaaaataccattcttacaatgaaacaactatttaaacattcattctttaacagggtcgattttgaaactatttattctctcctactagaacattatagtcttcttaaagaaaaacagtcatgtgattatataaactaaactcttgcataaatgaaatatttctaagttagtttataataattctcagttacttattagctctggcatatgtataagaacatgattgataatacaacagtaaatattttcctaaatattaca

SEQ ID NO: 455799 - DNA, 655 bp, Homo sapiens
tatgtaatattctcataactgtatattttgttccactgctttttcttttgaattgctaagttatgaatagctttacataaaagataaagatctatcttatttaactctgtgaagtattttataatatagacaatcacaatttctttagctattctcccactttttttggttatttgtttccaaatctttgcaatttaattagatgctaaaataagcaactaattaaagtgaatatttttggsgtcacaagtgaatttttctaaggtagatgctgagaagtgaaaatgatggattgttaggaacacagattatttttgctatccaaaatgtctttacaaatttacattctcatcagaattatacatttctaaacaaagttcttctccaattctaatccatgtaccaactccctacctacctcaactcacattttacaaatcttaccttcagagtgaattgatgatcccagtaaatgcttgagtcagtctctctttttctttgagtgtgtatcatgatttcatgtgggataaatattaataaataattgagccattatgtgatgaatgttctatggataagtagagaggaaaaccagggaacaatcaacccaagctttagaatgtgtcaatgtcaaaggaagtttgaattgtcttaa

SEQ ID NO: 455800 - DNA, 609 bp, Homo sapiens
ggcctctgaaaaaaacatatgcaaagtcccaggtctggtccttgacaagaaaatgcygttgtaaagtgatagtggatgggaaaagtcactttcaacctggccgtgaccagaaaaataaaatggtaaaggacttgtcatgctgtctcaaagacagggatcccttctgatcaagtatcagtcagaaagtgctcctatttggaatggtctacagttctctttatggggcctttatgcagactggaaaaaggcactttttccaggataacaataattagaaaaccctgatccttcagtgtcaagggatcccatggggaccaccctgcggagcgagtgaggcagatgttcctggtttggcaagaagagaggtcctggattaagtttcagctttatgatctttatgcccagggaagctttctgcaatatcctgatcctgcagcagttcccagagctggtgtcacccagtgagcctagcctacacgacacagtaccataatttgggaaaccattacccattgcttctgaaaaatcagaatatggcagagaaaggataaaagcaggaattgtgaggttattcagctgtagactgcaacttcactagcctcctcttag

SEQ ID NO: 455801 - DNA, 609 bp, Homo sapiens
ggcctctgaaaaaaacatatgcaaagtcccaggtctggtccttgacaagaaaatgccgttgtaaagtgatagtggatgggaaaagtcactttcaacctggccgtgaccagaaaaataaaatggtaaaggacttgtcatgctgtctcaaagacagggatcmcttctgatcaagtatcagtcagaaagtgctcctatttggaatggtctacagttctctttatggggcctttatgcagactggaaaaaggcactttttccaggataacaataattagaaaaccctgatccttcagtgtcaagggatcccatggggaccaccctgcggagcgagtgaggcagatgttcctggtttggcaagaagagaggtcctggattaagtttcagctttatgatctttatgcccagggaagctttctgcaatatcctgatcctgcagcagttcccagagctggtgtcacccagtgagcctagcctacacgacacagtaccataatttgggaaaccattacccattgcttctgaaaaatcagaatatggcagagaaaggataaaagcaggaattgtgaggttattcagctgtagactgcaacttcactagcctcctcttag

SEQ ID NO: 455802 - DNA, 609 bp, Homo sapiens
ggcctctgaaaaaaacatatgcaaagtcccaggtctggtccttgacaagaaaatgccgttgtaaagtgatagtggatgggaaaagtcactttcaacctggccgtgaccagaaaaataaaatggtaaaggacttgtcatgctgtctcaaagacagggatcccttctgatcaagtatcagtcagaaagtgctcctatttggaatggtctacagttctctttatggggcctttatgcagactggaaaaaggcactttytccaggataacaataattagaaaaccctgatccttcagtgtcaagggatcccatggggaccaccctgcggagcgagtgaggcagatgttcctggtttggcaagaagagaggtcctggattaagtttcagctttatgatctttatgcccagggaagctttctgcaatatcctgatcctgcagcagttcccagagctggtgtcacccagtgagcctagcctacacgacacagtaccataatttgggaaaccattacccattgcttctgaaaaatcagaatatggcagagaaaggataaaagcaggaattgtgaggttattcagctgtagactgcaacttcactagcctcctcttag

SEQ ID NO: 455803 - DNA, 609 bp, Homo sapiens
ggcctctgaaaaaaacatatgcaaagtcccaggtctggtccttgacaagaaaatgccgttgtaaagtgatagtggatgggaaaagtcactttcaacctggccgtgaccagaaaaataaaatggtaaaggacttgtcatgctgtctcaaagacagggatcccttctgatcaagtatcagtcagaaagtgctcctatttggaatggtctacagttctctttatggggcctttatgcagactggaaaaaggcactttttccaggataacaataattagaaaaccctgatccttcagtgtcaagggatcccatggggaccaccctgyggagcgagtgaggcagatgttcctggtttggcaagaagagaggtcctggattaagtttcagctttatgatctttatgcccagggaagctttctgcaatatcctgatcctgcagcagttcccagagctggtgtcacccagtgagcctagcctacacgacacagtaccataatttgggaaaccattacccattgcttctgaaaaatcagaatatggcagagaaaggataaaagcaggaattgtgaggttattcagctgtagactgcaacttcactagcctcctcttag

SEQ ID NO: 455804 - DNA, 587 bp, Homo sapiens
gttttcaatttaagttcttcatgtctatttacgcactgactctagtatgcataagctctttgtctttatccttttaaagatttagttgatatttaacctaagggagaagttctgtgattttatgggaatgatagaattaaactgcttcccacaaagtccctacaggtataagacaaaaaaggatgcacttggagaatatatctcaggaggatccattgttacatcctgtggaaaataacagagaaccagactaattgaaattaaaatgcccgctgtcattgtgatagataagtatcaaaacacattcccagaataaamtatggagagaatgatagaagaatgttcacataataaaaagaaagttgatgaaatcctaagcacctgggcacattaaatatagtatcacatttttatcatgagcttctctctgtaattaaaattttaaacctctgataagcttaaacactaaaatgtttttcaaaatttctcttttattttcattttttaaatcaggtattaagatattctgattaattaaatatttgtttatgtcatatattaaatataaatactcgaagagaatgctc

SEQ ID NO: 455805 - DNA, 440 bp, Homo sapiens
tatcacatcacactgctcagagaactggcactacattgctctgtaagtaataatgttttccctgatccagagaccttgtgtaccctttcaagataagtaagtaaatatagatataaaagcctaatacggaataacaattacttaataattcctttggtgtctatctttgcttaaaataataaatttaacattcaatttttacagaaaatttctgagtacttttatgtgtcagatactgtgttaagttctttcrcatacattatcttaagtagtttgaatcattattttagtgaacttgctctaagattcaaggtcataatttaaataatgcagtaaattttctattaatttacactgcttacaaataaagtttagaaatcataagcatgtttatcataagaatcttatgtttaaaatgtataattcatgtatctgtaccc

SEQ ID NO: 455806 - DNA, 440 bp, Homo sapiens
tatcacatcacactgctcagagaactggcactacattgctctgtaagtaataatgttttccctgatccagagaccttgtgtaccctttcaagataagtaagtaaatatagatataaaagcctaatacggaataacaattacttaataattcctttggtgtctatctttgcttaaaataataaatttaacattcaatttttacagaaaatttctgagtacttttatgtgtcagatactgtgttaagttctttcgcatacattatcttaagtagtttgaatcattattttagtgaacttgctctaagattcaaggtcataatttaaataatgcagtaaattttctattaatttacactgcttacaaataaagtttagaaatcataagcatgtttatcataagaatcttatgtktaaaatgtataattcatgtatctgtaccc

SEQ ID NO: 455807 - DNA, 585 bp, Homo sapiens
aagagccaatgttttcagtttgattctgaaggcaagaaaagactaatatccctgctcaagacaatcaggcaaaagttgtttgcttttatgcaagaaagggtcgggctttttgtattattcatgcctttaaatgattgggtgagggccaccacattagaaggacaatctgctttactcagtcaactgattcaatggttaatctcattaaaaaacccccgcagacacaaccaggataatgtttaaccaaatatgggtactgtggggcccagtcaaattgagacataaaagtaaccatcaaaactgcaaaggtgtaagcttacaaaaaaactggcaaatcaatcaagaaaatagactattttggcttatctctttcagtaattgatagaccatttaaaaatgaatactaattaagaagacctgaaatgcaatcctgttaacaagcatgatctttttagatgttttactcatcacaagaacacattcttttcaagtatgtaatgaaaattgtgctggaaaatgtacatacaaatttgccatgtgtcagcmtgttccagtccatgaagtaagggtcaataaatttgtaat

SEQ ID NO: 455808 - DNA, 409 bp, Homo sapiens
gtgaaaagcaaaaaggatattgttgcctaatatgggatgatgagaaacaaatgcaaaaggaatacaagtcaaacttactatgactcctctctcatccatgacatcataccacaacatatgagcatgaagtgagattataaagttctctggatatgtggtttgtacaagaattagtcaggtatatatcccctcagtcattttggyggagaaaaattattccccataagcagatgggagaaaaaaaagattcaaggaattgtcatttgaatcagtttgcacatattctattaaaaggaaataaaacttcaaaatcctacaacctttgtacaacttgagcttattgaataaaaaaatactgtggtctgggcccctttacctcagtactcccagttgatacctattatcaact

SEQ ID NO: 455809 - DNA, 557 bp, Homo sapiens
gagtctacaaaacctgtagattatttggctttgagcccacattcctttaaatacttgcaaagcctgcccaaggcttgtttgataggcacaaacaagctcagactgtgaagactacaataaatatctaactctttaatgcccagaaactgaagaacatgtacaagcatcaacagcatccagaaaacacaacctcaccaaatgaactaaagaaggtaacagggaccagttctagagaaatggagatatacaatatttcagatagagaattcaaaatggctgttttttgaaaaactcaaakaaatttaagagaacacaaataaattcagaattgtatcagataaatttaacaaagagattgaaataattaaaagcaatcaagcagaaattctggagctgaaaaatgcaattggcataatgacgaatgcattagagttctttaatagctcaaacaaaagaaagaattagtgagcttgaagacaggctgtttgaaaatacataatccaaggagacaaaataatataaaacaatgaagcacatctacaggatctagaaaatag

SEQ ID NO: 455810 - DNA, 575 bp, Homo sapiens
aaatatcaactttaatatcaaagtttattttacagtgtactttttataataaatataattagaaatgaaatgagtcatctaattatttgaaagtgtgttccttaaaaatgtttatcctagacttcctagaattaggtttttaataaaattgcaaaataaaataaaatattacctatgttttgatgttatgtctgtttttatcttaaacattttatttaggaagtttgtggtgttcattgacataatgtcttttcttccagcagtgtagctgggtttttatttttgtttttggttttcatgtggcagcttcaggaatcccaaaagcagcaaaggtgtcctagtatgatggtacacacacacattataaatctcttcttgcatcacattstctaatgtccttttggacaaaacaaatcaaatggccaactcagaatcaaggggcagagagatagattcattttcttaatggaataatctgcaatgccacactataaaggcatgaatgcaggagggaaagaacatttggccattttaataatctatcacaaatgtgtatggtagcaatgaaagattag

SEQ ID NO: 455811 - DNA, 418 bp, Homo sapiens
attatacatatgaattatgatgaactaaggctatcagtttagatggtgtacttatctctttgtcatcacaaagaactaatagccaccacaatattcatagtgattattatagattggcaataaaaagttattttttctttagtttatatttttaaatttttttataattaaaacatgttgcttatgttaaaagaaaattttgagttttcaaatgtatgattcatagtaataatgagcatttatcagaactttaatcacataattttatattgtawaaaactatgagtcatgatagagctctattaaaataaatgaaataaaacatttcattgataaaaaatgttcaaatgtataattcagattaaatatttaaataatgttataactattaaatgcatgtatctcatatgtatatata

SEQ ID NO: 455812 - DNA, 410 bp, Homo sapiens
tacagttttgttttggtgatagtaatggcaatgtaaagttggaaaaataagagaagyttataggaataattgagaattatattatttttaaagtcatgttagaatttttcaataataaagcacttttccaaacatttgatgtcagcaaaataaataaataaacctttgtctgtttgaattcacatgggatgtcattcatgaaagaatcaaaagaaatgtgacataaaacattatatttatatgctataaaccaataatatacaaataaaaatttaaaactatgtatgcacatagtggtattttacctttgcaatattggctgtgtctttctcttctggatgacttttaaaataagttgtctttaacagtcaacaaacgttgttactttattacatattcagatgtagtgt

SEQ ID NO: 455813 - DNA, 563 bp, Homo sapiens
tttgttttgaattatgtttaaaataccaaatggagctcactgttcagaytcgttgcaaaatctggctaaaatttaagtttaggagaggcaaaaaaattgctctatgttgtgggagcaagtataaaggttaaaataattccaagcttaaaaccgatcaagaacttttcaaaagcagagttagagctttggtttcagcctggcaagctctaaaatctgctgtgaggtatgaagttaaggctaacagaagccttggaaagcacatttgatccagagcaaacacaacatattgctgactctcagaacatttagagaattcagagcccaccggaggctaggaggtcctatatttacatgaatagtgttacctaccatttcccactaaatacataaatacataaatcatgattttaagttcaaatgccaaaaggaagaggagagccagatacacctctaattaatccatgttagacaaagaatataaaaaggcacttctatgattattgtttctatattatcattttatttcattttttgtttgtattttttcctttaacctaattaga

SEQ ID NO: 455814 - DNA, 563 bp, Homo sapiens
tttgttttgaattatgtttaaaataccaaatggagctcactgttcagactcgttgcaaaatctggctaaaatttaagtttaggagaggcaaaaaaattgctctatgttgtgggagcaagtataaaggttaaaataattccaagcttaaaaccgatcaagaacttttcaaaagcagagttagagctttggtttcagcctggcaagctctaaaatctgctgtgaggtatgaagttaaggctaacagaagccttggaaagcacatttgatccagagcaaacacaacatattgctgactctcagaacatttagagaattcagagcccaccrgaggctaggaggtcctatatttacatgaatagtgttacctaccatttcccactaaatacataaatacataaatcatgattttaagttcaaatgccaaaaggaagaggagagccagatacacctctaattaatccatgttagacaaagaatataaaaaggcacttctatgattattgtttctatattatcattttatttcattttttgtttgtattttttcctttaacctaattaga

SEQ ID NO: 455815 - DNA, 519 bp, Homo sapiens
gaagtgtggtacagatctttactgatgtgaaaagtaaggactctctatcaaaatatttttgagaratgaacaaacatttaaaaatatatttaaaaagttgtttatgttcataaaccatagtccctttaactgtaacttaccattgccaggaaacacatacctaagcttggtatatttttgagaaaatacacggctttgctgaatgaaatataagtaaaaaatgttagtaaatgacttcacatgtatccttgcctatttaattctgttaagtactagatatatttaaaaatgaagatgcgctttgatgggtctatacagtctatcatttccaacattgtcaacaattttgcatgatcaagctctatatttgttgctgctttcttgtttgtttacagcattgacaataacagagaaagtttcagagcatgtatatgtactcttggtaggtcacacttgatacctagtctcttacaaaaagaagaaacagaagctgtcctcttgaaagataaataatgacag

SEQ ID NO: 455816 - DNA, 593 bp, Homo sapiens
catggattaaacagaaaagtggtgaactctaaaatctgcatttttttaaacaacatccagaatgactatgatacagtcagactaaggcatgctttaataacctgtaaaatatttctaaattttctatacaagaagtgtggtacagatctttactgatgtgaaaagtaaggactctctatcaaaatatttttgagagatgaacaaacatttaaaaatatatttaaaaagttgtttatgttcataaaccatagtccctttaactgtaacttaccattgccaggaaacacatacctaagcttggtatatttttgagaaaatacacggctttgctgaatgaaatataagtaaaaaatgttagtaaatgacttcacatgtatccttgcctatttaattctgttaagtaytagatatatttaaaaatgaagatgcgctttgatgggtctatacagtctatcatttccaacattgtcaacaattttgcatgatcaagctctatatttgttgctgctttcttgtttgtttacagcattgacaataacagagaaagtttcagagcatgtatatgtactcttggtaggtcacacttgatacct

SEQ ID NO: 455817 - DNA, 622 bp, Homo sapiens
ggcgtttgtgtccttcagaaatgacctctcatggaggcctctagtatttggcatttgtaaaatttgccccagaaatgtaaagtatagtgtttctcttctttgatgctaatatgggtaatgactgagatgactttattttttttctcagcggtagagatctgaactctttggtattgagacagatccattcaacagcaaagaggaagacctgccttgagaactaatgcatgcattctcaagggaggaagtattgccccaggggagcataactagttcttggaataaaaacaaatcttaattattacaatggctgtggttttccaaagaaccaccctaaataaacgtatatatggtatatatgtgatagtaaaacttcgtggaagttgggggagtgattaggaagaaaaaaagtttaacaaggcctccttaatgggtgataatatgaaaaaaataaggtttattaactctgggttaaggtattcctcgttccagatgggagttgtcaatccatgggactagaaccggctctcagaacctaaatgaagaacaagaatacagtygcacagctgggagagcaggtgaatgtgtagcaggtatttatttggagttaacggtgtggtag

SEQ ID NO: 455818 - DNA, 559 bp, Homo sapiens
tccaaactccttggagagacagagttgagatttccttccagctcctcatttagtagtcctacaattaaacttctttctctgctacaacccaatgtctcgttgtatttacttgacatgtgcattatgaaatcgacatattacagttataattgctcccacattttacattgggttactagtatttctgtagttgtcctttttcagaatcttgaggtatgtagctggtctcattttttctctacttatgggttctaacattcatttctatttctaacatattactttaaatttagccagtgggataatttacaatgagatattgtaaatgccatatgtcatttaaacagactctatcctgagtagcctaattccacacaagaattcacacagcatttaaaccaggccttgaatctacctattagggtctacctgtattccatctagtttacatcatcatatctgaatcatatttggtgttgtaattttatggacattcttctaaagcacccagcctktcctccaagcaaaggtcaacaatgaaggcctatagaactgtagc

SEQ ID NO: 455819 - DNA, 567 bp, Homo sapiens
gctgtatggtgtcaataattttggaaagtttcctgccattactataatacatcaaacatttcttctgttttgttctcatttatctcacaattccttgaagttttattctatgttttgcttttgtttttttctttaatgtttttattagaataataattgtggaaaatcctattgatctatattcaggttcactgatttcctgggcatgccaagtctactgatgagcctactgaagttatacttcatttttgttayagtattctgattctgatttctagtatccctgtaattctttcttagaatttttatccctctgcttacatttcccatctgctctcttgcatgttctactttctccatcagagttcttaacgtattacttatggatattttaattctcattgtgataattccaacatctttctcatatatggatctggttctgatgattgcttagtttcttagaagattttcctttcttttttttttttcttgtttgttagaaagctggacatgttttattgagtaatggaaactgaggaaactaggcctttaatatgagtgcat

SEQ ID NO: 455820 - DNA, 551 bp, Homo sapiens
gaagacaatttatttcctcaaggttattaaggtaaatttgatctaaaactcaaaacatgcacaaaaatcttcaccagctttgttaagacaagttgaagacattttgtgtacttagtattttttcttaggcatttcctattatcctctcaagccagttttccatcaggctaaaaccaattatgcttctacatttttgtttcattttctcttgaagtgtctacaataatctaaattctgccagcactgatggtcagatttcagcttcccagttactaaattcacagcagtcctgaaaatcatttctcccactccctcttccttggacacttcctcccagggttttgtgaaagcatattcacagataaggacatttataactgcttgttttgttttgaggcatgcccttgagatacttcccagaaatggaaaattatatttttggcatctacatactcaacaattgctgatagygtattgggagaaaagaaaggttggtatgaaagcataaagcacctagaggtgagctgacagtgcttttaggaagtaagaga

SEQ ID NO: 455821 - DNA, 543 bp, Homo sapiens
cttacagataatttcattgttcctaaaaggattggcatacaaagtcaatcaaagatgagtggggtaaagtgttctcagttgaggtaagcctcagcttccctgactcataggcaggagaacagaagcttggcttagcttagcagaagtgtattccataaaaaactgtatcaccctctaccttctgaggatgtcagctacacagaaaaaaagcagtgaatattttgactttttatgaaacaactttatatagctgtgattcttattcctcatcaacrgtgtgcctgattgtttcactcttaattctgtcgattgatataacttgtttcaagtccaatccaacacttacataataataatcaaatgccatgaatttaggttttacttacttttatccacagtctagtaactatcttacagagtctcattcactcgattgcatatcaaacaaaggataacaaacaaagtcttagattatctgggtatttcagtctattcaagtaagaatttcactatataatgagataaaattgttataaaatgata

SEQ ID NO: 455822 - DNA, 543 bp, Homo sapiens
cttacagataatttcattgttcctaaaaggattggcatacaaagtcaatcaaagatgagtggggtaaagtgttctcagttgaggtaagcctcagcttccctgactcataggcaggagaacagaagcttggcttagcttagcagaagtgtattccataaaaaactgtatcaccctctaccttctgaggatgtcagctacacagaaaaaaagcagtgaatattttgactttttatgaaacaactttatatagctgtgattcttattcctcatcaacagtgtgcctgattgtttcactcttaattctgtcgattgatataacttgtttcaagtccaatccaacacttacataataataatcaaatgccatgaatttaggttttacttacttttatccacagtctagtaactatcttacagagtctcattcactcgattgcmtatcaaacaaaggataacaaacaaagtcttagattatctgggtatttcagtctattcaagtaagaatttcactatataatgagataaaattgttataaaatgata

SEQ ID NO: 455823 - DNA, 579 bp, Homo sapiens
ttatgggctggggcttttaaggggatcatggagggcaaggagctgtaaaattggggttgttgattggttaggggaaaggacataaagtcatcaggatatggaaattatgttctttggtgaatcagcttccctggggtgtcattcagatcagctgacatcagtagtttcattggtatgcaggagctgaaagaatatctcaaagggaaaacttaagattttacaatgtttaagttgttatctttaaagcagttaaggggaacgatagtcttgtgataaggtctctgtgagtctgaggcaataggcagtggaycgctctgaggaagcaggttggagagcaagctgcctaatgattaatgctgaacatgctgcaagcatgatttctttttgtttctcctcttccttcttccctgattagttttataaaatttataggaatagtttcatcacctgtagaaaatattacaaatttgtataccttgttacagaagttgtttagagtggctgtcaaaggctgcatttctctctttcctagttagtagaggtgtttctgtgactgaggcctagccatgaaaggaagtg

SEQ ID NO: 455824 - DNA, 604 bp, Homo sapiens
ttggagaaatggcaccaatacacttacttggcacagggctgccacaaaccttcaatttgtgaaaaatacaaatcttcaaagcacaataaagcaagatatgtctgttttagggtaacttagagagtgttgcagatatcctcacagtgggctgcagacaaagggacgttctacctacatatgttcccaaaagggggtcatagtatggagtttatatgagagtttaaataatttggctcaaggtcagtttcttttggtgttttgggcagtaacctggatacctttctcagtgcctgggtatgtttaaggctttggcttgggttcaatcccatgagaaaaatgcagctgagccggtttacaaggccrttaggacactccttgtttcatcttcagggcatagaaagaaagcaggggaaactggtggaccacacggtatgggtgtctgcacatgtgtctagatgtttgtgtgtttcttcaatcataagtcattcagtagatccaaggcaggtacttccctccctgaacattgtttctcccgccacctcatgactaatttagtaaaactgaatatcattgtaaagcaaagactaataaaaatgcaaagtaa

SEQ ID NO: 455825 - DNA, 604 bp, Homo sapiens
ttggagaaatggcaccaatacacttacttggcacagggctgccacaaaccttcaatttgtgaaaaatacaaatcttcaaagcacaataaagcaagatatgtctgttttagggtaacttagagagtgttgcagatatcctcacagtgggctgcagacaaagggacgttctacctacatatgttcccaaaagggggtcatagtatggagtttatatgagagtttaaataatttggctcaaggtcagtttcttttggtgttttgggcagtaacctggatacctttctcagtgcctgggtatgtttaaggctttggcttgggttcaatcccatgagaaaaatgcagctgagccggtttacaaggccgttaggacactccttgtttcatcttcagggcrtagaaagaaagcaggggaaactggtggaccacacggtatgggtgtctgcacatgtgtctagatgtttgtgtgtttcttcaatcataagtcattcagtagatccaaggcaggtacttccctccctgaacattgtttctcccgccacctcatgactaatttagtaaaactgaatatcattgtaaagcaaagactaataaaaatgcaaagtaa

SEQ ID NO: 455826 - DNA, 454 bp, Homo sapiens
ggattataggtgtgagccaccatgcctggcctacaagtttttaacttctttgaataaataacaagaacaattgtgggtttatatggtaagacaaatttagttttgtacaaaactgcgaaagctgagtgctatgggtcacgcctgtaattccattactttgggatgctgaggtgggcagattgcctgagccagggagttcaagaccatcttgggcaacatggtgaaaacccatctctacaaaagataccaaaaaaaattagcgaggtgtgatggtccrtgcttgtagtcccagctacccgggaggctgaggtgggaggatctcttgagcctgggaggccaaagcttccatgaaccgtgatcatgctagtgcacttcagcaaaggttatagagtgaaatccttattcaaaaaacaaataaacagaaaagaaactgccaaagtagctatactatttt

SEQ ID NO: 455827 - DNA, 357 bp, Homo sapiens
agacaagtattcaagacaggacagattggaaaatgtaacctggtggaaaagtagattaagcaaatgcaaagtgtacatttagaaaccttagtgtggcaaaatggggagtgtgctaacataataacataaacctagagcttcactgtggaagcttttcatattagaatgagttacatgttcgggamaaaaagctcatttttattattatttacttttgtcatcattccctaaaatagtttcctaaatgattataacatcatttctagactaaacactattatctgttgcatttgactgttgtagggttggtgggtaagatagaatgtatgtactttaattacctattatgtattatgc

SEQ ID NO: 455828 - DNA, 567 bp, Homo sapiens
ttttttgttcctatctgatatgctcctgatctgtcttcagtgccaaaatctcccctgaaatgaccagygatgggacaagatatattctcttcttccttgccttctttccatgttatgcagtgtgttcgacttggaagagaagtcaagtcacccactactcaagtgacagttgtagctctgtcactaatgaaaggaaagaatcaaacttagtctatagactaagatacttagatcatatatgagaatccactcttaaagtgtacaatgctattcaataaatgtccttctcatcaaaacttaaatgccttgtcctcttcctctcccacacagcaacagatgacaatggtctaattcatcatgctaattagcaaatagattaaattatgtactaatccctctcagttcgatcagccctcaatctaactgaaggtcatttattgcctagaggagtcctaagtacccagacattttatgttcataagtgagagagacctcactggttagggcgacctcctaggattccagatttattcttcacctacagagcatactggcaccacccactgt

SEQ ID NO: 455829 - DNA, 567 bp, Homo sapiens
ttttttgttcctatctgatatgctcctgatctgtcttcagtgccaaaatctcccctgaaatgaccagtgatgggacaagatatattctcytcttccttgccttctttccatgttatgcagtgtgttcgacttggaagagaagtcaagtcacccactactcaagtgacagttgtagctctgtcactaatgaaaggaaagaatcaaacttagtctatagactaagatacttagatcatatatgagaatccactcttaaagtgtacaatgctattcaataaatgtccttctcatcaaaacttaaatgccttgtcctcttcctctcccacacagcaacagatgacaatggtctaattcatcatgctaattagcaaatagattaaattatgtactaatccctctcagttcgatcagccctcaatctaactgaaggtcatttattgcctagaggagtcctaagtacccagacattttatgttcataagtgagagagacctcactggttagggcgacctcctaggattccagatttattcttcacctacagagcatactggcaccacccactgt

SEQ ID NO: 455830 - DNA, 567 bp, Homo sapiens
ttttttgttcctatctgatatgctcctgatctgtcttcagtgccaaaatctcccctgaaatgaccagtgatgggacaagatatattctcttcttccttgccttctttccatgttatgcagtgtgttcgacttggaagagaagtcaagtcacccamtactcaagtgacagttgtagctctgtcactaatgaaaggaaagaatcaaacttagtctatagactaagatacttagatcatatatgagaatccactcttaaagtgtacaatgctattcaataaatgtccttctcatcaaaacttaaatgccttgtcctcttcctctcccacacagcaacagatgacaatggtctaattcatcatgctaattagcaaatagattaaattatgtactaatccctctcagttcgatcagccctcaatctaactgaaggtcatttattgcctagaggagtcctaagtacccagacattttatgttcataagtgagagagacctcactggttagggcgacctcctaggattccagatttattcttcacctacagagcatactggcaccacccactgt

SEQ ID NO: 455831 - DNA, 615 bp, Homo sapiens
cctagtcagtcaagaaattacgagactaaaactaactctaggaagtgaagaaatctgtcattttaggaaatggagagatctgtctcttcactacatggggtgagattatcaaatgggagttagtaaatatgtttttctcattctttaccaaatttagagaaaaaaataatgaaggtataatagaatatttctaggattcatcctcaaggaaaaaggaataataaatggataataccttcagaaacttgaaagggttatttagatagatttaatgagaggtttgatgatttctaccagaaaaaaattgacatttttataagtgtgtggtgagaaaaatcataaagtgagtcagataataaaaatggattcaatttcaggagatgagaaatgtctgtactatttgcacaaaaaataattgatgccaagagtttgtaaacaccaggctatatgattkaaatatattgaaaaagtcattttctcatttcctgtccattctgtaatatacttaatttttgattcaatagttctgtcaggcacattgtcccgtcttgtctctgtgcctaagtttcctcatctgtaaaatggttcttgtgaaaatggaatgacatagtgcat

SEQ ID NO: 455832 - DNA, 273 bp, Homo sapiens
aggcaagacattttactcataaactagacatcctctggaaatgctatgaaagtcaaggaagaattttgatctgattcaccctccttagccattggcttgccaatctccatctgaaaagtgcacaccaaggacattgtccagaaaagctaacttctccctcgtaagcatcattggtttaaacccataaggtatggtaaccataggggatccstgattaatttcctattgtacttctcaggatggcctctgtgatccacctgatctgggcaattg

SEQ ID NO: 455833 - DNA, 554 bp, Homo sapiens
ttttatcatagtcaaaatattggcctaaatatactttgttatatttgattacatgtttttagaagatacgtaaaccatgattttgaagtgatttttttggtacatacgttcccattttcaaacatttatgaratgcatgtgttttacctttatgatgagaaaaaaaggtaaaagattttaaatcaacaagtcatgtatattttatatacagccatttgttgcatagaaaaaggattttcttatatatgtataatgaacaaacaaggctgaatttagatggctctgaaaatgtggactcatatcaggaaatatatcaaattatcattttacttttatataagttgataattcactgctgtgaaaactaaccaatataaaatttatgaattaaaaaaatagctattctattccctaagcatctgtggatttttaaataggtctttttcttttaaaaatcaatctcaaacacacaatccctaaagccaaattcttcttatgtttcccatgatagttaactaatcttgttctttctgcccatctcatgtctcactcct

SEQ ID NO: 455834 - DNA, 554 bp, Homo sapiens
ttttatcatagtcaaaatattggcctaaatatactttgttatatttgattacatgtttttagaagatacgtaaaccatgattttgaagtgatttttttggtacatacgttcccattttcaaacatttatgagatgcatgtgttttacctttatgatgagaaaaaaaggtaaaagattttaaatcaacaagtcatgtatattttatatacagccatttgttgcatagaaraaggattttcttatatatgtataatgaacaaacaaggctgaatttagatggctctgaaaatgtggactcatatcaggaaatatatcaaattatcattttacttttatataagttgataattcactgctgtgaaaactaaccaatataaaatttatgaattaaaaaaatagctattctattccctaagcatctgtggatttttaaataggtctttttcttttaaaaatcaatctcaaacacacaatccctaaagccaaattcttcttatgtttcccatgatagttaactaatcttgttctttctgcccatctcatgtctcactcct

SEQ ID NO: 455835 - DNA, 477 bp, Homo sapiens
aaccacacacatgtattctcttagaactctgcagttagaagtccaaaatggacttccttaggctaaacacaaggtatcaacaaggctgcattgctttgggagactctggagaagaaatggcttccttgcttttttcacatcctggaggccacctgcatttgcatttcttaactttatgagagtctgtaatgatgtctttataatgcctccaaatggttgcaaaactaacacatgcttttgtttttatgaagccaaacagatttagttgatttttgaccatggagttggggtatggggacaaggttggcagccatttttatgttagtgtagtccaacatattacattccagccagcacctgtggtattcyattctagtcattatagacttttagaatcatgaaactgtgaagttgcaaataatcttataggtcacccagtgcagcctgctattaaggagtatcccctacaacagtgct

SEQ ID NO: 455836 - DNA, 558 bp, Homo sapiens
tgctgtcttaatagtttaaagaaaagaattaatgtatttcttatgtaattgagttttttaaattcaagaaatatatgaactgtaaggcagacactctttattactaaagttttactttacaagtcaaacatggaaaaaataaaatatccattcttagattaattcattgggaaaactagaggcttataggatttttttctaatgaatttctcctttaaaaacctttgtattcattaactggatatcatttcatggggtgtatttgtgtgggtatatatgaacatgtccatgcatgtggaatatagggaattcacacagatctataactgtgtgactctggtgtgcaatgtgcaaatcaactgataatgcacaaatatatatgacacaaagtacgtcaatgtgaayaatacagatgtgtaaatgatcgtgtgcaaattatttgacaatgtacaatgcacatttttaagtataacatacacatgctaggctaagcagtgtataacttaatcagtataaaattccttactttaaagtatatgtttttatattaattccaaa

SEQ ID NO: 455837 - DNA, 558 bp, Homo sapiens
tgctgtcttaatagtttaaagaaaagaattaatgtatttcttatgtaattgagttttttaaattcaagaaatatatgaactgtaaggcagacactctttattactaaagttttactttacaagtcaaacatggaaaaaataaaatatccattcttagattaattcattgggaaaactagaggcttataggatttttttctaatgaatttctcctttaaaaacctttgtattcattaactggatatcatttcatggggtgtatttgtgtgggtatatatgaacatgtccatgcatgtggaatatagggaattcacacagatctataactgtgtgactctggtgtgcaatgtgcaaatcaactgataatgcacaaatatatatgacacaaagtacgtcaatgtgaacaatacagatgtgtaaatgatmgtgtgcaaattatttgacaatgtacaatgcacatttttaagtataacatacacatgctaggctaagcagtgtataacttaatcagtataaaattccttactttaaagtatatgtttttatattaattccaaa

SEQ ID NO: 455838 - DNA, 501 bp, Homo sapiens
ttattattttacagtcaataacttttgaaaattagcctaatccaaagagcagaacataaagtctgacatgtaaatcttatcctctgcctacagcctcaacatagtaagctcaattattggttagaatttataacctatacaaatagaggttttataatggaatccagtaggaagaaaaaaataagtctcatgaytttccatgcattcaggataagacagggaaacagtcacatgtactaacatgtaagttatgcatttatgcaatctccttttctggaaggcaaatattgtgcactgcctgtctgaagacttctgtttggaaaataaggtattttttcaaatgggtaacttttcttctgccattttgttgtagagtagtataggagttactgagataggttcctctatgtagagaggcactgaataagcagaataaacacccatcacccagaaaaccatgggaagcaacgtttaacttagtagcaatttcacatgacatta

SEQ ID NO: 455839 - DNA, 501 bp, Homo sapiens
ttattattttacagtcaataacttttgaaaattagcctaatccaaagagcagaacataaagtctgacatgtaaatcttatcctctgcctacagcctcaacatagtaagctcaattattggttagaatttataacctatacaaatagaggttttataatggaatccagtaggaagaaaaaaataagtctcatgactttccatgcattcaggataagacagggaaacagtcacatgtactaacatgtaagttatgcatttatgcaatctccttttctggaaggcaaatattgtgcactgcctgtctgaagacttctgtttggaaaataaggtattttttcaaatgggtaacttttcttctgccattttgttgtagagtagtayaggagttactgagataggttcctctatgtagagaggcactgaataagcagaataaacacccatcacccagaaaaccatgggaagcaacgtttaacttagtagcaatttcacatgacatta

SEQ ID NO: 455840 - DNA, 501 bp, Homo sapiens
ttattattttacagtcaataacttttgaaaattagcctaatccaaagagcagaacataaagtctgacatgtaaatcttatcctctgcctacagcctcaacatagtaagctcaattattggttagaatttataacctatacaaatagaggttttataatggaatccagtaggaagaaaaaaataagtctcatgactttccatgcattcaggataagacagggaaacagtcacatgtactaacatgtaagttatgcatttatgcaatctccttttctggaaggcaaatattgtgcactgcctgtctgaagacttctgtttggaaaataaggtattttttcaaatgggtaacttttcttctgccattttgttgtagagtagtataggagtyactgagataggttcctctatgtagagaggcactgaataagcagaataaacacccatcacccagaaaaccatgggaagcaacgtttaacttagtagcaatttcacatgacatta

SEQ ID NO: 455841 - DNA, 573 bp, Homo sapiens
tgagataggttcctctatgtagagaggcactgaataagcagaataaacacccatcacccagaaaaccatgggaagcaacgtttaacttagtagcaatttcacatgacattaacactcagaaaatatgcattattagtataattctatttaagtatgcaaccagagggtaaaaaaatttactgtgaaggttagaatggcttgtatacttcataattgtatgacatttggtcaccgccaattagaatattttgagtcctcgtaacacgtctcaactggcttgtagaagagtaaatgatagaaacaactcatactactgtgcaacaagtatttaacactgacgaaagcaaaaaatataatgtcaatcagttaacattttagtgggtttctgttttgtaaaaagaacaaaagaaacactaaatctttgtaacaccagaatttaaaatattttatcagattacacaataaatatattttaagtacaatttgttccccaacaactttagtttttaacaattgtckagcagtggtttgtagttctccttgaagagctccttcacatcccttgtaagttag

SEQ ID NO: 455842 - DNA, 561 bp, Homo sapiens
gaaaatacgtaaacaactcttggagggacrgagaatgatagaagattccttgtgcaactaatcaaggatcaagagtgtaacccagggtccctgggtttttgggtacacactgtgaagaactatccacttttaactgttgcaccttgagtttccgttgtttaaaagtgttctaggaagaagccgagcccctgcaaaacaaagaacaaacacaaaaaactggtcccaggcatccggggatgcctgagctggagatgaactttggagacctcttcaccttaccatactaaatgccctgcccagggaagagcttatgtgccattttctgtatgggcaacatatgaagaagcatgaacaacagctgtgcctgcctgcactccacctctgcacacagtgactcagctaagcagcccccacaaagccctgtttccacctgtgtctggggaggcactgctttgggaactatccccagtgttctacttacttgttgccagtaatgaaatcccttggttaaatcctccttggttgtggtcattggactcccacctgccaagcaactgaacc

SEQ ID NO: 455843 - DNA, 506 bp, Homo sapiens
atctgtttgttttaaaaggttccccaggtcatcctaagttatagtggccatgaaaaccttccgtttagcttttatcccattctagccaacccagatcagcagcaacaaagcagttgtgtcccctccactctatctccccaccaactgcctgcagaaatgagggyctctgccttgtgatgctgcatggggtcctagtaagcctccacaatcagcctttgctctgattccctgactcaaatatgagacagttgtgttcctccaggaacatgcattatcttagaatattgctatcctgctggtgctgtctgagatccacagtaggcagaatcttctcaggaagttttctgttagatgcccagtcctgtgatgtggtttatagttacagcttttcagagttcttaaacatgaaaatttcatttctgtttctcaatcttcttgatatttggatgattttggggacacaaagaggcaaagatgtctttactcttcaatcttacaacaggggt

SEQ ID NO: 455844 - DNA, 612 bp, Homo sapiens
tgtattttcagtagagatggggttccaccatattgcccaggttggtcttgaactcctagtctcaagtcatctgcccgtcttgacctctcaaagtgctgggattrcaggcatgagccaccgtgccctgccagtttcaggtatttctttatagcaatgaaagaatggatttacaaactccccaatgatgtgaacacgaaaagtaaagtcagtgagggattttaaaagtgccaatgcccctgacgactccaaccacactcaaccacaaagtacaccagcccaattcaatctctagaaataagaacatgtaagagtcactaaataaataaaattgagatggttgtccgtcccagaaaacaaagacatacctgcctctttgcaggaaagacaggaggctctaattacctctggtgctccttggacatttctggggaaatagtcttaagggaagaggacaggcatgctacccttgggcagggcagtaagcagctagctagaagactaacatttctttgaagactcaaggtctatttttttaaaaagccatgtaattttgtgttctactctataacatatcttttggagtttaattgcaaaactaaaattttaaacgat

SEQ ID NO: 455845 - DNA, 561 bp, Homo sapiens
tcattatggtggttcttctaggttcatagtgattctggggcaaacattttttgcagatataaatagcaaatattagtataatgagaatctacatagagagggaccttctttttttttatgaaagggctttaatagtggtctgtaaaagctatgggggaggcaggcataaaaaagaaaagsaccaaaactgtctgcttggggatatcagagaagtcttgaagaaagaggaacgtgaaacaatgccttgaaggatgagtaagtgtggtctgtggcaggggtgatggaagtaagatagaagtaagggatctcacggagaaagaaaaggaatatgaggcacaaaggagtggaacagcaaggtacatgccgagctcaaagtagtcagaagtggcagatgggctgtgcacaggaggcagctggagaggagtttgtgaaactagacctggctgcatcatggagggcccagcaggctctgcaaggagttctgactttgttctgtggtcagtaaagatgcatggaggattttcatctgagagtggtacaatctgatttgtgtttgaatag

SEQ ID NO: 455846 - DNA, 643 bp, Homo sapiens
ctgctgagtcccataaaatttcagttttcgtttttggaattctttgcctttttaaaaacaagtgacaactctgcctagttcttaaaataaagatgaagtgatacttttctttttttttccctaacacacaagtaaaaaacatttgttcatttaataaaagtccatttgaaaatatacacttttatttttcttcatgacacttgtcaacatataacataatgaatattttatattttatttcattcagaatgtaaattgcttaaagacagaagcgtttgttttgttcaccctcgtatccctagttcttgaacactgcctaggttaaagggatgcttatgagctgagggaaagaaggaagtaagggagggagagagggaggaaggaatgaagggcacaactttaaataattcatcttctattaccttcttgggtrttaatcaaatttaggctcagaaaaagtcaattttatatgggctatgttatctgtatttagattataattaatttacattttcaactgtgcaatatacgaggcaagtatgatgcttatagttaaagatcctctgtgagatctttaacacaactattaaaaaatgcaactataaaaaaagttgaagatgactataaaaaatccttacgttat

SEQ ID NO: 455847 - DNA, 643 bp, Homo sapiens
ctgctgagtcccataaaatttcagttttcgtttttggaattctttgcctttttaaaaacaagtgacaactctgcctagttcttaaaataaagatgaagtgatacttttctttttttttccctaacacacaagtaaaaaacatttgttcatttaataaaagtccatttgaaaatatacacttttatttttcttcatgacacttgtcaacatataacataatgaatattttatattttatttcattcagaatgtaaattgcttaaagacagaagcgtttgttttgttcaccctcgtatccctagttcttgaacactgcctaggttaaagggatgcttatgagctgagggaaagaaggaagtaagggagggagagagggaggaaggaatgaagggcacaactttaaataattcatcttctattaccttcttgggtattaatcaaatttaggctcagaaaaagtcaattttatatgggctrtgttatctgtatttagattataattaatttacattttcaactgtgcaatatacgaggcaagtatgatgcttatagttaaagatcctctgtgagatctttaacacaactattaaaaaatgcaactataaaaaaagttgaagatgactataaaaaatccttacgttat

SEQ ID NO: 455848 - DNA, 610 bp, Homo sapiens
tgtcttagttagcttgggctgctgtaacaaatagcacagactaggtggcttaaactccagactttggttttatacagtctggagactaagaagtccaagatcaaggtgctggctgattcctgtgagggctgtcttcctggtccacagaccattcagctgcctccgttcttcttatagattcgytagtcccattcatggggtctccaccttcatggcctcatgacctcccaaaggccccacctccaaatacattagagataagagcttcaacatatgacttgaggaaggcagaaccattcggtttatagtgttgagaatgtttctgaacctcccttgataattcatatgttaagcagtctttaggaattactattttaaaccatccccttttgagcaaatttgtggattcatattgcaaaatttaacaaacacaaaaacataatctccctttgatcttctgttatgtttaaatatagtagcaaattttgaaaaccactgttttaaaccatccaccttctttatctaacctttacagattcatattataagattaaacaaccacaatcaaaataagtatcccctttctggtttttcataatatataaatgat

SEQ ID NO: 455849 - DNA, 595 bp, Homo sapiens
aagctggtaattccctaactatgtagtaaatgataatgaatggagttaggatgttgattatcaggaggatgccattggtgctcctcctatctgtgaaatttttaatcaaaataatattccttctccctcaaaattcttaagattttaatcaccagtgaagattttccagacatggtgattctataagctctctcttatttctcaggtttgatctgggtaaaacatattgaaagttctggaatattgcctcactttatccaaaatttaaygtaagttctttctagaggtgtttagagacctttttatggaagctgactaaataccacacctgtatatggcaggggcagatttctctcacgaattagtcatgaagaatatggaccacatcttcaccccaggacatgatgcttctccatgaatgcttggctgtatggaatagaaggtggtaagaattctaaattttttaaaaaaaagattaatagaagttagaaataaagcctatgggaatatatacccaagcaaaattcttatcagtctaaagatacagcataaatttaattccctccaaagttaaggacggcttttagtcctttta

SEQ ID NO: 455850 - DNA, 586 bp, Homo sapiens
acactaggaaaactatatgtaaatgtttatagtagctttgtagcataatcataacaaamttcaaacagcccaaaggttcttttgctgccagattgataaacagatgatggtacattcattcatacaatagaatactattcagccacacaaaagaatacattatttataactcacaataggaatgaatctcaagtacattactttcaatcaaagagtctggactcataaggttacatactgtgtgattctatctacatcactttctgcaacagccaaaactatagcaataaagaagagatcactggttatcaggagttagcaatgggaaaagtggctacaaagggcaacctgaaggaattggtaggataataagatttgttgattgtgatgttgggtgaatatgggcttacatgactccgcattaatcaaagctcattgaacaatacatcacaaagtaattattttggtatagattaataagctagtgatccaagttaatttcttcccctatgactatcaaatctcaaaaagaacaaatggtctgggcatggtggctcatgcctgtaatcccaagactttgaaaggc

SEQ ID NO: 455851 - DNA, 586 bp, Homo sapiens
acactaggaaaactatatgtaaatgtttatagtagctttgtagcataatcataacaaaattcaaacagcccaaaggttcttttgctgccagattgataaacagatgatggtacattcattcatacaatagaatactattcagccacacaaaagaatacattatttataactcacaataggaatgaatctcaagtacattactttcaatcaaagagtctggactcataaggttacatactgtgtgattctatctacatcastttctgcaacagccaaaactatagcaataaagaagagatcactggttatcaggagttagcaatgggaaaagtggctacaaagggcaacctgaaggaattggtaggataataagatttgttgattgtgatgttgggtgaatatgggcttacatgactccgcattaatcaaagctcattgaacaatacatcacaaagtaattattttggtatagattaataagctagtgatccaagttaatttcttcccctatgactatcaaatctcaaaaagaacaaatggtctgggcatggtggctcatgcctgtaatcccaagactttgaaaggc

SEQ ID NO: 455852 - DNA, 553 bp, Homo sapiens
cttgatggacaaatacagtaattagatgtctagaggctctgcaaaggtttgcctgtgcatgcagtagaaagaacaagtggagagcttttttctcactgcagtgctggtgcctttggctatcatttttatttctgctaagactatcataattcttttttattttctcatcttagccctggactcycaggccttttatgatatatgtaactcaatgggatagtatgaaacaaatgcatctgcatgaagtcactcagctttggttctagtattctattctacctggagtaatttgctgaagtgtagaattattaacaaatttgtgagagctaacaaatatgattccccagattcagagtcaaacacttcttcaccgtaaaccaattcttcacgtaggtcctgggccagtgtacttttgcaagatgttcaaggtataagatgtcatttttgatagcacatgttgatagttagcaatggtcaaaaataattgtctccctcaaagcacaactattgtaatgtacatacacctttttctgtcaactataaatttgaaaac

SEQ ID NO: 455853 - DNA, 520 bp, Homo sapiens
gagcaaaaagaacaaagttggagacatcatattacatgacttcaaaatatgctacaaagatatagtaattaaaccagcactgtcaggcatgtatggtcatgtaggtgcatgtacacacgtgtatggctagctgatttttgacaarggtaccaagaatacacaatgagaaaaggccagtccgttcaataaatcatgctggaaaaactggatatccatatgcagaagaataaaattggacctttacctcacatcgtgtacaataatcaactcaaaatggatttaaaacttaaatgtaagatcagaaactgtaaaactactggaagaaaacataggggaaaaactacgtattggtctgggaaattattttttggaatttgatagcaaaagtgcaggcaacaatagtaaaaatagacaagattatatcaagataaaaaacttctgcacaacaaaggaaacactcaacagagtgaacagatatatttgtgagaaaatatttgtaagctatatttatctgataagg

SEQ ID NO: 455854 - DNA, 643 bp, Homo sapiens
  misc_feature (1)...(643): n = A,T,C or G
tgatgggccaggcatggtggctcacacctgttatcccagcactttgggaagccgagatgcaaggattgcttgagcccaggagttcaagaacagtctgggcaatgtaggaagaccccatctctacaaaaactaaaamtaaaaattaatcaggtgtactgttgtgtgtctgtagtcccagctacttgggaggatgaggcagttggatcgcttgagcccggcgatgttgaggctgcagtgagctgtggtggtgccactgtactccagtctggacaacagagtgagtcccctatctgaaaaaaaaatctgaatatctgtaaccatacctttngaggatgtcaaattagataaaacaattaaggggaaataaacctagcatctacttaatgcttctgcatgtcagacactgttctaaatgcttttgatgtgttcctcatttattctacaactctgtatacaggcatcattattagtcctttttttttacattgaaataaaactaaggcataggcaacttaagcaagtattcaagataatgtaagatcacatctgaaggagcttggatttgtttaaatccaagcagttggactctagggcatacaatttcaatgattatactaaccctactttattgctttacagataa

SEQ ID NO: 455855 - DNA, 561 bp, Homo sapiens
ctgacactttgacttcacccatttgaaacttcaagcagagaacccagctgagccggctggacttctgatttacaaaactgctatataatacatgagggttttaagttgccaagttcgtggcaatttattacacagcaataactgtcaagaaagaagctgagaggcttgttaagaaactacagtagacattcaggcaatagaagacagtggctcaggccaaaatggtagccttgaagatgtagagtwgtcagattccaggtatacttaaaagatgtgagatatacttttaaaaaagtatatttaaaaagtatattttatacttattttttaggtatattttaaaaatatactttaaaaaagtgagatatacttaaaaaatgtttttagcctaagaagaggaagaatgaagtttccatcagctcagactgggaagacaagggaaggagcactttttaaggagggggaagttcaggatctctatatagaacctgtaaagtctaagaagccaattaaaaatccacatggtatctaaagccacaaaactaaatgagatcatgaggt

SEQ ID NO: 455856 - DNA, 561 bp, Homo sapiens
ctgacactttgacttcacccatttgaaacttcaagcagagaacccagctgagccggctggacttctgatttacaaaactgctatataatacatgagggttttaagttgccaagttcgtggcaatttattacacagcaataactgtcaagaaagaagctgagaggcttgttaagaaactacagtagacattcaggcaatagaagacagtggctcaggccaaaatggtagccttgaagatgtagagttgtcagattccaggtatacttaaaagatgtgagatatacttttaaaaaagtatatttaaaaagtatattttatacttattttttaggtatattttaaaaatatactttaaaaaagtgagatatacttaaaaaatgtttttagcctaagaagaggaagaatgaagtttccatcagctcagactgggaagacaagggaaggagcactttttaaggagggggaagttcaggatctctatwtagaacctgtaaagtctaagaagccaattaaaaatccacatggtatctaaagccacaaaactaaatgagatcatgaggt

SEQ ID NO: 455857 - DNA, 555 bp, Homo sapiens
actttatcaaagtcaccaatgacttccattttgctaatcctatcaccaatcttcagtcctcattctttttgacttatcagtagcatttggcacagttgatcactctcctctggaaccagttttcttcacttagcagccactgatgtgtgyttctcccttgtttctcaagctcctttgtcccccaccccattttcctaacctctaaatagtggaggacctcagggctcagtccttggacttttcctcttgtctatttatatccattccccatgtgaatttaacttaagttgtatgactttaaatgaaatctatattctggtccttacaactttataactccagtccagacctctcctctgaatccagactcacacatccaacttcccggttgatattcccactcataggtcgaatagcctgattttttgtttcttgtggtttttgttttgttttgttttgttttttttgacagggtctcgctctgttgcccaggctcaagtgatcctccatcatcagcctcctgagtagctgggactagaggtgcgtgttaccaca

SEQ ID NO: 455858 - DNA, 380 bp, Homo sapiens
ctgatatgcactctatgtatgggaaacttggaaactttccaatagatccagtatatatctagrtgcttaattattgggataaaaataatactcattatttcctgagttattctttaataatttaaagatgcattgcctttaagtaccaccatgctaaaaaaaaaacaaaaagcaacaacaaaaacacattgaacagtaaattttgggagacattttcctaacacaatatgttatacatttaaactagtaagtctatcctcatgccacttctgaaggccatcctaccactcctgacggccagtccaccatttatcaattgaaaaacattcagtttatatatttgtcaatattgaaatcaaagatctacttctagtaacact

SEQ ID NO: 455859 - DNA, 380 bp, Homo sapiens
ctgatatgcactctatgtatgggaaacttggaaactttccaatagatccagtatatatctaggtgcttaattattgggataaaaataatactcattatttcctgagttattctttaataatttaaagatgcattgcctttaagtaccaccatgctaaaaaaaaaacaaaaagcaacaacaaaaacacattgaacagtaaattttgggagacattttcctaacacaatatgttatacatttaaactagtaagtctatcctcatgccacttctgaaggccatcctaccactcctgacggccagtccaccatttatcaattgaaaaacattcagtttatatatttgtmaatattgaaatcaaagatctacttctagtaacact

SEQ ID NO: 455860 - DNA, 589 bp, Homo sapiens
ctcacctccactagactaatagcacttctgagcacagcttgcgttatcacttgacatccctgaaatccatttctaaggtaaaatggaagtctaattggaaaaatcaatttttaatgaaagaagtcttcaaaaaagaaaaaaaaaacagttgtcagattttactatgccatccccattcacctgttaacactggggctaagccacttcaatgaaataaaaaatgtatatggcttctctattttgagttctctagagataattgaataaagaattgtggaaggagtaaaaaaagggctctgctatatacttgtgatttcttttgacctctacttttttaacctataaagttgaggcattaagctagataataaataagctctctaaaaactcaataatttctgtattaaccccaaactgaaggaagccccctccccycaacctttttttttttttttgagatacggtcttactctgtcactgaggctggagtgcaatgatgcaatcacagctcactgcagcctcaaacacctgggctcaagtgatacccctgcctcagtctcccatgtagttaagactacaggctgtgggc

SEQ ID NO: 455861 - DNA, 570 bp, Homo sapiens
ctctccaatttttagaccacaggcatcagccatcacttcttttattaacctaattccttgtaggattcagatggggtatttcccacatggtcccagctctgtgacatgtcactagtttgtgaggttatgctgcagggatcccaggacaaagacccatttccaatggcaaatgtgacaaatggaggtttttrgtggcaaaacataggtacgggcaagaaaaaggctggctgtagatgaacgcctctgaaaaggctatgaaggaagttatccactttaaatacgtgagtgtaaaaaaaatcaaccaaacaaaacagaacgggagcatttagataattcactctcctaatctcatggtaaataaatagtgttaaaccatgtctattgccacaggagttctggttttacttattttacagcctgcctttccccctctgggtagtaccaggaggaaataaaatccactttctttttcactcttccactatggcggctttgtctctcttgggtatttgggcttctgtgtatttgcaaggcttatttttcaatagagcgggcagggtttacaaagtc

SEQ ID NO: 455862 - DNA, 484 bp, Homo sapiens
cagttcttaaaaatttactcattagcagtaactgtaagttgtctctgattttaaagatctatttgaagaattaaatatttttaaatgaatttaattgttatgaggggggcttattttctagtgatttctatgatcttgctatatttttggactaacaagggaagaaaatatggatcagaaaggctaagcaactttcctaaggtcacacagcaaacttgtaggcaaggcagaactaagctttgtttgtttgtttgtttgtttcaattctgtgyagagctctgggcaaactcaaagggagaagttattagtagctgtaaaaatcaagccctgacagtgggtgtttctcttggacagtctctgtatttgatgttctgacagcttttatgaggctttggaatgtgtcaatagataacactgtgaccccgaggagggagcaaaccaaaccctttcctctgggagttctcctccactgtgctgctgaaaa

SEQ ID NO: 455863 - DNA, 613 bp, Homo sapiens
tgtccctccaggaaactcaattaaattgtactaggcagttttttttcttcctcctctattttgtcgacaatttcattcctgggtttgtagtcgagggattggccctataggtaatatagattctagaagaaactttggcttcatttgaagttaaaaactttcttaaaaaaaatgacattctttttttatctgtgctacagccttccccctttctagtgtactttttaaacattttagtttcactttgaaatctaccttttgggctacattcgtttcccttggtttcttgtggttttgtggctgggaagtctctctggtcaccttggcaatgtgaaatatttgcacaaaataaacaaccttcttactttccttttgcaccttcttagaaaaaatactaatctaccaggtacctgtcaaaaacagagactgattctttttcccatcctgtcaatggggaattgttctgtgcaggcttttactctctcaaaatagcagtaatgactgctttaatcactttgttctaatctgagccaaacaatgcctccttcttaccttcatctctccttttccctcttttcccscctctcaaagcaattgttttcatccaagctca

SEQ ID NO: 455864 - DNA, 558 bp, Homo sapiens
taattcctgagtcctaagcagagcctgcctgttagcacatttttaaagtggaagcttagagggcttctagatgccgctggtttgacatttctttgggatgggaagatgtgattagattcacgtaatataaccctgtttgaaaggtgtagcaacatgacatagcggaaaaaatgtgggctcttgctctgattttatgatataatgaatgaatcccaycttctatcttctctttgtaaaatgaatatactgtttaccatacaaggtgttgtcagaattcaattattaatgtatgtaactgctcaaaatatgttataccctttcactctccttttaagagggtgggtggattgggtaaaaatgtatatactacaaattggcaattagatattctaattttgtctttgctaatcaatttatttgaaacccccattccccagtgttgcagtaggaagtcagataagaaggcagattggtatcactctaatatttataaattaatgtcactggcctcaaatgggctgttacagctccgtcatccctttatgtttcttgggtcag

SEQ ID NO: 455865 - DNA, 521 bp, Homo sapiens
tggtctcactgtgctgcccaggctaacacctttttgttcttttttgtttgtttgtttgtttgagacagagtcttagagtcttgctctgtcacccaggctgcagtgcagtgatgcaatctctgctcactgcaacctcagccttctcagttcaagcgattctcccgacttagcctcccaagtagttgggattacaaccatgcaccactatgcctggctatttttgtatttttagtagggaaagggtttcatcatgttggatagtctggtttcaaactcctgacctcaagtgatctgcctgcctcggcctttcaaagtgctggggttacaggcrtaagccatcctgcccagcctaacatctttaaatacagatcttttgattccacctgtcttgaaaatttgtctacctctgtccctgacaaaccttctactattttcactatatcaggattcctcttctaaaggcagttcaccctgctgattcatcagtaattcctgttggctcaacttctgaaatagccatt

SEQ ID NO: 455866 - DNA, 521 bp, Homo sapiens
tggtctcactgtgctgcccaggctaacacctttttgttcttttttgtttgtttgtttgtttgagacagagtcttagagtcttgctctgtcacccaggctgcagtgcagtgatgcaatctctgctcactgcaacctcagccttctcagttcaagcgattctcccgacttagcctcccaagtagttgggattacaaccatgcaccactatgcctggctatttttgtatttttagtagggaaagggtttcatcatgttggatagtctggtttcaaactcctgacctcaagtgatctgcctgcctcggcctttcaaagtgctggggttacaggcgyaagccatcctgcccagcctaacatctttaaatacagatcttttgattccacctgtcttgaaaatttgtctacctctgtccctgacaaaccttctactattttcactatatcaggattcctcttctaaaggcagttcaccctgctgattcatcagtaattcctgttggctcaacttctgaaatagccatt

SEQ ID NO: 455867 - DNA, 524 bp, Homo sapiens
gactctgtaatgcttatttgattaattaaaaactctttaatttgggaacagaagggtaacgtaccagaagctcagccattagcctgttgttggagtttagcttattgttttagaaagttgattttaaataattgggacagttaaaaatgctggtctgaactatgtcagcttcaaagtgactggatcagtggttttgagtggcttctatttttggtcacaagctaccttgggaatctcataagaagtgtggaccttcttctcccaagtgatgcacatccatgcacaattctgcatttattttaaaattatcttccctaaggaacttcttggactccagggtagaacctattctaagttggttattggttgtaatgcagctgttctactgaatgtacttgcctccttttgtgtttttttccctgaggattccctaaattttgagcccataagcctttttaaactgaaaggttagtaaattcccatataktatgtcgtgctctacaacttggcttttcagtcacctc

SEQ ID NO: 455868 - DNA, 548 bp, Homo sapiens
tttatacacagtctggtctcttcctcctatttcctcaacttcatttgccctcctcttctctttctctattataacccattggccttttttccattccaggtaagccggaggacccttcttgtccctgagtattccactgtttccctcggcataraatactcttccctctttacctgctgataataatccttcagatctcaacaaccataattttatcattaacccttctctggtgacaatcaaaatgaagacagaccaacaatttgttctccaaaatctatgtctgctacagggaatttacaatgagcaaagcaaagcatgaagaaaatctcaattcagtttctcaaaaagccgaaacaccaagtctcttcaaagtctcccccaaaagtctcctcaagcatacctatcaaaatttactaaaagaaatcctgtgagaagtccttgactttgcagaaactgctttaagaaaaaccaccttctaattagtttcagtaaaaacaaggcagtgattatgacaaaaactttgtatagtctactacgacacttta

SEQ ID NO: 455869 - DNA, 538 bp, Homo sapiens
ctgtcccattctttttaaatatgcttgaatagatttgctttgggaataattacgtttaagaaactgccaaagcaacagggaagttgtacaccactatagagrtcgctcagattgttgtgtggggatctctgtcacataaacttcattatggatcttcgggtttcactatgatcatccaaaaataagtctgacttatacgttcatatttaaaagaaaagttgcaataaagggccatgcaatgcttgaccttgagaaacagtgcctcttgtatgaatccaggtaacctctggctattaatcggtatgttatataacaaaccggaataagctttgctaaggagcttcaattttactaatgtccagttgtttccaacctggtgaacactagatttccttcctaaattatttttacccaaaagaattcttaaacagctaaattataagactttgtggtatcagtggctataaatctcagtaaggaccacctctggacttaatttagagaaatggagtatatctgataactaggaataaagagc

SEQ ID NO: 455870 - DNA, 493 bp, Homo sapiens
tgggagaaattgaggccaaaagagctaaactgctttgcacaatgaggtaaagggcatctttctgggtggaaaggttgtttggttattagtagtttttgtygtttgtttgtctttggttgcagatgttgttgtggttttctttctctggaagatccgggaaatggggtggggcagtttgggctcagcgaagaaagggcaggaacggaagagcttgatgtgagcagggagtcctccgctgacatgagggtgggaggctggggggacagcagggtctctgaggaggggcttttggatatcaacatttgagttttcctgtaagacgtcaagctgtcagcaaggcttgttagctggcacccctggaactggcctgtggcacacattgccttggggaatgaagggaagaatagcaactccctctctgggcaaaggtgactgtgactgtgaccgagagccttgtagcaacttgattaaggcctggcatggagttgggagg

SEQ ID NO: 455871 - DNA, 493 bp, Homo sapiens
tgggagaaattgaggccaaaagagctaaactgctttgcacaatgaggtaaagggcatctttctgggtggaaaggttgtttggttattagtagtttttgtcgtttgtttgtctttggttgcagatgttgttgtggttttctttctctggaagatccgggaaatggggtggggcagtttgggctcagcgaagaaagggcaggaacrgaagagcttgatgtgagcagggagtcctccgctgacatgagggtgggaggctggggggacagcagggtctctgaggaggggcttttggatatcaacatttgagttttcctgtaagacgtcaagctgtcagcaaggcttgttagctggcacccctggaactggcctgtggcacacattgccttggggaatgaagggaagaatagcaactccctctctgggcaaaggtgactgtgactgtgaccgagagccttgtagcaacttgattaaggcctggcatggagttgggagg

SEQ ID NO: 455872 - DNA, 493 bp, Homo sapiens
tgggagaaattgaggccaaaagagctaaactgctttgcacaatgaggtaaagggcatctttctgggtggaaaggttgtttggttattagtagtttttgtcgtttgtttgtctttggttgcagatgttgttgtggttttctttctctggaagatccgggaaatggggtggggcagtttgggctcagcgaagaaagggcaggaacggaagagcttgatgtgagcagggagtcctccgctgacatgagggtgggaggctggggggacagcagggtctctgaggaggggcttttggatatcaacatttgagttttcctgtaagacgtcaagctgtcagcaaggcttgttagctggcacccctggaactggcctgtggcacacattgccttggggaatgaagggaagaatagcaactccctctctgggcaaaggtgacygtgactgtgaccgagagccttgtagcaacttgattaaggcctggcatggagttgggagg

SEQ ID NO: 455873 - DNA, 584 bp, Homo sapiens
tcttttcctacttgatatacagtcttcactgaaatgtcacttgatggtgagtcagcaattctctcttcatgttcataacatttatatatacttagttacagataaatatataaaaagactataaaatagttgctccggtgctttcccctattaaagtactgaatcagattagcaccagctgcctccttgttttggctcatgtatatctattggtcgcatttaaaagcattattygacagagctgtttgacagaggcaccttgtgtagctcagctgctagttttcatccccagaaggttaagccatttctatgctaaaggtcatcacatttttcactcttattattctgcacttctatcaactttctatttgcttcttttgactatgccctgtagggggtactggctctggagtaagagagatctggaattgaatcacaaagttctgccttgtactggctgtgtggcattgaattagtcacttaacctctgcctttgtttgcaaaataggaaaatatttacttcactcagtaattgtaaggaataaaagaaaccctatttattgctagtttttactaacaactgt

SEQ ID NO: 455874 - DNA, 584 bp, Homo sapiens
tcttttcctacttgatatacagtcttcactgaaatgtcacttgatggtgagtcagcaattctctcttcatgttcataacatttatatatacttagttacagataaatatataaaaagactataaaatagttgctccggtgctttcccctattaaagtactgaatcagattagcaccagctgcctccttgttttggctcatgtatatctattggtcgcatttaaaagcattattcgacagagctgtttgacagaggcaccttrtgtagctcagctgctagttttcatccccagaaggttaagccatttctatgctaaaggtcatcacatttttcactcttattattctgcacttctatcaactttctatttgcttcttttgactatgccctgtagggggtactggctctggagtaagagagatctggaattgaatcacaaagttctgccttgtactggctgtgtggcattgaattagtcacttaacctctgcctttgtttgcaaaataggaaaatatttacttcactcagtaattgtaaggaataaaagaaaccctatttattgctagtttttactaacaactgt

SEQ ID NO: 455875 - DNA, 584 bp, Homo sapiens
tcttttcctacttgatatacagtcttcactgaaatgtcacttgatggtgagtcagcaattctctcttcatgttcataacatttatatatacttagttacagataaatatataaaaagactataaaatagttgctccggtgctttcccctattaaagtactgaatcagattagcaccagctgcctccttgttttggctcatgtatatctattggtcgcatttaaaagcattattcgacagagctgtttgacagaggcaccttgtgtagctcagctgctagttttcatccccagaaggttaagccatttctatgctaaaggtcatcacatttttcactcttattattctgcacttctatcaactttctatttgcttcttttgactatgccctgtagggggtactggctctggagtaagagagatctggaattgaatcacaaagttctgccttgtactggctgtgtggcaytgaattagtcacttaacctctgcctttgtttgcaaaataggaaaatatttacttcactcagtaattgtaaggaataaaagaaaccctatttattgctagtttttactaacaactgt

SEQ ID NO: 455876 - DNA, 531 bp, Homo sapiens
ctgtttgttttctggctgtttcaacaagttgcaacttgttggcttgcaacttcagaacaaaacgtaatagcttaacaggcactttgatttatttgttccttaatcatggaaaaagtaaactagtcagctattctttgtggcttttaataaaatgtttgtaattgcatgaaacaattatcaaatatttcttatkagcaaaagcaaggaaaaatgacctatggatgtaaattttgatcccaaatgttttctctcctttaattcaatggttattgaacaaccattatgtgcttggtagggcttaaacaatagcgttcatttgattttttttttttttttttttttttttttgggagacagaatctgagtcgcccaggctggagtgcagtggcaccatctcagctcactgcaacctccacctcctaggctcaagcaattctcctgccgcagcctcccacaatagtgatttataaatgattttttttaaaagaaaactttggcacccaggaatgataggacattaagggactaaag

SEQ ID NO: 455877 - DNA, 554 bp, Homo sapiens
agtattttgagaatgccatgtgataagaagcatcatgaataaccttgagaaccagtgagttcagtaaatgtatgttaaatgagtgaaaaaaggagaatgagaaggcatctttctagtgtaggtgagcacttaggttctctaacagaggccagatatgtacagttaaaatgaagtggaaagtcattcaattgcttagaaaytttagaaagactggaagacaaatatggacaaagtaatgcttttaaaaatccaatttttacctgacttattcagggctttgttttattttagaacagcagcattagcttagggtgaacatcttaatgagaacaaaaatgcattacagttagagcagcttgtgtcagaaatactgcatggtgaaaacaagaacctttagaatggccctattacattcactgtgccattctaaaataaaaactctctgtttaatatagagtcataatgtgtttacttaggaaaatactgacagcactttcatctatgtgacatgttcattttgagattcataaaactgtttttcagagagcagacat

SEQ ID NO: 455878 - DNA, 594 bp, Homo sapiens
tataaaatcaacatagaaaaatcagtagcatttaaacatgccaacagcaaacaatctgaaaaagaaaccaaaaaaagtaatcccattacaacaaccacaaataaaattaaatacctaggaattaagttaaccaaagcagtgaaagatctttataaggaaaatcataaaacactgatgaaataaattgaagaggacaccaaaaaatggaaagwtatttcttgtccatggattggaagaatcaatattgttaaaatgtccatactaccccaaacaatctaaagattctatgcaatctctatcaaagtaccaaacacatttctcagagaaatagtaaaagctatcttaaaatttatatggaaccacaaaagacccagaattgccacagctaccctgagcaaaaagaaaaactggaggaatcacattacctgatttcaaattattctacagagctatagtaaccaaaacagcatggtactggcataaaaacagacacacagatcaatagaacagaatagagaatccagaaataaatcaacacacctacaatgaactcatttttgacaaaggtaccaagaacatacacagaggaaaaga

SEQ ID NO: 455879 - DNA, 520 bp, Homo sapiens
tataaattccaccagagtaattcccctgaatttgatgacttttattttmccccaactctccgttaaataaagataaatttgggggatggaagaagagaagctaatgcctttgcaacactgacacctaacagaaaataaggccttttggtaatgttattaaggttaggcctctggaggatgagtcaaaagtgccaaaaaggatattgtgtttcaaaggaagtgagagggcgccaagaataaacttgatcttcctcatactcttatatagttagaaaccatgcaacaatcatttataaagctcaatttaccttactgtaaacattagtggaaaaacgagttacatacaccctctataatcaccgaatggtgtccataaaaaaggcagatttaatcattcttgagtaaagaaggaagttaaaaataaattttcaaaccttatcatatttactttaccaacaatcttgattacgtggcaactttgttgctataattttatgcagcagataaaggtagacgttcc

SEQ ID NO: 455880 - DNA, 520 bp, Homo sapiens
tataaattccaccagagtaattcccctgaatttgatgacttttattttcccccaastctccgttaaataaagataaatttgggggatggaagaagagaagctaatgcctttgcaacactgacacctaacagaaaataaggccttttggtaatgttattaaggttaggcctctggaggatgagtcaaaagtgccaaaaaggatattgtgtttcaaaggaagtgagagggcgccaagaataaacttgatcttcctcatactcttatatagttagaaaccatgcaacaatcatttataaagctcaatttaccttactgtaaacattagtggaaaaacgagttacatacaccctctataatcaccgaatggtgtccataaaaaaggcagatttaatcattcttgagtaaagaaggaagttaaaaataaattttcaaaccttatcatatttactttaccaacaatcttgattacgtggcaactttgttgctataattttatgcagcagataaaggtagacgttcc

SEQ ID NO: 455881 - DNA, 604 bp, Homo sapiens
cacaactacctatctaaaaggtcagtggctgtgcttggaatgaagtccaactcagttcattgaaaaatcctgaaattagagccagagaacctgcttcccattgtggtgttatcactggcaggctctgggacatcatgcaaactcataatctctttgtcctttgatttcctcattggcaaaatgatgaagagttagacaagctaattcccaaggtgccatctagtgctgaacatccatgatccagggagctcagagaacctgctcgagttccggattcgtatagtgcctaacatttatgcagatgagattcctcaaggggatgctagacttcatggaactttcctttgaaccatacattttggggtcttttaacatacagtttacaagtggatcttctagcccagcagtggtcttctgggtctccccagcactaattcagaacctagagaaaggcccatatgttggagtcatctctctgtgtattatctctacagtttccccacatatattgaggtttcttttttgatatgacaaaaygttgtatcattgtggccaaaagaaggtaaagagggctgtactagagtggtaaccttggtcacgaaca

SEQ ID NO: 455882 - DNA, 652 bp, Homo sapiens
ttttttccttgcaaatagtgtggtgcagtgttttacagcttgggattggagttaatctgattgaggctggagttttggctctcccacttcctagctgagtttctttggcaagttaatttacctctgattccttcatctttaaaatgggaataacaactagatgtcttactgttttggggaaaattaaataacgtgttcatgtaaaatgttttaccatagcttctgacacgtactaagaccacaataaattttaacatgtcttcattttcttcttctcttcctcctcttcctttttctaacagtctaaatgggggcaaaaggaacagagaaagggaattcttggtaggaggraaacattctctgatcacagtggcctggataggaatccaggcttctcatagtgacctgctctgatctcagtcataacatggtttagtaattgcctgtttatttgaccctctccctcatgagacttttgtctctgtgggcagggactttgcttgctaacattagcaggtccagcctcttgcacagtggcatgtatgacgaagtgcccaataaatatttgttaaataataataacaataaaaaataatagaagaattcctgatggtgatgtcagttgcataaattaaaaaaaaaaagaattcat

SEQ ID NO: 455883 - DNA, 639 bp, Homo sapiens
tatcaagacccaaccatatacatgatctacaaaaatactcacttaaaatataaggtacaagtaggcaaagattaaaaggataaacaaagatatactgccaagtcagtaaccataagaaatctggaagaacatatgaatatcagagacctggagttcagaataaagaatacagccaaaaagaggacatttaatcaagaagacataacaatgataaatgtgcatgtaaacaataagaggacttcaaggtatccaaaaaggaaactaacagaactgacaggagaaacagaaaaattgacaataataattkgagattttaacattcctttccgaataattggtagaacaagtagaaaggctagagaaaggataaagaagagtgaatagcactgtcagccaatctaattgaaatttataaaacactgcatccaaatgcagcagagtatacatccttttcaagtacacataaatatatatcacaatagatgctgagccattaaccaattattcttaaatttaaaaaaatctaaatttaaggtaaaattttaaatatacacagtatatttattccaaaatggaattaaattagaaattaacaagagaaagatatctgaaaaatacaacaaatagtagtcaaactac

SEQ ID NO: 455884 - DNA, 568 bp, Homo sapiens
actggatgaatgggtctgatrtgcgacaagataagagagggattggatgaatgggtctgatgtgaagaggataagaaagtcacagaagcagctgggtctgttatgccacactcacaataacataaaaagcccacatagcacagactaatttggcagtaatctgaaatagaaatgcattaatccaattacttcttcttggcagcccaaaccacctactacctacgagcttttagaatcttaactccagggctaggatgacaaaatgagttcccagaataaacaaatcccattttagggcaggatgagtcatcttgggaggcctttatggccaggggccatgtttcctccctgacgtgaatgaagccagcttcctactttgtgtctaggaagcctctccctcctctgtcctatcctctaaccagtgcccacagctttgaaagataaaccaaagtttgtcttttttcatttatagtcacagttgttgctcatctcatggacaagatttctgctatcctcagatgtgtagattagtcaaatatgggtgtgtaacatctcagatgattgaatt

SEQ ID NO: 455885 - DNA, 568 bp, Homo sapiens
actggatgaatgggtctgatatgcgacaagataagagagggattggatgaatgggtctgatgtgaagaggataagaaagtcacagaagcagctgggtctgttatgccacactcacaataacataaaaagcccacatagcacagactaatttggcagtaatctgaaatagaaatgcattaatccaattacttcttcttggcagcccaaaccacctactacctacgagcttttagaatcttaactccagggctaggatgacaaaatgagttcccagaataaacaaatcccattttagggcaggatgagtcatcttgggaggcctttatggccaggggccatgtttcctccctgacgtgaatgaagccagcttcctactttgtgtctaggaagcctctccctcctctgtcctatcctctaaccrgtgcccacagctttgaaagataaaccaaagtttgtcttttttcatttatagtcacagttgttgctcatctcatggacaagatttctgctatcctcagatgtgtagattagtcaaatatgggtgtgtaacatctcagatgattgaatt

SEQ ID NO: 455886 - DNA, 537 bp, Homo sapiens
tttttcttgaatatttccccttgtacatgttttttgtcagcttccttgccctacctcccatgatgcctttccttatccagaagacactggcacaaactctttcaagaaatgaaaactccctatcatggttcacatgcattgattggaaaagtattaactattgaaataaatgtaatatatayagaaacctaaagctactgttttgttcaacctaagataacaatgcttgctgtatttctttaaattagttacaggttcactctactaagtaattagattcatttaatataaaacaaccgttgctggattctgagaatggttcatgcgttggtcagggacttggctttcttggggagacacaattatttcctagggcagccttatagctcccagacagctagtgaggcccagcaacatgtggagtctggtttctagagctatggcttggttaatctgtattattttcatgaagtggttaacattccttatgaagaaatggaggctaagtgactcacagcagattagtagaaaagacct

SEQ ID NO: 455887 - DNA, 572 bp, Homo sapiens
ttgttcacctccagaagcatagttttgtttccttaccaacattctgtgagcagtaccacacagtggctaaaaggtcaggctcctgagtcaaatggacatggatttgagtcccagctcaaagatatactaccttccctaaagcactattttatcattatactatgaagaaagaacagtaacaactgtacagagttattttgagtatccaatgagataatgcatggaagtacatcataaaatatctaacacatagttctcaaatattagctattaataattagtgagtattgcaatggacatagcaccaacaagattcagagacacaaaaaataaaaactgctttcaaggaacttacagtcagcttgaggatataagatgagcatacatgaagcagtatggaayggcccacaacagcataaagtgtatgaaatacactaagttctgcatgagtttacaaagcccacagtgatgaaaagttgtgtaataattcaagatactatgggtaatcatcaatgaagtggtatatttaagtaggtgctagaagtggagatgaaagatgagtgtcttttaaa

SEQ ID NO: 455888 - DNA, 604 bp, Homo sapiens
ttttgcattcttctattttaatctgaagaggctgtccatttctaagatttacccattttctctagattttccagttcatgacatacaattctttgcatttatctaataatcttttgaatgcttgtggtgtcagttataatgtcttgttacatttcttattttatttatttaggtattcctcttcttgtgtattctagcctgcagtttaccaatttgtttatcttttcaaacaatcaatatttcatttcactgattttaaaatttttttctgctgtctatttcattttgttctgttcgtggttcagtcctgggagagtgtaygtccaggaatttatccatttcttctagattttctagtttatttgcatagagctatttatagtattctctgatagttgtttgtatttctgtgcagtcagtggtaatagcccccttatcatttcttattgtgttctttgaatattgtgatggttaatactgagtgtcaacttgattgaattgaaggatacaaagtattaatcctgggtgtgtctgtgacggtactgccaaaggagattaacatttgagtcactgggctgggaagggcagacccatccttaattgg

SEQ ID NO: 455889 - DNA, 536 bp, Homo sapiens
aattctgtgaaaaataacattggttgtttcataggaatagtgttgaatctgtagattgctttgggcagcaaaatttttcttgatggcaattgtaaatgtactgtataaatgtacgttataaatgtactacataaagtgaatgggtgaggcrtagtggctcatgcctgtaatcccagcactttgaggggccaaggtgggtggatcatatgaagtcgggagtacaagaccagcctggccaacatggtgaaaccccgtgtctactaaaaatacaaaaattagttgggtgtgatggcaaatgcctgtagtcccagctactcgggaggctgaggcaggagaattgcttgaactcaggagacaaggttgcagtgagctgagatcatgccactgcactccagcctgggcaacagagcaagactccgtctccaaaaaaaaaaaaaaaaagtgagtgatctttggtgagtgataaacttctacattgaaagctaagaggtggcactctattttcaataggaattggcagaaagggagaggagtgc

SEQ ID NO: 455890 - DNA, 606 bp, Homo sapiens
tatgaggttctgatgctctaacttaactttacagtctatttgttagttaataattatacatgaaactattatgtattaaartattgattgtttaatcttggattagtgtttacactagagtataaacttcatgaactagaggctatgtttatttttgcttaccattgtatccccagtacctgcccataataggtactcagaaaatatttgttgattgaacaattatgtgagattgcaaatgctattatcagtctcatttgatgtattactaagtcaaaatcaagaagaaaaatgtcttccttaagagcaacttaagcaagttgcttaagtttcagagtggtaggaccactctgaaaatcatatttcccagctcttgggttgtttgcataaaccagtgaagtaataaaattatgaatccttgtaatctatctcatatttattcttaaaatcattactagctgtgagagttattaaattcatacctaataataagacactccttttaagaaataaaatatttaatgcaagaacttaaaaacatttatcaataattattttttcctccaagaagcacccaagttctcaattgaataacctgcagcttcc

SEQ ID NO: 455891 - DNA, 553 bp, Homo sapiens
tgtttacagcagcacaattctcaattgccaaaatatgtaaccagcctaaatgcccatcaacaaacaaggataaaaaaatgtgatatgtgcatatgtgtgtatatatatatatatatatatgaataccattcagccatgaaaaggaacaaaatgatggcattcacaacaacttgtatggaattggagaccattattctaagtgaagtaactaaataatggaaaaccagatatcatatgttctcacttataagtgggaactaaggtatgaggaaacaaargcataagaatgatgtaatggactctggggacttggggggaggctggaagggggtgagtgataaaagacttcactttgggtgccacgtacacttcttgggtggtgggtgcaccaacattttagaaatcaccattaaggaacttattcttgtaaccatacaccacttgttccccaaaaactattgaaataataataataataaaaggattttatttgtaattatataccaacaaattggataacttaggagaaatggataaattcttaagacacata

SEQ ID NO: 455892 - DNA, 655 bp, Homo sapiens
gaacagcatggaggtaactgtccccatgattaaattgcctcccactgggtccttcccatgacacatggggattatggaaactacaattcaggatgagatttgggtggggacacaggcaaacaatatcaagcacttactaagtatcaggctttatactaagcactttgtatatgttaatgcttactacaattccttgaaatagttattataatacttagaatrtggagccagggttctgtcagaaacaagagcagataatttttattgagcacttactaagcaacaggctttatactaaaaactaaaaactttatatacattaatgttcactgcaattctttgaagtagttattattacaatatttataatgtatagccaggattctgccagaaagtgccatttcactgacatctgaaagatgagtgggacaacagacaaaaggtatgtttacaggagtagtgagaaagcttttcaggtagaaggaacaacatacacaattccccaagtcaaaaggcagcaggacacattccaggaagtaagaaggccagggtaacaggaacccaagagaaggagagaaccatgtgagaggaaactgaaatgtgggctggggtcccttctcataagaacttgtagtcaaaccaatgtgcttcccaa

SEQ ID NO: 455893 - DNA, 533 bp, Homo sapiens
agcacaagcagtctgtctactcaggacagcagccacttaaccccagatattgtccacagagcaaatctaggtatatgagccaaaggcacatgtatattggggagcaggaaacctgaagtttagggtaaatgatttctatcatgttctgtaggccacgcttgacagtcctgtaactgcacccttccaccttgctttggccaagttaacacagkttgggtgtggttgctcataaatattcccaaagagcaatgacgattcttttggattcctgaacacaccatctctgttgtgggagaactctggggtatgtttccagctctctcaatgaagttttaatcaaagcactgtttccttcccgttgttgcttttggaatggccttgttctctgagtcctagctttgacaacagcaactgtgctgaacttttccacagcagcttttggatttctgccccaccccctcccatctgcacgcccccatttcctctcttctctgttttggctctgcgtggctcttctgagtaaagtggctgaa

SEQ ID NO: 455894 - DNA, 407 bp, Homo sapiens
ccacttgagtatcctgaggactgaggctggccagcacacccattagaagagatcgtaacacaatgaaaagcaggcttgtgatgacggcagcacagwcagtgagtggcaggccctgagaattcccagaaaaagaaggagaggccttatatggggagagagggtgtatatatgcaggtgggagctaagagtgttggtaattgtggcatgaatggcaatataacctcattcacacccatggctgtgatgtcttgttcttgatttgtatttcctgatttgaatgaatatttcacttaagttatcacaccttggtttctcattgatcaaaagcagcatccctttagtcaggtggaagtttcccattaaggatgagaggaatggccttttcaccaaaagaatctgagaaccac

SEQ ID NO: 455895 - DNA, 498 bp, Homo sapiens
tcaatcatagcattgattgctaaagggcgggaaaaggaaataattytagatgcagttacattcacatataaacactgttcatgatttggataatatttaaactatcagtgcgtatgtgatcttaaatgtggctaatcttccaatattatatttaaaactccattcttagttattctgtagctgtactgtaaatcacccagccctgaatactttctctgggtcctttgatgtggcacttacgggcatttcagagacttgtaagtctggtatttgaagatgtggaattcaagaaaaatcttgttgaaatttgtcttcattattgtgagaggaccgagaaaatactgaatatgatttttaataaacatctaaacccacatcactcagataactgaggtattagctgctaagtcagggttcagagtaacctcaaggctggagaggccagaagaacatcagcatactttgaatgctaccatagaatacggtcatttagcctgg

SEQ ID NO: 455896 - DNA, 557 bp, Homo sapiens
ctcaaactcctggcctcaagtaatatacctttctcagcctcccaaagtgctgagattacaggcataagccaccaccctcaaccaagactttcttaaaccaaataaaaattaagtgagattacttgagcccaggtggtcaaggctgcagtgagcctgattgcaccactgcactccagcctaggtgacagaatgagactgtctcaaaaaataaaataaaatacaaattaaccctttatgacattcccagtaactttccctcctaagtgttccccacaagtctttgaattctgtttaattttcacataacatttaagacatttaagaacttatgtctgtctgtgtcatccctttatgtcaaaagatgtctttttgtcacttccagctggatctaccatgaaagacttstgaatccaggaagagagactgactgggcaacatgttattcaggaacaaaaagatttggactgtaacttaaaaatgatcaaataatagtgcatgcatcaagtgcaatgggaagctcttctggagagtgagagaagcttccagttaaggtgaca

SEQ ID NO: 455897 - DNA, 557 bp, Homo sapiens
ctcaaactcctggcctcaagtaatatacctttctcagcctcccaaagtgctgagattacaggcataagccaccaccctcaaccaagactttcttaaaccaaataaaaattaagtgagattacttgagcccaggtggtcaaggctgcagtgagcctgattgcaccactgcactccagcctaggtgacagaatgagactgtctcaaaaaataaaataaaatacaaattaaccctttatgacattcccagtaactttccctcctaagtgttccccacaagtctttgaattctgtttaattttcacataacatttaagacatttaagaacttatgtctgtctgtgtcatccctttatgtcaaaagatgtctttttgtcacttccagctggatctaccatgaaagacttctgaatccaggaagagagactgactgggcaacatgttattcaggwacaaaaagatttggactgtaacttaaaaatgatcaaataatagtgcatgcatcaagtgcaatgggaagctcttctggagagtgagagaagcttccagttaaggtgaca

SEQ ID NO: 455898 - DNA, 457 bp, Homo sapiens
ggcttctggtcttgcataagacttcattgaggcctaatgggctatgcaggtctactgtccaaagtacagaggttattcctagtgtctttaataytactgtccctttaggcaagattatccttatgataagggagactgaattaagctattttggctgaggcatatttttataaattcatccaattagcttcccttgttgtagttttggctcgccaaacattgttctgattataatttagcatcccatataatttcatctgcagggagagtctgtactaggcatgacgatgcttacatatcagcccatgtgactgcaagagtctcagtataatttgataacatggcactcagattctagacattattctctgtgtgcttagtgagtgtgatgacataaccttcagaaagattcatcctttctcacatattgataaatcaacttttacatctacaaagt

SEQ ID NO: 455899 - DNA, 457 bp, Homo sapiens
ggcttctggtcttgcataagacttcattgaggcctaatgggctatgcaggtctactgtccaaagtacagaggttattcctagtgtctttaatattactgtccctttaggcaagattatccttatgataagggagactgaattaagctattttggctgaggcatatttttataaattcatccaattagcttcccttgttgtagttttggctcrccaaacattgttctgattataatttagcatcccatataatttcatctgcagggagagtctgtactaggcatgacgatgcttacatatcagcccatgtgactgcaagagtctcagtataatttgataacatggcactcagattctagacattattctctgtgtgcttagtgagtgtgatgacataaccttcagaaagattcatcctttctcacatattgataaatcaacttttacatctacaaagt

SEQ ID NO: 455900 - DNA, 457 bp, Homo sapiens
ggcttctggtcttgcataagacttcattgaggcctaatgggctatgcaggtctactgtccaaagtacagaggttattcctagtgtctttaatattactgtccctttaggcaagattatccttatgataagggagactgaattaagctattttggctgaggcatatttttataaattcatccaattagcttcccttgttgtagttttggctcgccaaacattgttctgattataatttagcatcccatataatttcatctgcagggagagtctgtactaggcatgacratgcttacatatcagcccatgtgactgcaagagtctcagtataatttgataacatggcactcagattctagacattattctctgtgtgcttagtgagtgtgatgacataaccttcagaaagattcatcctttctcacatattgataaatcaacttttacatctacaaagt

SEQ ID NO: 455901 - DNA, 577 bp, Homo sapiens
acatggcactcagattctagacattattctctgtgtgcttagtgagtgtgatgacataaccttcagaaagattcatcctttctcacatattgataaatcaacttttacatctacaaagttgagagccagaaattaaaaccttattaattcactaaggcatccctatgacggcagtcttccaactagctccattctggggcactctgacatcatygtacactttccaatgaaagcagggagtgtatgtgattaaagggagagccctgtggcactcctgaaaaatctcccctcccagttcacattgacttattaaccaacactcatgatcatgtgaaactctagaactggatctgggtgcctggcaggatgacatggtgtgaggctcaagcagcactgtgggaattcaagcatctgtttatttctgagagaaaaagtgtaaagcaaaataatatcttttaacaaacatttgtatttgactaaaaaggaagcaagcacttagaatttctgaatttgctaattgctcttctgagctgagaatatctgtgttgaatattagtcattatccagatttggcaca

SEQ ID NO: 455902 - DNA, 577 bp, Homo sapiens
acatggcactcagattctagacattattctctgtgtgcttagtgagtgtgatgacataaccttcagaaagattcatcctttctcacatattgataaatcaacttttacatctacaaagttgagagccagaaattaaaaccttattaattcactaaggcatccctatgacggcagtcttccaactagctccattctggggcactctgacatcatcrtacactttccaatgaaagcagggagtgtatgtgattaaagggagagccctgtggcactcctgaaaaatctcccctcccagttcacattgacttattaaccaacactcatgatcatgtgaaactctagaactggatctgggtgcctggcaggatgacatggtgtgaggctcaagcagcactgtgggaattcaagcatctgtttatttctgagagaaaaagtgtaaagcaaaataatatcttttaacaaacatttgtatttgactaaaaaggaagcaagcacttagaatttctgaatttgctaattgctcttctgagctgagaatatctgtgttgaatattagtcattatccagatttggcaca

SEQ ID NO: 455903 - DNA, 577 bp, Homo sapiens
acatggcactcagattctagacattattctctgtgtgcttagtgagtgtgatgacataaccttcagaaagattcatcctttctcacatattgataaatcaacttttacatctacaaagttgagagccagaaattaaaaccttattaattcactaaggcatccctatgacggcagtcttccaactagctccattctggggcactctgacatcatcgtacactttccaatgaaagcagggagtgtatgtgattaaagggagagccctgtggcactmctgaaaaatctcccctcccagttcacattgacttattaaccaacactcatgatcatgtgaaactctagaactggatctgggtgcctggcaggatgacatggtgtgaggctcaagcagcactgtgggaattcaagcatctgtttatttctgagagaaaaagtgtaaagcaaaataatatcttttaacaaacatttgtatttgactaaaaaggaagcaagcacttagaatttctgaatttgctaattgctcttctgagctgagaatatctgtgttgaatattagtcattatccagatttggcaca

SEQ ID NO: 455904 - DNA, 505 bp, Homo sapiens
tgtgatgacataaccttcagaaagattcatcctttctcacatattgataaatcaacttttacatctacaaagttgagagccagaaattaaaaccttattaattcactaaggcatccctatgacggcagtcttccaactagctccattctggggcactctgacatcatcgtacactttccaatgaaagcagggagtgtatgtgattaaagggagagccctgtggcactcctgaaaaatctcccctcccagttcacattgacttattaaccaacactcatgatcatgtgaaactctagaactggatctgggtgcctggcaggatgacatggtgtgaggctcaagcagcactgtgggaattcaagcatctgtttatttctgagagaaaaagtgtaaagcaaaataatatcttttaacaaacrtttgtatttgactaaaaaggaagcaagcacttagaatttctgaatttgctaattgctcttctgagctgagaatatctgtgttgaat

SEQ ID NO: 455905 - DNA, 498 bp, Homo sapiens
tcaatcatagcattgattgctaaagggcgggaaaaggaaataattttagatgcagttacattcacatataaacactgttcatgatttggataatatttaaactatcagtgcgtatgtgatcttaaatgtggctaatcttccaatattatatttaaaactccattcttagttattctgtagctgtactgtaaatcacccagccctgaatactttctctgggtcctttgatgtggcacttacgggcatttcagagacttgtaagtctggtatttgaagaygtggaattcaagaaaaatcttgttgaaatttgtcttcattattgtgagaggaccgagaaaatactgaatatgatttttaataaacatctaaacccacatcactcagataactgaggtattagctgctaagtcagggttcagagtaacctcaaggctggagaggccagaagaacatcagcatactttgaatgctaccatagaatacggtcatttagcctgg

SEQ ID NO: 455906 - DNA, 498 bp, Homo sapiens
tcaatcatagcattgattgctaaagggcgggaaaaggaaataattttagatgcagttacattcacatataaacactgttcatgatttggataatatttaaactatcagtgcgtatgtgatcttaaatgtggctaatcttccaatattatatttaaaactccattcttagttattctgtagctgtactgtaaatcacccagccctgaatactttctctgggtcctttgatgtggcacttacgggcatttcagagacttgtaagtctggtatttgaagatgtggaattcaagaaaaatcttgttgaaatttgtcttcattattgtgagaggaycgagaaaatactgaatatgatttttaataaacatctaaacccacatcactcagataactgaggtattagctgctaagtcagggttcagagtaacctcaaggctggagaggccagaagaacatcagcatactttgaatgctaccatagaatacggtcatttagcctgg

SEQ ID NO: 455907 - DNA, 498 bp, Homo sapiens
tcaatcatagcattgattgctaaagggcgggaaaaggaaataattttagatgcagttacattcacatataaacactgttcatgatttggataatatttaaactatcagtgcgtatgtgatcttaaatgtggctaatcttccaatattatatttaaaactccattcttagttattctgtagctgtactgtaaatcacccagccctgaatactttctctgggtcctttgatgtggcacttacgggcatttcagagacttgtaagtctggtatttgaagatgtggaattcaagaaaaatcttgttgaaatttgtcttcattattgtgagaggacmgagaaaatactgaatatgatttttaataaacatctaaacccacatcactcagataactgaggtattagctgctaagtcagggttcagagtaacctcaaggctggagaggccagaagaacatcagcatactttgaatgctaccatagaatacggtcatttagcctgg

SEQ ID NO: 455908 - DNA, 367 bp, Homo sapiens
tgccagaaaaagggcatccctccatttttgtagagagcctttctttatgaagactaatgaccacattagttagtcagtcagtcaataatacttaccaaatgtcagtagagcmgaagtgaacaccaacagaaaatcacattttacaaatgcaatttacttggtatcctaacatgccatgtcataataattattgaggcttttcttctctgctgcattggtctaatgaatgtggctagaaaaatatgggtgcccatgtagcctcctggaagcacctgtatgacttttctagaagcgaggttcctggataaagatgaatttttaaaagctggaatgaatgagcagcaatagcaggaggagaaaagtgagt

SEQ ID NO: 455909 - DNA, 575 bp, Homo sapiens
ctttctttatgaagactaatgaccacattagttagtcagtcagtcaataatacttaccaaatgtcagtagagcagaagtgaacaccaacagaaaatcacattttacaaatgcaatttacttggtatcctaacatgccatgtcataataattattgaggcttttcttctctgctgcattggtctaatgaawgtggctagaaaaatatgggtgcccatgtagcctcctggaagcacctgtatgacttttctagaagcgaggttcctggataaagatgaatttttaaaagctggaatgaatgagcagcaatagcaggaggagaaaagtgagtgagggctctccaagaagccatctggcaggctaagggttctgagggaagctctggtttcagaagcaactcaggaattacttctgtcatattaggatgggatggtaggagattgggaactctagggactagaggtcatttaatttcctgtctacaatccttagaagaggttttgagacttgcaacctaggaccttaactaatcatcttccctcagaattgatagaattctttattatacatgttaata

SEQ ID NO: 455910 - DNA, 575 bp, Homo sapiens
ctttctttatgaagactaatgaccacattagttagtcagtcagtcaataatacttaccaaatgtcagtagagcagaagtgaacaccaacagaaaatcacattttacaaatgcaatttacttggtatcctaacatgccatgtcataataattattgaggcttttcttctctgctgcattggtctaatgaatgtggctagaaaaatatgggtgcccatgtagcctcctggaagcacctgtatgacttttctagaagcgaggttcctggataaagatgaatttttaaaagctggaatgaatgagcagcaatagcaggaggagaaaagtgagtgagggctctccaagaagccatctggcaggctaagggttctgagggaagctctggtttcagaagcaactcaggaattacttctgtcatattaggatgggatggtaggagattgggaactctagggactagaggtcatttaatttcctgtctacaatccttagaagaggttttgagacttgcaacctaggaccttaactartcatcttccctcagaattgatagaattctttattatacatgttaata

SEQ ID NO: 455911 - DNA, 594 bp, Homo sapiens
taaatctctgtggctcaacagggagctctgcctgtcatggtcacttgggacccaggctttgggtataaggctacagcacatggaaaacgtatgaatgtctctcagattcttaaagcttctgctggaagtgacatgtcattctgctcacagttcattggctaaatgagtcacgtggctctctctaacttcaaggatggtatgaaattgcaatcctaccatgtttctagaaggagaaccagccctaatcacaatgctacatgtttatagcttgccttatagagtttactgtattctcctggtataattttcttacatgctcaactggagaggaagctcttaaatagaaaaaaatcacagtaaatttcctttaagagatctattttacaactctggcatgatggagcacaatggagtccttagtaatggactccatctcttccatcagatcaaatcttgagaactgaagttaaaatttgaataatgaaaccaaaggaaaaaaattaaatgaattttaagacaattgagataagaasaactgtggcatcagcataattcaatttaataatgtattaaatattttgcagaaaagtgaaa

SEQ ID NO: 455912 - DNA, 246 bp, Homo sapiens
tgcctggaaccttttctcccatataaacatagagattgctcttgcctgtccttcaagtctattcttaaatgtcccattctctgtgaagctttcctgcccaccctatttaamttacagacttcactcccaattccccatctactttaagagtcttcatttatcattccttgacaaactgtaaatatacatgttcacttttttatcgtctgtctccaaatactggaatgttaagttctgtaatgtcag

SEQ ID NO: 455913 - DNA, 565 bp, Homo sapiens
agtggaaaaagaaagttgaggaaatcttaaaacatgttattgagcttaaagttgcaaaaataaactcatgtaccataattcatgagtagaaaaatagactagtggaataacataaaaataaaaacaatgcttacataaaatgttgtamctgatttggatgtcattagaaatcagtaagtaaatagatggacaatgtaatgaaagatgctaggcaaataatgtggtagggagaataatggccctcaaagatgcccatgcctaaccctggaacctgtgaatatgttacactgaatgcaataaaggctcatcagatgtgattaaggatgcaaaccgagatggagagatcttcctgggttatccagatgggcccagtctaatcacatgaattcttaaaaatggagaacctttcttagctgagtccagagagagatgtgacaatgaaagaatggtcagagaaatgtgacattgccagctttaaaaagagagaggagaggcaatgagaaaaggaatgctgatgttctctagaagatagaaaaggccaggatatggattctaccctagccgc

SEQ ID NO: 455914 - DNA, 565 bp, Homo sapiens
agtggaaaaagaaagttgaggaaatcttaaaacatgttattgagcttaaagttgcaaaaataaactcatgtaccataattcatgagtagaaaaatagactagtggaataacataaaaataaaaacaatgcttacataaaatgttgtacctgatttggatgtcattagaaatcagtaagtaaatagatggacaatgtaatgaaagatgctaggcaaataatgtggtagggagaataatggccctcaaagatgcccatgcctaaccctggaacctgtgaatatgttacactgaatgcaataaaggctyatcagatgtgattaaggatgcaaaccgagatggagagatcttcctgggttatccagatgggcccagtctaatcacatgaattcttaaaaatggagaacctttcttagctgagtccagagagagatgtgacaatgaaagaatggtcagagaaatgtgacattgccagctttaaaaagagagaggagaggcaatgagaaaaggaatgctgatgttctctagaagatagaaaaggccaggatatggattctaccctagccgc

SEQ ID NO: 455915 - DNA, 549 bp, Homo sapiens
  misc_feature (1)...(549): n = A,T,C or G
aatgtaagtatcagcaaaacatattgtttagtgaaaaagaagctgaagaagaatatatacaatatggttacrtttatatgaagtccaaaaacttgcaaaataaagaaatgtatttagaaatagatgcacatgtgagaaaaactagaagaaaattaatgaaaggataaaagggatagcagtaattctgagtagttgaagggannnnnnnnnnnnnnnnnnnnnnnnnnnnnnnnnnnnnnnnnnnnnnnnnnnnnnnnnnnnnnnnnnnnnnnnnnnnnnnnnnnnnnnnnnnnnnnnnnnntttcatgtatttaatgtattttttgcataattaaatattatgcaataaaaatgagaaaacaaaaaagtagaaaatgataaattacaataaatggagaaaaaattataatctagttgagtaatggtatattacatagctattttcttaagtagatgtatgtacatgatgtatgcacgattgtacatacatgttcttaattatatataaatatatatgtacatatttttaatataaaatactaaacaaag

SEQ ID NO: 455916 - DNA, 572 bp, Homo sapiens
gactgggtaatttataaaggaaagaagtttaattggctcacagttcagcacagcttgggaggcctcaggaaatctacaatcatggcggaagacaaagagaagcaagccagcttcttcgcaaggcagcatgaagaagtgccgagcaaaggggaaagaatcccttataaaaccatcaaatctcgtgagaactcactatcacaagaacagcacaggggaaactgcccccatgattcaattacctccacctggtctctcccttgacctgtggggattatggggrctatggggattacaattcaagatgagattcaggtggggatacaaagcctaaccatatcagtaggcatgtgttgaattttaaactcagagaaaaatactagtgtttttataggattcttactaaagaaaaaccagaaagtaataaaccatctacgctaagacataaaattcagttgtttagttacaagatagaatgtggccttgtaagaaggcaaaattaacttctaacatacaaagccttagagaagattcaagtgactgacggatcttaaacagagctattattacaactc

SEQ ID NO: 455917 - DNA, 572 bp, Homo sapiens
gactgggtaatttataaaggaaagaagtttaattggctcacagttcagcacagcttgggaggcctcaggaaatctacaatcatggcggaagacaaagagaagcaagccagcttcttcgcaaggcagcatgaagaagtgccgagcaaaggggaaagaatcccttataaaaccatcaaatctcgtgagaactcactatcacaagaacagcacaggggaaactgcccccatgattcaattacctccacctggtctctcccttgacctgtggggattatgggggctatggggattacaattcaagatgagattcaggtggggatacaaagcctaaccatatcagtaggcatgtrttgaattttaaactcagagaaaaatactagtgtttttataggattcttactaaagaaaaaccagaaagtaataaaccatctacgctaagacataaaattcagttgtttagttacaagatagaatgtggccttgtaagaaggcaaaattaacttctaacatacaaagccttagagaagattcaagtgactgacggatcttaaacagagctattattacaactc

SEQ ID NO: 455918 - DNA, 484 bp, Homo sapiens
tgaagaagtgccgagcaaaggggaaagaatcccttataaaaccatcaaatctcgtgagaactcactatcacaagaacagcacaggggaaactgcccccatgattcaattacctccacctggtctctcccttgacctgtggggattatgggggctatggggattacaattcaagatgagattcaggtggggatacaaagcctaaccatatcagtaggcatgtgttgaattttaaactcagagaaaaatactagtgtttttataggattcttactaaagaaaaaccagaaagtartaaaccatctacgctaagacataaaattcagttgtttagttacaagatagaatgtggccttgtaagaaggcaaaattaacttctaacatacaaagccttagagaagattcaagtgactgacggatcttaaacagagctattattacaactcaaactgcagtaaaatatcctcagcaacatagatgtgtgtg

SEQ ID NO: 455919 - DNA, 484 bp, Homo sapiens
tgaagaagtgccgagcaaaggggaaagaatcccttataaaaccatcaaatctcgtgagaactcactatcacaagaacagcacaggggaaactgcccccatgattcaattacctccacctggtctctcccttgacctgtggggattatgggggctatggggattacaattcaagatgagattcaggtggggatacaaagcctaaccatatcagtaggcatgtgttgaattttaaactcagagaaaaatactagtgtttttataggattcttactaaagaaaaaccagaaagtaataaaccatctacgctaagacataaaattcagttgtttagttacaagatagaatgtggccttgtaagaaggcaaaattaacttctaacatacaaagccttagagaagattcaagtgactgacggatcttaaacagagctattattacaactcraactgcagtaaaatatcctcagcaacatagatgtgtgtg

SEQ ID NO: 455920 - DNA, 584 bp, Homo sapiens
aaacttgctaactcaatctcagtgtctgatgacagtaacatacaatccaggttttaatcatcagaaatcacagtcctattgtcttctgcacagacccaaacacacttggaggtcatgttcaatatgaatacctcacagagaaggaaatttacacrcgagaagtacatctgcagaaagccagctggcatgtcaaccattcaaaaactcagcgtgttcgggataaagaagactcaggaagacaagtatgaagcataatctgtgacattccatgcggcagacattagacacatacaagagagttgttggaaagcggaatttatcttcatataaacaacactgagctaaatctcaatatttcagatctctagaactatccatcagtgaaatggattgcaaatagaaagagtaataccatgtcacttaagaatacaatcatggacgaggctgccacctgctgttgggggccactgcagaagaaattccagaacactggactggagagcacctcactttccttacagctctaagtttctgactcagtgacctgattcagtaccatatacacaaagacccacttacacaaa

SEQ ID NO: 455921 - DNA, 584 bp, Homo sapiens
aaacttgctaactcaatctcagtgtctgatgacagtaacatacaatccaggttttaatcatcagaaatcacagtcctattgtcttctgcacagacccaaacacacttggaggtcatgttcaatatgaatacctcacagagaaggaaatttacacacgagaagtacatctgcagaaagccagctggcatgtcaaccattcaaaaactcagsgtgttcgggataaagaagactcaggaagacaagtatgaagcataatctgtgacattccatgcggcagacattagacacatacaagagagttgttggaaagcggaatttatcttcatataaacaacactgagctaaatctcaatatttcagatctctagaactatccatcagtgaaatggattgcaaatagaaagagtaataccatgtcacttaagaatacaatcatggacgaggctgccacctgctgttgggggccactgcagaagaaattccagaacactggactggagagcacctcactttccttacagctctaagtttctgactcagtgacctgattcagtaccatatacacaaagacccacttacacaaa

SEQ ID NO: 455922 - DNA, 584 bp, Homo sapiens
aaacttgctaactcaatctcagtgtctgatgacagtaacatacaatccaggttttaatcatcagaaatcacagtcctattgtcttctgcacagacccaaacacacttggaggtcatgttcaatatgaatacctcacagagaaggaaatttacacacgagaagtacatctgcagaaagccagctggcatgtcaaccattcaaaaactcagcgtgttckggataaagaagactcaggaagacaagtatgaagcataatctgtgacattccatgcggcagacattagacacatacaagagagttgttggaaagcggaatttatcttcatataaacaacactgagctaaatctcaatatttcagatctctagaactatccatcagtgaaatggattgcaaatagaaagagtaataccatgtcacttaagaatacaatcatggacgaggctgccacctgctgttgggggccactgcagaagaaattccagaacactggactggagagcacctcactttccttacagctctaagtttctgactcagtgacctgattcagtaccatatacacaaagacccacttacacaaa

SEQ ID NO: 455923 - DNA, 584 bp, Homo sapiens
aaacttgctaactcaatctcagtgtctgatgacagtaacatacaatccaggttttaatcatcagaaatcacagtcctattgtcttctgcacagacccaaacacacttggaggtcatgttcaatatgaatacctcacagagaaggaaatttacacacgagaagtacatctgcagaaagccagctggcatgtcaaccattcaaaaactcagcgtgttcgggataaagaagactcaggaagacaagtatgaagcataatctgtgacattccatgcggcagacattagacacatacaagagagttgttggaaagcggaatttatcttcatataaacaacactgagctaaatctcaatatttcagatctctagaactatccatcagtgaaatggattgcaaatagaaagagtaataccatgtcacttaagaatacaatcatggacgaggctgccacctgctgttgggggccactgcagaagaaattccagaacactggactggagagcacctcactttccttacagctctaagtttctgactcagtgacctgattcastaccatatacacaaagacccacttacacaaa

SEQ ID NO: 455924 - DNA, 586 bp, Homo sapiens
ctccgctactgacatctaggcattacacaattcatctcttcatacttaacctttgaagtttgctacttctcagagagactaatgagtagtgagcaaayatcctgaagctgagaatgcttctacctcctctcaaaacaacagaatattcatcaaaacacagcagttctgcacttaactttaggccttttctaacacctcgtttcttggcagtaactgtggccagaatagctctttccacagagaaaggaccttttgaaaggatagggtctctagatagaaaagcaaatgcctcattccagaaggtcttcaagaagaaaatgttgtggtgataactaactgattataatctattctgtgaaaaaagcttatgaaagagtagatgtgtgtatctagtacataagagctgaaggtcaatatatatatatagatatatacacacactcaaataaataatagttatctctaactagagaaattctagttgccttatattttcttcttttccttactatattttctacaataaacatgtgtttttaacaagaaaagtcttttctggtgtgctttttaattttctttgtttaag

SEQ ID NO: 455925 - DNA, 586 bp, Homo sapiens
ctccgctactgacatctaggcattacacaattcatctcttcatacttaacctttgaagtttgctacttctcagagagactaatgagtagtgagcaaacatcctgaagctgagaatgcttctacctcctctcaaaacaacagaatattcatcaaaacacagcagttctgcacttaactttaggccttttctaacacctcrtttcttggcagtaactgtggccagaatagctctttccacagagaaaggaccttttgaaaggatagggtctctagatagaaaagcaaatgcctcattccagaaggtcttcaagaagaaaatgttgtggtgataactaactgattataatctattctgtgaaaaaagcttatgaaagagtagatgtgtgtatctagtacataagagctgaaggtcaatatatatatatagatatatacacacactcaaataaataatagttatctctaactagagaaattctagttgccttatattttcttcttttccttactatattttctacaataaacatgtgtttttaacaagaaaagtcttttctggtgtgctttttaattttctttgtttaag

SEQ ID NO: 455926 - DNA, 586 bp, Homo sapiens
ctccgctactgacatctaggcattacacaattcatctcttcatacttaacctttgaagtttgctacttctcagagagactaatgagtagtgagcaaacatcctgaagctgagaatgcttctacctcctctcaaaacaacagaatattcatcaaaacacagcagttctgcacttaactttaggccttttctaacacctcgtttcttggcagtaactgtggccagaatagctctttccacagagaaaggaccttttgaaaggatagggtctctagatagaaaagcaaatgcctcattccagaaggtcttcaagaagaaaatgttgtggtgataactaactgattataatctattctgtgaaaaaagcttatgaaasagtagatgtgtgtatctagtacataagagctgaaggtcaatatatatatatagatatatacacacactcaaataaataatagttatctctaactagagaaattctagttgccttatattttcttcttttccttactatattttctacaataaacatgtgtttttaacaagaaaagtcttttctggtgtgctttttaattttctttgtttaag

SEQ ID NO: 455927 - DNA, 576 bp, Homo sapiens
gctgctcccaaaactccaggtatttttaaccttataaacctccagaataatgagaccactgggttcagtaaattgctttgttttgaagcagtgttagacaaagtgggagactagaagataaatctgtcaatgacatgtcctttaagactacttagattttgttgaatttgtggatcattccttacttgagcaaatggtaaattaactytctcttttctctctctctctagctggcacactttttccagtagccattctacttggtatgcttacttatcagctgtcctccaggggcctcacattagatgtttctcttgactaaccaaacatgacacacagctgaagtcagaaaaaccagattgataatttcactcaaactattttccttcattctaacaatttactggaatacacaattgtgactatttttagccataggaactcatagaaagaccaacttcattagacctacaaaatcgaattgtgtaacagtatatgcagtatgtgtaggaataaaaagcatttctcaaatatgcagtactggattttgcaaaagcaccttacactttgctataa

SEQ ID NO: 455928 - DNA, 354 bp, Homo sapiens
gtgtaacagtatatgcagtatgtgtaggaataaaaagcatttctcaaatatgcagtactggattttgcaaaagcaccttacacttwgctataaaggagtggaaaacacaaagatgagtaactgcacctttcaaaagactagagctataccagtaatacaaaggtggaaacaaataatgatgagatgacaaaggctgagtgttttctatttggaagctatgttgttgaattatttatgtatataatttcatgcaatcttcatgttatgggggtgttctaatccactgtgactctgtccttaaataaaagggagatttgggcatagagacaggcacacagggaggatgccatatga

SEQ ID NO: 455929 - DNA, 354 bp, Homo sapiens
gtgtaacagtatatgcagtatgtgtaggaataaaaagcatttctcaaatatgcagtactggattttgcaaaagcaccttacactttgctataaaggagtggaaaacacaaagatgagtaactgcacctttcaaaagactagagctataccartaatacaaaggtggaaacaaataatgatgagatgacaaaggctgagtgttttctatttggaagctatgttgttgaattatttatgtatataatttcatgcaatcttcatgttatgggggtgttctaatccactgtgactctgtccttaaataaaagggagatttgggcatagagacaggcacacagggaggatgccatatga

SEQ ID NO: 455930 - DNA, 354 bp, Homo sapiens
gtgtaacagtatatgcagtatgtgtaggaataaaaagcatttctcaaatatgcagtactggattttgcaaaagcaccttacactttgctataaaggagtggaaaacacaaagatgagtaactgcacctttcaaaagactagagctataccagtaatacaaaggtgkaaacaaataatgatgagatgacaaaggctgagtgttttctatttggaagctatgttgttgaattatttatgtatataatttcatgcaatcttcatgttatgggggtgttctaatccactgtgactctgtccttaaataaaagggagatttgggcatagagacaggcacacagggaggatgccatatga

SEQ ID NO: 455931 - DNA, 354 bp, Homo sapiens
gtgtaacagtatatgcagtatgtgtaggaataaaaagcatttctcaaatatgcagtactggattttgcaaaagcaccttacactttgctataaaggagtggaaaacacaaagatgagtaactgcacctttcaaaagactagagctataccagtaatacaaaggtggaaacaaataatgatgagatgacaaaggctgagtgttttctatttggaagctatgttgttgaattatttatgtatataatttcatgcaatcttcatgttatgggggtgttctaatccactgtgactctgtccttaaataaaagggagatttggrcatagagacaggcacacagggaggatgccatatga

SEQ ID NO: 455932 - DNA, 461 bp, Homo sapiens
agggctaattttatgaaagctttgggaagttttaagaaaaagaaaagctatttttcaaggtacatgcgtgtacgcatgcgtgtgtgtgtgtgtgtgtgtgtgtgtgtgtgtgtgttaaaagacagaagaaagagggagacctaggaagactatgagacactaagagaaaaattaaggtaaaaaagacgcacacttagaaaaacacacatagggaggagggaggaggttaagacattttactatgtgctgtgaatggaaactacaaccatttctgatatatgcaatatatatacatatatacacacatatacatatgtatttaaagatttaaattacattttctctttttttagagakgtggtttcactatgtcactctgcccaggctgcagtacagtggttgttcacagtcatgatcatagcacattatagtcttgaactcctgggctcaagcaatcctcc

SEQ ID NO: 455933 - DNA, 461 bp, Homo sapiens
agggctaattttatgaaagctttgggaagttttaagaaaaagaaaagctatttttcaaggtacatgcgtgtacgcatgcgtgtgtgtgtgtgtgtgtgtgtgtgtgtgtgtgtgttaaaagacagaagaaagagggagacctaggaagactatgagacactaagagaaaaattaaggtaaaaaagacgcacacttagaaaaacacacatagggaggagggaggaggttaagacattttactatgtgctgtgaatggaaactacaaccatttctgatatatgcaatatatatacatatatacacacatatacatatgtatttaaagatttaaattacattttctctttttttagagatrtggtttcactatgtcactctgcccaggctgcagtacagtggttgttcacagtcatgatcatagcacattatagtcttgaactcctgggctcaagcaatcctcc

SEQ ID NO: 455934 - DNA, 461 bp, Homo sapiens
agggctaattttatgaaagctttgggaagttttaagaaaaagaaaagctatttttcaaggtacatgcgtgtacgcatgcgtgtgtgtgtgtgtgtgtgtgtgtgtgtgtgtgtgttaaaagacagaagaaagagggagacctaggaagactatgagacactaagagaaaaattaaggtaaaaaagacgcacacttagaaaaacacacatagggaggagggaggaggttaagacattttactatgtgctgtgaatggaaactacaaccatttctgatatatgcaatatatatacatatatacacacatatacatatgtatttaaagatttaaattacattttctctttttttagagatgtggtttcactatgtcactctgcccaggctgcagtacagtggttgttcacagtcatgatcatagcacattatagycttgaactcctgggctcaagcaatcctcc

SEQ ID NO: 455935 - DNA, 479 bp, Homo sapiens
catatgccaccatgtccacccttatgctttttaaagtgaaaaaccatactaagaatgaggcagctcaacttartaataaaaacatttcgaatgtaaagaaatttacaaaagaaaaacaatcaaccccattaaaattgggcaaagggaatgaacagacagttttcaaaagaatacatgcatgcagccaacaaacatacaaaaaaaaagttcaacatcactgatcattagagaaatgcaaatcaaaaccataatgagataccatctcacaccagtcagaatagctatcattaaaaagtcaaaaaataacagatgctagtgaggctatggagaaaagggaatgcttatacactgttggtgggtgtgcaaatcagttcaatcattgtgcaaagaatagtgattcctcaaagagctaaaagcagagctaccattcgacccagtaatcccactactgggtatatacccagatgaatataaaccat

SEQ ID NO: 455936 - DNA, 479 bp, Homo sapiens
catatgccaccatgtccacccttatgctttttaaagtgaaaaaccatactaagaatgaggcagctcaacttagtaataaaaacatttcgaatgtaaagaaatttacaaaagaaaaacaatcaaccccattaaaattgggcaaagggaatgaacagacasttttcaaaagaatacatgcatgcagccaacaaacatacaaaaaaaaagttcaacatcactgatcattagagaaatgcaaatcaaaaccataatgagataccatctcacaccagtcagaatagctatcattaaaaagtcaaaaaataacagatgctagtgaggctatggagaaaagggaatgcttatacactgttggtgggtgtgcaaatcagttcaatcattgtgcaaagaatagtgattcctcaaagagctaaaagcagagctaccattcgacccagtaatcccactactgggtatatacccagatgaatataaaccat

SEQ ID NO: 455937 - DNA, 479 bp, Homo sapiens
catatgccaccatgtccacccttatgctttttaaagtgaaaaaccatactaagaatgaggcagctcaacttagtaataaaaacatttcgaatgtaaagaaatttacaaaagaaaaacaatcaaccccattaaaattgggcaaagggaatgaacagacagttttcaaaagaatacatgcatgcagccaacaaacatacaaaaaaaaagttcaacatcactgatcattagagaaatgcaaatcaaaaccataatgagataccatctcacaccagtcagaatagctatcattaaaaagtcaaaaaataacagatrctagtgaggctatggagaaaagggaatgcttatacactgttggtgggtgtgcaaatcagttcaatcattgtgcaaagaatagtgattcctcaaagagctaaaagcagagctaccattcgacccagtaatcccactactgggtatatacccagatgaatataaaccat

SEQ ID NO: 455938 - DNA, 479 bp, Homo sapiens
catatgccaccatgtccacccttatgctttttaaagtgaaaaaccatactaagaatgaggcagctcaacttagtaataaaaacatttcgaatgtaaagaaatttacaaaagaaaaacaatcaaccccattaaaattgggcaaagggaatgaacagacagttttcaaaagaatacatgcatgcagccaacaaacatacaaaaaaaaagttcaacatcactgatcattagagaaatgcaaatcaaaaccataatgagataccatctcacaccagtcagaatagctatcattaaaaagtcaaaaaataacagatgctagtgaggctatggagaaaagggaatgcttatacactgttggtgggtgtgcaaatcagttcaatcattgtgcaaagaatagtgattcctcaaagagctaaaagcagagctaccaytcgacccagtaatcccactactgggtatatacccagatgaatataaaccat

SEQ ID NO: 455939 - DNA, 354 bp, Homo sapiens
ggagaaaagggaatgcttatacactgttggtgggtgtgcaaatcagttcaatcattgtgcaaagaatagtgattcctcaaagagctaaaagcagagctaccattcgacccagtaatcccactactgggtatatacccagatgaatataaaccattctaccataaagacacatgcatacaaatgttcattgcagcactgttcacaatagcaaaagtataggatcaacctaartgcccatcaatgacagattggataaagagaatgtggtacatatacaccatggaatactatgccgccactaaaaaatgatatcatgtcttttgctggaatatggatggaccttctattatcctt

SEQ ID NO: 455940 - DNA, 446 bp, Homo sapiens
tactttctgcttatactcaattgtttgtactgacattaacatcccaaatccttagcatggcctacaaggccctgagcaatgtggcacctgctgaagcctgctgcctcatttaataactctttgtctctttcccagatccagccactctaacattttttagttcctggaccaagacaagctcttcccagaacctgacctttgtacctgttctttattcctggagtatttttcccctgacaaattacttatcatctatcataawtcaggttaaatggcactaactcagggaaggcttccctaactgcctcccttctccaaacaaattaggaacaattatatggccacatagtatcgaatcaagtttataattttaaaataattgggagattttgttgtttaacacttgttttcactataagactgtaattacatgcaagtaagaacca

SEQ ID NO: 455941 - DNA, 435 bp, Homo sapiens
ggcttccttgctttctggcaaaaaagatgttccaggatcaatatactgcaccatacatggagtcagccatttctctagggaaccttgattccttttagtagagaacacagtttgaggtcttggactgaatgacttttgtgaacctcctctcctgagactacagcctgcatccctgcatatagccygtttggagctcttgctgggcaccaacagatctcctaaaactgctatatagttctgcctcactcttacaaagattcatctcttgagagttttgtgctctacccccagatgtggtctttctggttctgaagcttttgcttcagtcaccctgaattttgccagccctatgcatgctataccttggattgccaacttgccctcactgaagccagtttctctggttagaatagttgccccaacccatgcccagta

SEQ ID NO: 455942 - DNA, 576 bp, Homo sapiens
gatttcaacatgccgtgtaactatttgttttctatttaaccgatttttatcccttcttttattaattgctggatcattttatattattattttttctgttttagatcataagtttagttttcatgggtatgctagaaattacaacatgtagtctttatttattagaatctaacatatgtaattacattatacttccctgaaaatgcaaggatcttacaccatttgaacctctatttactacttctcatatttttaaatattgttgtgatgggtttttttaataattttttttaagttccgaggtatatgtgcaggatgtgcaggatacggataataattaggcaaaatattacagcaattagaattttacaaccagaattccacattgtggaagttattctctaatgacaagtcaagggggaaatgtatgcttttcttaagaaaaatgttacttttatgttaatgtttctggtaatgcacagcgacacctaatggasgcaaaccaatattgcaatccattggtgtaacaggtatcaaactctgttatggcctataggatccccattaacagtgata

SEQ ID NO: 455943 - DNA, 532 bp, Homo sapiens
tttcttcggctatcttatttgttcccttttgatgtcccctrcaatgcatccctcctattgctcatggaagaaaaactgaggataataacctgctaattttgtggtgatattttataggaggtccattggcggttttccttttaaatggcagcatgagcatggagagctaagagagcgtacttggagtaggtataaatgttagctacctttccttgcttaattcaagtgctcttgtaagtgctattagctcagtcaattaagtgcttgtgcctggggagagacattatttagagtgactactgcttatcctgccttatgtacttcttgctttactggctgtttgttaactaagagctccccctacaggacagtgataatgccacatcatgtggagtgtaaacagttaaattatttcctagggttaacctggaggctttttttgctagtagagctgttatgacgatggtttggaaacacgtgtaaacaataagttctaactgcaactaaggttgagaaaaatattggatcagag

SEQ ID NO: 455944 - DNA, 532 bp, Homo sapiens
tttcttcggctatcttatttgttcccttttgatgtcccctgcaatgcatccctcctattgctcatggaagaaaaactgaggataataacctgctaattttgtggtgatattttataggaggtccattggcggttttccttttaaatggcagcatgagcatggagagctaagagagcrtacttggagtaggtataaatgttagctacctttccttgcttaattcaagtgctcttgtaagtgctattagctcagtcaattaagtgcttgtgcctggggagagacattatttagagtgactactgcttatcctgccttatgtacttcttgctttactggctgtttgttaactaagagctccccctacaggacagtgataatgccacatcatgtggagtgtaaacagttaaattatttcctagggttaacctggaggctttttttgctagtagagctgttatgacgatggtttggaaacacgtgtaaacaataagttctaactgcaactaaggttgagaaaaatattggatcagag

SEQ ID NO: 455945 - DNA, 532 bp, Homo sapiens
tttcttcggctatcttatttgttcccttttgatgtcccctgcaatgcatccctcctattgctcatggaagaaaaactgaggataataacctgctaattttgtggtgatattttataggaggtccattggcggttttccttttaaatggcagcatgagcatggagagctaagagagcgtacttggagtaggtataaatgttagctacctttccttgcttaattcaagtgctcttgtaagwgctattagctcagtcaattaagtgcttgtgcctggggagagacattatttagagtgactactgcttatcctgccttatgtacttcttgctttactggctgtttgttaactaagagctccccctacaggacagtgataatgccacatcatgtggagtgtaaacagttaaattatttcctagggttaacctggaggctttttttgctagtagagctgttatgacgatggtttggaaacacgtgtaaacaataagttctaactgcaactaaggttgagaaaaatattggatcagag

SEQ ID NO: 455946 - DNA, 532 bp, Homo sapiens
tttcttcggctatcttatttgttcccttttgatgtcccctgcaatgcatccctcctattgctcatggaagaaaaactgaggataataacctgctaattttgtggtgatattttataggaggtccattggcggttttccttttaaatggcagcatgagcatggagagctaagagagcgtacttggagtaggtataaatgttagctacctttccttgcttaattcaagtgctcttgtaagtgctattagctcmgtcaattaagtgcttgtgcctggggagagacattatttagagtgactactgcttatcctgccttatgtacttcttgctttactggctgtttgttaactaagagctccccctacaggacagtgataatgccacatcatgtggagtgtaaacagttaaattatttcctagggttaacctggaggctttttttgctagtagagctgttatgacgatggtttggaaacacgtgtaaacaataagttctaactgcaactaaggttgagaaaaatattggatcagag

SEQ ID NO: 455947 - DNA, 490 bp, Homo sapiens
ggagtgacacagtggatcacacctgcaatctcagcactttgggagaccaaggcaggagaatcacttgagcctaggagttcaagaccagcctggacaacatagtgagaccctgtctctacgaaaaaaaaattttttttwaaaaaaacccaggtgtggtggtatgtgcctgtcatcctagctactctggaggcaaaggtgggagaattgcttgagcctgagaggtcaaggatgcagtaaaccgtgatcgcactactgcactcaagcctggacaacaacagagtgagaccttgtcaaaaaaacaaaagaagaagaaagaaagaaagaaaaaaaggaaggaaggaaggaagaaagaaaggaaggaaggaaggaaaaaaatagagagcaaccaaaaaggaagccatcatgtcttttatcatttgtctcagtttgtctcagatgtgatgtgtcatcacttctgccatattctattagtcacacagttgcagcctgg

SEQ ID NO: 455948 - DNA, 555 bp, Homo sapiens
tgcatattaaaaagtgcttccttttccatttatcttctgagttattggggttgcaattaggggtctttaccagaattgcctctctcccaattgggaatggtgtttttgctatttcttyactttccctatctgctttcttcccttttggtgtattataggagatatattgctcatctccaacattttctgttgcttgcagagctgcctgctttttagctgctgtgagggtctggtttaggaacagcataacatccctccatggcaggtgaaatacctgagttaaattttggaaagcctctaaatacctatcagggtcattagaaaactggcctaagtctccatttatttgcctaaggtcctataatgagaagggaacttgaaggggccccaaataaggggaatcctcagatggtttccctggaggttacttctctaatttgggggaactattcttttttgggcctgcctgatatgattgttaaaagagttgggttgatcttacgatgtttgcaagggtttagtaaaaatgccatgcacttgtgcaaaagaaaatga

SEQ ID NO: 455949 - DNA, 555 bp, Homo sapiens
tgcatattaaaaagtgcttccttttccatttatcttctgagttattggggttgcaattaggggtctttaccagaattgcctctctcccaattgggaatggtgtttttgctatttctttactttccctatctgctttcttcccttttggtgtattataggagatatattgctcatctccaacattttctgttgcttgcagagctgcctgmtttttagctgctgtgagggtctggtttaggaacagcataacatccctccatggcaggtgaaatacctgagttaaattttggaaagcctctaaatacctatcagggtcattagaaaactggcctaagtctccatttatttgcctaaggtcctataatgagaagggaacttgaaggggccccaaataaggggaatcctcagatggtttccctggaggttacttctctaatttgggggaactattcttttttgggcctgcctgatatgattgttaaaagagttgggttgatcttacgatgtttgcaagggtttagtaaaaatgccatgcacttgtgcaaaagaaaatga

SEQ ID NO: 455950 - DNA, 595 bp, Homo sapiens
gtttcagagtgcactccagaggggtgcaagctgaagataatctgttacccatctagaaaaagatgtgagagttcttttagtctccttcctttccatatgacccagggtgaaggacaagacaggggagcatccttctggctgttttctctccctggttcttgggtcccagcaccctgttaamtatgccacctatggtcgaaggcgtggtcctccaagctatggaaccagatgaactaagtgatgctttacccacacaaccttagcttatccaccttgtgtcattcctcttttcacttcctaaacctgtgtgatctgcccggctccccaaaatatgagagactgtgtcatttttgggcaagcctcctttaatggaggcaatgtgccaaattgcctgctattatggcccatgctaaagcatttaccttagaaaaatggttccagttaacttccaaacttagaatccccttactaagtaccattttagtaggaaacagattggatgtcttaaaagaacataggaactgaggggctattttcatgctgatgggacaatatggagactaaaatttggctatggaagacattttactcctaa

SEQ ID NO: 455951 - DNA, 595 bp, Homo sapiens
gtttcagagtgcactccagaggggtgcaagctgaagataatctgttacccatctagaaaaagatgtgagagttcttttagtctccttcctttccatatgacccagggtgaaggacaagacaggggagcatccttctggctgttttctctccctggttcttgggtcccagcaccctgttaactatgccacctatggtcgaaggcgtggtcctccaagctatggaaccagatgaactaagtgatgctttacccacacaaccttagcttatccaccttgtgtcattcctcttttcacttcctaaacctgtgtratctgcccggctccccaaaatatgagagactgtgtcatttttgggcaagcctcctttaatggaggcaatgtgccaaattgcctgctattatggcccatgctaaagcatttaccttagaaaaatggttccagttaacttccaaacttagaatccccttactaagtaccattttagtaggaaacagattggatgtcttaaaagaacataggaactgaggggctattttcatgctgatgggacaatatggagactaaaatttggctatggaagacattttactcctaa

SEQ ID NO: 455952 - DNA, 595 bp, Homo sapiens
gtttcagagtgcactccagaggggtgcaagctgaagataatctgttacccatctagaaaaagatgtgagagttcttttagtctccttcctttccatatgacccagggtgaaggacaagacaggggagcatccttctggctgttttctctccctggttcttgggtcccagcaccctgttaactatgccacctatggtcgaaggcgtggtcctccaagctatggaaccagatgaactaagtgatgctttacccacacaaccttagcttatccaccttgtgtcattcctcttttcacttcctaaacctgtgtgatctgcccggctccccaaaatatgagagactgtgtcatttttgggcaagcctcctttaatggaggcaatgtgccaaattgcctgctattatggcccatgctaaagcatttaccttagaaaaatggttccrgttaacttccaaacttagaatccccttactaagtaccattttagtaggaaacagattggatgtcttaaaagaacataggaactgaggggctattttcatgctgatgggacaatatggagactaaaatttggctatggaagacattttactcctaa

SEQ ID NO: 455953 - DNA, 556 bp, Homo sapiens
gcacaccctgaactgatgcacctctcttcgagtctaaggctccttcctgatgatgcccccttcagcctgctccaaccactgcctctccttgcaatgcccttacccacatccaaacagacaccacccccattatcacctacctcwtgctctttctctactcttcttggctccatgacagttgcaatctttcagaacatctgattttagtaacatgtttggaaaaaagctttcaaattgaattaattaattaattcacattacagagttaataacagcttaacagtgtataaatatttatattgaaatggagaacttcgtctcaataaacatttggcttttgacaaagtgaaattttctgggatattggcaggtatgtccaagggggtaaatacatctgaattctaatatatagttgagggttttctgtcttgactcttaactgcaaactctttgagaacaagaactatctctaattcctttctaaattctcaatggatctgggaaaaaacttgtcaagtactaaatatttttagggatcttttcctagaatcaaaaa

SEQ ID NO: 455954 - DNA, 556 bp, Homo sapiens
gcacaccctgaactgatgcacctctcttcgagtctaaggctccttcctgatgatgcccccttcagcctgctccaaccactgcctctccttgcaatgcccttacccacatccaaacagacaccacccccattatcacctacctcatgctctttctctactcttcttggctccatgacagttgcaatctttcagaacatctgattttagtaacrtgtttggaaaaaagctttcaaattgaattaattaattaattcacattacagagttaataacagcttaacagtgtataaatatttatattgaaatggagaacttcgtctcaataaacatttggcttttgacaaagtgaaattttctgggatattggcaggtatgtccaagggggtaaatacatctgaattctaatatatagttgagggttttctgtcttgactcttaactgcaaactctttgagaacaagaactatctctaattcctttctaaattctcaatggatctgggaaaaaacttgtcaagtactaaatatttttagggatcttttcctagaatcaaaaa

SEQ ID NO: 455955 - DNA, 556 bp, Homo sapiens
gcacaccctgaactgatgcacctctcttcgagtctaaggctccttcctgatgatgcccccttcagcctgctccaaccactgcctctccttgcaatgcccttacccacatccaaacagacaccacccccattatcacctacctcatgctctttctctactcttcttggctccatgacagttgcaatctttcagaacatctgattttagtaacatgtttggaaaaaagctttcaaattgaattaattaattaattcacattacagagttaataacagcttaacagtgtataaatatttatattgaaatggagaacttcgtctcaataaacatttggcttttgacaaagtgaaattttctgggatattggcaggtatgtccaagggggtaaatacatctgaattctaatatatagttgagggttttctgtcttgactcttaactgcaaactctttgagaayaagaactatctctaattcctttctaaattctcaatggatctgggaaaaaacttgtcaagtactaaatatttttagggatcttttcctagaatcaaaaa

SEQ ID NO: 455956 - DNA, 556 bp, Homo sapiens
gcacaccctgaactgatgcacctctcttcgagtctaaggctccttcctgatgatgcccccttcagcctgctccaaccactgcctctccttgcaatgcccttacccacatccaaacagacaccacccccattatcacctacctcatgctctttctctactcttcttggctccatgacagttgcaatctttcagaacatctgattttagtaacatgtttggaaaaaagctttcaaattgaattaattaattaattcacattacagagttaataacagcttaacagtgtataaatatttatattgaaatggagaacttcgtctcaataaacatttggcttttgacaaagtgaaattttctgggatattggcaggtatgtccaagggggtaaatacatctgaattctaatatatagttgagggttttctgtcttgactcttaactgcaaactctttgagaacaagaactatctctaattcctytctaaattctcaatggatctgggaaaaaacttgtcaagtactaaatatttttagggatcttttcctagaatcaaaaa

SEQ ID NO: 455957 - DNA, 635 bp, Homo sapiens
accatgagttgagactcacccaaaggagctaataattgatgagcctgtgaatcatacttcttaggtattagctactactgaacttcagtgggcagtctgttctgatgatcttggtgagacttccagaaaccgtttaaaagagaacaaggcttctggaaccaaaaattgaaaaatgaaagaatgtgtactgccaggatataaacctaatccaaccatagaagttagaccctatgattgaggcttgggagagttaaataacattgggtttttgaagctctaaacttcaaaatctctgacccatgttaagaaagcaaatttcttgaatgtccttgattagctagcaatatgtggattaatcacttaggaagaattcgttaacggtgacctggccatttgttttttgaaagtgatctttgctgtgtggatgcagcactgttatggtgtcccagttgccattctaacccaaattaggtctttacctcagtcagttagctagctggtcataacaggattggtgaacttcaaaattagtcttcataatgttaaaagccacarttcatcatgaacataagacagctatgaatacctatatatcaagttacacatctgtaatttttttttttttttagatggag

SEQ ID NO: 455958 - DNA, 635 bp, Homo sapiens
accatgagttgagactcacccaaaggagctaataattgatgagcctgtgaatcatacttcttaggtattagctactactgaacttcagtgggcagtctgttctgatgatcttggtgagacttccagaaaccgtttaaaagagaacaaggcttctggaaccaaaaattgaaaaatgaaagaatgtgtactgccaggatataaacctaatccaaccatagaagttagaccctatgattgaggcttgggagagttaaataacattgggtttttgaagctctaaacttcaaaatctctgacccatgttaagaaagcaaatttcttgaatgtccttgattagctagcaatatgtggattaatcacttaggaagaattcgttaacggtgacctggccatttgttttttgaaagtgatctttgctgtgtggatgcagcactgttatggtgtcccagttgccattctaacccaaattaggtctttacctcagtcagttagctagctggtcataacaggattggtgaacttcaaaattagtcttcataatgttaaaagccacagttcatcatgaacataagacagctatgaatacctatrtatcaagttacacatctgtaatttttttttttttttagatggag

SEQ ID NO: 455959 - DNA, 597 bp, Homo sapiens
agggtttcaccattttgtgcaggctggtttcgaactcctgagctcaagcaatttgcctgcgtcagcctcccaaagtgctaggattacaggcgtgagccactgtgctcagccaaggtttatttctcatatgcagcatttatttagattttgyttatgtagtctgaaaatctttgtgctttggttagagcatttaaaccacttatatttaatgtaatcactagaatatttggatttcaacatgccgtgtaactatttgttttctatttaaccgatttttatcccttcttttattaattgctggatcattttatattattattttttctgttttagatcataagtttagttttcatgggtatgctagaaattacaacatgtagtctttatttattagaatctaacatatgtaattacattatacttccctgaaaatgcaaggatcttacaccatttgaacctctatttactacttctcatatttttaaatattgttgtgatgggtttttttaataattttttttaagttccgaggtatatgtgcaggatgtgcaggatacggataataattaggcaaaatattacagcaattagaatttt

SEQ ID NO: 455960 - DNA, 576 bp, Homo sapiens
gatttcaacatgccgtgtaactatttgttttctatttaaccgatttttatcccttcttttattaattgctggatcattttatattattattttttctgttttagatcataagtttagttttcatgggtatgctagaaattacaacatgtagtctttatttattagaatctaacatatgtaattacattatacttccctgaaaatgcaaggatcttacaycatttgaacctctatttactacttctcatatttttaaatattgttgtgatgggtttttttaataattttttttaagttccgaggtatatgtgcaggatgtgcaggatacggataataattaggcaaaatattacagcaattagaattttacaaccagaattccacattgtggaagttattctctaatgacaagtcaagggggaaatgtatgcttttcttaagaaaaatgttacttttatgttaatgtttctggtaatgcacagcgacacctaatggaggcaaaccaatattgcaatccattggtgtaacaggtatcaaactctgttatggcctataggatccccattaacagtgata

SEQ ID NO: 455961 - DNA, 505 bp, Homo sapiens
atggtattgttcattttcaaaattgtgtctctcgctgatatatagtcaaacaaatgatttttaaaattgctcctgtgttctgtggccttgctaaaggcagttatcagttccagcagcctttattagatttcttagaatttttccatatacaattgtgtcttttgcaaataaaggttatttacttctttcttttcaagtgtatacctaggtttctttttttmttgccttatttcactagctagaataatcggttcaatactgaatagaaacagcaagagtaaacattcttggctttttcctgataacagaggaaaattcatttaagtcttttttgtgtgcattccatttctttcttttccgtttatattatcatttacatatctgtacaaaaatataatagctcttttaaaattattttttgctagttccatcatctttaacattttggggtctatatttgttgggttttaaaaaatgactgattttgagtcgcaatattctgcta

SEQ ID NO: 455962 - DNA, 505 bp, Homo sapiens
atggtattgttcattttcaaaattgtgtctctcgctgatatatagtcaaacaaatgatttttaaaattgctcctgtgttctgtggccttgctaaaggcagttatcagttccagcagcctttattagatttcttagaatttttccatatacaattgtgtcttttgcaaataaaggttatttacttctttcttttcaagtgtatacctaggtttctttttttattgccttatttcactagctagaataatcggttcaatactgaatagaaacagcaagagtaaacattcttggctttttcctgataacagaggaaaattcatttaagtcttttttgtgtgcattccatttctttcttttccgtttatattatcatttacatatctgtacaaaaatataatagctcttttaaaattattttttgctagttccatcatctttaacattttggggtctatatttgttgggttttwaaaaatgactgattttgagtcgcaatattctgcta

SEQ ID NO: 455963 - DNA, 585 bp, Homo sapiens
ggaactgcagtgattgctatttctcttctggatctagccacctagcagagcaactggtctccaagctggtactggggagtgtctgcaaagtgtactgtgatgtggtctgtcttcaggtctctcagccatggataccaacacctgcactggtggaggtagcaggggagtgaagtggactctgtgagggtccttggytgtatttttgttaagtgaactgattttgtgttggttggcctccagccaggaggtggcactttgaagagctcatcagctgtggtaggatacaagctttccccagatctgcctttgggtaagcattcaggtttctcaggcagtgggcagggccctagatcccccaagagattatgtcctttgtcttcagccaccaggatgggtagagaaagaccatcaggtggggccagtgttagccaggtttgggggtgtggttcccaggccaatggagctatgttcccagggggattatggctgcctctgctgcctcacacagatcaccagggaactgagggaaagccagcagccacaggcctcacccagctttcacacagcctgcagcctgaaaggctg

SEQ ID NO: 455964 - DNA, 475 bp, Homo sapiens
ataaaaccgtcatgctgctacattagccaatgttaaaatccaacatccaaggaggagtttgcttggctgtgttgacaaataagagtgacttctaagccttttaaatgtgataytgtaaggggttgaatgatacattactaaaaacacaagttggaattaaggaattatgtggggtttttttttttgcttttttttttttttttttttttgcctcatcttaactggtaagtctttgatcttaggcaaactacagcatttagggaatttagtgcactcacttccaaaatgtaggtattccatttggagagtctaagaatatttgcagctctaatattctagaagtgtatattccctgaataggaatggtaaccctcaatttgcaccactcactgatcataacgtgaagttttaccattagattgtcattctgatccataattcaaacaacattgccaccagtgaactgtgatggcaa

SEQ ID NO: 455965 - DNA, 569 bp, Homo sapiens
tgggagaaaatatttgcaaattgtgcagctgactaaggtctcagatttagaatctatcaggaacttaattcaacaaataattccattatttccattataaaattggcaaaacacatgtatgaaccctttccaaaagatgacatacaagtcaraaaatatatgaaaaaatgttcatcaacaccaatcaccagagaaatgaaaatcaaaatcacaatgagatatcatttcacaccagtcagaatgtcttttattaaaaagtcaaaaaataacagatactggaaaggctgaagagaaaaatgaatgcttatacattgttggtgagaatgtaagttagttcagccactggggagagcagtttggagattttctcaaagaacttaaaacacaactaccatttgacccagcaatcccattattgggtatatatccaaaagaaaataaatctttctaccaaaaaggcacgtgcacttgtatattctaatagatgatgtccgttaataagcaaatggataaactgtgttatatccagaaaattgaatatgattcagcattgaaaattattagctatc

SEQ ID NO: 455966 - DNA, 593 bp, Homo sapiens
tatatgacattctggaaaaatttataactgtggaaatgataaaaagatcagtggttcccaggagctaggagggaggggatgataagaaacagaacacaaggattttcgggcagtaaaatatttcatatgatactctaatgatgtataaatgtcattacacatttatctgagcccatagaaactacaccagcaagagagaaccctaatgtcaactatagaccccaggaggtaaagatgtgtcaatgtaggttcatcagctgtatcaaatgtacctctctggtgtgggatgttgatggtgggggaggctatgcatatgtagagcaggggatatatagaactctgtgctttctgctcaattttgctgttaaataaactgctttaaaaatatctattaatttttttataaaacaaagcaccattaaacgaacactaaacgtgggtcttaataactagaaatatttgtcttcaggatgacagttaaagatgacagaattcagtaaaatttyatagaatataattctgttgagcaaaacagtagataactgacatctgaacaaaattggtaagtgtattaaaatcaaacataagctacc

SEQ ID NO: 455967 - DNA, 523 bp, Homo sapiens
ttacaaattgttttaaaatagccattatgcattagttctctttagttgagatgtaagttttcctttggaaaacagataatataaaataaattagctaaagtcaagtctttttctgtttatgcaaaggagraagaataataatataataatgttattggtagggaaacatatattacatatattgcagaatgtacaatctcttctttgttaggaaatcactcactgctgaaagacaaattgatgacaactttgttattgtaaagtacttctgatatcacactattcccatcgtgatctttaccagcatattactgtgtctgaacccaaatgtagtttaatgataagctttctagaagaactgaaaggagatttaatttagtcccagaaaaaatctatttctatataatcacagaaaatcaaaatctatatagtcaaggaaagtctgtttctactaatgactcaaagatggttatttctataaatagaaaacatacaattcttatggaaagtgtcataaaactat

SEQ ID NO: 455968 - DNA, 619 bp, Homo sapiens
gtataaataaactgtggtacatccagccaatggaatattattcagtgctaaaaagcaatgagctgtcaagccatgaaaagacatgaagcaaacttaaatgcttattgctcagtgaaaggagccwatctgaaaaggctacatagtgcgtaatccaactatatgacatctaaaaagggcaaaactatggagacagtaaaaagatccatggttgttagggttaggaagcagggagggatggtaagccagaacacagagattgtttagggccgtgaaaattatctgtatggtactataatggtggatacatggtattataaatttgtccaacccatagactacataagagggaggttcatcagttgcaacaaatgtaccactctggtgggggatactgacaatgagggaatcagtgagtctgtgggggaagacggtatatgggaaatctgtactttctcctcaattttgctgtgaatctaaaaccgctttaagaaataaagactattaaaaatgtaaaagcagttgtatcaccagacatcatagcttatttgaagcaactgtaatttaacatggttttggtgcaagcatggataattctaccagtgaatgataacagagagtg

SEQ ID NO: 455969 - DNA, 619 bp, Homo sapiens
gtataaataaactgtggtacatccagccaatggaatattattcagtgctaaaaagcaatgagctgtcaagccatgaaaagacatgaagcaaacttaaatgcttattgctcagtgaaaggagccaatctgaaaaggctacatagtgcrtaatccaactatatgacatctaaaaagggcaaaactatggagacagtaaaaagatccatggttgttagggttaggaagcagggagggatggtaagccagaacacagagattgtttagggccgtgaaaattatctgtatggtactataatggtggatacatggtattataaatttgtccaacccatagactacataagagggaggttcatcagttgcaacaaatgtaccactctggtgggggatactgacaatgagggaatcagtgagtctgtgggggaagacggtatatgggaaatctgtactttctcctcaattttgctgtgaatctaaaaccgctttaagaaataaagactattaaaaatgtaaaagcagttgtatcaccagacatcatagcttatttgaagcaactgtaatttaacatggttttggtgcaagcatggataattctaccagtgaatgataacagagagtg

SEQ ID NO: 455970 - DNA, 619 bp, Homo sapiens
gtataaataaactgtggtacatccagccaatggaatattattcagtgctaaaaagcaatgagctgtcaagccatgaaaagacatgaagcaaacttaaatgcttattgctcagtgaaaggagccaatctgaaaaggctacatagtgcgtaatccaactatatgacatctaaaaagggcaaaactatggagacagtaaaaagatccatggttgttagggttaggaagcagggagggatggtaagccagaacacagagattgtttagggccgtgaaaattatctgtatggtactataatggtggatacatggtattataaatttgtccaacccatagactacataagagggaggttcatcagttgcaacaaatgtaccactctggtgggggatactgacaatgagggaatcagtgagtctgtgggggaagacggtatatgggaaatctgtactttctcctcaattttgctgtgaatctaaaaccgctttaagaaataaagactaytaaaaatgtaaaagcagttgtatcaccagacatcatagcttatttgaagcaactgtaatttaacatggttttggtgcaagcatggataattctaccagtgaatgataacagagagtg

SEQ ID NO: 455971 - DNA, 565 bp, Homo sapiens
ccattgataaaatgcttatagcattttcatttgatttttgtttgtttgtttgtttgtttgagatagggtctcttctcactctgttgcccaggctggagtgcagcggtacaatcgtggctcactgtagcgttaacctcctgggcacaagcgatactcccaccttagctttttgagtacctaggacttcaggtgtgtgccaccatgcttgactaatattttatattttgtggagatgatttctcactgcgttgcctaggcaggtcttgaacttaagcaatcctcctgcctcagcctcccaaagtgctgggattacagacatgagccgccacaactggtaaacagttttatttttaatagctcaaaactaggaasaatctaaatgtccttcagtgggggaaaggttaaactatggtacatccataccattaaatactattctgcaataaaaaggaatgaatctatgcaagaactgggatggatcttaaggacattatgctgtgtgaagaaaagctcaaaagattacatattttattattccatatatatataaaactctaaaaatgtc

SEQ ID NO: 455972 - DNA, 614 bp, Homo sapiens
actctacttttccatctatcctaacagtttagaataataataatatctaaaagtgcaaatggcttcatttatattacccttaatacacttaaagaggaaaaatgtcttcaggtaggtcaaagggaaaattgttacatcattaatctgaattttaaccaggtgcgaaytaggagtgagaatggaggacatcaaatagaataattagaactagagatgggcagaagcaactggggaaccaaagctcaggttcaatagtgcaggaccacaaaattgacagttagagactgattttgcttgtactgataattgtacattatgcctctcagtattttgccattgttctaaaagtcaagatagtatgttattttttcaagatggtggattggaggcttttaacatgcctcagccacttggaaataccaagacagtgcagaaagataaactctgtgagttttaattcaagaaggaaaatgggaatccatcagaatactgaaggatatcccagatccctgggaaaacatgagccaacaagcccctgtgatggcatctgactgataaaagggagtgaagccagagtacatgagagaagcagacagtctccctctgtgactcac

SEQ ID NO: 455973 - DNA, 594 bp, Homo sapiens
tgaactataaatagactctgttgcaataatttttaacattagcatacagtctttgcagaatgaaccaaaacatacacatatatgcaatacacatatattttattgaaaaataaaataaaaatagaacatttgttctgtattaaaaattcattagcatatttgtgggaataaaatatattcataagctgttttaaatatttaatgcaattttactaccaaataaattcattaaagagtaaccttaaatggatgttttttcatttaataaatatgccaagtttaattatcccaatctaaatagtatagaaggtagtgaacattaaattcactgtaaaattatttttatgttgtattaccttcattgatgtcaatttaattaaagyatacattggcaaggagcaaaatgacttaattatttaaaacaaaacttaatcattgctagaacaataattaagtgcccccaaatgacccattctttactttcctacaaaactattgcatggaaataaattaagaaaaaccataattagtgcattttaaaatatttttatccaataaatagaaaattaaaatcaaccatttaagaatatgctc

SEQ ID NO: 455974 - DNA, 607 bp, Homo sapiens
caatttattggcatagatttgtgttccatattgagtgggacccayattatccttctaattttgaatggcctataataacaacacttctttcatgtctgatagaggtaactgatgtttctttctgtctatttttcctatctttagatatttaataatgttagtgatttttttagaaaaaagaattatcttctgattatattaatttgtttgttgcttttctttttactatttcagtaatttctgcataggcctttactatttctgtctttctgtttgctgagggttttcatctagtttttttctagtttaagtgcacttcataaaatttgaaaaccttctcttctaacacagaatttaaagctataacatttcccactatgtacaaatttggttatgttgaattttttttatcatttagttcaaaatattttctagtttctcttataattttttaacaaacattttgaattccaaatgttagggaattttttatttattttactattagtggtatctaattgtattgacctgtaatgagagaaaaaatattacataatgcttttattttaattggtcaaatactctgtaatataagaatttgtttttt

SEQ ID NO: 455975 - DNA, 608 bp, Homo sapiens
ttttaaactcattttagtcttaatggatattagggtggtttccacattttggttttgttttgtgtcttgctattacaaacaataatcttatacatattcatgggtggaatccctgtttctttgtgcatttttggaatgggtaggttacttttctctattgactttaaagtgtccctaaaatgatgaggtagtaatctgtttaatattttgcaaatttttttcaagtctgtcccttaacttccaattatatttatcatgatttaaaaagaaataaatagaaattctttattttaatgaagtagaatttatcagycttttcctttattatttgactgtgagctaagaagtattttcctgtcaccaagatcataaagatattactgtatatatttttgaacagtattatagttactccagttagcatttaagtattcataagcttggaattgaatttcatgcatagtgcaaggttggcttctatttatttatttatgcaacaacatttatgaaagccattcttctattcaaacctgcacatgttctttaatatttaggacaaacaagaaacaaaattataagccaatctcacttacaaaaatagatgaaaa

SEQ ID NO: 455976 - DNA, 608 bp, Homo sapiens
ttttaaactcattttagtcttaatggatattagggtggtttccacattttggttttgttttgtgtcttgctattacaaacaataatcttatacatattcatgggtggaatccctgtttctttgtgcatttttggaatgggtaggttacttttctctattgactttaaagtgtccctaaaatgatgaggtagtaatctgtttaatattttgcaaatttttttcaagtctgtcccttaacttccaattatatttatcatgatttaaaaagaaataaatagaaattctttattttaatgaagtagaatttatcagtcttttcctttattatttgactgtgagctaagaagtattttcctgtcaccaagatcataaagatattactgtatatatttttgaacagtattatagttackccagttagcatttaagtattcataagcttggaattgaatttcatgcatagtgcaaggttggcttctatttatttatttatgcaacaacatttatgaaagccattcttctattcaaacctgcacatgttctttaatatttaggacaaacaagaaacaaaattataagccaatctcacttacaaaaatagatgaaaa

SEQ ID NO: 455977 - DNA, 566 bp, Homo sapiens
aaacaacacatactaagcacctgtggagggggtgtgggaagggagaacaccaagaagaatagctaatggatgctgagcttaatacctaggtgatgggatgatctgtgcagtaaaccaccacagcacacgtttaactatgcaacaaacctgcataccttgcacacatacccctgaactttaaaatctgaaaaaatatatataaatatggtgatgttagtacatatagagcccaaagtgctcagtattgccaatattcagtattattacatgtttttgttttatttaactgtcttcaatgacatattgcaacattgttttataatgaatatttataaatatttatttacctttatgtccctcttttataaatttttctgcttaccagtctgcaattcatctatatgttatttctttgtaaataatttgtctttyattttggctacttctttgaaaatatttttctcttatgtgtctgaagttgtgctaagcatgaaaatttttaatttatgcctcatatatttaaaacactgaacatgtatttcaatgttctggaggatgccaagcca

SEQ ID NO: 455978 - DNA, 595 bp, Homo sapiens
tgtcactagtttttagtttggccattctgatgtgtatggtgatagctcattgtggtcttaagtgtaatttctttaatacctagtgacactattccaaaagatagaaaaagagggaaaaccccctaaatcattatatcaagccagtatcaccctaataccaaaacctggaaaggacataatgaagaaaactacagaccaatatacctgatgaacatagatgcaaaaatcctccacaaaatactagccaaacaaatctagcagcatattaaaaagataatccatcattatattataataaagaaaggtcatcaaaatcataaaaaggaagtcaaactgtcgctgtttgctgagtacataatcatatacctagaaaatcctaaagactcatccaaacagctcctagaaatggtaaataaattcagtagtttcaggatgcaaaattaatgtacacaaatcagtagccctgctgtacaccaccagcaaccaggctgagaatcaaatggagaactaaacccctttcacaatagctgcaaaaaatttaaartactcaggtatctacttaaccgaggaggcgaaagacctctacaaggcaaac

SEQ ID NO: 455979 - DNA, 344 bp, Homo sapiens
aataccttaagcaaaagattaggtcaaagatagagaatagtacaattatatatatagtaaatattagtaaaatgtaagaatgacttgcaatggcatcaaaaagaataaaatactcagaattatatwtaattcaggaagtgcaagatattaatactgaaaactacaaaactttttgaaagaaattaaagaagacctcaataaatgtaaatagaaagacctgtgttcatgaattaagaattgtaatcgtgttaagatgataatacttcccaaaatgatctgcagatttcatgaaaagcctatcaaaatgccaactgccatttacgcagaattgagagacaatcatg

SEQ ID NO: 455980 - DNA, 542 bp, Homo sapiens
ttttactgtaccttttctatgtttagatatatttagatacacaaatatttatcattgtgctacagtcacctacagtattcagtacagtaacatgttgtacaagtttttagcctaggagaaataggctataatatatagcctagtaggctatgccgtctagtttgtgtaagtgaagtacattctgttattcacagaaagatgaaatcacctaaagatacatttctcagaacccatccctgtggttgatcaatacatgactgacatagccagaarggaaaaaaagggcatgaattgttaccaaggtctccaatggtttacaaaatcttggttgttggcaatgtacaaacagcaaaatgttcacttatgacacaatgtagtgagaggaaatttgctaaatggaaatgtttattcccttgagtgcaaatggatctcactaggaggcaacctgcacatttagagattggccctctgtggcctcagatgctttgccaattcctgtttaagagttagcagaggcaggaggcctttgcaaaccaaatgtg

SEQ ID NO: 455981 - DNA, 632 bp, Homo sapiens
acatctcaatactaacattgaaggtaaatggtctaaatgctccacttaagagatayggaatggcagaatggataaaaatccacccaccaagtatctgctgccttcaagggactcatccaatgcataaggacacacgtaaacaaggtagagatggaaacagacattccacgcaaatggaaaccaaaaatgagtgggggtaactattcttatattaaacaaaacagactttaaagcactgacagttaaaaaagacaaagagggacattgtataatgataaaagggtcagtccaagaggaaaatatcacaatccttaatatatatgcacttaacatgggagctcccaaatttataaatgattattcctagacataagaaatgagatagcaacacaatagtagtgggagacttcaatactccactagacaggtcatcaagacagaaactcaataatgaaacaatgggtttaaactataccttagaacaaatggacttaatggatatatatgcacaacattctacccccaaaactgcagaatatacattcttttcatcagcacatggaacattttccaggatagaacatatgataggcaacaaaaaaagtctcagtaaatttagagaaaattgtaat

SEQ ID NO: 455982 - DNA, 632 bp, Homo sapiens
acatctcaatactaacattgaaggtaaatggtctaaatgctccacttaagagatatggaatggcagaatggataaaaatccacccaccaagtatctgctgccttcaagggactcatccaatgcataaggacacacgtaaacaaggtagagatggaaacagacattccacgcaaatggaaaccaaaaatgagtgggggtaactattcttatatkaaacaaaacagactttaaagcactgacagttaaaaaagacaaagagggacattgtataatgataaaagggtcagtccaagaggaaaatatcacaatccttaatatatatgcacttaacatgggagctcccaaatttataaatgattattcctagacataagaaatgagatagcaacacaatagtagtgggagacttcaatactccactagacaggtcatcaagacagaaactcaataatgaaacaatgggtttaaactataccttagaacaaatggacttaatggatatatatgcacaacattctacccccaaaactgcagaatatacattcttttcatcagcacatggaacattttccaggatagaacatatgataggcaacaaaaaaagtctcagtaaatttagagaaaattgtaat

SEQ ID NO: 455983 - DNA, 632 bp, Homo sapiens
acatctcaatactaacattgaaggtaaatggtctaaatgctccacttaagagatatggaatggcagaatggataaaaatccacccaccaagtatctgctgccttcaagggactcatccaatgcataaggacacacgtaaacaaggtagagatggaaacagacattccacgcaaatggaaaccaaaaatgagtgggggtaactattcttatattaaacaaaacagactttaaagcactgacagttaaaaaagacaaagagggacattgtataatgataaaagggtcagtccaagaggaaaatatcacaatccttaatatatatgcacttaacatgggagctcccaaatttataaatgattattcctagacataagaaatgagatagcaacacaatagtagtgggagacttcaatactccactagacaggtcatcaagacagaaaytcaataatgaaacaatgggtttaaactataccttagaacaaatggacttaatggatatatatgcacaacattctacccccaaaactgcagaatatacattcttttcatcagcacatggaacattttccaggatagaacatatgataggcaacaaaaaaagtctcagtaaatttagagaaaattgtaat

SEQ ID NO: 455984 - DNA, 607 bp, Homo sapiens
catcactaatcatcagagaagtgcaaatcaaaaccactatgagatacattctcacaccagtcagaatgactattattaaaaagtaaaaaataacagacrgtgttgaggctgcagaaaaaaagaatgcttatacactcttagtaagaatgtgtatagtttagccactgtagagagtaatttggagatttttcaaagaactaaaaaacagaactaccatttgacccagaaatcctattaatgggtatacacccaaagaaaaataaatcattctaccaaaaaaacacatgcacttgtacattcattgcagcactcttcacaatagcaaagacatgaaatcatcctaggtgcctatcaccagtggataggttaaagaaaatgtggtacatctacaccattgattactatgcagtcataaaaatcgaatgaaatcatgttctttgcagcaatatggatgtagctggaggacattagcctaagaaaattaacccacgaacaaaaaaacaaatcctaaatgttctcacttgtaagtgagagctaaacactgggtactcatggatataaagacagaaacagtagacactggggactacaagtgcagggagagaag

SEQ ID NO: 455985 - DNA, 617 bp, Homo sapiens
agacagctttggctgtatagcaaaacataccaaaatgtaaaacaattatcatttcatttagctcttggttctgtggataagcttaacgctctttcttgtccaagttctctcatctgtctaaggtcagatggagggttcactggaccctgaatagtttcgaatagccttcttacatgtctggtgtttgacattttgtcaagagggcacctaaatgccaaccacaaggcctttccagtaggctaactgcagtttatttacaagatggcctcaggatttcatacayagcaagcatcaaagcctcagtgtgtaagctctttcaaactatgattaatgattgttttgtgccaatctaaggaattgaactagatttgaaataagactactaatactttagaaatacatacatacacgcacgcacacgggggtaggaggtgggtagggagagagagggtgaattctttttaaaaggtaggtaattaaaggtttgaatattttaaattgaagatttttctatcaacacacaaaaaatgagagtaaggctaatattgcatatgtggtaacttctgagtgtttgtgctatcatataaaacatcaatttaaatcttatagttacctta

SEQ ID NO: 455986 - DNA, 576 bp, Homo sapiens
tgacaaaaattaaatgtgcctatgtaactcttaaatcctagataaaaatttgttgatgtgtcattattctaattagaaatggtgagaatataaaatgacacttttgagacccaggatatgtgatatgcacacgtgatgtgggttagtctttggcatttcttcactttctctgttgttcttcacgaygagaatttctaacacttagttcatattaactatagtataaaataaaatattaaataagggaactataatatttcgatgctctgaaaatagtattaggattattaaacaaacagtgcattatctctcagatcagtctaatgaaaacacattttatgaccttaaaaaccaaataattaaatgaagtgagtgatagaaaacacacatgggacacaagcatcttttagatctgtgactactttactccataacctttcgataacattagctctggcctccccatttcatttttcattctaaacacacacacgtccatacacacacacacacacacacacctgcacaagtaggtaatcttccaaatgtcaccaagtgtgacacaatgcacaccat

SEQ ID NO: 455987 - DNA, 600 bp, Homo sapiens
tagcttttgtcattaagtctaatctgcatcgattatctgagatatgacaaaaattaaatgtgcctatgtaactcttaaatcctagataaaaatttgttgatgtgtcattattctaattagaaatggtgagaatataaaatgacacttttgagacccaggatatgtgatatgcacacgtgatgtgggttagtctttggcatttcttcactttctctgttgttcttcacgacgagaatttctaacacttagttcatattaactatagtataaaataaaatattaaataagggaactataatatttcgatgctctgaaaatagtattaggattattaaacaaacagtgcattatctctcagatcagtctaatgaaaacacattttatgaccttaaaaaccaaataattaaatgaagtgagtgatagaaaacacacatgggacacaagcatcttttagatctgtgactactttactccataacctttcgataacattagctctggcctccccatttcatttttcattctaaacacacacaygtccatacacacacacacacacacacacctgcacaagtaggtaatcttccaaatgtcaccaag

SEQ ID NO: 455988 - DNA, 391 bp, Homo sapiens
ttttatccttgtcacattccttctttcatgtatttttcttctcatctatgtaaccatcactcattccaaaggctatgcttgaagatgattttccttttagacaagctcaattgtaattctttctaaggcagaaattccaagaattacaataatttgtgcatatttaaaacgtccagattattttaggatagagctttaaaagcataacttctttgcagtgaccttttgctgtaacctggggtttctgctgtcattactctcactctctgttttgtcctccaaggttggctataattaaggttttttagtacagcaatgtttgtaaaagaatctacaatatcgcaattgcttctgaccacagtrtcttcagtaataagttggtcacttcata

SEQ ID NO: 455989 - DNA, 519 bp, Homo sapiens
tcctatggtcatacatcttaggccttacarccatcaatacctgatacccttctattatcttcaacacatgtgttgtcctctgagtgctcttagaaagcactgcctctcctctttctaactcactcactctagtcattgacttacaactatccttgacctacagttgcccccaattcattaatcctataaaatttaactgtcctttatactttcacatcctttcccctctcctttcctaaataaattgaatagtcaattataattactatgttgcatacacataattctctgcccctatctcactttatggtatttatctggtaaaattataatcctgttctatctgtgcctatgttcataaagaggtaggtagttggaacaaaacacaaaacctagctaatggcctcattaaatacatgaccatgggtctcaaatcaacacctaacaatgctcaacaactgtactccacttagactacctattagctctcttttctttattaagtgactttttatgatc

SEQ ID NO: 455990 - DNA, 550 bp, Homo sapiens
cctccttcaaagatttactcaagtcccatattctcaaataggcccaacctgactactttatgcaaaatttcttccttagcctctgcaatacatacacatcctatcctgtcctactttttccctcccgtatcaatttactcacatcctgccagaggtatgacttttaaacaatctacataataattatgcttttttctcttcccattggaatataagttctataaaggcaaggatctttgcctgtttggtatattgatcccttctaaccaactaggaaaaactgtccagcttatagtaagtgctcaataaatattttataaatgtatgagtagttaaaaaaacaagaaaatatcttaattctagttcatggattcccttttaatttttaatttccttttcttggacattaggaaatgattaaaatmaaagttatctcaattttttccatagctaaattaatcaggacacatgctgtagaaaagtggcaaaaatacaactcaaataaacttgaacttaaaaaaatacatatattggccactgtaagtgggaa

SEQ ID NO: 455991 - DNA, 640 bp, Homo sapiens
tacaggtcttttactttgttaaatttattcctaaatattttatctttatatagttattgtaaatggaattttctttatttttaaaatagttcagtgttagtgtatagaaaatattgatttttatgtaaattttgtatcttgttactttacagaattagtttattagttctaacacttttagtggagtatttacagttttctataaatatgataatgtcatctgcaaasagaaacaatttaacttcttcctttccaatctggaggacttttctttctttcttttcactaactgctctggctagaacttctagtactatgttgaataaactgggaaagtgggcatctttgtcttgtttctaatcttcgaggaaaagctttcatcttttcatctttgagtatgatgttagctttgggtttgtcatatataatctttattgtgttgaggcacatttcttctaaactgaacttattggaagtttttatcatgaaagtattttgtattttgtcaaatgctttttctgcacctattgagatgatcatatttttttctttattctcataatgggtacaccacatttgtagatttgtgtatgttggatggaatcttctacatatgattcttagttctacttattctaaa

SEQ ID NO: 455992 - DNA, 640 bp, Homo sapiens
tacaggtcttttactttgttaaatttattcctaaatattttatctttatatagttattgtaaatggaattttctttatttttaaaatagttcagtgttagtgtatagaaaatattgatttttatgtaaattttgtatcttgttactttacagaattagtttattagttctaacacttttagtggagtatttacagttttctataaatatgataatgtcatctgcaaagagaaacaatttaacttcttcctttccaatctggaggacttttctttctttcttttcactaactgctctggctagaacttctagtactatgtygaataaactgggaaagtgggcatctttgtcttgtttctaatcttcgaggaaaagctttcatcttttcatctttgagtatgatgttagctttgggtttgtcatatataatctttattgtgttgaggcacatttcttctaaactgaacttattggaagtttttatcatgaaagtattttgtattttgtcaaatgctttttctgcacctattgagatgatcatatttttttctttattctcataatgggtacaccacatttgtagatttgtgtatgttggatggaatcttctacatatgattcttagttctacttattctaaa

SEQ ID NO: 455993 - DNA, 581 bp, Homo sapiens
cccttattgtgctacgccaccttgtggtcatttatttccttcatcagcgccctaaatcgctcaaactccctgtaagtgacaaagaggaaaagggaaggatttctggtaatcatgaaatagataggagacagtaggacaartaattggtaaaagaatcctggatggtctcaagcggtggaactctaaacttggaatgccattgcatcagtttggcatgggactgctttgtgctgtgtcacatactctacatttgtgggttttctctgtgcctcactagcctggccaagcagtaacaccagtatttgaatgaatccacttcattagaactgacttttgggatcaggtgtggaactgcctggggaaggaggtcaccctgcccgcctggagccccactaggcagggaaatgctggggcacgcacagggcgctataaggcctgtgggtctgaacacaaaaggttgggggagtacacatctctggactgagggtaggctatcctgaccccatgactggctagagtggtaggagccccgtgagttggccctgtgattttgggtaccctgagacgcatatgacacgtga

SEQ ID NO: 455994 - DNA, 581 bp, Homo sapiens
cccttattgtgctacgccaccttgtggtcatttatttccttcatcagcgccctaaatcgctcaaactccctgtaagtgacaaagaggaaaagggaaggatttctggtaatcatgaaatagataggagacagtaggacaaataattggtaaaagaatcctggatggtctcaagcggtggaactctaaacttggaatgccattgcatcagtttggcatgggactgctttgtgctgtgtcacatactctacatttgtgggttttctctgtgcctcactagcctggccaagcagtaacaccagtatttgaatgaatccacttcattagaactgacttttgggatcaggtgtggaactgcctggggaaggaggtcaccctgcccgcctggagccccactaggcagggaaatgctggggcacgcacagggcgctataaggcctgtgggtctgaacacaaaaggttgggggagtacacatctctggactgagggtrggctatcctgaccccatgactggctagagtggtaggagccccgtgagttggccctgtgattttgggtaccctgagacgcatatgacacgtga

SEQ ID NO: 455995 - DNA, 603 bp, Homo sapiens
gtaggtaagcagaagtaagggagctgaagttacaggaaggtcttgatttagtcatttaaaaggacattactctgctatgatcaggtccatcatgcttctgaaatgtgaaaacatttcccaatatctctgaaacagtgaataaattttttttcgtttttcattaggtggtcataattttcctctaaatcttcctgtaattaacaccaagagcttctttcatctgtcacataaagattatgacacttagattttctccaaatgtatgaaaagggtgaaagagaattaaaagttctctgacccagagaacagcacttgaaaggaatctgggaaacaaattaggtcaaaatgtgatttttaactttatatttgtgtctgtccagttctcttaagatgaactcctttttttwaaaaaaaagcacatagctatttaatggtaataacaatgatatggagattttgagaaaaatactttgatattttgctttggatttttcattttttaagtaataaaacctaacagataaagttaatacttcctttgtgtccccaattccattaccttctctccctctttggagactactatcctgaattgggtgttta

SEQ ID NO: 455996 - DNA, 603 bp, Homo sapiens
gtaggtaagcagaagtaagggagctgaagttacaggaaggtcttgatttagtcatttaaaaggacattactctgctatgatcaggtccatcatgcttctgaaatgtgaaaacatttcccaatatctctgaaacagtgaataaattttttttcgtttttcattaggtggtcataattttcctctaaatcttcctgtaattaacaccaagagcttctttcatctgtcacataaagattatgacacttagattttctccaaatgtatgaaaagggtgaaagagaattaaaagttctctgacccagagaacagcacttgaaaggaatctgggaaacaaattaggtcaaaatgtgatttttaactttatatttgtgtctgtccagttctcttaagatgaactcctttttttawaaaaaaagcacatagctatttaatggtaataacaatgatatggagattttgagaaaaatactttgatattttgctttggatttttcattttttaagtaataaaacctaacagataaagttaatacttcctttgtgtccccaattccattaccttctctccctctttggagactactatcctgaattgggtgttta

SEQ ID NO: 455997 - DNA, 568 bp, Homo sapiens
agcacactacaattctgaaatcaatattttagtatctccctcaagccctttgtggaccaaatggaaataaacaaacataaattttagaaacacattcaaaaattagaaattttatgctttacatatattgaaaattttgaaaaactattaaaaattgggaaaacaaagtaagaaaaaaggttaccaacaattttattaccctaagcctaacacaagctctgctagcatttctgtgaaaactcttctaatcctttttagtttttttgtttaaaaagagagaggatttgcatagttttcatcwaagtatacatctaactgtatatcttaaataagcagtggttttaaaaataacttgtgcagctgtgcacagtgggtcacacctataatcccagcactttgggagaatgaggcaggtgaatcacctgaggtcaggagtttgagattagcctggccaacacgacgaaaccccatctctactaaaaaaacaaaaattagcaggcatggtggtgcacgcctgtattcccagctacttgggaggctgagtcatgagaatcgcttgaatccagga

SEQ ID NO: 455998 - DNA, 485 bp, Homo sapiens
aatgtccatcttggtcaactagatctacccttgctccacctggaaaagcacaaatataatgagaatgtctaatataaatagcttttattaaaatgagtaggagtagaaaaaacaattgttccttaaatgcatttattaaaatgaatagaagaaaaacaataacaattgttcctttaatgctttattcttatggaaatgcttccacatacrttgtctacatcagatttttacaataagcttgtaaattggactggctaggaatcagtccccctttatataaaataaaagtgaagatcaggcaggtgaaattacttttcctgtatcaagcaactcccaacaagtggagctaggagtagaacttgaggttcctcatgccatgttgtgtgatcatcccttcatccttgtacttgtgcagctttctgctaaggaaagctttatcttaaacagagtatgcaagaattcctacctgttaagagagacttatt

SEQ ID NO: 455999 - DNA, 597 bp, Homo sapiens
atgtataagcattctagaagctctgagaagttgcacagtgaagaaacccattaattttttaagtccaaaatttctcataatcatttgatcccaatgctttttttttccagcataaactaacagcatttaaggaarcagtgatctgtaaaacactttggtaaataaaatactagtttataacttaaatgaatttcctcatttcacaattgaggaaactgaggcccagaaagttgttttattcatcacaattaaaaacaatgccttacacaaagaaggtactaaataattgtttggtaaattgaatgatatatttatgtttagataactagttagagccaggactaaaacccagctgtcctgacaagttagacctatagcatttaataaggataatgcagttcacttctattcactgctatttaagctgatgataaaaacattttataattgctattaaaaaagcatcatatgctggtttaaaaggcaaactaaagaagttgaatagttggctgatgttttaaatcgacttagaccacaggtatctatctctttagtttttaacagtgtcaaatattggtctcttgatattgttcagag

SEQ ID NO: 456000 - DNA, 554 bp, Homo sapiens
agtatggacagcggtgagcccctttgctctttctttttaaaatcagaacacagactgttataatctgtcaaatgataattttctcatsaccaatattcagggagttggaaaacaaaatgaatatgtaagtgtcaaagagcattgtgaggatgagtggtatataatgtgtttgctgccttgagcaaggcaaacaagttaaagttctacacttacggagagtcacgtataagaactgaaagaaacctaagagagtatttggtctaacccttccgtttgacagatggggaaactaaggcctacagtgatcaatggcttatgtaaggttttagaccctttgtaggggaatttactgaacatttatttattgaatgcttactatataccaaacattctaaggtactagagatgtggaggtacataacacacagtccctgttctcaagaaactgacaatcgagtcagggaatcagacccatacactcctgccaacagtgagttctagatgtgatgagtgctaaaggagaagtaactatatagggctatgggaggatgtgg

SEQ ID NO: 456001 - DNA, 554 bp, Homo sapiens
agtatggacagcggtgagcccctttgctctttctttttaaaatcagaacacagactgttataatctgtcaaatgataattttctcatgaccaatattcagggagttggaaaacaaaakgaatatgtaagtgtcaaagagcattgtgaggatgagtggtatataatgtgtttgctgccttgagcaaggcaaacaagttaaagttctacacttacggagagtcacgtataagaactgaaagaaacctaagagagtatttggtctaacccttccgtttgacagatggggaaactaaggcctacagtgatcaatggcttatgtaaggttttagaccctttgtaggggaatttactgaacatttatttattgaatgcttactatataccaaacattctaaggtactagagatgtggaggtacataacacacagtccctgttctcaagaaactgacaatcgagtcagggaatcagacccatacactcctgccaacagtgagttctagatgtgatgagtgctaaaggagaagtaactatatagggctatgggaggatgtgg

SEQ ID NO: 456002 - DNA, 653 bp, Homo sapiens
aagaacgagggtttgtatagagtggtggtggcacagaagaatgaaagcaaaaggctatcaaagggggaatgcatacaatcartggtagcagcactagcaagcacataaaaaggccagaagagagacagactgtggtgatgggctgcttgcatttgcatgtcggtgtgttgcagagtctgaagttatagtgaaaacaggacatgcaaatggaaacgtccaatgatctaaagtgttggcaagtgacaaaagcatagcagaaatgcccagtaggcaactgaagatatgagattagagttccaggaggtcaggatgtgagacagattagggggctatctacagagatgaattaatttaaaatttaagagtagatacattttcaatggaaaaaagtatagcatgagcagaagtctaaaaagtttgccttcaaggctgactgcagtgtggagatggaataatttaaaagatgtgagaagggagaatcagagagttacaggagatctgagatttgagtgaaataagaacctggcaaaaagggagcttcagggaagaagggtgatcaacataaatatggttttattttagtgtacactcaaccgtgtgctttggcaggtaaattatagtaatgttcattttggcaacaacataggcagtgc

SEQ ID NO: 456003 - DNA, 653 bp, Homo sapiens
aagaacgagggtttgtatagagtggtggtggcacagaagaatgaaagcaaaaggctatcaaagggggaatgcatacaatcaatggtagcagcactagcaagcacataaaaaggccagaagagagacagactgtggtgatgggctgcttscatttgcatgtcggtgtgttgcagagtctgaagttatagtgaaaacaggacatgcaaatggaaacgtccaatgatctaaagtgttggcaagtgacaaaagcatagcagaaatgcccagtaggcaactgaagatatgagattagagttccaggaggtcaggatgtgagacagattagggggctatctacagagatgaattaatttaaaatttaagagtagatacattttcaatggaaaaaagtatagcatgagcagaagtctaaaaagtttgccttcaaggctgactgcagtgtggagatggaataatttaaaagatgtgagaagggagaatcagagagttacaggagatctgagatttgagtgaaataagaacctggcaaaaagggagcttcagggaagaagggtgatcaacataaatatggttttattttagtgtacactcaaccgtgtgctttggcaggtaaattatagtaatgttcattttggcaacaacataggcagtgc

SEQ ID NO: 456004 - DNA, 577 bp, Homo sapiens
aaaaccatacaatcatgtccattgatgttgtaaaagcatttgataaaactcaacataccttcatgatgaaaactctcaaaaaactgaatatagaagtaacatacctcaacataataaaagcatatttgacaaatatgacagacccacagctagtatcatactgaatggggaaaaactaaaagcctttcctctgagatctgaaacatgacgagggtgcccattatcactactgttgttcaacataataatggaagtcctagctagaacaatcagacaagagaaagatataaagggcatccaaattgaaaaggaagaagtcaaattatccttgtttacagatgatatgattttatatttggaaaaacctaaagrctccactgaaagactcttagaactgataaattcagtaaagttgcaggatacgaaatcatacaaatatcagtggtatttctatatgccaacagtgaacaatcttaaaaagaaattttaaaaagttatcccatttacaatagccacaaataaaataaaatacctaagaattaacaaaagaaatgaagatctctacaatgaaaactat

SEQ ID NO: 456005 - DNA, 633 bp, Homo sapiens
agtctaaaattgacaaacagcttaaaatgtaatctgattttctcttaaatgcctacaagagacaaaggattgactatgtgataaataactctaaataaattcctctgtcatgtctttgctgcttaatttttcagtaagtaatagtaaattgtattttggagggaaaataagagagagatcagcatcatatgtgttaatttaaaaataaagayagcacatgaagaaacaatagggtgacaaagatatatcagtagtatctctgttatctgtaactgcataacaaaccatccacatatgtagtggcgtaaaacaacaatttctcaaggttctgtaggtaggctgtgcaatggtttcacctaggatcattcacacagctgtattcagctagtgggccagctgggggctgtgctcagctgagacaactaggcttttctttcctgtggtccttaaggaggctagagcaggcctcttcaaataccaccacacatcaaccaatgtacaggcaattatcaagtgtccccttgagtcatttttgctgacatatctttggccaatgcaagtcacgtggtcaagctcagagtcactgtgagagaaaaccacaaggtatgattcattgagagccatcagtgtaac

SEQ ID NO: 456006 - DNA, 589 bp, Homo sapiens
acacataggtcaactggaataattattagtaataatgcttggtattatgtattttatgcctttctctcaggagatcaaaatgctttacacacattatctcattaattcctactccaatgttgtgaaatagaaagaagtaggctttttatgtttgtattagagtgttattccctgtctcagatgtagcaactggagcccaaggaggttaagcaactcatccaaggtcatactctgtgtcaactgctgatttagatctttttattcttaactcttgtgttttctcctctaaacctcactggcttcagaaacagtcccttcaggcttcrttgcatagtatactgacccatatcagggttgaattttattaagtagcacaaggtcaagccctttacaaaagaggtcctgagtcaacagggagtgcattgcatctttgttttgtacaaggccttctccatatgaatgaactgtcagaataattttataatacattgttctttcaagtttagaaatggcattcttctatttactggtgaatggtgaacatgtaaattattttaagctataacaatgaaaacaacaagatcctact

SEQ ID NO: 456007 - DNA, 628 bp, Homo sapiens
gtgtgtctgggtgcttgtgagtgaggagagcagggtgtggtcaaggttgttttcttttgatacttcacgttagaggtttaaatgtggtacagaatgagggaatattattctgctatttcttcaagggaggggcaaaaaagatataaaattaaaatggagccagtattgcccaaggtccatctagaaccagaaagaaaagcagatggttgcagaaagagttatagtataggtggttgagccatcaaggaaactcacaagaaaaaattttacctagttgtcagagaacatactatgctccagacggctaacttgcctttttctataccatgcctttgtcaggaggcattccctacgttcaagtcttaagcatgtgtcctgtataaaatcagtctttagcgtctcccaaaagagctatcacttcctycttttatgaacttgctgtatcttgtctcttcacttgagcacctagtacattgagctaaaattattggtttgcattcctcttttactgtaagaattttgcttttcaaaggccacaattatttttttttctatttctgtattctcaatacctagcatggtgcttgtttgcagcaatttgtaaacaaatatttgttaaatttttcat

SEQ ID NO: 456008 - DNA, 628 bp, Homo sapiens
gtgtgtctgggtgcttgtgagtgaggagagcagggtgtggtcaaggttgttttcttttgatacttcacgttagaggtttaaatgtggtacagaatgagggaatattattctgctatttcttcaagggaggggcaaaaaagatataaaattaaaatggagccagtattgcccaaggtccatctagaaccagaaagaaaagcagatggttgcagaaagagttatagtataggtggttgagccatcaaggaaactcacaagaaaaaattttacctagttgtcagagaacatactatgctccagacggctaacttgcctttttctataccatgcctttgtcaggaggcattccctacgttcaagtcttaagcatgtgtcctgtataaaatcagtctttagcgtctcccaaaagagctatcacttccttcttttatgaacttgctgtatcttgtctcttcacttkagcacctagtacattgagctaaaattattggtttgcattcctcttttactgtaagaattttgcttttcaaaggccacaattatttttttttctatttctgtattctcaatacctagcatggtgcttgtttgcagcaatttgtaaacaaatatttgttaaatttttcat

SEQ ID NO: 456009 - DNA, 354 bp, Homo sapiens
aatttttttcttggatggttgccaaattattgcttcgggggatatgaaggctgtagacattctattctatcatttggctggtgttacttgcccagaactttttaaatagcattggtaatataaacaaaacagattacttctgagcctttatgagctaggacaagacacctgacatattggtagtaattaaaaatcattatataaakggaacagagaaaaattgatcctgtatgtacttttatctttaaaatggttaatttgtaaatagataatttctagagggaattttatttctatgattcaccacagtatcatacctgaattttggtaattaggtcaaaacataaaacataa

SEQ ID NO: 456010 - DNA, 354 bp, Homo sapiens
aatttttttcttggatggttgccaaattattgcttcgggggatatgaaggctgtagacattctattctatcatttggctggtgttacttgcccagaactttttaaatagcattggtaatataaacaaaacagattacttctgagcctttatgagctaggacaagacacctgacatattggtagtaattaaaaatcattatataaatgkaacagagaaaaattgatcctgtatgtacttttatctttaaaatggttaatttgtaaatagataatttctagagggaattttatttctatgattcaccacagtatcatacctgaattttggtaattaggtcaaaacataaaacataa

SEQ ID NO: 456011 - DNA, 534 bp, Homo sapiens
agaaggtgaactacagtgccagccaacaaagtctctaccacactggaagtaaatattgcaaggcagggcattcaccctcaggtagaactggctgggcctttatactccacctcactcaaccaccacatgagggttgctctggaaagcrgggcagaacttccagcaaggtaacattttgcagcagaacctgacgttgctgacagctagatgctctctgctgtcctcgaaggacgatccacacaccaagtggtctgctatgcccactttgcatgctgtactgtgagtgcaagccacactgcattgaagcaatgaatttcagaactctttccatttgttagaagagaatttaaaccattgccttttgttttgttttagtatttctagttctgtctacagaggtatatgtctctgtaaaaatatttttccttcctctttctttacaaaaatgactaacaagaatccaaaacaaaaatattttttacacacctgtctctacctgagataacatagatggtaaggattttcagtgatcca

SEQ ID NO: 456012 - DNA, 590 bp, Homo sapiens
gctagttaagtaggggatgaaaaactggtaacaaaaaagaagggaaatggttttgatttcctttatgcttaaggtcatatacaggtcatgtttaacagattccattttcacatattttaataaaatctgtataggaaatttaggcaagagctgtggaaagaatttgatctaaaggagtaaaactatcacyttaacattaaccttctagtaatgaataagcaagcagaataaaaaaaaagaatatcttctcgaaatcagaaggcagaaatatttgtgccctagctactgatgcgaaagacatatttgataggccttgtaacaagatgtcctgggtttggggttacaccatgggtacattaaacactaatacatgtatgttacttaagcactcttaccgtaattgaggagaaagagttaaatgtcaggttgtcctgtccttggaatttttgaaaatagtgtggcaggaattaaagctgtaccaatcacttcttactttgcatacttttccagagagacggcatctattcctttataactttgctgtcattcttggaagaagaggctcatctgggtcttacttgtaactctgt

SEQ ID NO: 456013 - DNA, 612 bp, Homo sapiens
cataagaactataacagacatggaaccaattattttaatgttttctaaacatagctcatttttgtttttcaaggttgcaaataactttttaaaatccttgcttgcataaatccaagttattttcttgtcttgccttcaagttaatttcttaacttatttgtattaagggacatttggtaaacatttttctaatatatttatttttgaaattttaatttagaagagtatttaatgaatttcaaaattcttaaatctagtttgtatagattattgaaactcagtgttcaaagaatcatcagatattgtttgacttacttaaaggaagaaactttttattcttattaggcacttaactaatctcaacctcttagttcataagaacctactcattttgggggaagtccattatatttattgtcatctctaaaagttttaaagttctttttcatatttagtcaatgtctgcctctctgcatcttctctccaatggtataattctgtcattgagaatcccagaaactaagtcaaatatcttgcaaatgacaaccactcaaatacttgcagtyagttatcatgttctttctgttggatccttcaaactagacaacccca

SEQ ID NO: 456014 - DNA, 625 bp, Homo sapiens
ataactttttatccttggttagagaagtttttctactaggttctttaaaggcgtcttttatctttcggtttgtctttctatcatacttctatctaccatattaaaatctctaatttttagaaacctagaaacacataaatttgcagagcagagaatctaaaaccttatgagcatgagaatgatatgaagagcttgttaaagcacaaagtcctgggtcctaccccagatactgatttagtacattggggtgggaacaggggcgttaattggatttttagcctcctagatsgaactttttcatggactacaccttcagtagaatggtaacagtgattaaaaaattataacaaaaatattcagtggagccataaaataaatgatcaacttaacctggtatttttagaaaagcagtcaaagaagagaaactacttgaattgagtcatgagcaatgattagctatttttttcaggcacataatatagaaatgtggacatatcaaaaagaagggcgtttcagcatgttaagcagggtaagtatgggcataaaatagcacattaaaaaaagtttgcatgactggagggtctaaagtatggggataaaggtgaggttggacgattaaggccag

SEQ ID NO: 456015 - DNA, 625 bp, Homo sapiens
ataactttttatccttggttagagaagtttttctactaggttctttaaaggcgtcttttatctttcggtttgtctttctatcatacttctatctaccatattaaaatctctaatttttagaaacctagaaacacataaatttgcagagcagagaatctaaaaccttatgagcatgagaatgatatgaagagcttgttaaagcacaaagtcctgggtcctaccccagatactgatttagtacattggggtgggaacaggggcgttaattggatttttagcctcctagatggaactttttcatggactacaccttcagtagaatggtaacagtgattaaaaaattataasaaaaatattcagtggagccataaaataaatgatcaacttaacctggtatttttagaaaagcagtcaaagaagagaaactacttgaattgagtcatgagcaatgattagctatttttttcaggcacataatatagaaatgtggacatatcaaaaagaagggcgtttcagcatgttaagcagggtaagtatgggcataaaatagcacattaaaaaaagtttgcatgactggagggtctaaagtatggggataaaggtgaggttggacgattaaggccag

SEQ ID NO: 456016 - DNA, 579 bp, Homo sapiens
ggagggtctaaagtatggggataaaggtgaggttgracgattaaggccagagcagaaagcagggggccaaattatgaataaccttctgacatattttaaatatttctttaggtaatgtaggaattgaaataatacgacaagcattacttttagaaagattatttggcattagtatataaaatcaagatggtacagactcgatgcaagagtggcagtgaagatagagtaataaacgaaacagcggaaacttcacatgatttttaagatgcaagcaatgttgtctgcctggttttaaacactattggcacaataaattgagataacaagataattattccaggggaaatgacaggtttcatggcaagaggggaaggaaagagttgatgaattctgtttttgagatgtggaatatgtaaaataggcaattgcctatataggcctagagcgtagtaatggcatctgagttaaatgtacaaattttggggtcgtttaatcattgtatagttgtctttaggataataggattacatgagataatccaggagaacatggagaatcgacaggttcttaggagagaag

SEQ ID NO: 456017 - DNA, 579 bp, Homo sapiens
ggagggtctaaagtatggggataaaggtgaggttggacgattaaggccagagcagaaagcagggggccaaattatgaataaccttctgacatattttaaatatttctttaggtaatgtaggaattgaaataatacgacaagcattacttttagaaagattatttggcattagtatataaaatcaagatggtacagactcgatgcaagagtggcagtgaagatagagtaataaacgaaacagcggaamcttcacatgatttttaagatgcaagcaatgttgtctgcctggttttaaacactattggcacaataaattgagataacaagataattattccaggggaaatgacaggtttcatggcaagaggggaaggaaagagttgatgaattctgtttttgagatgtggaatatgtaaaataggcaattgcctatataggcctagagcgtagtaatggcatctgagttaaatgtacaaattttggggtcgtttaatcattgtatagttgtctttaggataataggattacatgagataatccaggagaacatggagaatcgacaggttcttaggagagaag

SEQ ID NO: 456018 - DNA, 620 bp, Homo sapiens
aaagccaccaaaatggcttatcttgctagaaagtagaatataaggggaacagcattcgatttggatccacagagatcttgctttggattctaggtctgtctcttgcttgctaagtaatcttaagcaagccactaaaactcttagagacttaatttccccttttgtgaagtggtagtaatactttctctagatgtctacaaagtttagggcttattagcacatggttaatatctaattgtgttttaaaaatttttcttactttccacctttatcttaaggtatgattatgattacttatggatttacccatgtgaatgctctcaaagacaagatagaaaacttgatcattgaatgaccataagaataaataccctgcaattttgcagttgccaaatgatgtacattattgggaatcaaactgacttctgtgaattcagaacagggatctttattttcccaaagctgtatttctcaaaaatactcaaacaattctgagcagtrttaaaaggagaaactaatacaagataattaatcttttgtttttagtcttgctctagctttgccaatttggcaagataaaaccatttccacttaaaaggcatgatgatttggtaacataa

SEQ ID NO: 456019 - DNA, 568 bp, Homo sapiens
taggaaagggacaggaaacccacttgggcacaaaatctagtactgatataagtggatgtctgctacgactgagggaaggataggaaattttctaccacccaagaccatccacagatacaagacaaagtttggctgctaaggttgggttttgayggttaattgtatgtgtcaacttgactgggctaaaggatgcccagatagctgatcagacatcatttttggatgtgtctgtgagagtgtttctggaagagattagtactataatttgaatgtgcccccttcaaaatccagatattgtcaatgggacagtattaaggagtggggtctttaagaggaaattaggccatgtggtgttttcccttatagatgagattaggttcctttataaaaggcttgatgcatgaagcttgttccttttacctttctgccttctgccatgtgagaatatagcctgtgttctctccaaaggatgcagcatcaaggtgctgtcttggaagcagagggcagccctcaccagacaaccgaaccaactgacaccttgatcttggacttcccagcttccagaact

SEQ ID NO: 456020 - DNA, 582 bp, Homo sapiens
acttgagttgccaagaataaattttacccatctgttacatatgatccctttaaaaagcaaaggcagttatcatgtgtccccaatacttttctttctayagataaaatattcccattttcttcaaatgtttatttaatctgccttttaatataatttttatgatgtaatctgactagtgtagtcagccctactgttttctgatttcctgggataattcctcctttgtttgaggttttctacttctattaatgcaagctatgaccagattgtcttttttggctttgataactcactgttgacaaatattaaactcacactcagtgaaagcaactaagtacaacaacaatgtggaatacatttttttctatcctacattgacacacaaaatattttgaaccaaagcacaagactttacaattatcactgtaggattttctcattcatttcaatccattctttcagcttgttgagatcactttcagtctttactctcatatgtttatcttcttggtggcatgacactagtgtctgcaacagcagccttggcacagtacactgtccttgcatttgacatatatttgt

SEQ ID NO: 456021 - DNA, 497 bp, Homo sapiens
actgggaattaaatagttgacccattttaaacgctatggaataggctctcaagagagtaagttgtataaagtcataaaactggacattactagagcccagtttttaaccaagttctttctgtgaaatgattcgcattttcttcccagaaatgtatacaatktactctgctgcactgttaacaatcacttataccacctggctcaactaaaggtcaagcatgcacatttatatcataattaaatgaaataaaaaatgaagattatttgatacatctttagcaatatctgaaatcattattctgctatatggttatcagatgaatgttaaacaaggtatgtcaatgtccattatcacatttattttacccatcaattaaagtattcctggctttatctggaagaaaaatagaaaaagtttaaccaaacacatagttttttctaattccaagaaatgatgcaggtgcctccagtccttcaataagcagtagccatagtcc

SEQ ID NO: 456022 - DNA, 513 bp, Homo sapiens
aagttctttagtatctctgagccttatttttaaatatcaaatgtaaatttcactgttgggattgagatgagtactaaatgagattaattcaaataactacacactcctgttgtttggttatttacacgcacactcctgtttctccctgcccaactccttttctacttaaaataaataaaaatttkggggcggggtgcggggtcagggaaaggagagatgctgcagatcatcactattatcttcctttcggtcatttctgtaggcaggacactgcccgtgattacaaagcaggtgatgtcagtggctttccagatcccagtcccctcagaaacccagtgaccctaggttctagaatacaacactcctaactttcttcttcatggcttgaactgatgcctagtgctttcaaagattaaacattttttttttttttagcaagacctaattaggaaaatcacaattaggtgcaaatatgatttaatcttcccttgggaagggtaggttactttccga

SEQ ID NO: 456023 - DNA, 513 bp, Homo sapiens
aagttctttagtatctctgagccttatttttaaatatcaaatgtaaatttcactgttgggattgagatgagtactaaatgagattaattcaaataactacacactcctgttgtttggttatttacacgcacactcctgtttctccctgcccaactccttttctacttaaaataaataaaaattttggggcggggtgsggggtcagggaaaggagagatgctgcagatcatcactattatcttcctttcggtcatttctgtaggcaggacactgcccgtgattacaaagcaggtgatgtcagtggctttccagatcccagtcccctcagaaacccagtgaccctaggttctagaatacaacactcctaactttcttcttcatggcttgaactgatgcctagtgctttcaaagattaaacattttttttttttttagcaagacctaattaggaaaatcacaattaggtgcaaatatgatttaatcttcccttgggaagggtaggttactttccga

SEQ ID NO: 456024 - DNA, 605 bp, Homo sapiens
tagcacctaaatgcttatattgtaaaacatgctgactgctgtgtctgctctggaatacgaatttaaacttaaggcatcatttacaaacttattgtaatttgcagtcatgtgaaccaagatgtactttttaaaacctgcatctcagaaatccagtggtcctcatgtgatcatagtctcttctcaaagaatagacaaatggacacacttcaacattcattgtgggtatggtcagccaatgccaggtggattacaatacacaacaaagtattttattctagcccacctcaccctttcttctttaaattacattgcttggcttcttctataatgagcttgggtgaactttccctctttaaacataaagtaaatctgtactcattagctatctcagaaaagagagcagatctaacatactaacagacaatctggctagtgtaacttrtcaaattagctgttggaagatagacattttattatttatttatgtatttgtttgtttatttgtttgtttttattttttgagatggagtttcgctctgttgcccaggctggggtgcagtggcgcagtctcggctcaccgcaacccccacctcccaggtttgagc

SEQ ID NO: 456025 - DNA, 529 bp, Homo sapiens
gagcctgcacttttacttgagcatgtgaggtcactgtctagttttccccatatatacagtttcttttggacatcctagtctgtatatctggcttccaagagggaaaaagagaaaaatgagaggactgagatagagaatgttgccatagccctttaaattcccctgaagtcacttcagctgaaagggggaagggcttgcacaatgagaaggtgcaacaaaaatggtgtcccaactttttgtctggacctctgtgatcagaagcaccaatcagtgatcagagcacagttctctgamacctggaagacagtgatttttttttttttttcttccaccctgcctcccacaagctgtgtctaagctgctcttggaacatgtgcacagctgcctgccatgggctgagagaagtggaatgggtagctgctactatgataaaagttgaaattggccaaaatataccacaatttcatatcccagccttcctttgtaagttgcaagcctttaatagacctcagagtttcaaaagaagtca

SEQ ID NO: 456026 - DNA, 413 bp, Homo sapiens
gaagctctgttatgtatgcatatatataattatctcttcatggtatagtaagaattattaagaacggtccttttttctggtaacattccttttattgaaaactattttattattgaaataacattcaattttttatgcttattctttgcatggtttatcttttttctcctcttacttttaacctatttgtatctttacattttaagtgcttttttatacgacaaataggtctttcattttttatccagtttaacaaccttttttttatcaagactgaaacagttttaaaaattagagtgtttcataatagacatttcctatttaatgtaattaccaatatgactgtattaaggtatgagatttgctttttattccccccttawgtcatgagtttttgtttctctgctcctcct

SEQ ID NO: 456027 - DNA, 576 bp, Homo sapiens
ggaagtaagaagaaatgaatctagtcccagctttgccagagccaatctgtataatattatgcaggtgacaataattcatagaacacagttcctccattcttaatgagattagacttgatgattttttaaagactaactcatgatttaaaacttcagtaagggtttcctgaataaatgaatttactggtcctaccatcatccttaatactggaagagrggcaactatttctggtattgaaatgtaggaaaatcaatattatatgtcattaaatcaaaatattttatgtaattatatgtgaaaaaatgtagaaaaaaccctaagttttcatagctgaacttgagctatagaacaaccttttatacccattaatctgtctattctttagcattcatttagaattcttttacaaagtaatttgaaacactcaattttaagtataaaaatcttgcatttttggcttcaaacaataacagtcataggcacttgaggcttataaattagaaacatatgtcaaatgacaaaatgtagatcaaaaatgcactcattaaatggtataagtaatactacatatgacc

SEQ ID NO: 456028 - DNA, 546 bp, Homo sapiens
caatattatatgtcattaaatcaaaatattttatgtaattatatgtgaaaaaatgtagaaaaaaccctaagttttcatagctgaacttgagctatagaacaaccttttatacccattaatctgtctattctttagcattcatttagaattcttttacaaagtaatttgaaacactcaattttaagtataaaaatcttgcatttttggcttcaaacaataacagtcataggcacttgaggcttataaattagaaacatatgtcaaatgacaaaatgtagatcaaaaatgcactcattaaatggtataagtaatactacatatgaccccttgcacaattttataaggagaaaagcaataatataataaaatatagagtactgtatttaggtaattttattagttttcaaattctgaaaccttagtcctatgtccatgttcatagccataggattaaataaaaygcaaacatatgtactgtatctatgacacagagattattgaccataattcacattaaaacaagacaacaataattagacattcact

SEQ ID NO: 456029 - DNA, 598 bp, Homo sapiens
acttcctccaggaagcctctcagacaatggccactgggacctccaacttctctgagggtttccctcatatttctcacatataatacagagttgccatcatcacgaacttagataattctttaacttataaatatatgtaccactattacatggaatacgctctaaataacaaagagctagtaacaataaatggtgacacccttacgtttctaatgattcttaagtacatgttaaagacattattgaagctgattattgtttccagctaacactaaatgcttttgaatttttttctaaggaagaatatacaggaacaagaatttaaaaaccatcagaaatacaaaagtacagatgacatttcaaaacttttagacagagaaaaatacatgctatatattccaatcagatttaatattcaaatctaattagaaaatgttactgtatacattttataacaaaatgacttcagctgcatgccagtgagaaacaccctcttaatgctccyggcctggaccatgagggctaaaaatttgcttccactggtggagatctgttcagtctaaacaaattctacctacgaaattcactatcacgtata

SEQ ID NO: 456030 - DNA, 598 bp, Homo sapiens
acttcctccaggaagcctctcagacaatggccactgggacctccaacttctctgagggtttccctcatatttctcacatataatacagagttgccatcatcacgaacttagataattctttaacttataaatatatgtaccactattacatggaatacgctctaaataacaaagagctagtaacaataaatggtgacacccttacgtttctaatgattcttaagtacatgttaaagacattattgaagctgattattgtttccagctaacactaaatgcttttgaatttttttctaaggaagaatatacaggaacaagaatttaaaaaccatcagaaatacaaaagtacagatgacatttcaaaacttttagacagagaaaaatacatgctatatattccaatcagatttaatattcaaatctaattagaaaatgttactgtatacattttataacaaaatgacttcagctgcatgccagtgagaaacaccctcttaatgctcctggcctggaccatgagggctaaaaatttgctkccactggtggagatctgttcagtctaaacaaattctacctacgaaattcactatcacgtata

SEQ ID NO: 456031 - DNA, 595 bp, Homo sapiens
ggtagcggttatggcttaagtatgctgggaagctacgggaaaggcacacctccctgataacaatagaggaaatctattatcactcccacctcctttcttccatccttgaatataaacacgatgctgagagytgcagcaccatgaagcattaagataattgctaagatcagcaaagtgcaggatagaaagcaaccaagaaaattatattgctgaatttctccacagctctggtgtgccttcatgtaacttcttgctcaataaaaagtttaatccattgttagataatttgttatccactacaaaacagtggatatggcaattagtaacgttaagcctactttataaatgcgttgataattttcttattaatatcctatttctttttagaattgtatttattttccaaacatagaaaggaagtataatgcattaatactgcagtttaattttaagatggttttcatcatagaaacgtgatgcaatagctttactaaaactataaattgttactatgtaataaaatattaatacatttcttttagctatatagcgagggattcatgaaaagtatagtaccatttattttttaatgaaa

SEQ ID NO: 456032 - DNA, 595 bp, Homo sapiens
ggtagcggttatggcttaagtatgctgggaagctacgggaaaggcacacctccctgataacaatagaggaaatctattatcactcccacctcctttcttccatccttgaatataaacacgatgctgagagttgcagcaccatgaagcattaagataattgctaagatcagcaaagtgcaggatagaaagcaaccaagaaaattatattgctgaatttctccacagctctggtgtgccttcatgtaacttcttgctcaataaaaagtttaatccattgttagataatttgttatccactacaaaacagtggatatggcaattagtaacgttaagcctactttataaatgcgttgataattttcttattaatatcctatttctttttagaattgtatttattttccaaacatagaaaggaagtataawgcattaatactgcagtttaattttaagatggttttcatcatagaaacgtgatgcaatagctttactaaaactataaattgttactatgtaataaaatattaatacatttcttttagctatatagcgagggattcatgaaaagtatagtaccatttattttttaatgaaa

SEQ ID NO: 456033 - DNA, 561 bp, Homo sapiens
gtaagttaccctatgatgcccacaaaggattccaaggacatgtatgacaggattattacgaggggaggaaattctgtaaatggagtagtttggatatgctattgaataatgcagataagataagaggaatgcctagaataaagaaagattgtaatagtgttagtaggaattcaaataaatcgaataaacaagagatgtggaataatatgccaaggacttggaaattggtatgattcagttgctatggaatgtcacaagttttaaaaggttagagaaaattgacaagtgcttcattgatttgcatgtacatcctcattctcatttgtatatcactgatataggacaggcatgattattcccatttcagagattcagaaaccaatgttcagagagatcaaaaaggatttgctttaaaaaaaaaatcccatagctagtaatttttagaactagggctcaaatccaaggtttcagatgattaacttaattgtgcttgytctctgaatgtataatttagtagagctctaatgaataattttttattatccaaatcatcaagcacta

SEQ ID NO: 456034 - DNA, 504 bp, Homo sapiens
tttcataagaaaataaagaaatgaaaaatattagagcagaggtggcaatatacttattatttagtttagcagataatatataactattcttctaagaaagcacataggaataaatttcaaaagtgttctgttagtaagattagtcaataaattatctagttaaaaaagcaaatatgcaaaatcaatagctatccccttgatatggtttggctgtgtccgcacccaaatctcatcctgaattcccaggtgttgtgagaggagcttggtgggaggtgattgaattatggggacaggtctttcccatgctgttctcaygatagtgaataagtcacactagatctgatggctttaaaatgggagtttccctgcacaagctctctctttgcctgctgccatccatgtaagatgtgacttgctcctccttgccttctgtcacgattgtgaacctcccgagctatgtggaactgtaagtctaattaaacctccttcctttgcaaatcaccc

SEQ ID NO: 456035 - DNA, 599 bp, Homo sapiens
gcttggtgggaggtgattgaattatggggacaggtctttcccatgctgttctcatgatagtgaataagtcacactagatctgatggctttaaaatgggagtttccctgcacaagctctctctttgcctgctgccatccatgtaagatgtgayttgctcctccttgccttctgtcacgattgtgaacctcccgagctatgtggaactgtaagtctaattaaacctccttcctttgcaaatcacccagtcttgggtaagtctttatcagcagtgtgaaaactaactaatacacccctatagagaaaattattactagctagaacttacaatagaaaaatagatcactttctatagaaacagcaattatcttacacctagaattaactctagtcagaaatgtaaaaactacatgatgaaatctttaaaactttactggagacatgaagtcttgaactaatgagaataccaatgtgtactatgttttaaggaattactccatattttaactctaagagataaaaatgaagaatagaggatgaggacgctcacatttgctaaggcaaatcaggaagggaagacttcttaaaagaaataaggctc

SEQ ID NO: 456036 - DNA, 537 bp, Homo sapiens
tcagtggacatttggttacttttagttaggagtaatatttagaaactgagatctgggaactagaatatgctcattgctaccagaatgttgttacttctggatctttcagcaatagagctaggaaaaaaaaatcacacatatgtatacatgcatacaaattctatatatgtctatatgtagaaatgtaaacatataaacatatagacatgtatgcatgtagacatatatgtgaaataactaattcattatgctgatctccaattscaatccaatccctcagggctcttccagccattctacttttgtagagatgtaaaaattccttatagatgttcttccaaaatgagaattccagcacccaaaaacatcaatatattaataactcatttgcttagttgtataatacacaatggtttcggaattgtaatatctatactgtaatgtggagagggaaaacttatattcattcatgcatgcatgcatgcatttttttaacatcttatttggaaataattatagattcacaaaaaattgcaa

SEQ ID NO: 456037 - DNA, 533 bp, Homo sapiens
acactaataatgaactacctacaaaataaatcaggaaaccaatctcatttatagttgctaccaaaaaagaaatcccacttaggaataaacgtaaccaaggatgtaaaagttgtgtacactgaaaactgtaaaacattgaaaaaatttggaaaagtcatgaataaatggaaagacacactattttcatggaatggaagaattaatattgttaaaatgtccttgccacccaaagcaatctatagattcaatggaatccctatcaaaatttcaatgacatttttcacagaaatagagaaaatgatcctaaaattcatgttgaaytacaaaagacccccaatagccaaagcagccttgagggggaaaaaagcttgacacattacagtacttgacttcaaaatatcctacaaagctaaagtaatcaaaactccattgtgctggcataaaaacagacacatagacaaatacaacaggatagagagcctagacacagacccatacatttaatggtcaattgatttttcaaaaaggggcca

SEQ ID NO: 456038 - DNA, 569 bp, Homo sapiens
tttctcatcctttaaaccaatgtgatttttttagagtgagtaaaatgtagtgttatgacagtgttgaacacatttcaygtagtttcacagagcatttccagaaaatgagtagcaatttaagacagagatttaatctattgagagtatgtctccaaattattttcctattctttaagattcctgtgacatttatgcatccttggcatctaccccctttatttttcccctctccatccacttactacgttatgtcaccttatttttttcctacaaattaatggcttcttaatggagaagaagttaacatactggccttaaggggaaatgcaagaggatagaattcaaagaaagctaatgagaatgataaacagtttgaggactgtagatttttatcattatcataaaattactctaattgtaatggcaagcctattaaaatgatctgtcattaaaattgcagtgctgtggcaagtaattttgtctatcaaataattttaatattgtcctaaaatgatactgtttcaatgctctcagtccagttagaatatataaatcatttataacaatga

SEQ ID NO: 456039 - DNA, 569 bp, Homo sapiens
tttctcatcctttaaaccaatgtgatttttttagagtgagtaaaatgtagtgttatgacagtgttgaacacatttcatgtagtttcacagagcatttccagaaaatgagtagcaatttaagacagagatttaatctattgagagtatgtctccaaattattttcctattctttaagattcctgtgacatttatgcatccttggcatctaccccctttatttttcccctctccatccacttactacgttatgtcaccttatttttttcctacaaattaatggcttcttaatggagaagaagttaacayactggccttaaggggaaatgcaagaggatagaattcaaagaaagctaatgagaatgataaacagtttgaggactgtagatttttatcattatcataaaattactctaattgtaatggcaagcctattaaaatgatctgtcattaaaattgcagtgctgtggcaagtaattttgtctatcaaataattttaatattgtcctaaaatgatactgtttcaatgctctcagtccagttagaatatataaatcatttataacaatga

SEQ ID NO: 456040 - DNA, 624 bp, Homo sapiens
ttggggctgtgacctttatgcagagtgaaaaatcctcaacatttgtcaccttagattcctttacatactcagtgaatcaccccagtagcaggtactaagactttgtggctagattggaaatcaggtgcaacaggtttagttaacacttcaggaactgagtcacagattcttcttagaatcatttcaagtcaggggttcccaggaaaacaagaatgccccattaactttataaggcatatgaattctttgttcctggatacmcttctgtacaatgggaccaagtagggtgcatgtaatcaaaaggaggaaatgcttccctgctcagggagacagctctgagagtaaatgggtacctacatttctacgggaagctttattcattagctagttacctcccctgtacacacacacacagcctctaccaactactcgttcaatgagctttagttttttcatgctgtggtgaaaatattttgaggtttagagccagaaagaagtatttcaaatactgctctgtcatttattagctaaaatacttctttcaggttctgtcttctcagttataaatatgaaggtagaaatacctatttggcacagctactatgaagactgaatgagatacac

SEQ ID NO: 456041 - DNA, 570 bp, Homo sapiens
ttttgaaatattcactaccatatcaatcaactaaaattttacttggctttaatgttgtgtaacatagagagggtacacttctaatatgacatataatctatcttgtaattcatttaccttattctatttttgaaaaattcattttaattttctcctgttgtcacaactccctaaccatctcaatgtgtaacaaaatgggaaatgcaattctgaacatatgaaatacagtactacaaaatactattggcatggtgaagtacttagatcataggatttggagtccaagctctgccatttactatgcaacaaccctcaatagatccctgaactgctcttagcctcagtttttcctctccaaaacatggaaataataaatagtaatgtctactaaggtaattaggaggactaaatagtgtatataaaggagtataggctggaygcagtggctcacacctgtaatcccagcactttgggagaccaaggtgggtggatcacgaggtcagaagattgagactatcctggccaacgtggtgaaaccccgtctctacaaataatacaaaaaaaattagc

SEQ ID NO: 456042 - DNA, 496 bp, Homo sapiens
agttgtaaactacaggccttatttatgtagtgaggactgtctaaaattagcccatgaatcactgtctctaagcattgttgtttgctgaagtattaatattaatgatacaaagaaattataaaactgataagaagaaaatttttagcatgtgttccctagagctcaaagttggttaatgkcactctggtgggcaatgttgttagtggggggctatacctgtgtgggggcagaggatatatgggaagtctctgtaccttctattcaaatttcttatgaccctaagaatgctctagaaaaactaagtctaaaaaaaaaaaaaaaagaaaaaagaaaaactaagtctattaaaaaggtgggggattacctgcaaagtatccttatggaattttatggtaacatctaaagagatctagagtttgagggagcagtctagactggaggcattttcttaagaagacatttatcactcatgttagtctgggtcctcccagaagca

SEQ ID NO: 456043 - DNA, 587 bp, Homo sapiens
agtgaaatgcagaaatcaagagtacaattaaatgagttttgacaatgagtaactgtcagcccaagtatacagcattaccatcacccacaaaagttcctctgtgccctttgcagtcagttccctcattcccttcccaaggaattactgataatgacataacaccagattagttttgcctgtaataaaatctcatataaacagaattgcagtattatgtaacttagtatctttcacttagcatatttttgagattcattcctgttactacacatatcagtaattaattcctttttgttgctgagtagcaggccatttaatgaatacaccacaatctgtttatctaaaaacttgttaatagacactgggattgtttctagatactggctattatttaaaaagctgctatgaacattaatacacaagtcttttatagacacgtcttcatctttcttgggtatacagctggaaaaagaaatgctgggtcayagagtaagtgtatgttctaactttacttaaaaactgccaaactatttttcaacatgatgtacaattttacactcccactagcaatgtataagagttctggt

SEQ ID NO: 456044 - DNA, 515 bp, Homo sapiens
tgtgaaacaacaaaaacaatttgtaacaaactaatcataaagaaagattatgtttccaaagcttattataccccacctccctatacacacacacacgaaaccaaaaaatctctaataaaggaccataatcaaaactttgcttaagaatatagtaaattgaaaaaattggcactgactgtggcctctatctacaaaatactcttattaaaatgctaactgtgtacattttatgtacagtagttatatttctaaagttctttatcawgagttaatgtatagtatattaaacagaaaaaataggggccttctagtaagaaaaatatatggtaggggcacatttaacccattaaaaatataatttgaaaagtctttgatttattatttacatgcaaatagaaatagctataataaactacttcttaatccagtttacagaagcaatgttttatgaaatgttgaaaagagcggactaggtttaaattccagattggccacttaatagctgcaatataagc

SEQ ID NO: 456045 - DNA, 561 bp, Homo sapiens
catttttcatctgctcataccctgtcagtggtattattatattgcctatggaactcaaattacaaagcaatctttctttgcttatgttataccatgccaagtaggcccaataattcagaaatataaaaccactaccactgcccattttcaatagaaagcaaataattggctaggtttttatttgaatagtagccttgctttccacagatcagaggaaagataaagtggaacaagttaagaaggaaaaaaggaaaaagaaaaagattgcctcagaggtgactgaagttagcaagggcatccaagagtcaggatcatagcaccactttgtcatttgttttctcaaagtgtaaccaaaggttgtttccagctcttgatttaggatctaagcaatcctggcagtactatctccttcatcaagtattctgtattcattccctagcaaagctggttatcrattaatttttttctgattaaatttacaagaataatacaaaagcaattgccccgtgaattttgcctctgataccccagccgaccaaatgtaaaagtggcatatggcat

SEQ ID NO: 456046 - DNA, 633 bp, Homo sapiens
ttgtagcccattagttggccatctcaattattgacagcctgatcaagtatctggagagaattaaaaaattaatcagctcaaatcaatrtctggaaaggccatatattaaaatttgtctgctctactattaagagagtcattcagttttgctctgtacctaaccctatgctcacttgaggcataactctaagaaaatgaatcataactgagtagaaaatcaactagaagtggtatggggaaaggagcaacgtgttattgatggacacattgagaggcagtggtctgatatttgaaacactaacacatttttattgtaaagaagacttggaagctcaaaatgggagcatttactcatggcacaaatgcttctgagttattttatcaataaaataacatcaaaaaaataaaatttattgtggttattcacatgtattgactagcgtactgttcatagtactttataaatatattggcatttatactcaccacaacactataatgtggaaactgttagtatctctattttacagataaaggaactgagacatggagaatttaagaactttgttcaaggtctcacagctaagcaaagacttctacccaggcagtgtaactccagagcatgtagtttta

SEQ ID NO: 456047 - DNA, 425 bp, Homo sapiens
ccacgcagcaaagatggtgacctgcccctccctctgggagctctgtctcggggagttttcaaatctctgtcagccaaagaacactggcaggggtggcaagaaaccccagttgggaggtcccacctagtgaaaaggaatgggatcwgggaccgatttaaagaagtagtctggccatgttttcatagcgcagctgccatgtgctgggtactgcttttgccctcggccagcgtggacttcacaaggcctaaaggctggaatggctaagtcacccaaacagcaaagatggcagcccacttctccccatgggagctttgtctcagggaggtgtagccctgctactggtgactggctggaatcccaggccagtgggacttatcctgtgaggtgccacagaagtggggcctgcagactgtggctgcttgcct

SEQ ID NO: 456048 - DNA, 593 bp, Homo sapiens
atattttttcaatgtactgattttctttcttttggataaatacctgctagtgggattgctggatcatatggtagttctatattcagtgttttgaagaacatcaccagaaaataaaaaatattattattatttgtctttttgataacagtcattctaactggagtgagataatacttcattgtggttttgatttgcatttctctgacaattagtgatgttgagcattttttatatacatgttagccatttttatatctcttgagaaatgtctattcagatgctttactcattttaaaatcagattattatttttgctgttgactgtttatatattctggatattrgtcctttgcaaaatgaatagtctgcaaatattttctctcattttatatgttgtctcttcactctgttgattgtttttacggctatgcagaaattttttactttctcttttcctatttgaatgccctatttttgcttttcttgctcgtgcttttgaaatcctacccataaaatctttgcatggactaatgcactgaaatattttctttatgttttcattgattagttcatatttttagaccttaaattga

SEQ ID NO: 456049 - DNA, 568 bp, Homo sapiens
tactgctgctgtgctttagcaaagagactggtggcattttgcccctgtcctagagatctgtgaaactttgaacttgagagcgatgatttagggcatctggtggaagaaatttctaagcagcaaaacattcaaaaggtgatttggcttttgaaagcatacaggtatatatgctcacaaagagatggtttgaaattggaacatatgtttaaagaaaaagcagagtgaaaagtctggaaaatttgcagcctgaccaygtggtagaaaaaaaaaaacaaacatattctggggagaaactcaagccagctgcagaaatttgcataagtaatgagaagctgaatgttaatagctgagacaaagggggaaatgtcttcatggcatctcagagatcttcaaggcaacccctcctattaaaggcctggaggcttaggagggaaaaatggtttcaggggtcaggcccaaggccccactgctctgtgcagcctcaggacatggcgctctgtgtcccagctaatccagctccagccatggctaaaaggggccaaggtacagcttgggctgtggcttcaga

SEQ ID NO: 456050 - DNA, 595 bp, Homo sapiens
tattaactctgtcaatgagtatgctaaacaaaaaggcaactttttctaatctttgtgattttccttattttatcttttgaaacattttatttctactaatgtttgagaaatgttctcagagtaaactgagtataaggagttttcttaaaaatagtttagttaatatatcttttagaaatgctaatccttggaccactgataaatgtccagctcacatcactttcttggttacactgaataaattggaacatttgcacttagctagttaccttccttgaggaggaatcttatcaaggaactctttttcttaactatgcccaagcagctctatatattctaaaagatcctgcaattcaatacgattaaaagcaacattatrtaataaaatcttatttctgaaaataacagcacattatttgaggaaatacttacttcgagagactgagacaagtctgaacatatgaagagatcagttgcagagcctctctcctgcaaaaaagacttgctctgccagagagaagaataataaactttctccacgagtaaaactggaaatacaacatattcatttaatgctcaagaaagactttcagta

SEQ ID NO: 456051 - DNA, 371 bp, Homo sapiens
acaaacatatccaactctaccaaacaacttgcatttacctaaatattccatgatttatcacatcttcttatatttgcatatactttttactttacctgaaatattcttctcctaattttccacataatatcytattcatcattgaaatttcaatgttaccacttctatgaagatttttttcttctttccccaacccctaacattacctgatctctcatttatgcttttatagtacttcaaaagtcttatttttaaaatgcactcatccaactttatctacctgactagtgtattagtttgctggggctgccataacaacatatggcttaaacaacagaaatttattttctcactattatggaagctaaaag

SEQ ID NO: 456052 - DNA, 567 bp, Homo sapiens
ttaaaataacctatgttatttgagtcattgaaatacataaaagatatttgtaagattatgttactactattaaaatttttaaagtttgactatatagttgaagagctctagaatcctcctttttccaaaataccttatttctcatgcctgggaactaaagcaacactgaaggatgaatcagttagtattgatttcaaggaccagaattattctgaagagaaaggaactgagtgagtaaacaaatagtagtgtggctttrtttacattttgagagtggaattggcttgtgctctaattagctaaattttataagatttctgttttatgcatattgcaaggtaccttctaaatgaatgcaattattcatcctcttaaaagcatacagaagtctaattgatgtgctgtgatattagctttaagcatgattttataaaagatcaaatttgcatttaatgaaaacttaacactttgacatatacttgtcaaagatatgaagaagttggcaattttatacatacagattctgcttaaaagaagtgcttctaaacaagagcccaagagaacctc

SEQ ID NO: 456053 - DNA, 578 bp, Homo sapiens
tattatgaaatattctttttttattagaaaaaagtatgcattcttccataaatctaattttaaaattttttgaaaagyttttgattttaattattttgttctatattcaggtcatatgtttgtattctgcaataaagagtataaaatatatatatatatataaattaatacacattcgagagaacttgcactacagtcacaattttttttgtcagtattctgcagtcttcaaaaatctctttagctaaggtgaatagtccttattttgcagtggaggtgagctgaaataaatgtctgctggtttctatcaattatatcttcttttcccacattcgatggtctaatcttagatttccctcacctttatattgcaggcaatagaaactgccaaacttaaaatcagttttgaacttgaagagtttacatagggtcaatggagttggaagttaggattgttttctatttaaaaggtatttcagctagggaaaaaaaatcaaaaattttttgttgtctgtctgaaacagtataagaaaactgacatataaatgagacatttcaacaatattctgagataaagc

SEQ ID NO: 456054 - DNA, 591 bp, Homo sapiens
tctacccctgttctaccagtgactataatgtgatacttgttctgccaagaaatcgttacttttgtaaattacagggacctcatagatttcaaaataaattcttgctccagattttacaagtgagaaaacgaaagcataagakaattaactgacttaccaaagatattacgtttaaatgcatgtttagttaatggaacttttagtccggtgttgttttcgctatgccataaaattattctgtacttttttttcttcatttataaaatgaggataatatatacgtcttgacagtttttagttatacatataaaatgggagaaataagtgaaaaatatttgtaaattctagattctacccccttatagctgagactaacttccatgattctggcttttgacaactggagctcaagacctaatttctttactgtaatgttataaatatagtgaaatgcatgtaagtataaaacctatgtactgttttaaatgagtgaatattgaaacataatatagaaattactatgtttcttctgatttatccaccaaaatatcagtttctaattatcatatattattactttccatattatag

SEQ ID NO: 456055 - DNA, 578 bp, Homo sapiens
attctgtacttttttttcttcatttataaaatgaggataatatatacgtcttgacagtttttagttatacatataaaatgggagaaataagtgaaaaatatttgtaaattctagattctacccccttatagctgagactaacttccatgattctggcttttgacaactggagctcaagacctaatttctttactgtaatgttataaatatagtgaaatgcatgtaagtataaaacctatgtactgttttaaatgagtgaatattgaaacataatatagaaattactatgtttcttctgatttatccaccaaaatatcagtttctaattatcatatattattactttccatattatagattattttctcctattttcctaattatgtatgtatctagttttgtagaaatagctctaaaattatcaatstgttggcttagaagagtaaatgaagcatcagggacagtgtgtttgactacatttctagtttctaaacaagtcttggttggataactctgtttatgaagtggaaatgtggtcaacaaactcttagtccctacagtccacagagaacactaaa

SEQ ID NO: 456056 - DNA, 592 bp, Homo sapiens
tgatcaactacataaaatattgatgcagttaagtgatgcattgcaattgtccatctctctgtactcaaatttaacatgtgtttacaaagggatgctgatctggaagcagattgaaacagttatgtattaaaagtttgttaggacaacagattgcaaaataaaagtttattttctgattttcacacttttcattatcatacagagtatgggcctacatttttattctagcttcctctctgttcattttcctctcattttaaacttattgcctcatccattaatttgcagaattaaaaaccataactgaattccattacctctgttgtgtactctccaacagtgcacatccacactaggccatagcaaccctgatagagcagcccgtgtgatccttctgtaggaaggaatgtgaaatgcaagtggttagcagagtgtccatatccttaatgaatgtyagcccttgaagctgagctcacctgcaataaaagatttgaaaattttctaattagagtcagtacattaaattagaggaagaaaatctattgacaccctggtcagtttctaaaggccctccttagtagctttctgcaac

SEQ ID NO: 456057 - DNA, 589 bp, Homo sapiens
aaatggccccaaatttattggcttaaaatggcaactcaggcatgggtggttcagctcgggtagggagaggtggtttactcatctactctaggtcaagctggccagctctgtttcaagtttttgttgtgtttaggcttatcctcactgtgggttggattcaggtcagctccatgtgtgttcattctggggtccagtgtaaacaaacagcatctacgcaggggaagctatgctcatggtgacagcaaaagtgcaagaggggaagcccaaccaggttagtccatttcaagcctctctttgcatcatatctgctaacattaygttggcaaagcaagtcacatggttgcatacaaagtgaaggtggggagttcactccacctgtagtagaaaggatagcaatgtcacatgacaaaagccatgggtataggaagtggtgaacaattggggccaattacacaatctaccataaggaccttcaagatactgaggttaacgttacaggagacaacgaagttgactttcagtcacttcatagattgttttttctttacctatccttaagtaaagataaaatttacttagtaaagataag

SEQ ID NO: 456058 - DNA, 589 bp, Homo sapiens
aaatggccccaaatttattggcttaaaatggcaactcaggcatgggtggttcagctcgggtagggagaggtggtttactcatctactctaggtcaagctggccagctctgtttcaagtttttgttgtgtttaggcttatcctcactgtgggttggattcaggtcagctccatgtgtgttcattctggggtccagtgtaaacaaacagcatctacgcaggggaagctatgctcatggtgacagcaaaagtgcaagaggggaagcccaaccaggttagtccatttcaagcctctctttgcatcatatctgctaacattatgttggcaaagcaagtcacatggttgcatacaaagtgaaggtggggagttcactccacctgtagtagaaaggatagcaatgtcacatgacaaaagccatgggtayaggaagtggtgaacaattggggccaattacacaatctaccataaggaccttcaagatactgaggttaacgttacaggagacaacgaagttgactttcagtcacttcatagattgttttttctttacctatccttaagtaaagataaaatttacttagtaaagataag

SEQ ID NO: 456059 - DNA, 589 bp, Homo sapiens
aaatggccccaaatttattggcttaaaatggcaactcaggcatgggtggttcagctcgggtagggagaggtggtttactcatctactctaggtcaagctggccagctctgtttcaagtttttgttgtgtttaggcttatcctcactgtgggttggattcaggtcagctccatgtgtgttcattctggggtccagtgtaaacaaacagcatctacgcaggggaagctatgctcatggtgacagcaaaagtgcaagaggggaagcccaaccaggttagtccatttcaagcctctctttgcatcatatctgctaacattatgttggcaaagcaagtcacatggttgcatacaaagtgaaggtggggagttcactccacctgtagtagaaaggatagcaatgtcacatgacaaaagccatgggtataggaagtggtgaayaattggggccaattacacaatctaccataaggaccttcaagatactgaggttaacgttacaggagacaacgaagttgactttcagtcacttcatagattgttttttctttacctatccttaagtaaagataaaatttacttagtaaagataag

SEQ ID NO: 456060 - DNA, 552 bp, Homo sapiens
catattaaagtaccaattgtatggtacagaaaatatatacaatagttgtttaaatgagattattgcgggcttaagtttttccagaagagataggattctggctggtgcctgaaaacattgtgtggtagaaagaagggggaaatgtatcattggtggaagactcagcacaagaaaaggaatttaggcataaattaagaaaatgagtgttgggacagataatgggctagcactgaaggggcatagataaggccttgatttttcagagctttaatatttaggttacagggtttagactactgtgtgtagccactggaaagcaattgaaaatagaggatgggcttgacatggtgtgcaataagcagtcaaatgattttgcagtgtgttgcttacattttatgaagaataagtggatcttctttctcttactgaaatggaagcaaaagacacatcttkgtccttgatcactgaaacctttaagaagttcttgagctcagatcaaagattatgttagtcaaaattctccagagaaatagaaaacacacatacacacat

SEQ ID NO: 456061 - DNA, 563 bp, Homo sapiens
cttgatgatggggaaacattctgggagataccctagcacattgatctgggcaaagatttcttgagtaagacctcaaaagcacaggcaaccaaagcgaaactgaacaaataggaccacatcaagctaaaaagcttctgcacagcaaaggaaacaatcaacaaagtgaagagaaaacccacagaatgagagaaaatgtttgcagcctagccatttgaaaaaggattaatagccggaatacatatggagctcaactaactcaacagcaaaacaattaatgtaaaattggcaaaagatctgaatacatatttctcaaaagaagacatccaaatgaccaataagtatatgaaaaaatgtttaatgtcactaattatcaaagaaatgcaaaccaaaactacaatgagatattatcccaccccagttaaaagtcttttatccaaaagacaggcaataaaaggtkctggtgaggatgagaagaaagaatccttctgcattgttagcaggaatgtaaattagtacagtcattatgttgaccagtatagaagttcctcaaaaaactaaaaaca

SEQ ID NO: 456062 - DNA, 608 bp, Homo sapiens
tatgtttcagtttcattctataggttctgtttcagtatttcaattcaatttcttattataattgaaggattatcttagtaaccttaaagaaatccacaattaatgtaatttatcaatatgtatttatatttgaagatgattattgtctaacatttagagtttatactatgatatatacacaactattatattttcaagtctttatttatacaagcaaccagtcatacaatttgctatttgttcaagtctttatttatacaagcaaccagtcataaaatttgccatttgytcatttatttattctttcaatcattcatttaacaaatgtttaactgcttactcatgtgccagacacttgactgagcaataggacaccaataatttgaaaataaaaagaactggtctctgcatcaaggatatcatattctatagacataggtaaccacataaatacaaaacagtgtgacaagtgcacacaataatatgtaaatattctaacatgaagggaggcatctagcagttcttagaataaagtatttctaaacctgttgtttgcatcttgtgctaagacttggatccactgaggacctcattcagaagttttattc

SEQ ID NO: 456063 - DNA, 608 bp, Homo sapiens
tatgtttcagtttcattctataggttctgtttcagtatttcaattcaatttcttattataattgaaggattatcttagtaaccttaaagaaatccacaattaatgtaatttatcaatatgtatttatatttgaagatgattattgtctaacatttagagtttatactatgatatatacacaactattatattttcaagtctttatttatacaagcaaccagtcatacaatttgctatttgttcaagtctttatttatacaagcaaccagtcataaaatttgccatttgctcatttatttattctttcaatcattcatttaacaaatgtttaactgcttacycatgtgccagacacttgactgagcaataggacaccaataatttgaaaataaaaagaactggtctctgcatcaaggatatcatattctatagacataggtaaccacataaatacaaaacagtgtgacaagtgcacacaataatatgtaaatattctaacatgaagggaggcatctagcagttcttagaataaagtatttctaaacctgttgtttgcatcttgtgctaagacttggatccactgaggacctcattcagaagttttattc

SEQ ID NO: 456064 - DNA, 589 bp, Homo sapiens
taagtgctcagtgcagagtttaacagcccttttatggactggtactagattacgtatcgaggggtggggtgaagatagtttttctatcgacatttgtaaaaccttagatttgggtttccatgaaccagaatactgctctacagacrtcaaagactctaaatgttgcaaacgattgtcttttgtttcttcattttcctttttccaggttgcttggtcacaaaaggcatctgtccacctgatctttccaagggagtatggtgggggtggttggggctttctgtgagggtgatagttaggcagggaaggaaggtgggagaggagaccactttgctttttctgcaaacccctgttatcgattaccctgtttgttcctttccccttaaactctcctaaaagaagggtcaattctctcaacatcagttgaatgaaaaatagcaatttgaacagcatctgcaaagtgacatgtataaaatccaaaataaaatgagtcctcaaactcatgtaattttcaattttctctcatttatttgaaagccccagtagcagggtcactatgacatggcgagaggatggaaaatctttatcagaa

SEQ ID NO: 456065 - DNA, 554 bp, Homo sapiens
ccccaaatattttcttaacattgaaaaatcaaatgacatgatttaagtatcatacatatatttccccttgatttattcaacattggaactcaaccagaaaaaataattatgtgaatacatatgtggacatcacttagaactctgtgtggagttctgtatattttccttggtttacagtgcattttttcttatggctcttatgggaattcatctgaactttcatgttgtcataacacttcartgttctctcagttataattcattaccacatgggatgagatgggctgtgcactttagcacatgctgaaatataaaagtctgaaggcactgctgactattcagctgactctaacaatgaccaatatagagacaccggtctttgtatgttactctctttctctatccatccacccccattcagacaaacccttggataaattgaacactcttagataccaaaggttagaaatagtgagttcttcagtgactctaatgagctcacagctgagtatattttccagactaacttagttttgaatatcaagagagacccc

SEQ ID NO: 456066 - DNA, 553 bp, Homo sapiens
ttcatgtgaatagctgtacttaagatttgtaacttaagccattctatagtgtagttaccagaccttttgtcatcccgtctccttccctgattctcttgtcattgtcccaattacaaatgtacttcttasaagtgaactcaatcatgtagcacagagtatgagcatgaccataatgtgagcattactttatatgctataattcaggcttgaattaacatgtaggcagccagatcaagcattggcttgttgaatttttgattaattagaggcatcaatctttcataatatgtactgttttagagttagtctacctaacacaggatattttgttgtttttatgttttacataggttttcctcaaatttcttaacaagagtttggacagtgatatctttatttccaaaatccatgtattatacatatgttaggatatttgtcaaatatacttttgatttcaaacattaaactgtccatatatctgagcaccaaaataagttgataaatatattttgcaagtacatttaagtctgagatctgaaacaaagtgtaagaa

SEQ ID NO: 456067 - DNA, 648 bp, Homo sapiens
tttgatgaagaagtggatagttgtgaattatgattggacaaagagagtatgatctaatgataataaactggtggaatttagcaaattctgttkattcagattctcctttgtgtctctgtgtctccagagtattctgcatagtattctttgacactgtatttaaaatctatatagcttggtgttgatggtagaatactttcaatttgtttgttaatcaaataatactttccagatatttcagatgcctttaatattttgacacacaaagggagaaatgtctgatgggggactttgtacgtgattttcttggagtgtagagacgattaattcaaagataaagcattgggaaaaagctggaaaatgggaaaattctccgatttggaaaaagctaaagaaaattagagaacatcatgacttgttcactctttgttcattttttgttctttataaattattctagtaagtttattaatcaatacattgactacttgactccaaaatattacggagtctgttgaaagtcattctgcaactcagggaaattatgtaactgccctcaaggttactagttcttagacttctatcatagatagcaagagaaatctaggaaatcattcacaaatcacatatcacatccagatggcttga

SEQ ID NO: 456068 - DNA, 553 bp, Homo sapiens
cttctcaaactccttatcctgcggaaattctacttaatctttatgtttgagctcagtcgtcattccatagcctccttgatttctgatgtggacttaatctttatgtttgagctcaattgtcattccgtagcctccttgatttctgatgtggaaattagtttctcttccctakgagatgctatatagtactccttgctttatatctctcttatagctcttaacattctattatcaattattatttgtatttaatatctttgaagacaggggccgtatggttatcattcttatgcctttcatagctactagcagtcatttattatattaggcagtcaataaattggttgaataaaactagactaattatgtggaatttattttgagatatttgtttctgttgtcttatggaaaattaaccatacaaaagccaccattcatgaagacagcatggaatggtagaaaaaaagtaaaaggtaaaatctggatttgcaccccatttttaaatttaattattttgtgaacctgaacaaattactaacttttctgagagccc

SEQ ID NO: 456069 - DNA, 595 bp, Homo sapiens
gccaaaaaatgtgcttgaactgtcagaaatatactttaaattgatagcgctaacctagtttaataaggaaaagtttccaccgtcttattagtagtgatacatttaaattcttaacttttttgtgatttttcagtcactagggcaatatgaatgtaaccttttcttgaaatgtcaattggaaatgaccccaggatgtaacgttatgaagtatgtagactatcagatttcatgtgctttatgtctgtaccgtgattttgtaagcacccttttatcacatatacaatatattttgttatattatttttaacgcctacttcattggcatgtttcttcaaaatgtagaattgctaaattctatataaaacatgctcttaatttccagtgacagactttgaggattcccaattgtttgaacaaagcataagatataaaaaagggaataacccagaaaagcccaacaccaataaccgttacacgaaacaaaggaagtaaagaaggagaagctgaattcacaccctttgaagaagggggacaattgagttattcctaccgtagactgaaggamgaaggccgattttcctgttgcctcctctct

SEQ ID NO: 456070 - DNA, 618 bp, Homo sapiens
tctaagatactatcagttgtaacatgcatccttattttatgtaccatcatgaaaaaatgtaaagccctgataattatactttgacacaatcctaatacaccattaattttaagacatgtgccagtttcggacattaaaatttgaacaaatatgcatgttagaattgatgaaatatgttttaatggtttaatgaaaaggaagaagaaattaaaagtcttgacagaatttgataatcaaattgctgaagatagaatggaaaaggaagtaatcaaacatgggcttgagatttttagttttatttcttgatgtcagtatcaaaaaatgggaagtcataatgagaaaaatggtttaattgtgatgccattgggatttctgggtgttgtaaaagagtmagaaatgtgaaataaagcttgaaaacatggttgttatttgagagtgacatttaaaaatcatctccttaggagtaatttttaaagccatgggaatatgtgagctcattaagtagcagaggatatagaaagaaaatagaactaatgttaggaagctaaatttctggatgaggataaaggaacaaacaaactccaaaagcaatgataattagaatagcaagaggtgtga

SEQ ID NO: 456071 - DNA, 618 bp, Homo sapiens
tctaagatactatcagttgtaacatgcatccttattttatgtaccatcatgaaaaaatgtaaagccctgataattatactttgacacaatcctaatacaccattaattttaagacatgtgccagtttcggacattaaaatttgaacaaatatgcatgttagaattgatgaaatatgttttaatggtttaatgaaaaggaagaagaaattaaaagtcttgacagaatttgataatcaaattgctgaagatagaatggaaaaggaagtaatcaaacatgggcttgagatttttagttttatttcttgatgtcagtatcaaaaaatgggaagtcataatgagaaaaatggtttaattgtgatgccattgggatttctgggtgttgtaaaagagtaagaaatgtgaaataaagcttgaaaacatggttgttatttgagagtgacatttaaaaatcatctccttaggagtaatttttaaagccatgggaatatgtgagctcattaagtagcagaggatatagaaagaaaatagaactaakgttaggaagctaaatttctggatgaggataaaggaacaaacaaactccaaaagcaatgataattagaatagcaagaggtgtga

SEQ ID NO: 456072 - DNA, 560 bp, Homo sapiens
atctgccccagctttgacttcttaactcctgtagtaatttttatttccctcacttatgttgaatatttagaatatactattagtgtatagtgttaaaaatatgtttatgatctctctatccctgatgtctgagatcgtatcgtaaatctctttgccctttattttccaggaacctggcacaagggctattgataaagatttgcagatgatggtgactttataagacagaaccaggagagctggcaggcattgactttgaaaattcaaaatrttcaacaattttgagggaaaggggtaaatttatttaccttgaaaaccggatattgctcctgtgagtttccaaatatcagataaacagctgttctgattaaccacatcaacatttaatccttgccacggaaatctcacaatcctcaatattatgagagagaaggagtgagtgagaacacgatcagtatgattaacttaaaattatttaaatgagtggatttttaaaaaaatcatctttcatgtacttatagaaaaagtgattaaatacattgaaaagagaaaattttaag

SEQ ID NO: 456073 - DNA, 589 bp, Homo sapiens
cttgctctgtcacccaagctggagtccagtggygtgatctcgactcactgtgacttctgcctctcgggttcaagctattctcctgtctcagtaacctcagtagctgggattacaggcatgagccaccacacctggctaatttttttgtactttgagtacatacagggtttctctgtgttagccaggctggtctagaactcctgagctcaagaaatctgcctgccttggcctcccaaagtgctgggattacatacatgagcctctgcacctggcaccacaaatatttttaattttaatttaacaaaacatttctgaaacaattgaagatcccttagtatccaatctatagttgcattttcttctctttcgtgatagaattgttctatatcttatccttcggaatttcttattttaaatactttttacatattcaataatgcaaaaacaacgccagtatttttttgtgcattttaaaagtttaaataagttatatcactatgtaacttgtttcttcgtctcaatataatgcttttgagatcagtccatattggtatgtaatgatctggttcattcaccttaattgctatac

SEQ ID NO: 456074 - DNA, 609 bp, Homo sapiens
tatgtgtgaataaaggagacaaagaatccagtatataatttttttagtacactataaagataaatcttaattgctttggagatagacaaaggagtcaagacaacactgaaatcagtgttcagtatcccacttaataattggctaatgcaaaggaaaggttaggagagtcactactgcttttcattctaccaggctggaataagyaacactgtgaggccaaagtaaaggtgagaagacctcaaagaaagaaaacccagagagctggaaaacttctggaaaaatgataatagctgatcaaggcaagccagcctccaatccattggtagaaaatcataggactatttcatagggaagaagatgagttagactgggatataagaaaataacctatgctcattggagaatatagaggaaaaatttcccctcatactcaaatgtctagaaagagcatgaaatggcacatgaccagaggttggaaaccagtaatcataatagcttggggagtgaagaggggaaatcaagcactgaggcccaggggatgataagaacgtgtttgtacatgaacataggtcttaacaactgtgaaaaactgtttaaactggagaaact

SEQ ID NO: 456075 - DNA, 585 bp, Homo sapiens
gtcttaacaactgtgaaaaactgtttaaactggagaaactacagagatgacctggaaacaaatgatagcataatagttcaatatctaattctgtagagggaaaagactttcatcagaggaataaacttagagaaacaagtgaatagcaagtatcagatgaaaaagatattggaaatttaaaaataatagcactcctaaataattgatgagcaaaaggaaaaaaaagaaattgtactgaagattagaaaatacttggaaaataatactaataagcttacaatatgacaaaacttatgatatgctggttaagtgttacttagtgggttacctacaaccttaactgcttagagaaaaaaagttagaataaaaatcatgagttaaaggttatacttatgaaattagaaaatagcaatagattaaattcaaagtagaaagtagaaagaatgaaataagcataatactaaacattattaggtgtaatattaaacattattaaatagaaagcaaagayaagatagaatcaattaatttaaattatggatctttgaaaagtctaagagagtagacacatttatgacaagaatt

SEQ ID NO: 456076 - DNA, 634 bp, Homo sapiens
taccctatttctgaaaacaacaacaacaacaaaacaggacagagttattgaacaataacaggcaagacattgtcctgagctctatgattggcctagttgactgccaagacaaagtttccaggtcacactgcagagagggaaaactcagtcatagcacagcagtctccctgagtcaggaagatagagcttggagtccttggataccaaggtgtctagagtttgaagtgaggagtaagatagaggagagacctatacggaaaccccagagacctgcagaggttcccccttgaaaatttagtttatgatcagtgcatgcgtgaaagtaagcaaactatccaaatcaaggtggaaaaccacataaacagattacaaagaatagtgctttagactcatgcagagcagagaataatggactcttcccaggtgctaaagtggaaaatcttataattcacagggcatcaattaaagaaaggtcttgccccagtagcagggttaaattartcatagactaactactgctgctctggtcctgcctaacatatcttaagagcataacctaagaggattaagctattccaaagtaatttatctgcttcccagaacaaatctcaaagtctgccacccagataaaaat

SEQ ID NO: 456077 - DNA, 515 bp, Homo sapiens
tgtgaaacaacaaaaacaatttgtaacaaactaatcrtaaagaaagattatgtttccaaagcttattataccccacctccctatacacacacacacgaaaccaaaaaatctctaataaaggaccataatcaaaactttgcttaagaatatagtaaattgaaaaaattggcactgactgtggcctctatctacaaaatactcttattaaaatgctaactgtgtacattttatgtacagtagttatatttctaaagttctttatcaagagttaatgtatagtatattaaacagaaaaaataggggccttctagtaagaaaaatatatggtaggggcacatttaacccattaaaaatataatttgaaaagtctttgatttattatttacatgcaaatagaaatagctataataaactacttcttaatccagtttacagaagcaatgttttatgaaatgttgaaaagagcggactaggtttaaattccagattggccacttaatagctgcaatataagc

SEQ ID NO: 456078 - DNA, 522 bp, Homo sapiens
tctaggacaaaggaaggcacagtccagcttcccaccttggctgttgctgtttcctagcccttggaatgccatatccctctaacccatgtctccyatgctggttttccaggctcctctggaacacactacctgcttccatcctcatgaaccagaaagcacgtgcctgtggcagtcaccagtcatgtgtcttcttttggtacatgcctgatgttccagatggtctgtgaggcagggtccttgtcttgtcctctgctgatcccgagtccacacagcatcttgcatggagcaggtgaccccctggagcgtgtgtggatccagccacctcctcttctagggcagctcagcctcccagagcgccatcctcaacatggccagaagatggcaccaaggcttctgtcagcgccacctggcaggtttgtgtgtttggctctcggttgaaggagagaagccttataggttttgcccgccgtctatgacagtctcttttcttgagtcaggcagaggtgtccctctgtgattttt

SEQ ID NO: 456079 - DNA, 622 bp, Homo sapiens
ctgtttgttagttttccttctaataggcccctctgctgcaggtctgccggagtttgctgaaggtccactccaggccctgtttgcctgggtatcactagtggaggcttcagaacagcaaagattgctgcctgttctttcctctggaagctttgtcccagaggggcacccaccaaataccagctggagctctcctgtatgaggtgtctgtcaaccccagctgggaggtgtctcccagtcaggaggcacrggggttagggacccacttgaggaggcagtctgtccctcagcagagcttgagcgctgtgctgggagattcactgctctcttcagagctggcaggcaggaatgtttaagcctgctgaagctgcacccacagctgccctttcccccagatgctttgtcccagggagatgggagttttatctataggtccctgacgggggctgctgcctttctttcaaagatgccctgcccagagaggaggaatctagagaggcagtctggctagagcagctttgcagcactgtggtgggctctgcccagtttgaaattcctggcagctctgttcacactgtgaggggaaaaccacctactcaagcctcagtaatggtggacgcccctc

SEQ ID NO: 456080 - DNA, 478 bp, Homo sapiens
ttgttcatgaatgtgcaggttggttgagctgttcttatcgggggctggatttactcatgtgtctgcgatcagttgcctatctgcttctgtaggaggattggctagccatcaggggagtcttttacatgtataggagttcagctgggatgrctggagtggatcatgattgttgtggtctttcatcttcttccagcaggttagcccaggcttcttcatgtagcaactggctttcatgaacacctagagaacaagccccaatgtgcaagcacttttaaagtctctgtgtcatgtttcttaatgtcctattgtccaagtgagtcacatggccaattcagacgaaactgggtatgtgtagggtggtatggatatacacacatgggcaattcagaatcagtgtgaaagggacaaaatctgtagccatttcagaatgtactgtggtagtaaaaccatttttcaaataaaagctgccttggaacta

SEQ ID NO: 456081 - DNA, 606 bp, Homo sapiens
tactgataaatgccctacctgtgaaataactattcagggaaagaaatttaaaggtttggtagatgcaggagcagacatttcaatcatttctctacagcactggccatctgtatggccaattcaaccccctcaatttaacatagttggagttggtaaagcccctgaagtatgtcaaagtagttatattttgcactgtgaagagcctgatggacaatctgggactatccaaccaattataacttctgtacctatacatttatgtggaagagatttattacaacaatggggagcacaagttctaattccagaacaattacatagccctcaaagtcaacataggatgcataaaatggggtatgtccctggtatgggactagaaaaaagtttgcaagatttgaaagaactgcttcaagcggaaagacaaagttcccgccaaagattargaaataatgtttgatggcggccattgttaagcctccagaacctatacctttaaaatggttcacagataagccaatttggatagaacaatggccgctaagtaaagagaaactggaggctttagagaaattagttaccgaacaattagaaaatgggcacatagct

SEQ ID NO: 456082 - DNA, 584 bp, Homo sapiens
caacagcagatgtctactagacttcttgctaaataagaaaaaaaagaaagaaatacagtagacccttgaacaacatgagtttgaactgcatgggtccacttatacatggatttctttttcaaccaaatgtggataaaaaatacacagtattctcaggatgtaaaatctgcttataagaaagactgactttttgtrtatgttgattctgcagggacaactctaggagctacctagagttggagctacctagagttaaagctacctcttaagaggttaatccatgtattaggatacaggctaagcttctgtaacaaaggcaccctaaaattcagtagctcaaaccagatagttcattctgtctttcatgtaacagttcagaggtgagaagtacagagcatacaggctgctctgctccgtgatgtcacccagagctccagggttgttttggttgtgggtctaccatttccaggattgttgctctccatgacatgtttgagggtgggtggttcaaaaagaaccatgtttgcacgccagcccctaggaagggggaaagaagacgggaggctgagtagtctcctttgtaa

SEQ ID NO: 456083 - DNA, 560 bp, Homo sapiens
aagcactgggtcaaaaacaaaatcaagatggaaattaattcttaaaactgaattacaataatgacacaacctatcaaaacctctgggatacagctaaggcggtgctaagaggaaagttcacagccctaaatgcctacatcaaagtctgaaagagcacaaacagacaatcccaagtcacacttcaaggaactagagaaacaagaacaagccaaacccaaacccaaaccmagcagaagaaaagaaatacccaagatcagagaagaactaaatgaaaatgaaacaaaataaatacaaaagataaatgaaacaaaactggttctttgaaaagataaataaaatttatagactgttagcaagactaaccaagaaaagaagagagaaagtccaaataacctcactgagtaaagaaacaggagatattacaactgacaccactgaaatacgaaagatcattcaaggctactatgaacacctttatgcacataaactagaaaacctagaagagatggaaaaattcctagaaaaatacaacactcctagcttaaatcagggagaactag

SEQ ID NO: 456084 - DNA, 587 bp, Homo sapiens
ctaagtggatttactgaagaagagaaaaatattcaaagatatgatagaagaaaactttcctgaaccaaagaaagatctgaattcatggattgaaaggtgcaccatgtataggtaaaattagtgaaaaattgccaagacctggagaaataactatgtcttgaatcttaaaagcatcctggttaccaagaatagaaagggatatatggctagctctagacttttctgcaatgttagattccataagatgtggaacaacattcatgaaggtggtttgagagtaaaaaggggtacagtgcaagaatgttayggtcagctgtagcagatgctttttgtgtcctacaccacatctcttagaccacttgtcattttaactgcccatggtagcagtttccagatatgctgtcagcttctcacttcaagcctccaaagctgtagaagcaagaagtcaaagggagctaataatgttccttgttcaattcttgaccaattggagggaagagttggtagatgaatgccctgggctcccacctttgtggaacaattttgaggcactttctacagggtcctcagaggtccccaggagcaat

SEQ ID NO: 456085 - DNA, 579 bp, Homo sapiens
taacattttaaaatcatttcttataattttttattgagtaatagacattgtgaatcaaaaaaatgtggagctctggatgatgttatctctctcccaaatggttaagatttttcttctttttctttttggtaagttaacagatcactttattctattgaaagttaattttaagactttcttagagttcatctctttcagtttttccctctcttacagagcatggtccctctgagatcttaacagagaatctgaggcattaaccaaacctctcccaatttgaaagaacttaaattccaatttctagctcctcagcaatggtaagctttgggatctctactcagaagttcagcctcccaactgctgctttctgcttggctctttggaatcactctgtacgyggaaatctcaggagacagccaatgacctaagaggcattttagagcttctctcattgcagctaagtcttttccagaattttgttcctcaatcctttcctgctctggcagactcagacttcatccattgtctccttggcccagtcagattacagctttctgcttggcgaaggcctagtgctta

SEQ ID NO: 456086 - DNA, 569 bp, Homo sapiens
tggctattgtcacctataattcaatcaatagaaaaagacaggtttcaaataaatcctaatgcctcccactaccaaaaacattttttaaaaagatctggtagggcctgagaatttgtttgtctctgctggtcatgtgttctgagctcttacggccaggagaggggccctagcaccccaccattcacttccctttctgactttggaagagtagcctcgacccacagatctaagaatccagccccggtgtggatgccaggacccctgcacatcccctccctaccctcagtgccccctccccaactctcctaatggggcatctgtgggaggttcgcattccaggctgcagctgctgccgcctggcagagcccaggcatcrtttccattccacagctttggcctgacatctggtggagggacgggaagcggtgcatttagtcaaatgacaaggagagtggctgcagccctgggcaggcagggtcttcctcctacggaaagtgagggtagcttccagagtctcctggaagcttccaggagtcaggggctttaccttcaaccagtaagggccacca

SEQ ID NO: 456087 - DNA, 537 bp, Homo sapiens
gtccctttgcttagtagagcacacaaagtgtgctgagcactgtgatgtgtcacccagatctgccttcagggaaagggatgtattccccatctgctgggagtgctggcaraagacaactctcagctgtcagccctcttcaaggattgcttcaactggaaagaaaattgcctcccccaaggtcatgtctcttttagggacagcctgcatccagtaaataaattggtgctgggaaataaaggcccagctccttgctccaaatcagaacaactctgaagaatcatcccagcttcagagcaaccagtaggatcagctaaggcctccactgacacttaaaagaaatcaacttctccttgtaccttcctgatctttcccttcccttccacagatactgattcctagagcatttcctaataaatgcctcatgtgctaatctctaatctgcttcctgagtaacccaacctgcaatcactggtgccaagaatggtccaagaaagcacacattggtacggaatcatgcaactagcatgtggaccccat

SEQ ID NO: 456088 - DNA, 593 bp, Homo sapiens
agatgcaaacccagcctgccctcctgcccagagagcccaacagctgatctcagccttccctccctttctctttgcatgatagatgcaggaagaaaacagtattgtacctgctcggtgcattctctagattctaccttttttaaaaaaaatgatttttgatgatataagcagcacgtgaacacattctcctgtttaataaaaagcagataagcctgaagttccctttgactttcaccctcaatctccatctctccctcrgtggttacacctgcctttctagacctttccctgtgcatttacatacatgtatctgaaccgatgggaaagaagtcgtgttgatggacatttagattgtttgcaacagtttgctattacaagcctcactacaatagacatgttcctatatgcttccttggggaggtttctccagggagtcactcagcaaagggaaatctatgagtcacaagatatgatccaatttaccctcaccggtactgcaggggactctcttttgcttaatgaattgtaagagctcactaaatattgcatgagttcttataacaggcaaatgtggaaagggacactgctgttga

SEQ ID NO: 456089 - DNA, 593 bp, Homo sapiens
agatgcaaacccagcctgccctcctgcccagagagcccaacagctgatctcagccttccctccctttctctttgcatgatagatgcaggaagaaaacagtattgtacctgctcggtgcattctctagattctaccttttttaaaaaaaatgatttttgatgatataagcagcacgtgaacacattctcctgtttaataaaaagcagataagcctgaagttccctttgactttcaccctcaatctccatctctccctcggtggttacacctgcctttctagacctttccctgtgcatttacatacatgtatctgaaccgatgggaaagaagtcgtgttgatggacatttagattgtttgcaacagtttgctattacaascctcactacaatagacatgttcctatatgcttccttggggaggtttctccagggagtcactcagcaaagggaaatctatgagtcacaagatatgatccaatttaccctcaccggtactgcaggggactctcttttgcttaatgaattgtaagagctcactaaatattgcatgagttcttataacaggcaaatgtggaaagggacactgctgttga

SEQ ID NO: 456090 - DNA, 593 bp, Homo sapiens
agatgcaaacccagcctgccctcctgcccagagagcccaacagctgatctcagccttccctccctttctctttgcatgatagatgcaggaagaaaacagtattgtacctgctcggtgcattctctagattctaccttttttaaaaaaaatgatttttgatgatataagcagcacgtgaacacattctcctgtttaataaaaagcagataagcctgaagttccctttgactttcaccctcaatctccatctctccctcggtggttacacctgcctttctagacctttccctgtgcatttacatacatgtatctgaaccgatgggaaagaagtcgtgttgatggacatttagattgtttgcaacagtttgctattacaagcctcactacaatagacatgttcctatatgcttccttggggaggtttctccagggagtcactcagcaaagggaaatctatgagtcacaagatatgatccaatttaccctcaccggtactgcaggggactctcttttgcttaaygaattgtaagagctcactaaatattgcatgagttcttataacaggcaaatgtggaaagggacactgctgttga

SEQ ID NO: 456091 - DNA, 637 bp, Homo sapiens
cctcttgaattaaggagcaataatcaaaaaaatcctggggtttgtttctttctcccctaaaaacaggatttccttcaatacttttcccagtgtgtctcatgacctctgacgtatataaccccatgtgggctgcattttttggtcccacagctgtgaggcaaagtgggggtaatattcagccttaaaaaggaacattcgtcatttgagacaacatggatgaacctggaggtcattatgctaagtgaaataacccaggcacagaaagacaaatattgcatgacctcacttctatgtggaacttaaaagagtaaaactcaggagtgcagagtagaatggtggttactagggctgtgatatgggaagataaattgtttagaaggtacgatgtttcagttagataggatgaataaattattgaatgtacagcatggtgactacagttattaacactggatactatacttgaaaattgccaagaaattcmattttaaatgtgctaacagcacacacagaaaataagtatatgtggagatagatatgttaattagcttcatttaatcattttacaatgtatacatatatcaaaacatcatgttgtacactttgaatatatatatttttgtcaattatattttaa

SEQ ID NO: 456092 - DNA, 595 bp, Homo sapiens
acatcagcattacagccacattcagttggccaggaattacagttgaaagaaatttatttcccagcagtcagagctaatgaaagtgctagtcttctacaactcatctggccagaggcctagaagaaaaggagagacaaatcmgagacaaatttctctggatagagtcacatggatgggtggcatatggaaattagcaccaagtgtggatgcccattataaaacaccaccatggaagtgtcactggattactaaacaaacagaatgacatggccagttgatgttggccagacttcatcatatgccattttgaactggcatgcatcaatagaatggccatgtttgtgttttcaaggttaattacagcaggtttgtcattatcttgggctgctttgctaacgttcgtttatgacaatgacccttactcgaggcacaaaacatactgattaatagtattgctttgcaaccatgggtctgaagagtttctggaccattcattccagttagttgggattgtttattgataacaatgagattgatgatttgcacctggtttcagtgacactctggaggattctgctgataaaactggttatgt

SEQ ID NO: 456093 - DNA, 583 bp, Homo sapiens
cttcttgtctaccatcaatgcctttgtgctgatccctttccttcatctttcttaaattaatggtggcaaacttcagggtatctaaaattactgacttcggtgggaaggtaacatcttatacctggtatttggctttggactgcctccaattgtctgtgacaaatattcaggccttaaaaccccttgctgtattatctcttrctaaggctacctctccatagccacctattacaataagcctcacttaattttcttcttaatttgttcaagtcaaaagcaggagccggcacacagttacattttgagacttacaaactagtcctactaatgctcaacctctcagtaacatggacagctactgagaataacacaaatttcagtttcaccaaatattttgcagtagactaacaaataactcaggttctttgccttatgccaccaataactagccaataccttatattttaacccatttttggtatcacctaccatatcagcctggattcaggacaataaataaaaggaattttaggtgttttaaattacaaaacatttagctggaaagtattatatatttaccata

SEQ ID NO: 456094 - DNA, 635 bp, Homo sapiens
gagatggcattaggccatatgcccaagctcatcttgaacactgggctcaagctatccaccagcttcagcctcccaaagttgggattataagtgtgagccaccacgcctggcctagtatttttctaatgtggatgagaggaacaacttgtaacttccttctatgccatgctagaaactaaaagtgcccctgtaattctatgtgtgtaatttgctytatttgaaatatctagagtgatctcttttccataaactaaactacacattataaaaattaatagaggatcatcatattatctaaaattacggtaatatcaacctgaaaaaaatataaattacaaatatttaaaagtgattctttcagagaaggggctttaagaggagggacgtttaatagttttctagtgcattttattttatttgtattgtgttcaatgttatgcttcacagttctaaagaaaatcattcaagaagtcatgaaatggagggggaaaagaagacgataaattacaggaaggaaaaaaatcaaaaaaagagagagaatataaggggtaaaactggatagaaactatcggtgctgttaattaacaggtcaatggtacttttcattagaaaaaattcaaaatgaagttagggga

SEQ ID NO: 456095 - DNA, 599 bp, Homo sapiens
  misc_feature (1)...(599): n = A,T,C or G
acaaggaaggaggagaggctgaacattcattttacacaggaaaaagaataagtattaggtcaattgcttagtgnaagagttatttattcaagtgagaataatcactttaataatagataaatcactatgggtaatagaagaagtagttgaaaatctacaagtaagaggattgctatgtagaactagaaattttttttttaccctttagaacttgacatgggagagttaccaattgaaacagcacaatggtgtcatcaacgtttaattgataaaatgtaaaaagaaaaaaaaagaaaggtactagtgcttttagaaaaagaaatataaacagtaaaatgagaaggtataaaacagaaatgaagaacatgtaattgaagcatcatttcagatgtggagaaagagaagaaaattgaagttagaaatggtgttaagaagatattttctttagataaacagaagggaagcayagacaattattaagaaatattacacgacaaatttttggaacccctacagctgcagcgggaaaaaaaaataacaaccctaaatgtagccaaagaataatgaacccaaattgtggcaaacctattaatggcccc

SEQ ID NO: 456096 - DNA, 536 bp, Homo sapiens
catcactgaaatcagcaataatatgaagccattttaacacatacatatctagcagacctgagtgactttactctctcctgccagtttggcaactactcattaccttgttggacaatttctacagtctactgtttccaggtgtctctgagttcttgccaatgctatactgtgcaggtgctacctaycacctacctcacacctgtttgatattatggcccacccaccttcttgaaaaatagggttcacccctcagtgactgcaatgacccttctgaaattttatgttggcttcactgcttctggaaacagctccctagtattccagaccagctcaacagagaccacaaactttctcagtcactcctgaaaacaagactaggctgcaggagaaagagtagagggctggctgggaacctagggaactggactccaggtgtgattctgaaataatttttgattgatcttaattacttttctctgcctttccggaaatcagttttttatcttgaaatgcaggaactctattatgtactgttt

SEQ ID NO: 456097 - DNA, 536 bp, Homo sapiens
catcactgaaatcagcaataatatgaagccattttaacacatacatatctagcagacctgagtgactttactctctcctgccagtttggcaactactcattaccttgttggacaatttctacagtctactgtttccaggtgtctctgagttcttgccaatgctatactgtgcaggtgctacctatcrcctacctcacacctgtttgatattatggcccacccaccttcttgaaaaatagggttcacccctcagtgactgcaatgacccttctgaaattttatgttggcttcactgcttctggaaacagctccctagtattccagaccagctcaacagagaccacaaactttctcagtcactcctgaaaacaagactaggctgcaggagaaagagtagagggctggctgggaacctagggaactggactccaggtgtgattctgaaataatttttgattgatcttaattacttttctctgcctttccggaaatcagttttttatcttgaaatgcaggaactctattatgtactgttt

SEQ ID NO: 456098 - DNA, 536 bp, Homo sapiens
catcactgaaatcagcaataatatgaagccattttaacacatacatatctagcagacctgagtgactttactctctcctgccagtttggcaactactcattaccttgttggacaatttctacagtctactgtttccaggtgtctctgagttcttgccaatgctatactgtgcaggtgctacctatcacctacctcacacctgtttgatattatggcccacccaccttcttgaaaaatagggttcacccctcagtgactgcaatgacccttctgaaattttatgttggcttcactgcttctggaaacagctccctagtattccagaccagcycaacagagaccacaaactttctcagtcactcctgaaaacaagactaggctgcaggagaaagagtagagggctggctgggaacctagggaactggactccaggtgtgattctgaaataatttttgattgatcttaattacttttctctgcctttccggaaatcagttttttatcttgaaatgcaggaactctattatgtactgttt

SEQ ID NO: 456099 - DNA, 472 bp, Homo sapiens
tttacaaaaataaaaaaattttaagcagaaactatgaacaattctgtcagcttatcagataaccagttgaacaaactcttagatatacactatccaccaaaccaaatcatgaagaaatagaaaatttgaaaagatatataataagtaaaaaaaattgaatcwttaatctaaaatctcacaagaaagaagtgttgacccagaaggatttactggagaagtatatgccaatccttttcaaaatctttcaaaaaagaaagctgaaaatagggactacttcctgtcttgttccatgaggcacacgaatacccggatacaaaagccagacaaagacactacaagaaatgaaaactacagaacaatattcctcatgaatattgatgcaaaaaagcctcaaaaacatttagcataccagatcattcctgtggccgtaggtaagatggccaactggatgcagccaggtggaacagctgcc

SEQ ID NO: 456100 - DNA, 621 bp, Homo sapiens
aaaaatcatatgattgtctcaatagatgcagaaaaggctatccataaaattcaacatactttaatgttaaaaactctctatgaactagatacaaaagaaacttacctcaaaataatacaagccatctatgaaaaacccacaaccaatatcatactgaatggtgaaaagctggaagcattgcccttgaataccaaaacaagacaattatgctctctttcaccactcttattcaatatagtatgggaagtcctggacacagcaatcagggaagacaaagagagaaagggcatcaaaataggaagacagaaagtcaaactactgtgtttacacacaacatgattctgtatctaaaaaaacccccatagtctcaaaacaaaagctctttcagctgataacttcagcaatgtttcaggattcaaaatcaatgcacaaaaattactagcactcctatacaccaacaaaagacaagccaagagccaattaacaaacacaatcccattcacaatagtggcaaaaagaataaaatacctaggaatacagctaaccagggaggtgaaagatctctacatggaaagctacraaacattgctgaacaatatcagagatgacacaaatgtaggg

SEQ ID NO: 456101 - DNA, 621 bp, Homo sapiens
aaaaatcatatgattgtctcaatagatgcagaaaaggctatccataaaattcaacatactttaatgttaaaaactctctatgaactagatacaaaagaaacttacctcaaaataatacaagccatctatgaaaaacccacaaccaatatcatactgaatggtgaaaagctggaagcattgcccttgaataccaaaacaagacaattatgctctctttcaccactcttattcaatatagtatgggaagtcctggacacagcaatcagggaagacaaagagagaaagggcatcaaaataggaagacagaaagtcaaactactgtgtttacacacaacatgattctgtatctaaaaaaacccccatagtctcaaaacaaaagctctttcagctgataacttcagcaatgtttcaggattcaaaatcaatgcacaaaaattactagcactcctatacaccaacaaaagacaagccaagagccaattaacaaacacaatcccattcacaatagtggcaaaaagaataaaatacctaggaatacagctaaccagggaggtgaaagatctctacatggaaagctacgaaacattgctgaacaayatcagagatgacacaaatgtaggg

SEQ ID NO: 456102 - DNA, 623 bp, Homo sapiens
tgtgggtagtgttgctataaacaagggagtgcagagacctcttcaatatactgatttcctttcttttggatatataccaagaagtgggtctggtagttttatttttagtgttttgaggacctgccatactgttttccgtagtggctgtactaatttacattccactaayagtgtactagtgcttgtctttattttcatcgtcggaagcattttttttgtctttttgataatagccattctaactggtttgaaataatatatcattgtggttttgatttgcattttcctgatgattagtgacactgagcatttttaaatatatcttttgggccatttgtatgtcttcctttgtgaaatgtctgctcatgtcttttgctcaaatcaattttttttgctagcaaatagtttgagcttcttatgtattctggttattaatctcttgttggatggatagtctgcaaatatttcctcccattctgtaggctgactcttcattttgttaattgctttctttgctgctcaaaagctttttagcttgatataattccatttgtctatttttgcttttgttgcctatgcttttgagttcttctccaaaaatctttgtccacaccaatgtcctg

SEQ ID NO: 456103 - DNA, 623 bp, Homo sapiens
tgtgggtagtgttgctataaacaagggagtgcagagacctcttcaatatactgatttcctttcttttggatatataccaagaagtgggtctggtagttttatttttagtgttttgaggacctgccatactgttttccgtagtggctgtactaatttacattccactaatagtgtactagtgcttgtctttattttcatcgtcggaagcattttttttgtctttttgataatagccattctaactggtttgaaataatatatcattgtggttttgatttgcattttcctgatgattagtgrcactgagcatttttaaatatatcttttgggccatttgtatgtcttcctttgtgaaatgtctgctcatgtcttttgctcaaatcaattttttttgctagcaaatagtttgagcttcttatgtattctggttattaatctcttgttggatggatagtctgcaaatatttcctcccattctgtaggctgactcttcattttgttaattgctttctttgctgctcaaaagctttttagcttgatataattccatttgtctatttttgcttttgttgcctatgcttttgagttcttctccaaaaatctttgtccacaccaatgtcctg

SEQ ID NO: 456104 - DNA, 623 bp, Homo sapiens
tgtgggtagtgttgctataaacaagggagtgcagagacctcttcaatatactgatttcctttcttttggatatataccaagaagtgggtctggtagttttatttttagtgttttgaggacctgccatactgttttccgtagtggctgtactaatttacattccactaatagtgtactagtgcttgtctttattttcatcgtcggaagcattttttttgtctttttgataatagccattctaactggtttgaaataatatatcattgtggttttgatttgcattttcctgatgattagtgacactgagcatttttaaatatatcttttgggccatttgtatgtcttcctttgtgaaatgtctgctcatgtcttttgctcaaatcaattttttttgctakcaaatagtttgagcttcttatgtattctggttattaatctcttgttggatggatagtctgcaaatatttcctcccattctgtaggctgactcttcattttgttaattgctttctttgctgctcaaaagctttttagcttgatataattccatttgtctatttttgcttttgttgcctatgcttttgagttcttctccaaaaatctttgtccacaccaatgtcctg

SEQ ID NO: 456105 - DNA, 564 bp, Homo sapiens
agaaaagaaaaagaaagaaataattggaaactggaatcttgccaaatgttcttcaaaggagaaatggttaaacaaactgtggtacatccataccatggaatactatttaacaacaaaaaagaacaaactattgatagaaatgattgcctgaataaaccttaagaaaattatactgagtggagaaaaacaccaatttcaaaaagatacaaactgcaagattccatgtatgtaatattcatgaaataacataattgtagaaatgacaaacattattagttactagtggttcgagatacagggggagaagggagagtgtggctgtaaaagggtaaatgagggagtctagaggtgatgataaggtcttgtctcttgatgaaggtggtggttacacaaagctacatatgtgataaaatttcacagagccatacacacacacacacaaatgagtgcatatataacyggtgaaatctgagttagctcaatggattgtaccagtattaattttctgggtttgatgttgttctacacttatgcaagatgttaacactggagtaggctgggtga

SEQ ID NO: 456106 - DNA, 571 bp, Homo sapiens
tgtataactgtgaacctactaaggactattgagtgtacacgtcaaaagggtgaatttcatggtatgtaaattctgtgtcaataaagrtattttaaaaacaaagaaaatgggctcttttgtaaacataaatgcaagagaatagagggaaaccaaaaatctgcagagttgggaaactcaattacttttaaatagaaagagataaaatcgagaataattttgagagacaaaagttcattaaaactcaggtttgcacttaagattagattaagttttaatgtcatcccacctacgtttatttttccaaagagtgtcaaagaagccacagttgaggaagacagacatggaaaaaagaaggaataaataagcacaagaatttcatctgcgaaggaaatgaagaaatgtgggtatagttactagcatatagaactggctagaagaaaatagattagaaatctactaaatttttgaggaatcatattcccaaagtaatcaaaagctagatcttaaaacaaaacaaaaagaaatgaagcaaaacagctttccaagagccttaaaccacacttggttagaa

SEQ ID NO: 456107 - DNA, 565 bp, Homo sapiens
actccagtaatcttcaatcaaacattacataagtagccaaggagcgataaacagcagctactacagtagaggaagccatgcatctatgggcgtgaacagcatgggagggatgtctaacatgtctgatatgagtggtggatgaagaatgtaattgatcctcatcacrgactcttggccaacttttttctaagaaaaaaacttcagtttaacagtttttgaagtacaagctcgtggtttatgcttactctctaagtggaaatcaggattgttctgcagacttaattaaggctcaatgtttttgaacacagtactcctctaggatgtaacagtgaagtcgagtaaactataactgttaaaaaagttttcgtttttctcaagttagttatattgtacaatgtactgaagcagtaaatgtatttaggttaaagcagttgaattaagttagttgttgcccttataccacgttacattgaacacagtttggatgcatgttgaaatacatgctttttttttttttcataaaactcaatataagagctgtgtctggaattaaagtaaaaatttt

SEQ ID NO: 456108 - DNA, 565 bp, Homo sapiens
actccagtaatcttcaatcaaacattacataagtagccaaggagcgataaacagcagctactacagtagaggaagccatgcatctatgggcgtgaacagcatgggagggatgtctaacatgtctgatatgagtggtggatgaagaatgtaattgatcctcatcacggactcttggccaacttttttctaagaaaaaaacttcagtttaacagtttttgaagtacaagctygtggtttatgcttactctctaagtggaaatcaggattgttctgcagacttaattaaggctcaatgtttttgaacacagtactcctctaggatgtaacagtgaagtcgagtaaactataactgttaaaaaagttttcgtttttctcaagttagttatattgtacaatgtactgaagcagtaaatgtatttaggttaaagcagttgaattaagttagttgttgcccttataccacgttacattgaacacagtttggatgcatgttgaaatacatgctttttttttttttcataaaactcaatataagagctgtgtctggaattaaagtaaaaatttt

SEQ ID NO: 456109 - DNA, 486 bp, Homo sapiens
agctgggtacaagtgggagccccacccctttcaagttgtattggtgggaggtccctggrtgcagctgtagccatccaaatctggctgcagacccaggattctctgtactcttggggacctgggtaggtccccgtacctctcgaggctcagaagtgcctgttcctgttgcttggcctctccccactaccagagcccactctgatcttggaacaaagttggggctgagctctggtgctactgcagcccagctgggtgagagcacgcttgaggcagtgctgacactaggcccctgccaccttggccccctctgaattttgggcactgatgtatataggagggaagccgaggcagctggggagtgggcagcacagtgttggcctgcaggtgccagttggcacagtctgggcaccatgaatggcagtgggaggcagacagactctgggcagaagatggcaggtccccggtgaagccccaccttcaggccag

SEQ ID NO: 456110 - DNA, 569 bp, Homo sapiens
ctcaccttcatatcctgctttatctcccgaaggctaaactcccctctccaggcagccacccagcaacacattgataccatccttctcctctgccaagtccggtaccagtgcctccaggaaaacaactctgaagtccgtcaccccctgcttcaaaacccaaaccctgattacagctcccctattcggcagcaagcagccagataatcaacaatgcccctcttccttttatactaaagtagaaggcaagaatgtgagtccaaaccaccatttagtaagcaccctgctattttgcagaccttgatcaaagtgaaacattccacgggggttcgggccatgagaaaaatcttgcctaatcrtcgtaacacaaggcggacacaggtccaactaaagaaactttcctatggtatcttgctgggcaaagttccaagaaacaccacaatgacatcccactggaaaaaggaccaaacagcctgatcataaaaacatcttatcaatatcctgccgggcagcaagccatactgcccaggcccctcccacccctacctacaagcaccccaggctgtaagcgg

SEQ ID NO: 456111 - DNA, 569 bp, Homo sapiens
ctcaccttcatatcctgctttatctcccgaaggctaaactcccctctccaggcagccacccagcaacacattgataccatccttctcctctgccaagtccggtaccagtgcctccaggaaaacaactctgaagtccgtcaccccctgcttcaaaacccaaaccctgattacagctcccctattcggcagcaagcagccagataatcaacaatgcccctcttccttttatactaaagtagaaggcaagaatgtgagtccaaaccaccatttagtaagcaccctgctattttgcagaccttgatcaaagtgaaacattccacgggggttcgggccatgagaaaaatcttgcctaatcatcgtaacacaaggcggacacaggtccaactaaagaaactttcctatggtatcttgctgggcaaagttccaagaaacaccacaatgacatcccactggaaaaaggaccaaacagcctgatcataaaaacatcttatcaatatcctgccgggcagcaagccatactgcccmggcccctcccacccctacctacaagcaccccaggctgtaagcgg

SEQ ID NO: 456112 - DNA, 566 bp, Homo sapiens
ttgtgccttcagatgttcagatgcgtctggagtttcttccttctggtgggttcgtggtctcgctgacttcaggagtgaagctgcagacgttggtggcgagtgttacagctcttaaaggcagcacgtctggarttgttcgttcctcccgtccggagttgttcatccctcctggtgggttcgtggtctccctggctttaggagtgaagctgcagaccttcgcagtgagtgttacagctcataaaggcagggtggacccaaagagtgagcagcagcaagatttattgtgaagagcgaaataacaaagcttccacagcgtggaaggggacctgagtgggttgccactgctgactggggcagcctgcttttattcccttatctggccccacccacatcctgctgattggtccattttacagagagctgattggtccgttttgacagggtgctgattggtgcatttacaaacctttagctagacacaaaagttctccaagtccccactagattagctagacacagagcactgattggtgcatttacaatcaccacaaaagtccccactagat

SEQ ID NO: 456113 - DNA, 555 bp, Homo sapiens
gagttggaagagagaaaaatgataagggattattatgaatttgggctcatgtgtctgagtaagtcccatttggagaaattaactgaataagaaagaggtcataggtagaacagaattgaggagcatagtaaaagcaggaaaaagtacggtgtgaggcagaggtattgggtctcacaggtttgtgtgctaactaccaaatgtaggtgtgggcacataatggcaagctttccatgggagagagactggggaagtgyatttagacttgggaagcgatgggcctctattcttggaacttgtatgttggttaactacatctgcaggatattagaaagatctgatattagaaagatattaggcatctagaattaaatacttcacatggcatgacttccttgtttaagaaaacttctatatcttcccatttctcttaaaatccataggctacaagaccctgcatgctctggcctgctgtgccttttcaggctcatcaaatacttcactcacactgaaagccacactgcctgcctcctcatgtttagaataaacactttcatg

SEQ ID NO: 456114 - DNA, 555 bp, Homo sapiens
gagttggaagagagaaaaatgataagggattattatgaatttgggctcatgtgtctgagtaagtcccatttggagaaattaactgaataagaaagaggtcataggtagaacagaattgaggagcatagtaaaagcaggaaaaagtacggtgtgaggcagaggtattgggtctcacaggtttgtgtgctaactaccaaatgtaggtgtgggcacataatggcaagctttccatgggagagagactggggaagtgtatttagacttgggaagcgatgggcctctattcttggaacttgtatgttggttaactacatctgcaggatattagaaagatctgatattagaaagatattaggcatctagaattaaatacttcacatggcatgacttccttgtttaagaaaacttctrtatcttcccatttctcttaaaatccataggctacaagaccctgcatgctctggcctgctgtgccttttcaggctcatcaaatacttcactcacactgaaagccacactgcctgcctcctcatgtttagaataaacactttcatg

SEQ ID NO: 456115 - DNA, 544 bp, Homo sapiens
catcaatttcctcatctgcctttgattgtttaccatgcttctaagatgaagtccaaatgccttagtgtgctgtgcaaagctttcacacacaggctgccttcagcctcatctctcactggcccagccagacagagctccttgccattctcttgcccttggacttgccattccattccttctctatatggaaayagtctgttctgacttttcaagtggactaacgaaagactgtctgccttcagtgaagccttcacatatgcagcaggttgagaatgagagcactagctttggagtcaggctgatccagcttaaacctgtgtgtgtgactctagggagctagtgaacatgtttcctcctcaggaaagtggatgtgacgataacagtctttctcatgggtaatttaaacatgtaagtttgaaaaaattaaatcagaaagtgcacttgtagcacttggagttctccagagagacagaactgaacaaattgtgtgtgtgtgtgtgtgtgtgtgtgtgtgtgtgtgtgtgtatacatacagagagaaaga

SEQ ID NO: 456116 - DNA, 641 bp, Homo sapiens
tgctctataagcacctgctctggctgaattatgagactgagggatattccttctcattattcttgagaaagtctttcttgttcaccactggcctaggtcctaggccataaatctaatcttcagacttcatcatttctccacaccaaaggctgtgaaattatggtttattttttattttttatattgtcagtgcatatgtgttacatacacctatgtatggcgaactcttgattytcctagcagattggtgagaggaagagctcttaataggcaatagccctgaatcacctcttctactaaagtttctcataactggctttagttttcctttccttttcttcccattctctaattagacctcaccaaaagatatttgccctgtaacttgccaaaacataactgccccagaacagccctagatctctggatattgcataataaaaagaagactgagaataacattatccaagaagtgttccatagtttctcttaacaagtagatacagctattaccactgcccctcccccaagaggagggaatattcaaatcatgttcagatttattaacataaaaatagctatcatttcttgagctcctgcgacatgccggaaattgttcctaaagtatctataaacattta

SEQ ID NO: 456117 - DNA, 580 bp, Homo sapiens
aacttttgttagaagtggaaatgcactaatctatagaagacacttacactttgtggatttgtgattcagttttaaatacttaatactttttgaattcttccattgtaacaatcagatgccttatatggtaggcctgtttgcatgtcagtttgcctgctggagcatgagctctgcgaggatggggaatgggaaacacttttttaaaaaacttgcttccaggaaactatcagtatgccttcgatgtggtaagcgtgaatgaataactgatatttagtatgactggttttaatcacagagtcttattcaccatgaagccgttatagacctgttccaatgacaatttatcttgattccaggttttccaaaattggagacaatggcattcatctctctcttgctcattttaccctgagagttgggctggcttcatgggtctgcaatcygcacataagggcccatgcttagaggggccctacacttggtttaatactctgccgtcactttcttaaaatttgtaataatttttgacaagaagccctgcattttcattttgcaccaagctccacagattttgtagcca

SEQ ID NO: 456118 - DNA, 542 bp, Homo sapiens
caatttatcttgattccaggttttccaaaattggagacaatggcattcatctctctcttgctcattttaccctgagagttgggctggcttcatgggtctgcaatctgcacataagggcccatgcttagaggggccctacacttggtttaatactctgccgtcactttcttaaaatttgtaataatttttgacaagaagccctgcattttcattttgcaccaagctccacagattttgtagccagtcctgcctggctacataatctgaagactaagctaacccacaacggcccatctagcacagtgagtatattagactatatattatattacatagtgtataatactgaaagtatataatactaaacaaccctgaaagattatgtygtattgcgagtatcattaattaataatagctaacattaattgagcacctactatgtgccagacactgttctggctaccaaacaggcattatctcattgaagcctcaaaacaagtcacagaattagactatattatatagtctaatatattcactgt

SEQ ID NO: 456119 - DNA, 410 bp, Homo sapiens
ttttacagatgacaaaactgaaggacagaaagatcaattaaattgctcagtgacattcactttgtttggtagtggcattattgagactggaactcagtcaagtagactctcacatgcttaactttatgctacttttgatatgggcatacatagactaaggtgttaaatgacttgttcacaatctttccactaccccttgttcccttccctcagtttggtcaataagcatggtaaaaaatctactctatatcagaaaatgtgtgggaagtcagagattgtgatccatagaacatagcagaacttgrgaaaatgaagagatatgtttaaaagggtactaataagtattcaatcgaaattagagtctacagagcactctcatattgaactgaacagaattaaggcattaattg

SEQ ID NO: 456120 - DNA, 581 bp, Homo sapiens
aaagactgggatagagactgcagtggaagcacgaagctgagaaaagacaaagaggactagtgggtaggttccctccattcaccaaggaggggtggcaaagtattttaccaccagcggcagaatatgcttaggaccgaaacttcttgctcaatttgtttatttgttttggtttttttctttagcaaaaatactttgggccttcttagatgtggaaaacttgcccctgggcagagccaaggaaaatcaaggggaaagaaaaarttgaattgctctacaaaaggaagttggaaaattttaagtatttaggaattgcccaggaggggacacgggaaggaggagcatgagcaaggttctggaacaaggtgatgcacagaggggccaggcaatttggcaggtgaaaggttctctgtgataataatggcctgtgatttttaagaatagaaatgtttaaaatgttatctgccttgctgtaatgtaatcctttgttattccatatttattgttgctgttgttaaaatctattactcacactctcttgcatgtggtatttataagaaattgaagaaaaaaacagggaggca

SEQ ID NO: 456121 - DNA, 647 bp, Homo sapiens
tattggacactgtggatgacttaggcttaggttccatctccagttgttcagaacacttctaacttaaaatctcatgggtggcacaaggtataaatattagtaaaactaaatatcaagtgtccataattaataacaatttattacaactcccaaagagaagtttcaagacaatataaaaggaatagccaagtgtagggtagtaagaataaatggtaggcaattaccgcaaagtggagattgctatagcttagcttcatttgagaagttttcagaaatcagaccagataagagataatttttaaaagacgcacaggatttaggttgcatggatttactacatgttgcccaggccagtttacccaatataatttttttataggagtagatgttgatttgttttgcttgcttccaaaacatacacagctccagaaaatgattcaccttyttttgtattttctttttgaattgagattcctgaaaactctactttaaaaataacaagttctcaaggtagtttcatacatatgtatttcccattgctccctgtggttcttcttacatagggcttagaatctgggtagacataaaacacagagatgtgaattaatagttctgaaccacactaacaaaattttagacctttccta

SEQ ID NO: 456122 - DNA, 651 bp, Homo sapiens
ctatctagggcagccagtcctgccatgaatagatgtgtgtccagagattgttaaacccagactgtaagcaatcatatagttcaacaggtcagaagccctttcttaaaccaaattaaagtcaacattcaataaacaaaaactgataaaattggagcggcttagattgaagttaggagttgaaaacatcttaatcttccccttaccctgctgtaatagtctctgagacagatctctaaagaagcaatttggaaaygactaaactagttcagctgactcactctatcaatggtgatttcagaatgaccttccctatgtcccatggctaaggagtggcatacctggacttgaactcaggtctcctcaggctcagtccattgactcttctataattcactaacatggtaaaatgctgtcatgacttatgcctcatctggaactaagatctccttggaagcagagagtgaccggatgaagttaggcaatatgttactgtatccagtaaccagggaaaattcagtgacattgagtcagaggaagctgtggtttgacctgaccaatataaacaaatgtacacaagcaaagcaggcgtggaaatacatatatttcatgtgattcttgagatagttaggatgtctgtgtcatctgccattt

SEQ ID NO: 456123 - DNA, 563 bp, Homo sapiens
taacacttcttacaataaccctgtggggcttataatgatcagtcctcattttccaaatgaagaaaaactgaggtctggagagcttaagtgcctggcccgaagtcatacaatctggaagggggcagacagtagatgtaaaaccaggaccccctgactccactgccagtttgctttgtgctacagtgattcccccagtaaatttctacttgagttccatgtcyggggaaaaacgtttctgctaatgcattgtcatctgacatgtaatttgggtgtctcccttttcagtttagtgctagaaaacttgtaaccaaatttattgcccaggtataatactctaactaattctgaaataatttatcccttttctttcatttatatgggctcttatttttgatggcctgattttcatttattttatgtttgaaacatcttaccatgttactcttgggatgtctttacaaaaactgtcatcattatcagaaatgagtagaaattcaaacttaattatgttagagttgtattaaggggtaaggggcataaaaaggataaaccaaggtttctgg

SEQ ID NO: 456124 - DNA, 563 bp, Homo sapiens
taacacttcttacaataaccctgtggggcttataatgatcagtcctcattttccaaatgaagaaaaactgaggtctggagagcttaagtgcctggcccgaagtcatacaatctggaagggggcagacagtagatgtaaaaccaggaccccctgactccactgccagtttgctttgtgctacagtgattcccccagtaaatttctacttgagttccatgtctggggaaaaacgtttctgctaatgcattgtcatctgacatgtaatttgggtgtctcccttttcagtttagtgctagaaaacttgtaaccaaatttattgcccaggtataatactctaactaattctgaaataatttatcccttttctttcatttatatgggctcttatttttgatggcctgattttcatttattttatgtttgaaacatcttaccaygttactcttgggatgtctttacaaaaactgtcatcattatcagaaatgagtagaaattcaaacttaattatgttagagttgtattaaggggtaaggggcataaaaaggataaaccaaggtttctgg

SEQ ID NO: 456125 - DNA, 590 bp, Homo sapiens
ttctagcaaaaaattgacattcatccatgggttttaaaactaactttcagagggcactatctcttttattaagagattcaatgcccatagaaattttaagtttgtttaatatttattgaaatttataattcaattattctttttgacagactatccatgctctatatcaagtttgaacaggtttactagccaaatatattcattgttaatttagaaaaatgtcttcattwaaaatgttttcaaacttatttttgtattttaagtttttggataagggcttgagaaataattctgtgctaacgattgtaatgataaactcaatcaagatgaaaatttaataaaaatatattatggttccagaaaaattcttagctgttacatttttaagggaaatatgagggaagatcaataaaatgctttcataaaagaaagtaattaccaagataaaattttaaacaggaccacacttctgtgtgagagtagttttgtacacatggaatgtctacccattgtcaatcatcttaggaagaagtcaattctcaagcaagcaaggaagtttcaagtggtggcctttagaattgttgaaagaa

SEQ ID NO: 456126 - DNA, 560 bp, Homo sapiens
tatatgtagattaaataaatcactgaaaataaatcataagacaggtatccttagatatcagccaaaaaaaatcccaggaatgtacatatttttagactataactagaaacttttaaaataccttttttgaaagatttttaagtttaagagaagggaaaaaaatgggtgttagaactccttctcagttaattaaaattcttattttctctgagcattttcgctaattggtaggagagggcaagatggctgactagacacagacaagtagaacagctaccaccaagggaccgaaactactggaacactcctaacagatcttcagaggggaagcacggagagtagacagagggaagacacagaagctgrggtgaagggggaggaagccgggaaccctccatagggctaccgtgggctgggactcattcctggcccccaacagctcttggggaacaggtgagttgaactggggaggaacaacccactctcaccatgggcctctggaatcccggcaggaggagaccccctcaaccaccttggacactcaaattaacagggagagc

SEQ ID NO: 456127 - DNA, 594 bp, Homo sapiens
tgtactttggggactcagaggaaagggtgggaggagggtgagggataaaagacaacaaattgggtttagtgttactgctcrggtgatgggtgcaccaaaatttcacaaattgccaccaaagaatttactctgtaaccaaataccacctgtttccccaaaacctgtggaaataaaggaaaatgcaaaaataaaaaaggatggccgggtgcggtggctcacacctataatcccagcactttgggagaccgaggcgggtggatcatgaggtcaggagttcaagaccagcctggccaagatggtgaaaccctgtctctactaaaaacacaaaaattagcctggcatggtggcaggcgcctgtaatcccagctacttgggaggctgaggcagagaactgcttgaacccaggaggcggagtttgcagtgagccaagatcgcgccagcgcactccagcctgggtgacagagcaagactccatttaaaacaaaaacaaaaacaaaaaaccaaaaaaaacaccaaaattctttggaaataatgaaaacaaacgtacaatataccagaatctctgggacacatctaaggcagtgttaagagaaa

SEQ ID NO: 456128 - DNA, 617 bp, Homo sapiens
gattcaatattccatatatacagtatgatcttgattttaaatgtgttctacatacatttcacccgaagtttgcaaacacaaagctcaagtgtacaatggaattttagttaaattttggtggaaaattgggttggtgaggttccgataaaacagagaaaagaaaacaatttgcagttcagtggcagatattactatttctaaaaatctagcacataccaatcttccatttctttttagtttctcactggctgtgtagctctgtgcattcccaggtccccaccatgatgataggcctccttgcaaatcttgagctactacatttcctgttactttttcttcaargaaatacatctccccctttgtcttgtccttgtccatccaagtcatgttctgtgaaagtgtattgggagtatgtggtaacaatcctacctattgacaccaaaaaggcttgtcaagtgctttccatcctgcttcccctcaaataaatcagaagaaccatctatcataatctgccattaatcaagaaggcaggagcagcggctgtgagtttttaaaaattatttttatttaaaaatagcatttcttatacctgatcaataactatgtgtatatattta

SEQ ID NO: 456129 - DNA, 583 bp, Homo sapiens
tcattttaagaagtaatccaccgatgctaggaggaatattcaaaagcacaccgaagtcaaatacgtgtgcactaaaacwctagggttgttacatgtggtggtttgaaaatggagatttgcaagtaactataaaattgatgagtgtgcgacatttgttgttggcaacttggaaccatcaccatcagtccctcttaaggctgaaaactataatgctcaaaattcctatccctgtaaatttcagggttagaaatttgccagtgaaagaaacttgcgtgagatttgaaaagcagacgtgaagcagaaactattatcttggaagataatggccatcctacatgacaggcttccagacttcacaagctacttttaagttgcagtagtttacagattttcccacaagaggcagctttctgttccagtgctttccctaatatcacaataaaaaatttctccaattgcccagcttcaacactccagatatttcaaaccctgtagatcctaacaatttctgtaaactctaattcccatattaaaatacttattcttataacacttgtcatggctccattttcccaaccaaccc

SEQ ID NO: 456130 - DNA, 583 bp, Homo sapiens
tcattttaagaagtaatccaccgatgctaggaggaatattcaaaagcacaccgaagtcaaatacgtgtgcactaaaactctagggttgttacatgtggtggtttgaaaatggagatttgcaagtaactataaaattgatgagtgtgcgacatttgttgtkggcaacttggaaccatcaccatcagtccctcttaaggctgaaaactataatgctcaaaattcctatccctgtaaatttcagggttagaaatttgccagtgaaagaaacttgcgtgagatttgaaaagcagacgtgaagcagaaactattatcttggaagataatggccatcctacatgacaggcttccagacttcacaagctacttttaagttgcagtagtttacagattttcccacaagaggcagctttctgttccagtgctttccctaatatcacaataaaaaatttctccaattgcccagcttcaacactccagatatttcaaaccctgtagatcctaacaatttctgtaaactctaattcccatattaaaatacttattcttataacacttgtcatggctccattttcccaaccaaccc

SEQ ID NO: 456131 - DNA, 583 bp, Homo sapiens
tcattttaagaagtaatccaccgatgctaggaggaatattcaaaagcacaccgaagtcaaatacgtgtgcactaaaactctagggttgttacatgtggtggtttgaaaatggagatttgcaagtaactataaaattgatgagtgtgcgacatttgttgttggcaacttggaaccatcaccatcagtccctcttaaggctgaaaactataatgctcaaaattcctatccctgtaaatttcagggttagaaatttgccagtgaaagaaacttgcrtgagatttgaaaagcagacgtgaagcagaaactattatcttggaagataatggccatcctacatgacaggcttccagacttcacaagctacttttaagttgcagtagtttacagattttcccacaagaggcagctttctgttccagtgctttccctaatatcacaataaaaaatttctccaattgcccagcttcaacactccagatatttcaaaccctgtagatcctaacaatttctgtaaactctaattcccatattaaaatacttattcttataacacttgtcatggctccattttcccaaccaaccc

SEQ ID NO: 456132 - DNA, 574 bp, Homo sapiens
aatggctgtgggatgaaatgattgcttctaaatgtaataaagaacttgggrgtgggaaagaataatgcacttaagactctaaaaaatccagctcaaggctacgtaaaaaatcagaaaactaaaactgtcccaaaagaaactctatcttctgtagcctcagagttgaaatcctgtgggtggctgaactacgatacaatttgaattcacacccactcagggtctctcatgttaaattgaggacattgattgggaaagaactggacccataaaattgggaagaggatatctgaccagattgtgattaagctaaaaacctgaaacctccatatttccctgcactttccctgccagaagaagcaatcttccctttcttgtgtaagagggtgactcatcttgctcacaggctaatgactactccagggatagctttcttataagtgagtgctgatctttaagactaacccccaccaattccattgattctagacctttaatatgactcaaatcccagtgtacaccagatgggcaggtattaagcgcaaaagtttgacagcttatatcaacagaaacttgt

SEQ ID NO: 456133 - DNA, 635 bp, Homo sapiens
tatcacccataatattaaattaacatactgaattataatcagctaatgccttaatgaaattagcaatcactacattgctttgcttcacaaacagaatatatttctcatctcaaatccatttctcaagtccactctatgcaatagaatttatattcctgtcactatttatcaagcaaccctgaaattgaaattatttattcagcaagacctttctcttattccattttatgggtctaataacttggtttaattgtcaactataaaagagataagattagagaacttagtaatttgtcctttttatgttagaaatatttcaccatggcctagatccaaggagatgagtaactaggggcacaacaatttcttaaagaaggaaaaaaagcaattgtataagcatctccgatattttgggtataaaccctaagccwttccaaatctttaaagccttaggtgaacaggttgcatgattaatattatagcttagacacatattgatccatttaaatcctcaggcttcaacaaattttgtcatactattcatactgttagtagattttgaaatgagttggactggatactgttcttgttctggacaataatcacaaaacctaaaagaagcaattggagtttat

SEQ ID NO: 456134 - DNA, 635 bp, Homo sapiens
tatcacccataatattaaattaacatactgaattataatcagctaatgccttaatgaaattagcaatcactacattgctttgcttcacaaacagaatatatttctcatctcaaatccatttctcaagtccactctatgcaatagaatttatattcctgtcactatttatcaagcaaccctgaaattgaaattatttattcagcaagacctttctcttattccattttatgggtctaataacttggtttaattgtcaactataaaagagataagattagagaacttagtaatttgtcctttttatgttagaaatatttcaccatggcctagatccaaggagatgagtaactaggggcacaacaatttcttaaagaaggaaaaaaagcaattgtataagcatctccgatattttgggtataaaccctaagcctttccaaatctttaaagccttaggtgaacaggttgcatgattaatattatagcttagacacatattgatccatttaaatcctcaggcttcaacaaattttgtcatactattcataytgttagtagattttgaaatgagttggactggatactgttcttgttctggacaataatcacaaaacctaaaagaagcaattggagtttat

SEQ ID NO: 456135 - DNA, 563 bp, Homo sapiens
ctcccttccagaggtcaaggcactgaagttcttggtagctatggcaattacaaggtgaaccaatgaattattgacatcttagggtttgctacttgacacttatccccagttaaatgcggttagaaaattaagttcatgcaattatattttccaaatgaaaatacagagcgagamagctttttttaaaaaaaataaaaataaaagtagccatataattgaagatggtactgcctctgcagttcattgtcaaagattgattatctcctaatctaaacatcaacacattatccttttgaaattaagtataccaagagtcaagactcttttacttctaggagttaattctatataacctaagttcctcagctaatatgacatgttatgtattcaaatgtcttttatttccttttgatttttttccctcggttctagcatatgatttatttagtttgtaatggtcactaaaaagaaggtagtggataccagtgaaaaacactattttaggatgacaatggccttctttgggcttgactcttaaaagaaattatgttattttatgatat

SEQ ID NO: 456136 - DNA, 587 bp, Homo sapiens
aaatgtcttttatttccttttgatttttttccctcggttctagcatatgatttatttagtttgtaatggtcaytaaaaagaaggtagtggataccagtgaaaaacactattttaggatgacaatggccttctttgggcttgactcttaaaagaaattatgttattttatgatattctgattattctctaacttcatccacatctttgaactaagctgaaccactgacctcttattttggctagtgaccttgaaaaagaaaagaacttcaggtctcacagagctctttcaaagtaaatgatcttaaatgacttcacttccgttgtctctcactctctaatccacttttggtactgtctgacttgcacctccttggctttatctcctatttctagcatttcatttgtttcttgcatatgcttacaagtctcaatattaatgatttttgacgtttagtacttcctggaatggactgaatcatttaggactccttttcaagtgacagatagccaagttgaatttgcttgagcaaaatggagaagttactggttactactatggacacaatgtctgtgtcctgtcaaaaatt

SEQ ID NO: 456137 - DNA, 587 bp, Homo sapiens
aaatgtcttttatttccttttgatttttttccctcggttctagcatatgatttatttagtttgtaatggtcactaaaaagaaggtagtggataccagtgaaaaacactattttaggatgacaatggccttctttgggcttgaytcttaaaagaaattatgttattttatgatattctgattattctctaacttcatccacatctttgaactaagctgaaccactgacctcttattttggctagtgaccttgaaaaagaaaagaacttcaggtctcacagagctctttcaaagtaaatgatcttaaatgacttcacttccgttgtctctcactctctaatccacttttggtactgtctgacttgcacctccttggctttatctcctatttctagcatttcatttgtttcttgcatatgcttacaagtctcaatattaatgatttttgacgtttagtacttcctggaatggactgaatcatttaggactccttttcaagtgacagatagccaagttgaatttgcttgagcaaaatggagaagttactggttactactatggacacaatgtctgtgtcctgtcaaaaatt

SEQ ID NO: 456138 - DNA, 587 bp, Homo sapiens
aaatgtcttttatttccttttgatttttttccctcggttctagcatatgatttatttagtttgtaatggtcactaaaaagaaggtagtggataccagtgaaaaacactattttaggatgacaatggccttctttgggcttgactcttaaaagaaattatgttattttatgatattctgattattctctaacttcatccacrtctttgaactaagctgaaccactgacctcttattttggctagtgaccttgaaaaagaaaagaacttcaggtctcacagagctctttcaaagtaaatgatcttaaatgacttcacttccgttgtctctcactctctaatccacttttggtactgtctgacttgcacctccttggctttatctcctatttctagcatttcatttgtttcttgcatatgcttacaagtctcaatattaatgatttttgacgtttagtacttcctggaatggactgaatcatttaggactccttttcaagtgacagatagccaagttgaatttgcttgagcaaaatggagaagttactggttactactatggacacaatgtctgtgtcctgtcaaaaatt

SEQ ID NO: 456139 - DNA, 586 bp, Homo sapiens
ccacttttggtactgtctgacttgcacctccttggctttatctcctatttctagcatttcatttgtttcttgcatatgcttacaagtctcaatattaatgatttttgacgtttagtacttcctggaatggactgaatcatttaggactccttttcaagtgacagatagccaagttgaatttgcttgagcaaaatggagaagttaytggttactactatggacacaatgtctgtgtcctgtcaaaaattcatgctgaaacttaatctccaatgtagtagtactaagagattgggactttaggaagtgattaggccatgagggctcctccctcgtgaatgagattaaggcctttataaaagaggctccacacaacattcagccctttttcccttgcaccgcttttgccatctgagatatagcattgcctctggaggatgcaacaacaaggcaccatcttggaagcagagactaggccctcatcagacacgcaacctgccagagccttgatcttggacttcccagccaccagaactgtgagaaataaatttctgttgtttataatctacccagtttatagcattttgtt

SEQ ID NO: 456140 - DNA, 586 bp, Homo sapiens
ccacttttggtactgtctgacttgcacctccttggctttatctcctatttctagcatttcatttgtttcttgcatatgcttacaagtctcaatattaatgatttttgacgtttagtacttcctggaatggactgaatcatttaggactccttttcaagtgacagatagccaagttgaatttgcttgagcaaaatggagaagttactggttactactatggacacaatgtctgtgtcytgtcaaaaattcatgctgaaacttaatctccaatgtagtagtactaagagattgggactttaggaagtgattaggccatgagggctcctccctcgtgaatgagattaaggcctttataaaagaggctccacacaacattcagccctttttcccttgcaccgcttttgccatctgagatatagcattgcctctggaggatgcaacaacaaggcaccatcttggaagcagagactaggccctcatcagacacgcaacctgccagagccttgatcttggacttcccagccaccagaactgtgagaaataaatttctgttgtttataatctacccagtttatagcattttgtt

SEQ ID NO: 456141 - DNA, 628 bp, Homo sapiens
cttgaaaagctctattatgttggctgtcatttatttcaatttttgtatcaatattcataagtaagattgagctatattctatttttaattatttttgtcatgttttataattcataagttraagctttatggagctttttctctttttccagtttcttgagctgtcaaaattgcatcggagtgatttgattctccaaagagagaaagaattccactatgcttgggacagttgctgttgttgtaggtttatgcttcaagcacatagccactgggctatcaatgttcaatcttggcagtacccattatatcactgcttatagctataacatttttaaatgtttaatgagaatgtttttattacttccatgcactctttctggctctcagtatgctcttttatcacagcaatctgctcttatttattgctgctgtatctctgaaattatatcaaaactaaaaaacagattttttgaaaaatgcctctcaagttctccacatttcctctgcctcggtggggacatttcctatgcttcagtgagctgtagttattttccttctcttttgaaactgttgaattttctcatagattcagtgttactgcttatctttatcaatgtaggtctagatt

SEQ ID NO: 456142 - DNA, 628 bp, Homo sapiens
cttgaaaagctctattatgttggctgtcatttatttcaatttttgtatcaatattcataagtaagattgagctatattctatttttaattatttttgtcatgttttataattcataagttgaagctttatggagctttttctctttttccagtttcttgarctgtcaaaattgcatcggagtgatttgattctccaaagagagaaagaattccactatgcttgggacagttgctgttgttgtaggtttatgcttcaagcacatagccactgggctatcaatgttcaatcttggcagtacccattatatcactgcttatagctataacatttttaaatgtttaatgagaatgtttttattacttccatgcactctttctggctctcagtatgctcttttatcacagcaatctgctcttatttattgctgctgtatctctgaaattatatcaaaactaaaaaacagattttttgaaaaatgcctctcaagttctccacatttcctctgcctcggtggggacatttcctatgcttcagtgagctgtagttattttccttctcttttgaaactgttgaattttctcatagattcagtgttactgcttatctttatcaatgtaggtctagatt

SEQ ID NO: 456143 - DNA, 505 bp, Homo sapiens
tgatttcctacttagcagcctttcagaaatctccaacatgttacatctttggatgcatcacctggtctttcactaacttgttctctgtgcatttggtacaactcccagttggctgcaaacttctttgatgcatctgccagccctttggtagtaataatactaatactaaaaagctaacatgcaggtcttattatgctccagacaaaatgctaagtaatttactagcagagtatttgaatactgtctggcacatagtaagccattaatacaggtttgttattattaccatttatagctcaattaacttggcattattattctctccatttcaggataagaaaactgtgaggcacagagaattacataaattgctcagagtcacagagctcattatgtggcacaaacaaaacttggtgcccatctatttgacaygaatacccatcaatgttcttaatcattacaaaacatttgctaaacacacacacacatgcacacacacacacac

SEQ ID NO: 456144 - DNA, 557 bp, Homo sapiens
tgcttaaccggaggcctggggtcagtcatctgaattacaggcaatagagtctgactgtctggagataacagatttgcaaaacctgaaaatcaaagctcatactcttatttcatatatggactcctaaagtgtaattttttattttaagaaagaatcttaacagctatttggtggctttttaaagattattaaagacaaattcctttttggatcttaaataagatagaatacagaaaagtttaaatgaaagaattaaccaatagtaatcccagcacacagaaataaccactgttggctattttatgtatttcattctaatctttttttgttggatgcatatatataaatctattaaaaatgattctcactttaaaatttatattctgcctttttcatactgattgttattttaagcacagagytaacaagtttgattgtctaaaatattcacagcattttgtgaacagcaaactaggagagagattcaaggatggttacaggagaataagctctcaactgtaaaatgaatgtccatgagtgaagtaagttagaaaaag

SEQ ID NO: 456145 - DNA, 557 bp, Homo sapiens
tgcttaaccggaggcctggggtcagtcatctgaattacaggcaatagagtctgactgtctggagataacagatttgcaaaacctgaaaatcaaagctcatactcttatttcatatatggactcctaaagtgtaattttttattttaagaaagaatcttaacagctatttggtggctttttaaagattattaaagacaaattcctttttggatcttaaataagatagaatacagaaaagtttaaatgaaagaattaaccaatagtaatcccagcacacagaaataaccactgttggctattttatgtatttcattctaatctttttttgttggatgcatatatataaatctattaaaaatgattctcactttaaaatttatattctgcctttttcatactgattgttattttaagcacagagttaacaagtttgattgtctaaaatattcacagcattttgtgaacagcaaactagragagagattcaaggatggttacaggagaataagctctcaactgtaaaatgaatgtccatgagtgaagtaagttagaaaaag

SEQ ID NO: 456146 - DNA, 556 bp, Homo sapiens
agccactgaggcttggggcttgcaccctttgaagccatggcctgagctgtaccttgaccccttttaaagccattactggagatggagtggttcggttgcagggtgctatgtcccaagtctgaacagaccagtggggccctgggccctgcccaggaaaccattttttcatcttaggcttgcaggcctgtgatgggaggggctgccatgaagatctctgaaatgccctggagacatgtcagggcaagacaycaccattgtcttggttattagcattctgtttctctttatttatgcacgcaaatttctgcagtcaatggggtttcaatttctcccagaaaaaggggttttcttttctaccacatggtcaggctgcaaattttccaaacttttatgttctgctgtccttttaaacatagattccaatttcagaccatttctttgtgaacacagatgactacattttcagaaaaagccaggccacatcttgaatgcttggctgcttagaaatttcttccaccagctaccctaaatcatctctgtcaagttcaaaattcta

SEQ ID NO: 456147 - DNA, 556 bp, Homo sapiens
agccactgaggcttggggcttgcaccctttgaagccatggcctgagctgtaccttgaccccttttaaagccattactggagatggagtggttcggttgcagggtgctatgtcccaagtctgaacagaccagtggggccctgggccctgcccaggaaaccattttttcatcttaggcttgcaggcctgtgatgggaggggctgccatgaagatctctgaaatgccctggagacatgtcagggcaagacaccaccattgtcttggttattagcattctgtttctctttatttatgcacgcaaatttctgcagtcaatggggtttcaatttctcccagaaaaaggggttttcttttctaccacatggtcaggctgcaaattttccaaacttttatgttctgctgtccttttaaacatagattccaatttcagaccatttctttgtgaacacagatgactacattttcagaaaaagccaggccacatcttgaaygcttggctgcttagaaatttcttccaccagctaccctaaatcatctctgtcaagttcaaaattcta

SEQ ID NO: 456148 - DNA, 591 bp, Homo sapiens
tcctgtgcatacatacacaattcaaattatttttcacctgttaatatgccttatgtcaatttaattcatggctcagycaaagaacctgaagggtacagagaaatcatttttttcttcccatgcaaacctaatacagcttgcaatcctaagcaatagaccctgtctacctatttattgtagaaattttagaaaacaaagaagaaagtgtacaaagcattcttgatcctatgttcccaagtccatcactatggattgtatatttttaagtttgtttttgcttcctcccaaacaccatttcattcagtttcatcgtttaaaaatagcagcaactctcttgtgtattttctttcattttatcatttgatcagctctactccttgtgggatgtgctttaaaaatagtgaaaatggctattaacctcagaatcctcagtttttttatcatcgtcataaccaccatgatcatttcagctcaccatctcgccctaccttcctaactgctgctttgcaagccctcctcctgcttgtgcaccaacttttactcctgtaactccaaattagttgcgttagaatttgcttccatcatctcatc

SEQ ID NO: 456149 - DNA, 399 bp, Homo sapiens
tgtgttataggtaatttattcaagttawattttccaactctctaatagtcttttcatctttgtttaatttgctgtttcattcagccattgcgatccgggtgtgtatttgaaatctacgagttttatttagttctttctaaaatctgccatattggtttttaaacttttgtatttattttttgaatgtgttttttttgtagagatgggggtctcaccatgttgcctaggctggtctcaaacttctgggctcaaggcctcccaccttggcctcccagagtgctggaattacagacatgagccactgcgcccagcccagttttcacattctgtttttcttgcttttttaaaatttccttttccatttcttttgaccttttacacatggttgtttctgttgac

SEQ ID NO: 456150 - DNA, 522 bp, Homo sapiens
ttaaagtcgatgccaatttaaccatccacttgggacacaaggcataaagctacacagccaagtaaacactgttctatccccttacctcatctcccatatggcaccatatgcaaactataggtactgcgtggagaccagatgagcaggaacaggaggagaagaagaaactcacaatgcctcatccccactgtggcctccagtcttaagcagacccagagaggggaggcaacaatgggtgagttcagagttacgattaaaatccgacgtggcagtccaaayactgaattgagactgttcttactacatgaagtaaccttcaagactaagcagaatatttatggaacctccccaatttgcctccatggataggggaagatgatcacaagtcattcttgtccaacatactgattccatttgggtatttggaaaattcactaatgtggaacatctctttcccagatgattatggataaaaggaatttagtgtagccacaggatatttatgacatgaaatgaacaaat

SEQ ID NO: 456151 - DNA, 522 bp, Homo sapiens
ttaaagtcgatgccaatttaaccatccacttgggacacaaggcataaagctacacagccaagtaaacactgttctatccccttacctcatctcccatatggcaccatatgcaaactataggtactgcgtggagaccagatgagcaggaacaggaggagaagaagaaactcacaatgcctcatccccactgtggcctccagtcttaagcagacccagagaggggaggcaacaatgggtgagttcagagttacgattaaaatccgacgtggcagtccaaacactgaattgagactgttcttactacatgaartaaccttcaagactaagcagaatatttatggaacctccccaatttgcctccatggataggggaagatgatcacaagtcattcttgtccaacatactgattccatttgggtatttggaaaattcactaatgtggaacatctctttcccagatgattatggataaaaggaatttagtgtagccacaggatatttatgacatgaaatgaacaaat

SEQ ID NO: 456152 - DNA, 554 bp, Homo sapiens
attcatgccttcattcctttcccaagagtttcctgagtgtcttttctgtgtgaggcactgtgctgtgtgtgtgtaggagacataggggaaagccctgctaaggtggtcactggcaggcacttatttttaccatcccttctgccactaatatagtcaggcacatagtagatgctcatgccagaaaaatatagtttaaaatgaattagttcttccattgttatgtgtgtatccacagcatctaccagtgaaccaggcaaggggaagtgcttaataaatgtttatgaatgaaaggcaaatgactgatcctacacagatggaatgaggtgactaaggtcatgccactaaacaaaacttcttcttcttctaaaggggtattaaccatacaatgtcaccattcattaacaaattctttaagatctgatttttaaatagtgttatatccttgmtaagccattaacaatgggaaaataaaactgttaaattccaatcagaagtttgcaaatattatgccacaaatatcctctataatgactctttcacagacagcagatgta

SEQ ID NO: 456153 - DNA, 527 bp, Homo sapiens
tacttattaacttattacctcttttagaaattctaggttttccactcatagtggaaaatgatcaaatatagggagtatactctctgtatatgtatagtacacatatgtatatatatatatatatgaataaaccatggatacaattttatgaaataataattaagctgactattctaaagcttattcatagaaaattacatctcaaatatataaggtgggaatgagatgagattggtaaggtcccattccctatctttatttaaatcatccaactctcagttgagtgctagtgatgaaagatctcagattttatacagattttttgttactctctataattattccctcttatccacagaagtyatgagttatgggtagaaaagacattggcctaagaatcagtaaattttcatgtcagtttttgctactaacttgtgactatgtgattctggccaagttatttcttctgcctgagcctcagtcttctcaactgtaaaatgagatatttataccagatggccactatg

SEQ ID NO: 456154 - DNA, 539 bp, Homo sapiens
tttttgtacaaggtgagacataaggatccagtttcattcttctcaagtggcttgccaattatcccagcaccgtttgttgaatagggtgtcctttccccactttatgtttttgtttgctttaccaaagataaattgacggtaagtatttggttttatttctggcttctctgttctgtaccattgatctgtgtgcctatttttatacctctaccatgctgttttggtgactatgaccttatagtttagggtgaagtcaggtaaagtgatgcctccagatttgttctttttgcttagtcttgtttttggctcgtttttggctccatatgaattttaggawtgtttttacgggttctgtgaataatgatggtagaattttgatggaaattgcattgaattgtagattgcttttggcagtatggtctctttcacaatattgattgtacccatcaattagcatggaatgtgtttccacttgtttgtgtcatctatgacttttttcagcagtgttttgtaattttccttacagaggtctttcacct

SEQ ID NO: 456155 - DNA, 591 bp, Homo sapiens
gattcacctgcatgtgtaggtgttggcatgcacacccttgtgatgggcaaagatgaatcatccagagatagtgtgcagagaaggaaattttactcagtggcaagataattctaagagaagttcaaaattaaagtcagagaaaaaaatctgatgacatacaggagtaatcccattaaatcttaagaaaattataccatacccaatagctaatcatgacaaaaagggatgtgctagggtggaaggaaactaaggtaggaggtgacagggaattggggttgaattgggaaggcagccaaacgtaaaagtcaaccatgacttctctaccatgaaggtgagtcaaggttgtagttagaaagacagtgtgagccagttagaaagtgtgagtagttagaaagacaatgtgagccagaaatagaactataaatagtatgcaatcttgggtatctgctttatgtgttgtttagaaagtgttaagtggttagacatgaaagatcaaatgaactattccagcctggagtattgtaagaaataaaaactactaaaytgtcagatagaagaggttcaatatttgttctcatacacataatttgt

SEQ ID NO: 456156 - DNA, 451 bp, Homo sapiens
cccattcaattcattccagcataatacttttttgctattcttcaaagacattaaattttttcagccttaggacctttgtagttgctattcccttcacttagaacacactttccacagatctttgcatgctattctaattttcatgtcacttcctcataaagcaaagascaatgagtatgtagcatgtcattctcaaaatgaagcaggtaccaattagtgatgaattcgccttcccagtactgcccagaaagttcaaccggagagacaatcgtagtgtgcactccctcctcaaaaagccaattctttcttaggggagagtctttactacaatgaagaaatagggtcctggtctccctgggtatgcttcctacatctttggaaatataaaaaaattttgtctcatattttgattctataaaagagaacataaaaacagacattgtgagtcaac

SEQ ID NO: 456157 - DNA, 476 bp, Homo sapiens
catatatatctgaaaaacacaggtactagagtaagaatattcaacctctattaaatggttcctatattccaggctctgtgaatttttcttctcaactatcctaggaggcaggcattataatccctgttttactgaaggaaaaactgaggattactaagggcaaggaatttgcactgaggtcacataaccaataaatggatgaccactccaagcctcagtctattcgtctgtaaacaggaaataacttctttagagtattcgtgaaaaataaggagaaacagtacttggcactcagtagaagtcctgcttacctgtgcaaackcctatctttctacttcctccatctcattcatacagcattacactcaagtgtgttatatcttactgggacacatgcttcacttcgttccttgtctgaattctaaacatcctctaggtcccatgtccatgtctttaggctcatctctctcacccat

SEQ ID NO: 456158 - DNA, 476 bp, Homo sapiens
catatatatctgaaaaacacaggtactagagtaagaatattcaacctctattaaatggttcctatattccaggctctgtgaatttttcttctcaactatcctaggaggcaggcattataatccctgttttactgaaggaaaaactgaggattactaagggcaaggaatttgcactgaggtcacataaccaataaatggatgaccactccaagcctcagtctattcgtctgtaaacaggaaataacttctttagagtattcgtgaaaaataaggagaaacagtacttggcactcagtagaagtcctgcttacctgtgcaaacgcctatctttctacttcctccatctcattcatacagcattacactcaagtgtgttatatcttactgggacacatgcttcacttcgttccttgtctgaattytaaacatcctctaggtcccatgtccatgtctttaggctcatctctctcacccat

SEQ ID NO: 456159 - DNA, 627 bp, Homo sapiens
agcacaccagcatggcacatgtatacatatgtaactaacctgcacattgtgcacatgtaccctaaaacttaaagtataataataataaaataaaaataaaaaaaaatacagttcctgtagccactgaaacactcaggactttcacacaacagtattcaggctgatccacatgaacatttctagtatggataaaaaagacttccactaggcactgagaagtaaatttccatttacttttatttatctcctgacatacttggcattgtaactgaygcaaaatagtaataataacaggaacaagaacgagaacaagataagaaatagaaaggcttttgtttatttttacttcatcaagatttgagcccaagcatttcattgtttaccaaatgcacattataagttaggcaatgcatcatagaatacaaggatagttcaacatataaaaagcaatcagtataatacaccatattgaaaaaatgaaggggggaaactacacgatcaattcagttgatagagaaaaaaaattttttgacaaaattcaataccctttcatgatgaaaaaaaaagtcaacaaactgggaatagaaggaagttacctcaacataaaggtcatatatgaaaaaccca

SEQ ID NO: 456160 - DNA, 563 bp, Homo sapiens
cgtgactatcaccatagatggttatgttcatgcaacaaaaataactggattaccattttaccactgtaattctcataaaggctcagaagtctcagaggatctgtccactatgctgttaaaacttgaaaatckttaaaaatcatctttaggtttatcttctcttacaggaggaaattggggcctcaaatggccctgtgttcttggcaccagaggatgatcaatgataggaaaaactgcatttcatttgcaatatatcctaagaacaatggattacagggctgctggaaaacttcactaataatgaaggagacatactcaaaaatctctaaggaagaaactgtgtgtattacagattatttgtgccaaggccctgtgctaggtgctttacatacttgcattgcttttcacaagcataaaataggtatagctttctctttcttacaaataaggaaactatcttacaaaagtttcttaacttgtctaagatacacagtacaggaagtagtagagctaccattggaacaccaaagtctatattctttctaccatagcttctatgctgc

SEQ ID NO: 456161 - DNA, 594 bp, Homo sapiens
ttttttttttttgtttttttttttttttggagacggagtctcgctctatcgcccaggctggagtacagtggcgcgatctctgctcactgcaagctccgcctcccgggttcacaccattctcctgcctcagcctcccaagtagctgggactacaggcaccggccaccacacccggctaattttttgtatttttagtggagatggggtttcactgtgttagccaggatggtctygatctcctgacctcgtgatctgcccaccttggcctcccaaagtgctgggattacaggtgtgagccaaccatgaggttttgaacttggggaaatgggtggatactggtaccattaataaagagacaaaatattggaagacaagcagaatatgaaggaaagaagatgaatttaggagtcattcagcatttattgagcacatgatgtgtgtaacctctcttctgagcactggctgttctagatataacttgatctcaacatctggtactagtaaagtgtgcctaggtgataaagcaacagatgctatagatctgtctgtccaatacagtagtcactggcctaccaaatttaaacatgtggctgtt

SEQ ID NO: 456162 - DNA, 610 bp, Homo sapiens
gtcacaacagccacattatggctaattatagccacattatggttaacggctactatattaagcagcatagacagggaacatttccattactgtagaaagttctatttttgggggcattaagtagttggatatccttttctctggagtataacagctggcagagccctctaaatggcagctgtggaaaacacagttaagccaggaaccgtgtttctcagaatgacttttgctacatggttatgagttggtcaatgaattggtcaatgtgtaacttctgtttttggtaggagcagtctcttartagtgaaccactaatgtacttgaggcacaggccaggcaatgacaaaagaagtaaaattttagttcgttagttccttaggcttagttccttagtcacattagccacattcgagaactcaatagccacacatggttagtgattactcacgagccttgtcacatgccaatttcacatgtcaactaatgtgcaattttcaactgtgtatacacacacacacacacacacacacacacacacacacatcatatacatgcatagagaaaacactagaaagaaatttaccagcatgttaatactggttctctttga

SEQ ID NO: 456163 - DNA, 562 bp, Homo sapiens
tctcattgtagtttttatctgcatttctttgataatcagcagtgttgagcatcttttcatataactkttttccacttgtatgtcttcttttcagaaatgtctattcaggtcttctgtccatttttaatcacggtattagctttttctttcctacagagttgtttgagctccttttatattctggttattaatcccttgtcagatgggtagttgaaaaatatcttctctcattatctgggttgtctcttcactttgtttattgttttctttgttgtacagaaggattttaacttggtgtgatctcatttgtccatttttgctttggttgtctgtgcctgtggggaattactcaagaaactctccagtccaatgtcctggagagtttacccgattttttcttgtagtagtttcatgatttgaggtcttagatttaagtctttaatccattttgatttgatttttgtatatggtgaagcataggtcaccatatatgatgagactggtgagatatggtgagattctagtttcattcttctgcatatgaatatccactttcccccac

SEQ ID NO: 456164 - DNA, 572 bp, Homo sapiens
atggcaaagcgaggttaatgctctagtctccatggagctacaggcttaagcaccattgctataagagtggtgctcatctttaagaagccatgaagaatgtagggggaaagaactagttctggatacacaaaggckaggttcaaatcacagatctatcacttacttaacctctttctagctctgactcctaatctgcatagtgaggacaataataacaatacactcttcataggcttattgtgaggattagatgtatgtaaagtatttaaaacagttcctgggacatagcaagccctcagctaatgatagttgctatttttattttgggacagtatgcagtgttagctataaggatgacaataatatttacttgagtctgaggcatcatcaaatgctaatccaaccccatcattttttagatgaggaacctgaggcatagagaggagaaatgatttatctgaggtcatgtagaaagttaatagcagatctggaaacagcatccaggtctcttaattcccaattctgtactctttcctacttcttcgctagcccaaggactgtctctgtccctc

SEQ ID NO: 456165 - DNA, 581 bp, Homo sapiens
tattgtgaagaacaaaagaagaaagtttccacggcgcagaatgggacctgagcaggttgctgctgctggctgggtggccagcttttattcccttatttggccccgcccacatcctgctaattggtccattttacagagtgctgattggtccrtttttacagagtgctgattggtgcatttacaaacctttagctagacacagtgctgattggtgcatttttacagagtgctgactggtgagtttacaaacctttagctacacacagagtgctgattggtgcgtttttacagagtgctgattggtgcatttacaaacctttagctagacacagagcactgattggtgtgtttataatcctttagctagacagaaaagttctcgaagtccccaccccacccaggagcccagctggcttcacccctcagtggcacattggctaatgaactatttttagttactaactttttttccacataaaaaatatcaggaagcttgcttgtaaacaacttggggaccacactataagtgttcagttaatgttttgttttatttttctttctagttccacagattcatagtg

SEQ ID NO: 456166 - DNA, 593 bp, Homo sapiens
attttatatagtatcttgcggatgttctctgaatttcttctgttgggatgttaacctgtctagcaaggttagggatgttttactgacttatttcctcaaatatgttttccaaattgcttactattttttcttctcattcaggaacaccaataaaccatagagttggtcattttatataatcccatattcctccaagtcttgtttattttttattttttattttttaatttttctgatggagttaatttgtaagagtggtcttcaagctctgaaattcattctttttggtccagcctattgttaaagcttccagctctattttgaaaaaaatttaaggaagtgttcaatatcagaatttctatttttttggtcaaatatagctatcttgtccttcacattctgaatcacttttcttgtttctttrtgttagatttcaactttatgttggatctcattgagtatcttcacaatccatattttgaatttcctgtctgtcatttcagacttttcaggttagttaggatacattgctataaaactagtgtgatcatctgggggtgtcaacatactctggctctttgtactgccagagt

SEQ ID NO: 456167 - DNA, 569 bp, Homo sapiens
agaatgagagaaaatatttgcaaactatacatctgacaaaggactaatattcagaatctacaaggaactcaaatgtctcaacaacaacaaaaaataccaataatctcattaaaaagtaggcaaaggacatgaacagacatttttcaaaagaagatatacaaatggccaacaagcatatgaaaagatgttcaacatcactaatcatcagagaaatgcaaattaaaaccacaatgagataccatctttcaccaatcagratggctcttattaaaacgtcaaaaaataacagatgttggtgaggatgtggagaaaagggaatgcttatacactgttggtgggaaggtaaattgatacaccctctataaaaaacaatattgagatttctcaaagaactaaaaacagaactaatattcaacccaacaatcctcctgtgaatatctacccaaagagaagggtagatattccatcatatcaaaaagatactggcactcatatgtttatctcggcattatacatgacggaactggaagccattatccgaagtgaaataactcagaaacagaaagtta

SEQ ID NO: 456168 - DNA, 455 bp, Homo sapiens
tctttagatatcagacccacctggtgaagctggacatgcttgttaattttccatagctacatttatttatataattaaaaattcatccataaagcctcattggtggtgagaagacaagaaagaagaaagccagggtatatttgaagttttgtgaagctctcaaactctccccttcatccgtcccagatagaagtggaggggcttggagactcagaaagaaagaaaactatgaaacttacaagttgtaaccacttttccattcatgtttaaaccatgtgtatttcagcagaaatgtagcccatgtaatactgattcattttctctgtaatcatcaaactactcttttccaggaggaatttaatgtccacaaagrgttttcagccttttcagaaagatttttaatccactctcctcataaaaacaggaagctacatttgccaattgtcaacggactc

SEQ ID NO: 456169 - DNA, 567 bp, Homo sapiens
caactgccaatacattttatagtcagatttatatcgacaccactgaactagatggttcccaaaatcttttctagatatgagattctgtgttcttctccaccacgggctattccaaccttctccttcagagcacctccaccagtctagaaatgtacaaatactaacaactggtttggaatgccccaatataaaattttcaatgtcaaagatggttctggctttcacatcaactttttgatagttttgttttgttttctcagactcttctaaaaggtctgcctgactacacagaagttattttctataagactaaaacatataaagaaattcatgcctaaacttgaagcatctcatcaatttgtaatcaagtctcttttgcatagacatgttgctcaagtcttttaaaaaacatccacaagcaatttcttctctcctttcaggatttttaaccactggaatgagcagcaagaaatgggaaatgaattcaatgatgggagaaaataacggtcatggtttcttatgacayttaagaaaatgggaaagtaggataaactcatctaagtaact

SEQ ID NO: 456170 - DNA, 527 bp, Homo sapiens
atgaggaaaagagtcacatgtgctcttggctgacctcaaaagagatgtagcatcaaattcaactgacctcaagtacatttttagtaactcttatttccacagctctaggctaagtgctggccagaaacataaaaattataagtcatattgtcagcctcaagttgctaaaacatttggggtaaaaataagacatacgcatattaaagagataagagtgaaacagcttttgttaaacgacactgtgacaggatgaaaaagtactgaagaaatcaaagacgacagggacatctgcagagtagagtagctgggaaaggcttcatggaggagatgggaccaagtttggaaatttgaatacctgtcttgcttaatttttcatctaagtgacttcccagacttctctttgtcctctgtaaagtayattgaccgatacccgcaagcagctgatcacttttagtttgtagtgacttgcttctaaaagtgaacgtttttataccagctgaatttgtttttacagtttagtaaaatat

SEQ ID NO: 456171 - DNA, 581 bp, Homo sapiens
tgacagagacttacagagagtgagagtttcagggagagagagagagagtgcaaaaagarggtattaggtgaagaagggaaggacacagacagccagagaagtgggactatattatagagaattttagctcatggttggtttctatttacttcctttgcagtcttgttagtctgtgcctttaaggaagttggatacaagtattcaaccattttctgctaaaatggtgcactgtaataaaagcacctcctcctcaacccacttactgctacatcaaacactacaaggatgggaagagaaattctgcaatttatactttatttgcataaaaacaagatttagtaatgaagagtatcccatgctgttacccttgcccaagttgtcacccaggaaaattatttttccagaaaaactggaaatccccctgagtcaccccattcccttgctctgatattgggtttcctctgaaaagtgccttgtggcatgattgtgttacccttgggtttagagattaccacagcaacccagggaaggaaatgtttgcccatcctcctactgacaaggaccagaatcctgtaaaatcc

SEQ ID NO: 456172 - DNA, 480 bp, Homo sapiens
tgactgcttttggacattatttgaccagtttgtatttaagttttaccagcaggtgaaggaagaaagtaaaacttacattatatgacttgcagtattgtttaaagaagaaaatgaaatgtgcttacaaaatatatgtaatgataaggttttacaattatcactatattcatcataatgccccaagttattcaatcaagttcagttccactttagcagagtagacctgaaatgcctaggcttgaatcctggcttcatgacttcctgtgtgacttatctaaccctcaaattcctcactcaaaaaatggagatacttaatagtacctacttycaacctactaaacagtaaatatctaggatggaaattacatgagacaattcacatatagcactcaggacaaggtttcacatgtaataagagataagggttagctttgtcattataataattaatagctcacaatgggaatgttatatgagcat

SEQ ID NO: 456173 - DNA, 374 bp, Homo sapiens
gtttctgtattataaattatgtaatcacgaagtataataagtaaattgtttttcaattattttaaacgtaggagttgcatttccctgattacaacatcatgctgaagtgggwctacaacccctctaaattatggaaagtttatctatataataaggaggcttacccagaacttaaaaagatccatttccagaaagacctcctcagaattcttgccaaggaggaaagaaaagagaaagaaaaaagtcatctttttttttttttacatcgaaatacataggatgtaaagtaagaattttggcagacactggtctttcccttctaatgtatgctcacttaataatatttaataagaatgttctcgagaaagataaat

SEQ ID NO: 456174 - DNA, 541 bp, Homo sapiens
ataaatatacataccatataagtatttcatatgaaaatttcattaaaatgttcatacartatgtagacttttgtgttgtttttttttttcaaagttcattcattttctcacatatagtagtacttcattcctttttacaaggctttcttttaattttctactttaatacttctggcctgcctcctctttgacatttgattgaattccaattcaatatcaataacaaaaattattgtgataataataaaagtataaatcatcaagccaaatataaattttttaaactctgtccattttgttaattgcactatttccacatttgatgactaataaagatatcatgagtgaagagatttggatgataacatctattttatacatctctaggtttatgtctaattggtgcatttgttttgctttctctagctctttataagctccagaaagataacttctttcggatttcatatgcatagtgtattagtccattctcgtgctgctatgaagaaatacctgagactcggtaatttacaaaggaaag

SEQ ID NO: 456175 - DNA, 532 bp, Homo sapiens
ttattttatttcttaagagtaattttttattagaaggtgaatattgtgatatgcaaaaattatataaaaagcagaggtcaaattgtaggcaccttattttacagatgaggaaaccaaatttgaaaggatcaactaatccaaagagccagcacacmaacagaggtgttcttatctccaatctgttgttctatttccctcagaatggacagtgtagatttgaacacgtagtggcatgtactcattgaaatctatactttcaaaaaataggcacattagtttatgtcatcatgttagtttgttttcttgagaatagataaggtgttgtttttaaaacaattttaggtagatgaaaaattttggtgaattatacaaatgagacttactaagacaaagattgcttcattttctttctattgacatttctttggcttcttttgggaggcttaattattttttatcaagtcattaattgataattatttcacctaaaaaaactccttggagtgctattatatatcaagcactgtgttag

SEQ ID NO: 456176 - DNA, 532 bp, Homo sapiens
ttattttatttcttaagagtaattttttattagaaggtgaatattgtgatatgcaaaaattatataaaaagcagaggtcaaattgtaggcaccttattttacagatgaggaaaccaaatttgaaaggatcaactaatccaaagagccagcacacaaacagaggtgttcttatctccaatctgttgttctatttccctcagaatggacagtgtagatttgaacacgtagtggcatgtactcattgaaatctatactttcaaaaaataggcacattagtttatgtcatcatgttagtttgttttcttgagaatagataaggtgttgtttttaaaacaattttaggtagatgaaaaattttggtgaattatacaaatgagacttactaagacaaagattgcttcattttctttctattgacatttmtttggcttcttttgggaggcttaattattttttatcaagtcattaattgataattatttcacctaaaaaaactccttggagtgctattatatatcaagcactgtgttag

SEQ ID NO: 456177 - DNA, 418 bp, Homo sapiens
ggattgcatgagcccaaaagtttgagactgtggtgagctatgattgtaccactgcactccagcccacgtgacggagcaagaacctgtctctaaagagagagaaagagagataattcaccttatatattaggtatgaaaaattggccaggcacggtggctcatgcctgtaatcgcaacatttttggaggcctaggcaggtggatcacttgaggtcaggagtttgagatctgcctggccaatatggtgaaacgctacctttactaaaaatacaaaaattatctkggcatggtggcgggcacctgtaatcccagctacttgtgaggctgaggcaggaaaatcgcttgaacctgggagggagaggttgcagtgagccgagatcaaggcactacactccagttgaggtgacaaagtgagattc

SEQ ID NO: 456178 - DNA, 418 bp, Homo sapiens
ggattgcatgagcccaaaagtttgagactgtggtgagctatgattgtaccactgcactccagcccacgtgacggagcaagaacctgtctctaaagagagagaaagagagataattcaccttatatattaggtatgaaaaattggccaggcacggtggctcatgcctgtaatcgcaacatttttggaggcctaggcaggtggatcacttgaggtcaggagtttgagatctgcctggccaatatggtgaaacgctacctttactaaaaatacaaaaattatctgggcatggtggcgggcacctgtaatcccagctacttgwgaggctgaggcaggaaaatcgcttgaacctgggagggagaggttgcagtgagccgagatcaaggcactacactccagttgaggtgacaaagtgagattc

SEQ ID NO: 456179 - DNA, 416 bp, Homo sapiens
aaggagaaaccaagtgtgttgatgttagctatattaggtgcctggaatcagaaaaggcaggacactgaagtctagacagtctgccattaaactaaacttaattagtataattaaatacaagttaatgcatacatataattaatgtatactaattaagtcatagtaccatgcaaagcctgctgattgatgggctagattagcarttcaagtcattagcaagaacaaaattctagcatgcaagacagattgtccttagaagttaagcaggtattattctaatccttggaatctcacattgccaaatttatttcaaaagtcattaactaatttttaacattctggttctgagaaaagaaaacatatcaaaacgtatccattgttcaggagacatcagccacaatgaacaagcccagctt

SEQ ID NO: 456180 - DNA, 612 bp, Homo sapiens
ctggtgtctggcaccatactggttactttctaggcattaacttatttaattttcacaaaatcccaagaggaaagtattaacatgatctcaattytatagatggaaaaactatggcttgcagaagtttacttacccaatttcacacaacctgtaagtggtggcactggaatttgaatccaggcaatctgacttcagagatttgttagtgcattttttagatttctctgtccctttagacatttttactgggtgtggaatgtggggacattggtactgttgatgaccttggtggagaggtgggaagtcctgccgggaagtaaagaggatttggtgtttatgagtgcatgtatctatgtgccttattaatgaaaaatggtttctccccttttattgtccaccatctgtgtcacacctggaggcactcagtattttttagaaatatagatgattcatacaactattttcttataaagtctaacctcccagaggaggaactggaggggaaagttcatttacaaagatcatctatgcttataaaggcatcttaatttggtgagttggagaaagcccggctgctaattgattagcttgtttcttgacccgctaattgag

SEQ ID NO: 456181 - DNA, 612 bp, Homo sapiens
ctggtgtctggcaccatactggttactttctaggcattaacttatttaattttcacaaaatcccaagaggaaagtattaacatgatctcaattctatagatggaaaaactatggcttgcagaagtttacttacccaatttcacacaacctgtaagtggtggcactggaatttgaatccaggcaatctgacttcagagatttgttagtgcattttttagatttctctgtccctttagacatttttactgggtgtggaatgtggggacattggtactgttgatgaccttggtggagaggtgggaagtcctgccgggaagtaaagaggatttggtgtttatgagtgcatgtatctatgtgccttattmatgaaaaatggtttctccccttttattgtccaccatctgtgtcacacctggaggcactcagtattttttagaaatatagatgattcatacaactattttcttataaagtctaacctcccagaggaggaactggaggggaaagttcatttacaaagatcatctatgcttataaaggcatcttaatttggtgagttggagaaagcccggctgctaattgattagcttgtttcttgacccgctaattgag

SEQ ID NO: 456182 - DNA, 612 bp, Homo sapiens
ctggtgtctggcaccatactggttactttctaggcattaacttatttaattttcacaaaatcccaagaggaaagtattaacatgatctcaattctatagatggaaaaactatggcttgcagaagtttacttacccaatttcacacaacctgtaagtggtggcactggaatttgaatccaggcaatctgacttcagagatttgttagtgcattttttagatttctctgtccctttagacatttttactgggtgtggaatgtggggacattggtactgttgatgaccttggtggagaggtgggaagtcctgccgggaagtaaagaggatttggtgtttatgagtgcatgtatctatgtgccttattaatgaaaaatggtttctccccttttattgtccaccatctgtgtcacacctggaggcactcagtattttttagaaatatagatgattcatacaactattttcttataawgtctaacctcccagaggaggaactggaggggaaagttcatttacaaagatcatctatgcttataaaggcatcttaatttggtgagttggagaaagcccggctgctaattgattagcttgtttcttgacccgctaattgag

SEQ ID NO: 456183 - DNA, 617 bp, Homo sapiens
aatgttactttctctttctgtagcattaataaaactatggaaatagtgagggaatagtcaatggtcttatagtacagataaataaatgaatttccrgcagaatacgtgattttcttcctgcattgttttagacgagatcgggtgcgttcagggtggtatggacgtataccttgcattgttttaaaccaaggggattttacagtgaatttgaacaagaagaaagttccaagtgaaatctggccattgctttacatttaatctttacattgctttatggtagaacaaaactttttgtcagttgtatggtggattctatgattcacctgatccagcaggggaaagaaggagattctttgggaaaccttgtttggtgacatgcagttgttggtgaggtaaagggaagggactaaaaaggtagtcagaaattgattagttgtcagagacattcaagggtcacctttgttttttttttctttttaaaattgtcattcttcagacattctatagatgctgtttatttatcatgctattagcagaaactatgctgctctaaaaagttacataatcaaaccaaatccttatccaatttcactgcagtgggactctgcccactgtgt

SEQ ID NO: 456184 - DNA, 657 bp, Homo sapiens
tggagtactattcagccataaaaagaatgagatcctgtcatttgcaacaacatggatggaattggaggtcgttatgttaagcgaaataagccagacacagaaagacaaacatttcatgttcttatttatttatgagagctaaaaatcaaaacaattgaattcatcagcatagagagtagaagaatggttaccagaggctgggaagggcagtggtggggaggtcaggataattaattggtacaaaataattagaaagaatgaaagggacctattattttatagcactggagggtgactatagtcaataataacttaattgtacatttaaaaatagctgaaagagcataattggaatgttgtaacaygaaggataaatacttgaggggagggataccccattttccatgatgtgattattatgcgttgcatgactgtatcaaaacatcccatgtaccccataaacatatacacctattatatactcacaaaaattaaaaataaaaaacaaacaaaacaaaagaaatattttttatctaaaataaatgtagcaacttcaggcagtatagtatttttttatctgaaataaatgtaacatcttcaggcagtagagtattcttcatgtatctcagttcatcatgagcagttgatgtttgtaga

SEQ ID NO: 456185 - DNA, 530 bp, Homo sapiens
ttggtttctgtttttaaaataattatcctgaatacaatgaagtgaaaaaattattccagatccaatgaatttgttatgttaagtgacttcttaccgtagtactttgggacaccctaccaatcatgagtcaccatgttagggtgggctgtttatatgtttgtcaagaagacagcaagaaaacagactgtatttcagtctatctatctatctatcatctatctatctatctatctatctatctrtcatctatctatctatctatcatctatctacctatctctctctccatctagtctacctattatctatctattaatatgatctgtctatctatctatctatctatctaatctatcatcatccatctatccgtctatttatctaccgtgtacctattttgccatgaagtagcaatatagcaattctgtccctaagttgaaggtataggtaacttttaaaaagtcttaataagctcaaaaacaaaacagcaacctaccaagagatggattcaggggtaaaatgaaggacaa

SEQ ID NO: 456186 - DNA, 530 bp, Homo sapiens
ttggtttctgtttttaaaataattatcctgaatacaatgaagtgaaaaaattattccagatccaatgaatttgttatgttaagtgacttcttaccgtagtactttgggacaccctaccaatcatgagtcaccatgttagggtgggctgtttatatgtttgtcaagaagacagcaagaaaacagactgtatttcagtctatctatctatctatcatctatctatctatctatctatctatctatcatctatctatctatctatcatctatctacctatctctctctccatctagtctacctattatctatctattaatatgatctgtctatctatctatctatctatctaatctatcatcatccatctatccgtctatttatctaccgtgtacctattttgccatgaagtagcaatatrgcaattctgtccctaagttgaaggtataggtaacttttaaaaagtcttaataagctcaaaaacaaaacagcaacctaccaagagatggattcaggggtaaaatgaaggacaa

SEQ ID NO: 456187 - DNA, 544 bp, Homo sapiens
gctggggagtgaggatatatttacaggaaaacacagtgttgctttgggcactggagatgacccaggaggaacaacagtgggtacttatgggctccaccagggcagtttccaggcctggaagcagctctctccctagagcccctgtaacagtggccaccacatatttcccactagtagccaatgggcaggggatatcggcaggaagtaaaataaagaaaactgcacgtgagcccatagacaacacgtagggactcctaaagtctccatagttgctggagatataattttaatataattccacaagtgcccacaggctagaggggtggaggatacccaggttctattccattagattagagtgaaatgaatgaggaaaatacttatcccaaaagcaaatgcaatatrtagaaactacagagtaaaagttcaaactaacctttccttacttgatatttacacttaccaattttttaatatattcatttttttaaattgtcttcaaataatgtatgcctttgccacttgacaataagttggctctcca

SEQ ID NO: 456188 - DNA, 502 bp, Homo sapiens
cattcagactgcttaggatttccaggatacacttgagcaaattttcatatattttcctttgttggtagaatagcatcatttcatgtaattcatgggtctctttgccttctttcctggttgctgatctttgcttgtgttgctgaagttttacattggcacgcctaaacttctatatagcatagaaatggagtattaaaagtaaggttttttttcctttcttcttttatttatttttttcctacctaagctattctaactaactccctcatgacagctgagtgaaattttagtattagtttgctggacagaatttttagggaagtcagttcactatgacttctgctctctgaaaccttgaaatgcaattcaaatttaaagaggcagaatcagctcataaagtgtgatttcaggattrgactagctcttcgagatagcaaaactgtggtctcctgaaattctagagccaatgcttatctacatttaagattttatttggaactgt

SEQ ID NO: 456189 - DNA, 446 bp, Homo sapiens
aaaaatcataataacatttaatttaaaacacaccttcaaatagtccatttagccaccaactctttctacttttctttgtatttactttgttgttcctagtcccctttcctctctccaccctggttctaggaatttaattatgtatcttgaagtttgagacaccctaggggattccccacacccagttctccatatattttcatgcctagaatcactctcattagacttccctcatatgtgtatccttcatttgtgttggaaactgccttcaaaatgaagaccctccaggtctgctcccataggtaagtgatgaggacaggtggagacagatcaasaagacagctgtgggggactgggttggggggggtggggctgcagattgaagactatgataggctggactccctggggaattcagactctgactcagaggtttgtgtgaagga

SEQ ID NO: 456190 - DNA, 628 bp, Homo sapiens
catatgtgcaaaacacaatcttgcaagaaaaaccattctaagtcatctaaatcagcataaggctggatgatgccattttaacaagactggaaactcagagagagagagagagactatttgttcaccaaacagaacacattcaggctaatgtccacagtttatttatttttaaaaagttcttccaaattgtcaggaagacaaactaatagaaaacaggcaaaggatatatagacaatccagagaagaacagttctaaatagccatcaaacatgtgaaaataggtataaatttattaggaagkataagaaaataacacttaaaatttaacagactgacaaaaaattaaaaataacaataatacctgttactggtagggatgaggagaaaacaggatgtcgtggaaatgggaaatgttataggcttactctatgaattagattaaggttactggttaaataactttaaccttaagtaaccaactgcttactataaaaatatttctttagtaaaattattgaattgacatatttttaaaggcagcatcaaaacagtagccccacatagaagtcattcaagcaggctcatttgcccagagaaatacccaagatcctgggagaggaaccaaagg

SEQ ID NO: 456191 - DNA, 609 bp, Homo sapiens
tgtatagtttagcaactgaggttctcaaagcaaataaaaagaccaagttctcaagggtaggtttttcccatgggagtgtataattcagcggatgtttaactagtgccagatttatcaggatacttccaactctgcatctgataagaagtgtctggagaataaatatcttctatttctcctcctggccctaaacaactcaagcctcaccactcccagacatcaccgagstagcatcaccctttgctacttgccagaaggtcacccagataagcttctgcatggtttacaaatatgtttgaaaaatgaaattccttcagccaactgcaataatctggttcaaccacactttttttttcaggcaattccttcacaggcatctatcttcttatgacacacttatttagatgttatcatgattagtaagatattaaaatcatttctgctcacaactgactgtcttgacacccatgtgttccatgaagttccctcagcgtgagaaaactcaatgaaacaggtggtgcaaatttcaatgatactcaacgcatcagcacgttttagaaatggtatacattgctggtcactccttcccctggaaaagctgcaccctct

SEQ ID NO: 456192 - DNA, 609 bp, Homo sapiens
tgtatagtttagcaactgaggttctcaaagcaaataaaaagaccaagttctcaagggtaggtttttcccatgggagtgtataattcagcggatgtttaactagtgccagatttatcaggatacttccaactctgcatctgataagaagtgtctggagaataaatatcttctatttctcctcctggccctaaacaactcaagcctcaccactcccagacatcaccgaggtagcatcaccctttgctacttgccagaaggtcacccagataagcttctgcrtggtttacaaatatgtttgaaaaatgaaattccttcagccaactgcaataatctggttcaaccacactttttttttcaggcaattccttcacaggcatctatcttcttatgacacacttatttagatgttatcatgattagtaagatattaaaatcatttctgctcacaactgactgtcttgacacccatgtgttccatgaagttccctcagcgtgagaaaactcaatgaaacaggtggtgcaaatttcaatgatactcaacgcatcagcacgttttagaaatggtatacattgctggtcactccttcccctggaaaagctgcaccctct

SEQ ID NO: 456193 - DNA, 609 bp, Homo sapiens
tgtatagtttagcaactgaggttctcaaagcaaataaaaagaccaagttctcaagggtaggtttttcccatgggagtgtataattcagcggatgtttaactagtgccagatttatcaggatacttccaactctgcatctgataagaagtgtctggagaataaatatcttctatttctcctcctggccctaaacaactcaagcctcaccactcccagacatcaccgaggtagcatcaccctttgctacttgccagaaggtcacccagataagcttctgcatggtttacaaatatgtttgaaaaatgaaattccttcagccaactgcaataatctggttcaaccacactttttttttcaggcaattccttcacaggcatctatcttcttatgacacacttatttagatgttatcatgattagtaagatattaaaatcatttctgctcacaactgactgtcttgacacccatgtgttccatgaagttccctcagcgtgagaaaactcaatgaaacaggtggtgcaaatttcaatgatactcaacgcatcagcacgttttagaaatggtayacattgctggtcactccttcccctggaaaagctgcaccctct

SEQ ID NO: 456194 - DNA, 496 bp, Homo sapiens
tggctcacccaaggttgtcagcttcattacagtttatttttcccacccatcatatacaccagacttggatcttgacaaaaggccaagattttgtcattattgagaatattcagaagcattgtctggcaacagtaactacacacacacacacacacaaacacagacacacacacacacacacacacactgtccacaccaccccatccaacacagccccaaatacctttctaacaaaactcaaccttattttcacatctgaagcttctattattgttcactcttacccaaatttttttaatgaaatagctagagattggaaggcagcatagagtgtgaccaaacaccagctggtgccctcctggcagaagctgtcaaaaaccacaatactggagwctaagaggggcctaaagaaagcagctaacccatcctcctgtctccagctaggtttcttctcatattcagagctaccagaggctgacatggactggaccaggtc

SEQ ID NO: 456195 - DNA, 481 bp, Homo sapiens
tgtttaatattagtgttattttcttagaagatgagccttttcttagcataaaattctcagaggaactgaagtttggtcagcatggaggtacagagagagatatacgcttttacaagtatcaagtcacctaggcaaatgacaaaatattcaacatcctggtctcaccatcagactgagcacaggcaccctgaaaagtctctgaccctgaacactacccccaaaaataacatttgtcttataaaacagggagaagaaggggcactaaaaagataaagtttaatcaaagtcaygaatcactggaatagaagatatgctgttaagaagagtccccagtggtgcattggacaggggaggggggaagagaggtactaatgagcttctctttcttggattacaaacaggagagtgttagctgccatttgaaccaggcctgtcttcaaatgtgtcacccacctggtcaggtggctttagggttcctaag

SEQ ID NO: 456196 - DNA, 481 bp, Homo sapiens
tgtttaatattagtgttattttcttagaagatgagccttttcttagcataaaattctcagaggaactgaagtttggtcagcatggaggtacagagagagatatacgcttttacaagtatcaagtcacctaggcaaatgacaaaatattcaacatcctggtctcaccatcagactgagcacaggcaccctgaaaagtctctgaccctgaacactacccccaaaaataacatttgtcttataaaacagggagaagaaggggcactaaaaagataaagtttaatcaaagtcatgaatcactggaatagaagatatgctgttaagaakagtccccagtggtgcattggacaggggaggggggaagagaggtactaatgagcttctctttcttggattacaaacaggagagtgttagctgccatttgaaccaggcctgtcttcaaatgtgtcacccacctggtcaggtggctttagggttcctaag

SEQ ID NO: 456197 - DNA, 481 bp, Homo sapiens
tgtttaatattagtgttattttcttagaagatgagccttttcttagcataaaattctcagaggaactgaagtttggtcagcatggaggtacagagagagatatacgcttttacaagtatcaagtcacctaggcaaatgacaaaatattcaacatcctggtctcaccatcagactgagcacaggcaccctgaaaagtctctgaccctgaacactacccccaaaaataacatttgtcttataaaacagggagaagaaggggcactaaaaagataaagtttaatcaaagtcatgaatcactggaatagaagatatgctgttaagaagagtccccagtggtgcattggacaggggaggggggaagagaggtactaatgagcttctctttcttggaytacaaacaggagagtgttagctgccatttgaaccaggcctgtcttcaaatgtgtcacccacctggtcaggtggctttagggttcctaag

SEQ ID NO: 456198 - DNA, 536 bp, Homo sapiens
atggtacctcacatttcaatactaacattgaatgtaaacagcctaaatgctccacttaaaagatactgaaccctgcagcagaatggataagaactcaccaaccaactgtctgtcaggagactcagctaacacatcaggactcacataaagtaaaggggtggaaacaggcatttcatgcaaatggacaccaaaagtgagcaggggtagctattcttatatcaggcaaaacaatctttaaagtaacagtggttaaaagagacaaagagggacactataatggtaaaagtctttgttcaacagtaaaatatcacaatcctaaacataaatgcaccaaacactggagctcccaaatttataaaacaattacaaacagaccttagaaatgagatagacagcaacacaataatmgtgggggacttcaatactccactgacagcactagacaggtcatcaaaacagaaagtcaacaaataaacaatggatttaagtccatttgttaccttggaacaaatggacttaacagatatatatagaac

SEQ ID NO: 456199 - DNA, 534 bp, Homo sapiens
accatcattccttacagaattagaaaaaacmattctaaaattcatatggaaccaacaaagagcctgcacagccaaagcaagactaagcaaaaaggacaaatctggaaacatcacactacctgatttcaaactacactatgaggccatagtcaccaaaacagcatggtactggtgtaaaaataggcacatagaccaatggaacagaatagagaatccagaaataaacccaaatacttacagccaactgatcttcgacaaagcaaacaaaaatataaagtggggaaaggatacccttttcaacaaatggtgctgggataattggctagccacatataggagaataaaactgtatcttcatctctaaccttatacaaaaatccactcaagatgaattaaagacttaaactgagacctgaaacgagaaaaattctagaggataacattggaaaaacccttgtagacattggcttaggcaaggatttccccaccaagaacccaaaaacaaatgcaataaaaacaaagataaatagctgg

SEQ ID NO: 456200 - DNA, 534 bp, Homo sapiens
accatcattccttacagaattagaaaaaaccattctaaaattcatatggaaccaacaaagagcctgcacagccaaagcaagactaagcaaaaaggacaaatctggaaacatcacactacctgatttcaaactacactatgaggccatagtcaccaaaacagcatggtactggtgtaaaaataggcacatagaccaatggaacagaatagagaatccagaaataaacccaaatacttacagccaactgatcttcgacaaagcaaacaaaaatataaagtggggaaaggatacccttttcaacaaatggtgctgggataattggctagccacatataggagaataaaactgtatcttcatctctaaccttatacaaaaatccactcaagatgaattaaagacttaaactgagacckgaaacgagaaaaattctagaggataacattggaaaaacccttgtagacattggcttaggcaaggatttccccaccaagaacccaaaaacaaatgcaataaaaacaaagataaatagctgg

SEQ ID NO: 456201 - DNA, 583 bp, Homo sapiens
aaactaaaccaggaagaagttgaatccctgaatagaccaataacaggctctgaaattgaggcaataattaatagcttaccaaccaaaaaaagtctaggaccagatggattcacagccaaattctaccagaggtacaaggaggagctggtaccattccttctgaaactattccaatcaatagagacaggagatgtgttagtcttttttaaaatacaacttgcaactctatgccatttaaatagggcttttagactgtttaagttcaaggttawtttgatatgtgaagttttgattctatcactatatcattagttggtcactttgtagtttctatttgctttgtagtttctggttgcttttttagagtctgtgggctatgtaattgacatgtttttgtggtacacaagttttgttcctttgtgtccatgtctagaactccctaaatgtgccttacaaggcaggtctagtggtaacaaattcccttagcacttgcttgtctggaaaacattttatttcttcttcacttatgaagcaagggtataaaaattgttggttggaatttcttttctttaataatgctgaa

SEQ ID NO: 456202 - DNA, 583 bp, Homo sapiens
aaactaaaccaggaagaagttgaatccctgaatagaccaataacaggctctgaaattgaggcaataattaatagcttaccaaccaaaaaaagtctaggaccagatggattcacagccaaattctaccagaggtacaaggaggagctggtaccattccttctgaaactattccaatcaatagagacaggagatgtgttagtcttttttaaaatacaacttgcaactctatgccatttaaatagggcttttagactgtttaagttcaaggttattttgatatgtgaagttttgattctatcactatatcattagttggtcactttgtagtttctatttgctttgtagtttctggttgcttttttagagtctgtgggctatgtaattgacatgtttttgtggtacacaagttttgttcctttgtgtccatgtctagaactccctaaatgwgccttacaaggcaggtctagtggtaacaaattcccttagcacttgcttgtctggaaaacattttatttcttcttcacttatgaagcaagggtataaaaattgttggttggaatttcttttctttaataatgctgaa

SEQ ID NO: 456203 - DNA, 601 bp, Homo sapiens
gaataaacatgttatctataatgatattaatatttctctaggttagctttacaggtcagatgtaacctaccatagctgctgcacctgtcaggtaaagaagttgggataacaaatacagctgatttttggtaagtaccttcatagccttgtgtgaaactacygctcctccaaggaccagattgagaaagaaaattctagctttccttttggaaaaagttcaatgttaaaatctaaggagcctacagggcagacgaaaatgactttgtgaactgaactagcagtttgatgaactagcagaaagatgaaactgcttgaatcagaaagagacagtgcagagagggaaaacactgaacttaaagaagttttataggagtttttgtcctgagaaagtagtgtccaagttcagagctcagttccagaagaggtaacagtagcatggcttcttaatctgagatgtgtggtttctcagcagcatctcaggcaaagagatttgaatgtactggtttcaacatttctggaaatatacaagtagacaaggcctcagtgaaagaagggtgagggaacggggcagatccagcagaagtattgcaactaatacagt

SEQ ID NO: 456204 - DNA, 601 bp, Homo sapiens
gaataaacatgttatctataatgatattaatatttctctaggttagctttacaggtcagatgtaacctaccatagctgctgcacctgtcaggtaaagaagttgggataacaaatacagctgatttttggtaagtaccttcatagccttgtgtgaaactactgctcctccaaggaccagattgagaaagaaaattctagctttccttttggaaaargttcaatgttaaaatctaaggagcctacagggcagacgaaaatgactttgtgaactgaactagcagtttgatgaactagcagaaagatgaaactgcttgaatcagaaagagacagtgcagagagggaaaacactgaacttaaagaagttttataggagtttttgtcctgagaaagtagtgtccaagttcagagctcagttccagaagaggtaacagtagcatggcttcttaatctgagatgtgtggtttctcagcagcatctcaggcaaagagatttgaatgtactggtttcaacatttctggaaatatacaagtagacaaggcctcagtgaaagaagggtgagggaacggggcagatccagcagaagtattgcaactaatacagt

SEQ ID NO: 456205 - DNA, 601 bp, Homo sapiens
gaataaacatgttatctataatgatattaatatttctctaggttagctttacaggtcagatgtaacctaccatagctgctgcacctgtcaggtaaagaagttgggataacaaatacagctgatttttggtaagtaccttcatagccttgtgtgaaactactgctcctccaaggaccagattgagaaagaaaattctagctttccttttggaaaaagttmaatgttaaaatctaaggagcctacagggcagacgaaaatgactttgtgaactgaactagcagtttgatgaactagcagaaagatgaaactgcttgaatcagaaagagacagtgcagagagggaaaacactgaacttaaagaagttttataggagtttttgtcctgagaaagtagtgtccaagttcagagctcagttccagaagaggtaacagtagcatggcttcttaatctgagatgtgtggtttctcagcagcatctcaggcaaagagatttgaatgtactggtttcaacatttctggaaatatacaagtagacaaggcctcagtgaaagaagggtgagggaacggggcagatccagcagaagtattgcaactaatacagt

SEQ ID NO: 456206 - DNA, 601 bp, Homo sapiens
gaataaacatgttatctataatgatattaatatttctctaggttagctttacaggtcagatgtaacctaccatagctgctgcacctgtcaggtaaagaagttgggataacaaatacagctgatttttggtaagtaccttcatagccttgtgtgaaactactgctcctccaaggaccagattgagaaagaaaattctagctttccttttggaaaaagttcaatgttaaaatctaaggagcctacagggcagaygaaaatgactttgtgaactgaactagcagtttgatgaactagcagaaagatgaaactgcttgaatcagaaagagacagtgcagagagggaaaacactgaacttaaagaagttttataggagtttttgtcctgagaaagtagtgtccaagttcagagctcagttccagaagaggtaacagtagcatggcttcttaatctgagatgtgtggtttctcagcagcatctcaggcaaagagatttgaatgtactggtttcaacatttctggaaatatacaagtagacaaggcctcagtgaaagaagggtgagggaacggggcagatccagcagaagtattgcaactaatacagt

SEQ ID NO: 456207 - DNA, 623 bp, Homo sapiens
tgttaaattcaaacaattatagggtatgaatcaaaaataaatgtaattttcatcactgctgtcttctctcagggggcactcacaagagattcacttacgaccaccaattctactcatttccccaattcactcatcaccaaaaacctacaggcaaaacatttaatattcttttgtttccatagccccactttctctaagctctgaactgtgtgagtaaatctgacctctctgggcttcttttaagttcacttgcttcactcattgttctaattctctacaaaatgcatgctcaaggatttaatggaacaagaatgtgaattggaaacggggaaattctgaagatgcacattaagaacttttctccactgcatatttatatttttgtctgttacatacatatcacagtgtttcagtggtgcaatcacaatgtttttgttgaggaaaatatcaaagagctgtctaaaatatcaatggaatgtcaagagaactgatttaaactttattttgctgaaaaatacaygaacaacaaaatggaagaaggcgctgacaaatacgaaagagtgacactcaactgaaaaaaagattataaataaggtgcaagatctcagtgagctgagatctgc

SEQ ID NO: 456208 - DNA, 589 bp, Homo sapiens
ctattaaaataccatgacagtcataaatttgctagtctgtagtactttggtaaataacctgctgtcattagtaagttttatctgacataagaaaagtctatttggattttaataatattttttgacatttatcttcaagaagacaaactaaagcttaaaaatctagaaaggtggactaaaaagaaacaccacttcacattcagatttaaattaaaaaaaatcgaacctagtttcatagtgtaccttcagctcttactaattacctagacaaacttttttcaaaaatagaagagataaaataaaattatgtttctatgggaaaaaatgaataaatctaggcttaaaaattaaagtcagtttctgcaacacttttgctagggacagtattacctctttcctcagaatgagaataaaggatgccaaggtctgaagagttagactgtttttattcaaatacaggagaattgttgccttttaggctgcaactgacactggaatttttagtaagccctaatcartcataactcttgaaagcagctattacaatatgatatgaaagtcagactgtgtgacatgaactttccaaaaa

SEQ ID NO: 456209 - DNA, 647 bp, Homo sapiens
attgaataagtctcgcagaaaagttaataagatgcagaaaggagcctgagataaggaaagcaaaatgcattgaggcgaaaagatgaggttttataatcatatcagtaaaaaaagagatagaaaataagttcacyaataaattaggagaggtaggaaattagagaaatcagtgataacctcaaatgactgagatactaaactattgtaacaaaagaaataaaaaatatcaataattagaatgaaatacaagtcctgcaaaagtaaaaacttaacaaaagcaggtataaaacgcttgagaaacttggctcagttgggaaaaacacactgaaataatttattttgcatggatttcaggagagcaacagactttatatgagttaatccaagaagttcctgttgtcattgctttatgttattgctataatgtgcattaatccattagtataaatttctgctatggggaaacaaatctatagtcaagggaagaataaagaattcagtaaaatatgagcccctgacaactatttaggtgttaaaaaggttatatttgaagctaatatataactttttttctattccacaggcttgtttagtaagccaggttattgtaataaatgtggcttaactctatattggaaatatttaga

SEQ ID NO: 456210 - DNA, 647 bp, Homo sapiens
attgaataagtctcgcagaaaagttaataagatgcagaaaggagcctgagataaggaaagcaaaatgcattgaggcgaaaagatgaggttttataatcatatcagtaaaaaaagagatagaaaataagttcaccaataaattaggagaggtaggaaattagagaaatcagtgataacctcaaatgactgagatactaaactattgtaacaaaagaaataaaaaatatcaataattagaatgaaatacaagtcctgcaaaagtaaaaacttaacaaaagcaggtataaaacgcttgagaaacttggctcagttgggaaaaacacactgaaataatttattttgcatggatttcaggagagcaacagactttatatgagttaatccaagaagttcctgttgtcattgctttatgttattgctataatgtgcattaatccattagtataaatttctgctatggggaaacaaatytatagtcaagggaagaataaagaattcagtaaaatatgagcccctgacaactatttaggtgttaaaaaggttatatttgaagctaatatataactttttttctattccacaggcttgtttagtaagccaggttattgtaataaatgtggcttaactctatattggaaatatttaga

SEQ ID NO: 456211 - DNA, 608 bp, Homo sapiens
tacaatgcatgcttcttatccatattctattcctatttattaatcaaggaaaataatcatacttctacataaaaattgaagaatgtagatggtgtttaaatgtgacaataaataaacagctggmaatgaaagaaaacagacttctagcaggccatcctaaataaacaaatggctcagtaaaattgtctgtaaatagtaaatctcaaaaacaagaaatgtttttttttggcaattacattaaggaaacaaatagtttgttttttgaattcctttattttttcctctctctttctttattctaccggatcacatacacaactagggtaggaggcagatgagacagattactattaaagggatttagaatatggcatggcaaaatatgctattttggcatgaggattattttgaactgaaggtaactgaagaacagcagatacatgaggagctctctgccctcccccatctgcctcaaagcagagcataaatttccctttgtaagggtgacataaattttcatttgtggagatgtgcccttgcttataccaggaagatgaggacaacttcaaagactactcttctcactggagatttgagtctgcataaca

SEQ ID NO: 456212 - DNA, 410 bp, Homo sapiens
tagacagatttgtggacagtatttgtactyagaatatttttaattgcaatttttctaaccattaagaaacatttatttagtcctcagatatgtgaggcttctggaaaaatataaccaagttatttaaaaacatagaggcaagatatactcaacgtaaagaattaaaaatgtttaaatgaagtcatcaaagaactaaagaaatttgtttgacttgggtatgatttcactgtgggaaaaaacatttgcaaacaatagtagcaatcataaagaaaaatgtaacatttttgttttccgtgaaataccagaggattttgtgccaggatggctttgaatttctccctcagctttaaacataagaatcacaaataatattgttagaacatttaaaaataaatatccttattcaaaga

SEQ ID NO: 456213 - DNA, 567 bp, Homo sapiens
aagagatccattccagatgtgaaattctaacatccatgtgaaatgcatatatacttcactttactagtagccactaatgacttaggcacaatgagtaaatagcctgacatgaaattgtattatcttcctgtgtgtatgtctgtgtgtagctgtaatagaatttaaaatctctctgtcttataaacatttatcattcagcactttaatattataatgttctctactttaagcaataagstcttattgaaggggaatttaaatagaaatgttatgaattattgtaaatgggtgttgtaagtattctttagttctctcccaaaataaattcaatggttaattgtcttattaaatgtaagtatgccctaatctttttatttctaataatgcaacaggggaggatagtgtggagagggacaatcctaccctgttgcattcttggaatttacctgtcccctcatagtctgttttctttctctcctccccttgcttgattttgagttttctcagtatagaaatccacagcagtgaaatatgaatttttatggcagaattacatgtctagtactt

SEQ ID NO: 456214 - DNA, 567 bp, Homo sapiens
aagagatccattccagatgtgaaattctaacatccatgtgaaatgcatatatacttcactttactagtagccactaatgacttaggcacaatgagtaaatagcctgacatgaaattgtattatcttcctgtgtgtatgtctgtgtgtagctgtaatagaatttaaaatctctctgtcttataaacatttatcattcagcactttaatattataatgttctctactttaagcaataaggtcttattgaaggggaatttaaatagaaatgttatgaattattgtaaatgggtgttgtaagtattctttagttctctcccaaaataaattcaatggttaattgtcttattaaatgtragtatgccctaatctttttatttctaataatgcaacaggggaggatagtgtggagagggacaatcctaccctgttgcattcttggaatttacctgtcccctcatagtctgttttctttctctcctccccttgcttgattttgagttttctcagtatagaaatccacagcagtgaaatatgaatttttatggcagaattacatgtctagtactt

SEQ ID NO: 456215 - DNA, 473 bp, Homo sapiens
gaacccttaggcattgttattgatgaaggtaggtctatccaagaagaaatatcaaactttgtgtctttgggtaatttacatttatgatcctcaatttccttatcagtaaaacgtgcgagtacagaacttgtttgtagtgttatgagcattaaatgcattaatgacttaaggcttcatttgataacaatgattaccacacatcaaatgacaacatatgttagmtatctactatctaaaaattaaatcataacactagagttctagagatagctcaagaggggccatatagatttaagattccatgacagttgctgagtccgtgaaaataaataagagccaagaatggtagcttgctcctgtaatcccagctacttggaaggctgaggcaggaggatgtttgcatccaggagttcaaggctgcaatgggctatgattgcaccactgaactccagcctgggtgacagagtgagaca

SEQ ID NO: 456216 - DNA, 607 bp, Homo sapiens
gtaaaaatgttttttgtcttcatagtgtttccagagattacaagaaaaataatctgaaattttttttttagttctacctctcctttctgtcaacattttattcattgtacgaaatcatcatgaggcgtctatatgggtgtctgatggatggtgtgagattgataagacctgattttagccaatttttaatattgacaatttaaaatgcatccatttttatctgtgaaagtctatagagaaaagacaatatgagttaaatgtggggtgggggtaggtgaggtagctttaatcactgaaaactcacattaataaaacaataaattcctaattctgtaggacatttcttcctcagtaataactaatagcattttagcaattgtgtttatccgttgataatgtaatactattgtttaacttggataatttatcattatccagtgatratggtttatcctcaagaatgctttttaacaccatttctacatttctaaaatttttaggagagcaactttgatatatggctagagttaacaacaaagtgttcacatctgagttggagaattattaggatcttaaagacgtatagggagggtgcacagagttgtcc

SEQ ID NO: 456217 - DNA, 586 bp, Homo sapiens
gataatgtaatactattgtttaacttggataatttatcattatccagtgatgatggtttatcctcaagaatgctttttaacaccatttctacatttctaaaatttttaggagagcaactttgatatatggctagagttaacaacaaagtgttcacatctgagttggagaattattaggatcttaaagacgtatagggarggtgcacagagttgtcctgatttcattggccttggatttcttctcatgcaagatacaacctattcactaataaatgatacactggttataatacattcctaggtctgaaaaaaaaacagaaattttcctcagtgtttatatatttgaatttttggccaatctttgcctctctttcaaaaacttatttttgccatcccagaatatctcttcttatggaggttgatattctttataagacaattttatacagtcaaaatactctttcatttttgataaatgaatataattctagtggcataattatagctcacagcagcctcaaactcctgggctcaaggcaatcctcccacttcagcctcccgagtaggactacagatgcttgccacc

SEQ ID NO: 456218 - DNA, 581 bp, Homo sapiens
taatgaatccaagcctgcttagagggtttttattcccctcccattttttactctagcccatcctcctcttgaaattcagccttcttaggaaagtcaagtcacctcaccaaaaaacagggctccaatccaaatttttttcttcggaggatagttaagcttatggctttttaatgctgtgcctgctgtcaagcagttgtagrtacacagggaacataccaacatgccaacaaaagaggccaatcagtagaaaatttgtttatttggaaataatgtttgcttggtttgaagtagaaagcctatatgagagctagggcttgtttttggtttttccttattatattttgaacatgctaagaaaaaggagaaataatattttaaagtcttaaaatgcagttgcacatattgatagttaggaaggcaatatattgtcatagatgattcaacagggttctgaagactggagaccaattattaactctggctcacttgctctatgctttgttctggtcccaactgcctcaagtctgagtttagttatgaaataaacagtgtcatcttcacaatctctaagagtctcccta

SEQ ID NO: 456219 - DNA, 631 bp, Homo sapiens
aaggagtacttatattaggttattttgatgcttaacaaagccagtacttgaaaatgagtaaaagggatttactagtaaagaagcaggtagaatcctgaygttcgtgttaaatatcgttgaacttggaaaagtcttttttttttttttctaagtccaattggaatttgaaaaggaggaagttttgggggatgatattacggacacatgaacatttcaggcctataaataattgttcataatggaggattgaaattattgcctttgtggtttttagaaattgtcttattaatgaaggagagtaatgacttgtttccattaagaatgtctttaacaaaactgtcaacacttttaaataatagctacccagccatttgcttagctgtttttgtgtatttggttcatatagaaacatgtaagcatatttccgaagctaatgagaggaaggatgtgctatagaaaactagattagttagaggcctacatcattctagaagaggaaaactgaagaaacagtcaaatataacttctttcctgacactgcctgattacgttgtggccctcattcacacagcatatgaaaaatgttagcccctggtactaacatttagaaatgacaatccagtggaaatta

SEQ ID NO: 456220 - DNA, 631 bp, Homo sapiens
aaggagtacttatattaggttattttgatgcttaacaaagccagtacttgaaaatgagtaaaagggatttactagtaaagaagcaggtagaatcctgacgttcgtgttaaatatcgttgaacttggaaaagtcttttttttttttttctaagtccaattggaatttgaaaaggaggaagttttgggggatgatattacggacacatgaacatttcaggcctataaataattgttcataatggaggattgaaattattgcctttgtggtttttagaaattgtcttattaatgaaggagagtaatgactkgtttccattaagaatgtctttaacaaaactgtcaacacttttaaataatagctacccagccatttgcttagctgtttttgtgtatttggttcatatagaaacatgtaagcatatttccgaagctaatgagaggaaggatgtgctatagaaaactagattagttagaggcctacatcattctagaagaggaaaactgaagaaacagtcaaatataacttctttcctgacactgcctgattacgttgtggccctcattcacacagcatatgaaaaatgttagcccctggtactaacatttagaaatgacaatccagtggaaatta

SEQ ID NO: 456221 - DNA, 621 bp, Homo sapiens
cccctcactacagccagccagtatccatgggacatggtaggggaattgaatttatcaggggcttagagtttgcttgtagaaatgagaagagtcttctcagggctcagaagagtcttggggctcaacagctctccagacttgggacttgttcacataactctatcctcagcagagaagcctcacatttaaaatagagagtgacatttcctcctgagagatttgtaataacaactttcttacatagaactacacataatccagacaattctgaatgcaatagattttgttaattcaaattgcataggaaagcaattctacctgggtatcatattatatataatataaattatttttatttgtatgaattagtctagcaaaatgtataaggaaggtgtttgataaactattgacatattttagggaaatttttcttcctataatatcttragggagagcatcaggaaaaatagctaatgaatgctgggcttaacacctaggtgatgggttgatctgtgcagaaaaccatcatagcacacgtttacctatgtaacaaacccaaacctgtacatataccttggagcttaaaataaaagttgaagaaagaaaacttctaattttaca

SEQ ID NO: 456222 - DNA, 584 bp, Homo sapiens
gtttcctgaccatattactttaggactttgatcaagccatgcctagacttttcaatcttcttgggtaaaattttctggttttgcttaattgagtagacttttttgttatgtgtaactaaaacagccttaattactacactagtatcattttcatggaaaggaccacaaattccccagaaaagactgccttctaacaaatctactaagtctttcmaaagtagttctagaagtcagtaatacaacaatgcataccttttgaaaactaaagtttgaaaagcattgccctagaaaacaagctcaacttatatcttatttatctttgtatccctagagacttgtatttggtctagtatataattaatattcaatgattattgaataaagtgttctcaaaattctatacattacttgggcaatagaatacaaagaggtacaaaaacaggttattttcatttcagaacatcaaaaatcgtgtaattaagtgttgattacataataattaaatgattgattacataataattaataattcatattttctcacttgtccaagtaatattaaaatgtgctctcaaaaattaaaa

SEQ ID NO: 456223 - DNA, 671 bp, Homo sapiens
gtatgtggaaaaaggctcaacatcaccagtaattagggaaatgcaagttaaaaccacagtgagctaccatctcacacctcttagaatgactaccatcaaaaactcaaaagacaaatgttgacaaggttgtagagaaaaggaaaccgttgcacactgttggtaggaatgtaaattggtaccaccatttttgaaaacagtatggatgttccttaaaagattaaagacgagactactattatccagcaatccattttggatataaatccacaggaaactaagtcactattgaaaaggactcccttgtttatggcagtattatttattcataatagccgagatatgaaacaacctaaatgtttgctgatgaataaatgaataaataaatgttggtatgtactgtacaaagatacagtaatcaaaacattatggtgctggcataaaacaggcacacacagcacaatgtctattcaggtactttgctcatttgaaatatgaatatcattcagccttaaaaaagaaaaaaatcctgccatttkcaactataacacatatgaaactggagcatattatgataaatgagtttaggcagacacagaaagaaaaatagcacatgatctcacttatatgtggaatataaaatggaatcacagaagcagaaagtagaatggtgg

SEQ ID NO: 456224 - DNA, 539 bp, Homo sapiens
aatgcattttggaacaagaaaataacaaaaataatccagttcaaggctctcattttatagacaaataaattaagcaacagacaatcctccaacagaagttacaagaagcattatgattttccwtcccccattccataattaaaagagtttgcaactctgcggatctagccacttggtatcataatatctggccatattatagccttgtgagtaaccagaaattctagttcttcatagagtaattttctgactctatttagcatcttgtttgattacataccaaagggagatgtcatattccactgccctgattttaatctgagcaaaactgaattttttaaaaaagaattgtcagtctggagacatattggataacaaccactccagacagcttaggtgatatgtctgaaagatatttggtttcttaccaaaaacatagcccaagactctaattgtagttatcttcttttgagaaatggatggtaaatgacaagatgatactaaaccctcataacacaaagtcatgaaatttattgatt

SEQ ID NO: 456225 - DNA, 539 bp, Homo sapiens
aatgcattttggaacaagaaaataacaaaaataatccagttcaaggctctcattttatagacaaataaattaagcaacagacaatcctccaacagaagttacaagaagcattatgattttccatcccccattccataattaaaagrgtttgcaactctgcggatctagccacttggtatcataatatctggccatattatagccttgtgagtaaccagaaattctagttcttcatagagtaattttctgactctatttagcatcttgtttgattacataccaaagggagatgtcatattccactgccctgattttaatctgagcaaaactgaattttttaaaaaagaattgtcagtctggagacatattggataacaaccactccagacagcttaggtgatatgtctgaaagatatttggtttcttaccaaaaacatagcccaagactctaattgtagttatcttcttttgagaaatggatggtaaatgacaagatgatactaaaccctcataacacaaagtcatgaaatttattgatt

SEQ ID NO: 456226 - DNA, 605 bp, Homo sapiens
taaaactcagcccactttacctgatttcaagcagactatcagcataaattagatttgaattactacaaacacawagttttacaatgaaagctacaacattccttattataagagagttttatttggggctcaaatcttttaaatattttgtgtgtgggattctcatctagactgctcatgaacgtaaagaattataaatcttgttttcttgtaacagtaatgaatgaagcaacttagcataagttgtgtactggagcaatgtaacaaaaatgaatatgagataacctaatattttataacataacgaaactgatgggggctaaagaaatcctgtgacaagctgtatccataagcagtaacagagcaaatgcaaataaaatggcaatatagttttattggactgtaaaccactaatatggtgatgtaaaaaaaaaatggcacttctgtgtgtgattgtgtagtggattattatacatggattgacttttgccacagaaaacaattatgcatcctaggatcctagataagaatgtatgttatatgtacttataaaaataaatataattaaattaaatttttaattaaagatgtgaataatgaaaaaa

SEQ ID NO: 456227 - DNA, 611 bp, Homo sapiens
tggaatttctataaaagaaatatattcctggatagaataaagatggcagatgggagtggaaaggagtcagtttgtatatcactggttcatgcttagttgggaatcagtaagaggaataaaaatttgttactataaaggctgtacatatattattagcatgagtagtgtggatttgatagagcataaaatttaaatcaaatgtttgtatgccactgtcagaggtgccagtgcccccaaaggaagtccccattcagagcttaaagtgtgraatgtctgcaaatcagttgaaaattaacatgcaatctagttggtgatgagattccatttctcgtctgtgctggccattttatgaaacctctaggagtctaaacaggaaagaagaataatacatttcaagtgctgtgttcctttcctttttttcttcaggcactatgcagtatgaactcatttctctaaaggtgaggactttcctaagaactaagggaaaaagttcaactttttaaatgaactatctcagtctgtgcaagctgccataacaaaacaatacagcccgggtggcctaaacaccagatatttactttcttagagtttgagatgctggggagtccagg

SEQ ID NO: 456228 - DNA, 562 bp, Homo sapiens
taaataaacttgaaataagtaactgactaaatgaacattaaattaacacaacagagtgtgcagctaaggttgtatgaattcttcctccctaaattcaaagctcatggcttaktgagggtgccacatttaaaaaattattactttaagaaaatttatgatacatagataaatgtctacatctgtatctgtacctcttgtgtacctgatctttctcccaatttccctgtttcaacagaaaagataacattcatacagctaacttcatcatttgctgagtaatatttctattaacccacttggcctaggttatgaggaagtagatatgatctaatataaatcctattttgtcctctttcactccagtctcaggcaggttttgacacagaagcacttccaaacatttagcgtttcagtgaaacacttttggaggtgctggtgccacgtggatgtcaggagaggaacgactattgtctgtacattcgtcctcaatagatgtgctttttgacagaaagcatggaaggcttttgatggagggaattagtcatagtctggtgtttcatta

SEQ ID NO: 456229 - DNA, 548 bp, Homo sapiens
ttctcccaatttccctgtttcaacagaaaagataacattcatacagctaacttcatcatttgctgagtaatatttctattaacccacttggcctaggttatgaggaagtagatatgatctaatataaatcctattttgtcctctttcactccagtctcaggcaggttttgacacagaagcacttccaaacatttagcgtttcagtgaaacacttttggaggtgctggtgccacgtggatgtcaggagaggaacgactattgtctgtacattcgtcctcaatagatgtgctttttgacagaaagcatggaaggcttttgatggagggaattagtcatagtctggtgtttcattaattcctttacacaagtttgtttatagtctgtaaattcagccattagtcttctatctatcagcggttatatttgtaattaarcacagctttacaagtttcttttaaaactctttggttatacctgctaaagctaaatatgtacctaccctacgattcagaagacaagttctagcatgtacctagcaacataatgct

SEQ ID NO: 456230 - DNA, 605 bp, Homo sapiens
gatcacatacatagcatatagttcacatttgaaaatcctaagaagagaccaaaattagtgatcaccactgctcacccatttgcacaacatagaaaagacatgatcttcatccattaactttattaatcaaattcatatttctgaccctcaacacaattaataaacattctaaatatgaaggtgacataaacacttcctaaattaaatcagtgcattcattgtgctggacttctattaacttcaayaggaatagcactttgtttaagaggctgaataagagacccaaagccagggaatgagatacagggttttactgtgggggatgaaaaatatataccccctcctgggtagtctatctacagaggtctgtggcccccaggacatgaaagattttgaggttgtgtatgtatacctggggcaaaatgacaaagagaaaataaacacaatgtttgatagaagaatagggtggctatcctgagcaacaaaggttgtatatttcaaagtgaccagtgtcatgctacatttgtcagcaggtcgctctgagtgtacccttagctgtctcctttcctttggctcacttgtctttcatcccagccgcatgcacc

SEQ ID NO: 456231 - DNA, 632 bp, Homo sapiens
cattattggtgccacagaggcactgcctcagggcagggtggtttgtgatggatgccatttaactccccttaaatttggagggtataatatcctctgcccccatgtcccatagacagagaagtcaccccacaatcaactcttttcccttctgtaggaacctattccacaattccacagtggcacarccctgcattgtggtgtgcagccctacaagacttgccccctttcagatgaaagcaagtcttgtagggctactccctataggtgcagttggtctgtctttatcttggcagtaactatgggacaggtggagagcatgggaacttctgcagactcataaaggtcctcactctcctccccactagacatctccatggagtccctggacataagatccaggacaattcagccatgaaagccccaacttattgacatggcagccttcaaacaggctacccaacaagccagggtctcctttccattatcctggtcccacaggtggggcaccaaggtctctgacatttcagcctgaattaatgtggcatctctttctagtcacaactcatcctgtaactgatgaactcttgcctatgattgaagctcagcttcagtggctgctcagagtgcagtca

SEQ ID NO: 456232 - DNA, 591 bp, Homo sapiens
ggctatgctatctggagaatgttttatcatgttatattaaaaaatataacaagaaaggatataaggaggaacaatgaggaatttcaagaaaggcagtagagctggaagaggtctggctaggacataatgtcttcgaatcttttcagaaatgtgttccagcttctttatgatagcagttagcatccctgcacatatgtgagtatatagggctcaagaaaaatggcaggatagggaagacctatcattatactacagaaaaggacttataaagagacttcttgtaactattccttggggtttgattaattacttgcttattgctgaagacagaatagagcgaccggtactgtgattttagtagtgaaaatgagatggcagttggagagttcttagtagggagaactgatacactaaaaaattgtgtttcagatttagtctacctcccttaatttccagtaggagggggaccttgagcttcctttggctgctgaagattactgagatatttagctctcaaatgagaatgctartctcattcattaagtttcattttagagatatttgggcagctagattatcagacaaaaacat

SEQ ID NO: 456233 - DNA, 306 bp, Homo sapiens
gagaaataaggatgcctttgtcagaagatggtatgactaattaaagccacaaacttacacccatcactgacagaatgacaagcctaatatggtttayattactgtgaaagctcaatgagtgaattaatataatctctttttattgcatagaagagtatataaagcatatagtctcctaacaatccaaacttttgcccccaaagtaaagtcaaacattcaagtaagggagaggagatataggtcaaggatttaatctatacacacaccagagaggctaccaaaccaaagggctcttatatacctaat

SEQ ID NO: 456234 - DNA, 306 bp, Homo sapiens
gagaaataaggatgcctttgtcagaagatggtatgactaattaaagccacaaacttacacccatcactgacagaatgacaagcctaatatggtttacattactgtgaaagctcaatgagtgaattaatataatctctttttattgcatagaagagtatataaagcatatagtctcctaacaatccaaacttttgcccccaaagtaaagtcaaacattcaagtaagggagaggagatataggtcaaggwtttaatctatacacacaccagagaggctaccaaaccaaagggctcttatatacctaat

SEQ ID NO: 456235 - DNA, 307 bp, Homo sapiens
ccctggttagtttacttttcggtaagactgactggttaactaagtgtgagaaattactagcaactaggaaccaatacaacaactgcaaagagaacagagaaccatttttaaaaggacacattgtataatcagtcaacaaaaaaargaacaatcagcagtttctgctttttctagatctgggacctttaacctcttgagtccttgcttctggaattctctctagatttggtcagtccattatcagccccttcatcatgtagagttacctgggagccagtggcttttgcctgtcttcattttcttacca

SEQ ID NO: 456236 - DNA, 307 bp, Homo sapiens
ccctggttagtttacttttcggtaagactgactggttaactaagtgtgagaaattactagcaactaggaaccaatacaacaactgcaaagagaacagagaaccatttttaaaaggacacattgtataatcagtcaacaaaaaaaggaacaatcagcagtttctgctttttctagatctgggacctttaacctcttgagtccttgcttctggaattctctctagatttggtcagtccattatcagccccttcatcatrtagagttacctgggagccagtggcttttgcctgtcttcattttcttacca

SEQ ID NO: 456237 - DNA, 557 bp, Homo sapiens
ttgttagtgagcattggggttgattctgtgaaaaatattccagtataaatcaacttttctaacaccagcttctactatatacagtgcctgaactaaccccaaaagatttggacggtttattgggacccaaaaataaaaaaataaataaccctgaaagagaaatacactcatgaacattaagatactacttcaactgatctgtacagcagcyatggaattatgatttgacccactttacaaatggggaaacagaaattcaagaaggatcaatcacttgcacaaagttagtaaatacagtgctgagactagagcctaggtaatgctgattcttagcccatgggtcttcccattctaacaagctgccttctgtcatactgttctttctgaccacaaagatggaatggagacttctgcttctggccaatttggagtaatggagacctgatttgtcctccaccttaaacaactgagaaactggaaaaagtattttaaactctaccttcaacattggatatagtgcagtactataataaataaaagaggtgagccctataatt

SEQ ID NO: 456238 - DNA, 557 bp, Homo sapiens
ttgttagtgagcattggggttgattctgtgaaaaatattccagtataaatcaacttttctaacaccagcttctactatatacagtgcctgaactaaccccaaaagatttggacggtttattgggacccaaaaataaaaaaataaataaccctgaaagagaaatacactcatgaacattaagatactacttcaactgatctgtacagcagccrtggaattatgatttgacccactttacaaatggggaaacagaaattcaagaaggatcaatcacttgcacaaagttagtaaatacagtgctgagactagagcctaggtaatgctgattcttagcccatgggtcttcccattctaacaagctgccttctgtcatactgttctttctgaccacaaagatggaatggagacttctgcttctggccaatttggagtaatggagacctgatttgtcctccaccttaaacaactgagaaactggaaaaagtattttaaactctaccttcaacattggatatagtgcagtactataataaataaaagaggtgagccctataatt

SEQ ID NO: 456239 - DNA, 557 bp, Homo sapiens
ttgttagtgagcattggggttgattctgtgaaaaatattccagtataaatcaacttttctaacaccagcttctactatatacagtgcctgaactaaccccaaaagatttggacggtttattgggacccaaaaataaaaaaataaataaccctgaaagagaaatacactcatgaacattaagatactacttcaactgatctgtacagcagccatggaattatgatttgacccactttacaaatggggaaacagaaattcaagaaggatcaatcacttgcacaaagttagtaaatacagtgctgagactagagcctaggtaatgctgattcttagcccatgggtcttcccattctaacaagctgccttctgtcatactgttctttctgaccacaaagatggaatggagacttctgcttctggccaatttggagtaatggrgacctgatttgtcctccaccttaaacaactgagaaactggaaaaagtattttaaactctaccttcaacattggatatagtgcagtactataataaataaaagaggtgagccctataatt

SEQ ID NO: 456240 - DNA, 466 bp, Homo sapiens
ctttacaaatggggaaacagaaattcaagaaggatcaatcacttgcacaaagttagtaaatacagtgctgagactagagcctaggtaatgctgattcttagcccatgggtcttcccattctaacaagctgccttctgtcatactgttctttctgaccacaaagatggaatggagacttctgcttctggccaatttggagtaatggagacctgatttgtcctccaccttaaacaactgagaaactggaaaaagtattttaaactctaccttcaacattggatatagtgcagtactataataaataaaagaggtgagccctatrattgctccagtttgctgcctgagattgtcaactgtagagcagggagggaggacccaggcagagcctggtagtaagtttgaagaagtcagggtggctagacatcacaggacagactagagaataggttgctgcacagatagaatg

SEQ ID NO: 456241 - DNA, 466 bp, Homo sapiens
ctttacaaatggggaaacagaaattcaagaaggatcaatcacttgcacaaagttagtaaatacagtgctgagactagagcctaggtaatgctgattcttagcccatgggtcttcccattctaacaagctgccttctgtcatactgttctttctgaccacaaagatggaatggagacttctgcttctggccaatttggagtaatggagacctgatttgtcctccaccttaaacaactgagaaactggaaaaagtattttaaactctaccttcaacattggatatagtgcagtactataataaataaaagaggtgagccctataattgctccagtttgctgcctgagattgtcaactgtagagcagggagggaggacccaggcagagcctggtagtaastttgaagaagtcagggtggctagacatcacaggacagactagagaataggttgctgcacagatagaatg

SEQ ID NO: 456242 - DNA, 466 bp, Homo sapiens
ctttacaaatggggaaacagaaattcaagaaggatcaatcacttgcacaaagttagtaaatacagtgctgagactagagcctaggtaatgctgattcttagcccatgggtcttcccattctaacaagctgccttctgtcatactgttctttctgaccacaaagatggaatggagacttctgcttctggccaatttggagtaatggagacctgatttgtcctccaccttaaacaactgagaaactggaaaaagtattttaaactctaccttcaacattggatatagtgcagtactataataaataaaagaggtgagccctataattgctccagtttgctgcctgagattgtcaactgtagagcagggagggaggacccaggcagagcctggtagtaagtttgaagaagwcagggtggctagacatcacaggacagactagagaataggttgctgcacagatagaatg

SEQ ID NO: 456243 - DNA, 667 bp, Homo sapiens
taagttcatcaactgtaacaaatgtgccattctggagagagatgttgataatctaggaggctatgcatgtgtggaggcagggggtatatgggaactttttgtacttcctgctcatttgctgtgaatctgaaactactctaaaaaataaggtctattttcttaaaagtcattttgcctccacagtgggaaaaagatagcagttgactaatagctgctcttatcctgcctaaaaaaatttaaaagccakcctgaaaagatgaaaattgtttttaagtaactttattgtataccaaaacaaagctaaaataattttaacactaaattcaaaaaaatccagaactcagtaagttacaatttgcaacgtctaaccccaaatcaaataatgttaggaatgcagacagacagaaaactataatccatgataagaagggggaaaaaatcaatctacttaaactgacttagaaaggacacatcaggtgagaattaaaaaacaataaaaaggacacagatgacagaatctgtagacaagcacattgaaacaaacataactatattccttgtattaaagaagctaggctggtgtggtggctcatgcttgtaatcccagcactttgcgaggccaaggcgggtgggtcacctgaggtcaggagtttgagatcagcctggc

SEQ ID NO: 456244 - DNA, 464 bp, Homo sapiens
gtggtgtattcacatattggataacactcaccagttacacccaaataaactagatacatataataatatggatacatttcaaagatgtgaaaaaaagctaacacaaaaagtgaatttatatgawtttcaagaagagagcaacataatctatggtgataaacatcagaatagtgataaaccaaggggagaagggtgggattgcctggaaagggactcttggacctttttaaatattttttattttttgaatttgaaaaaaaatttttatagggatgggggtcttgccatgttgcccaggctggtctcaaattgctgggctcagtcaatctttccgcctcagcctcccaagtgctgggattacaagcatgagctaccgtgcctggcatccacagacatttttgggatgatggaaattttctataacttgatctgggtgatgatttcatttgtcaatatttaataac

SEQ ID NO: 456245 - DNA, 532 bp, Homo sapiens
aattgtccatcaacagtggtgtattcacatattggataacactcaccagttacacccaaataaactagatacatataataatatggatacatttcaaagatgtgaaaaaaagctaacacaaaaagtgaatttatatgaatttcaagaagagagcaacataatctatggtgataaacatcagaatagtgataaacyaaggggagaagggtgggattgcctggaaagggactcttggacctttttaaatattttttattttttgaatttgaaaaaaaatttttatagggatgggggtcttgccatgttgcccaggctggtctcaaattgctgggctcagtcaatctttccgcctcagcctcccaagtgctgggattacaagcatgagctaccgtgcctggcatccacagacatttttgggatgatggaaattttctataacttgatctgggtgatgatttcatttgtcaatatttaataacctgtcctagttaatatatttgaattttacactgtgtgaattacatttcaatag

SEQ ID NO: 456246 - DNA, 532 bp, Homo sapiens
aattgtccatcaacagtggtgtattcacatattggataacactcaccagttacacccaaataaactagatacatataataatatggatacatttcaaagatgtgaaaaaaagctaacacaaaaagtgaatttatatgaatttcaagaagagagcaacataatctatggtgataaacatcagaatagtgataaaccaaggggagaagggtgggattgcctggaaagggactcttggacctttttaaatattttttattttttgaatttgaaaaaaawtttttatagggatgggggtcttgccatgttgcccaggctggtctcaaattgctgggctcagtcaatctttccgcctcagcctcccaagtgctgggattacaagcatgagctaccgtgcctggcatccacagacatttttgggatgatggaaattttctataacttgatctgggtgatgatttcatttgtcaatatttaataacctgtcctagttaatatatttgaattttacactgtgtgaattacatttcaatag

SEQ ID NO: 456247 - DNA, 464 bp, Homo sapiens
gtggtgtattcacatattggataacactcaccagttacacccaaataaactagatacatataataatatggatacatttcaaagatgtgaaaaaaagctaacacaaaaagtgaatttatatgaatttcaagaagagagcaacataatctatggtgataaacatcagaatagtgataaaccaaggggagaagggtgggattgcctggaaagggactcttggacctttttaaatattttttattttttgaatttgaaaaaaaatttttatagggatggggrtcttgccatgttgcccaggctggtctcaaattgctgggctcagtcaatctttccgcctcagcctcccaagtgctgggattacaagcatgagctaccgtgcctggcatccacagacatttttgggatgatggaaattttctataacttgatctgggtgatgatttcatttgtcaatatttaataac

SEQ ID NO: 456248 - DNA, 464 bp, Homo sapiens
gtggtgtattcacatattggataacactcaccagttacacccaaataaactagatacatataataatatggatacatttcaaagatgtgaaaaaaagctaacacaaaaagtgaatttatatgaatttcaagaagagagcaacataatctatggtgataaacatcagaatagtgataaaccaaggggagaagggtgggattgcctggaaagggactcttggacctttttaaatattttttattttttgaatttgaaaaaaaatttttatagggatgggggtcttgccatgttgcccaggctggtctcaaattgctgggctcagtcaatctttccrcctcagcctcccaagtgctgggattacaagcatgagctaccgtgcctggcatccacagacatttttgggatgatggaaattttctataacttgatctgggtgatgatttcatttgtcaatatttaataac

SEQ ID NO: 456249 - DNA, 464 bp, Homo sapiens
gtggtgtattcacatattggataacactcaccagttacacccaaataaactagatacatataataatatggatacatttcaaagatgtgaaaaaaagctaacacaaaaagtgaatttatatgaatttcaagaagagagcaacataatctatggtgataaacatcagaatagtgataaaccaaggggagaagggtgggattgcctggaaagggactcttggacctttttaaatattttttattttttgaatttgaaaaaaaatttttatagggatgggggtcttgccatgttgcccaggctggtctcaaattgctgggctcagtcaatctttccgcytcagcctcccaagtgctgggattacaagcatgagctaccgtgcctggcatccacagacatttttgggatgatggaaattttctataacttgatctgggtgatgatttcatttgtcaatatttaataac

SEQ ID NO: 456250 - DNA, 532 bp, Homo sapiens
aattgtccatcaacagtggtgtattcacatattggataacactcaccagttacacccaaataaactagatacatataataatatggatacatttcaaagatgtgaaaaaaagctaacacaaaaagtgaatttatatgaatttcaagaagagagcaacataatctatggtgataaacatcagaatagtgataaaccaaggggagaagggtgggattgcctggaaagggactcttggacctttttaaatattttttattttttgaatttgaaaaaaaatttttatagggatgggggtcttgccatgttgcccaggctggtctcaaattgctgggctcagtcaatctttccgcctcagcctcccaagtgctgggattacaagcatgagctaccrtgcctggcatccacagacatttttgggatgatggaaattttctataacttgatctgggtgatgatttcatttgtcaatatttaataacctgtcctagttaatatatttgaattttacactgtgtgaattacatttcaatag

SEQ ID NO: 456251 - DNA, 478 bp, Homo sapiens
ctatccttctgtcagcttcttcctctctcctgggcattcaggaagcaccaggcaactttacttaaaagtcctgggctttcaatcacagggtggccccctgtaaggaaacaccacaggcctcctcccagacagagaccaccaagtacatctaagggagatggacacagggtgagaaactgctaaaggcctctaggcagaactggcctagtaatgggaaaggctgtctacctccttggtatggaaaacaatccagagaatctccctctctacctcatccctctccccgatgatgatcccractcaacagcctttgagatttcactcactcacagacagaaagaccaaggtaagtgcatatgaaattaaaccaggctgtgaataatgagtgatagtgaatgttctcctttaaccagttttggcaaagaggaacatggaagagcttgggaaggtatcaggatctgaagtgggggaacaggag

SEQ ID NO: 456252 - DNA, 592 bp, Homo sapiens
gacagtcttaatctaggcctaagaaggttgtagcacagagagaaggcaacatttaagtgtgaggtaacttatcctccttgtagagcacctcagaatgtccctgacttctcctactctcctgcccagagtragttcctaggtagggtggctaggagaaggcactttcaaagaacaagcactgagctggttctcactgtctggctgatctacatattgtcctgtcattttttatgaaccaggttctaacagaggaaccaaaaaatcctctggccaggaaaggaatgtgtcattcctaccaatgggctcgatttcactaagtgctcctttgtgttttaccagaggtttcggagttgggttggtacaaagaggagaaggaggctaggtctccagatgcattcattttttgaggcctcatctcttcccatgggccactgctaccgtgttctagtgtcctgctctgctgggccagtgccgctcgaaggatggaagggctgggcagacctggttccttggttgctgggcaaagcagctgaatcagcagaaatggcagggctggcatctgtccagaaaggaatgtgagtgagaaaccaac

SEQ ID NO: 456253 - DNA, 592 bp, Homo sapiens
gacagtcttaatctaggcctaagaaggttgtagcacagagagaaggcaacatttaagtgtgaggtaacttatcctccttgtagagcacctcagaatgtccctgacttctcctactctcctgcccagagtgagttcctaggtagggtggctaggagaaggcactttcaaagaacaagcactgagctggttctcactgtctggctgatctacatattgtcctgtcattttttatgaaccaggttctaacagaggaaccaaaaartcctctggccaggaaaggaatgtgtcattcctaccaatgggctcgatttcactaagtgctcctttgtgttttaccagaggtttcggagttgggttggtacaaagaggagaaggaggctaggtctccagatgcattcattttttgaggcctcatctcttcccatgggccactgctaccgtgttctagtgtcctgctctgctgggccagtgccgctcgaaggatggaagggctgggcagacctggttccttggttgctgggcaaagcagctgaatcagcagaaatggcagggctggcatctgtccagaaaggaatgtgagtgagaaaccaac

SEQ ID NO: 456254 - DNA, 592 bp, Homo sapiens
gacagtcttaatctaggcctaagaaggttgtagcacagagagaaggcaacatttaagtgtgaggtaacttatcctccttgtagagcacctcagaatgtccctgacttctcctactctcctgcccagagtgagttcctaggtagggtggctaggagaaggcactttcaaagaacaagcactgagctggttctcactgtctggctgatctacatattgtcctgtcattttttatgaaccaggttctaacagaggaaccaaaaaatcctctggccaggaaaggaatgtgtcattcctaccaatgggctcgatttcactaagtgctcctttgtgttttaccagaggtttcggagttgggttggtacaaagaggagaaggaggctaggtctccagatgcattcattttttgaggcctcatctcttcccatgggccactgctaccgtgttctagtgtcctgctctgctgggccagtgccrctcgaaggatggaagggctgggcagacctggttccttggttgctgggcaaagcagctgaatcagcagaaatggcagggctggcatctgtccagaaaggaatgtgagtgagaaaccaac

SEQ ID NO: 456255 - DNA, 559 bp, Homo sapiens
ataaaaatcctgtcaattgaagccttgggctctacactgctaagcctggcccagaggctggattgcaaatgcaggtgctagtgtaatggaatggatgtttgtgttcccttcatattatatattgaagccttaacccccaatgtgaaggtattttggaggtagggcctttgggaggtaatcaggtttagatgaggtcatgaccatgggatctccatgatgagatcagtgtcattataagaaacagaagaaagacgaaagtgctctctttctctccaccatgcgargacagaaggagaatgtagcagtctgcaagccagggagagagccctcaccaaggaggtgaatccgctggcagtttgatcttggacttctcagcctctcaaactgtgagaaagaaattcctcgtgtttaagccacccagtctgtggtattttgttatggaagcctgagttaagacagctggttcactggggaatccactggtgtgaacctgtgaaaagtttgtgacatgtgaagtagtttgctgctcctggatttgagtattggcaagagctgttag

SEQ ID NO: 456256 - DNA, 559 bp, Homo sapiens
ataaaaatcctgtcaattgaagccttgggctctacactgctaagcctggcccagaggctggattgcaaatgcaggtgctagtgtaatggaatggatgtttgtgttcccttcatattatatattgaagccttaacccccaatgtgaaggtattttggaggtagggcctttgggaggtaatcaggtttagatgaggtcatgaccatgggatctccatgatgagatcagtgtcattataagaaacagaagaaagacgaaagtgctctctttctctccaccatgcgaggacagaaggagaatgtagcagtctgcaagccagggagagagccctcaccaaggaggtgaatcmgctggcagtttgatcttggacttctcagcctctcaaactgtgagaaagaaattcctcgtgtttaagccacccagtctgtggtattttgttatggaagcctgagttaagacagctggttcactggggaatccactggtgtgaacctgtgaaaagtttgtgacatgtgaagtagtttgctgctcctggatttgagtattggcaagagctgttag

SEQ ID NO: 456257 - DNA, 479 bp, Homo sapiens
ggcttccttgtaccatttgctcacagaatctctgtctctggtagtaggcaatgycagtgttcctgagaaggccctcaaaagacttgactgtgttcttcacatgctgggtgaaaaggtagcagacacctctcccttcttgtatcttctgtcgtaagtgggtcagttcttcagcctgagcctgaattaagggatcatgtatcctaaggtgggaaagaagagtaaaatgtaagagggaatgtagtgaataataggttatagaagtttcagaggagagatctcttagaatccctgtaaggaactcccaagttgaattcttttttttcttttttttttttttgagacagaatcttactctgtcgcccaggctggagtgcagtgacaagatctcggctcactgcagcctccgcctctgcctccgcctcccaggttcaagcaattctcttgcctcagccttccaagtagctgggattacaggtgcc

SEQ ID NO: 456258 - DNA, 479 bp, Homo sapiens
ggcttccttgtaccatttgctcacagaatctctgtctctggtagtaggcaatgccagtgttcctgagaaggccctcaaaagacttgactgtgttcttcacatgctgggtgaaaaggtagcagacacctctcccttcytgtatcttctgtcgtaagtgggtcagttcttcagcctgagcctgaattaagggatcatgtatcctaaggtgggaaagaagagtaaaatgtaagagggaatgtagtgaataataggttatagaagtttcagaggagagatctcttagaatccctgtaaggaactcccaagttgaattcttttttttcttttttttttttttgagacagaatcttactctgtcgcccaggctggagtgcagtgacaagatctcggctcactgcagcctccgcctctgcctccgcctcccaggttcaagcaattctcttgcctcagccttccaagtagctgggattacaggtgcc

SEQ ID NO: 456259 - DNA, 479 bp, Homo sapiens
ggcttccttgtaccatttgctcacagaatctctgtctctggtagtaggcaatgccagtgttcctgagaaggccctcaaaagacttgactgtgttcttcacatgctgggtgaaaaggtagcagacacctctcccttcttgtatcttctgtcgtaagtgggtcagttcttcagcctgagcctgaattaagggatcatgtatcctaaggtgggaaagaagagtaaaatgtawgagggaatgtagtgaataataggttatagaagtttcagaggagagatctcttagaatccctgtaaggaactcccaagttgaattcttttttttcttttttttttttttgagacagaatcttactctgtcgcccaggctggagtgcagtgacaagatctcggctcactgcagcctccgcctctgcctccgcctcccaggttcaagcaattctcttgcctcagccttccaagtagctgggattacaggtgcc

SEQ ID NO: 456260 - DNA, 608 bp, Homo sapiens
atctgtcaataccatttaagtgctcctcccacttgctgtccccagtagcttctcttccctgtgagctgtgactccttgtgtgttagcctgtgtttctcatttttcagatggcagttttccctgtgacctcaattctctggtctaccctagaagggttgactttcagttccttcagcttttttctagctgtgaggacaagtcatgaccgcstagctctttccatgttggaatagaaatccaaaagttcatttaaagaattacttgttataaaagtcacccattgtcaatgtacaactcaatgatgtaagttgatttatcgaattgtgcagccatcagcagagttctacttcagcatattttgtcacttcccaaattcccttgaacctgtttgtagtcatttcctaatccctggtccccatgactgggtctgaatagaataaacatttggaaagcagatttcattatatttacactttcctgtgtttgggactttatatagtggactattgtgttcgttttgtgacaagtagagaagagattgcattctagggatgatttttgggggaacataatattagtcctgtttatggctctccttgaattggttc

SEQ ID NO: 456261 - DNA, 508 bp, Homo sapiens
catctctaaaccactcaacactggggttagacaagggcttgtcttcaaggttggaccttctagagtagatctcttccatggtttccacccaggagtcaatgagttggggatctgtttcttgggatgtgaggtccagcaacagagtagcagggtttaaaaatcagcatactttaagggtaacatctggggtgtcaagcagaagagcctgatatttaagtaactggccccctattagccatgggtatacttttgcctctaggaccctctgtactgtacttcatggggtggtggggggcgggggtggtatggcatctacttgttgtcccaaggtaaacttactggcttcttcyaccaatagagtgatggtagctacagatctcaagcttcctggtcactcagctgccacctggtctagctgtttagagaaataagccactggtctgaggcaattcctgacccttcgagttagaacatccaaagctgtcccttgttattcatccacatagag

SEQ ID NO: 456262 - DNA, 508 bp, Homo sapiens
catctctaaaccactcaacactggggttagacaagggcttgtcttcaaggttggaccttctagagtagatctcttccatggtttccacccaggagtcaatgagttggggatctgtttcttgggatgtgaggtccagcaacagagtagcagggtttaaaaatcagcatactttaagggtaacatctggggtgtcaagcagaagagcctgatatttaagtaactggccccctattagccatgggtatacttttgcctctaggaccctctgtactgtacttcatggggtggtggggggcgggggtggtatggcatctacttgttgtcccaaggtaaacttactggcttcttccaccaatagagtgatggtagcyacagatctcaagcttcctggtcactcagctgccacctggtctagctgtttagagaaataagccactggtctgaggcaattcctgacccttcgagttagaacatccaaagctgtcccttgttattcatccacatagag

SEQ ID NO: 456263 - DNA, 474 bp, Homo sapiens
cctgagatgccaaagtcacattgttcagtggcccctaacttggcctttggggttcaccattgcctcccctgcagtttcagcattcagtgtggggaccatcactggctgatacttgggtactctgggtttttggcatttcgttgtggtgagagttccactgtcactgttggcctctccctggatgctctggggttttcagcattgacattccctataggattgtggattagagctccttcgctggaggagtgtggatgtcatcttctccgcccttaaattaaaagattacgattttccataacagccagttgtgggccccctcctacgtgactttgctcaagcccatattgaactcttggtcacagggaccagggattcctggacccctggcccaagtgacaactacccatagtggcagacaagcagcagccayccaaacattttgcccaaataattttcctcagtctctgtggc

SEQ ID NO: 456264 - DNA, 578 bp, Homo sapiens
gcctccagcagaaaagattctaagaactggatgtgggtagaggatgcaattatggaacttggtatctttcccaccttcttttctttcttcccattttgactggtcttgtaatgctaggcccaggcatcaatatacatacaactaaaaaagcaatatcagtgcaaaagacataatatctatacaatgaaattacatggtgcctattgctaaagttactttaacttcacatcatgtagcccagtaaggtgactgccacccacctaccaagggtattagtcagctcaggctgccatagaaagataccataggttgggtggyttaacaacagacttttattttctcaatattctggaggccaaaagtcaaagatcgatgtgctcacagagttggtttctggggaggcctttcttcctggcttgcagaagtccactttcttgctttgtgctcccatagcctttcctctgtgcctgtgtggagaaagagacagattctttgatgcccttcctcttcttatatggacaccattctgaccagattaggaccccaactgtatggcctaattaaccttaattacctcc

SEQ ID NO: 456265 - DNA, 406 bp, Homo sapiens
ggttttgtctttgcagaatataaaaaactaacgtgaggtaaacactaaggtctggagatggctgtgcaagagatgacaaagtccaacaccacgctggagagtgtccaatcatctcttctggggcagcatatttttctacaatactgaakttggaaaacaacagcaacaacaacaacatcaaaagcaaacaaataaacaaacaaaaacctacaagattcatgaaactggacaactgtctttataacattaccagtgataaaaccagtaaggaaggctggtttgcagtcatctgagaagcctctttcatttcataaatatggtttctctctgacattgaacggcttccaatttcaagcggaatgctacatgacaaggataaggatgtgaagagaaccggtttcttttg

SEQ ID NO: 456266 - DNA, 446 bp, Homo sapiens
ttcctcactaaaggaaagggtctgcaaccaactcaaatgatcgattgaaaccaactcatattactgatagcactgaatgtgtaccaaacctcargccatgggtgcctgagtcctagtgttcctatgacatcccctgggagtggtggaactctacctttcaatgatgggaagtcttgggcaagagcaggtctcctccccttgtccagtatagacagcttttgtgtctaactctgcctcagcagctggcctatacctgggggcaagggttggacaggtttctagctccaacatcagtggtagatgccttttgttttatgtgagagaagcaaccacgttttgtgcctgtgctctggtggtgctctatcatgcattcatgacttatatgcctacaccactgtggcaagctcgagaaattctctttccctgctacatgtgtcttatcagca

SEQ ID NO: 456267 - DNA, 446 bp, Homo sapiens
ttcctcactaaaggaaagggtctgcaaccaactcaaatgatcgattgaaaccaactcatattactgatagcactgaatgtgtaccaaacctcaggccatgggtgcctgagtcctagtgttcctatgacatcccctgggagtggkggaactctacctttcaatgatgggaagtcttgggcaagagcaggtctcctccccttgtccagtatagacagcttttgtgtctaactctgcctcagcagctggcctatacctgggggcaagggttggacaggtttctagctccaacatcagtggtagatgccttttgttttatgtgagagaagcaaccacgttttgtgcctgtgctctggtggtgctctatcatgcattcatgacttatatgcctacaccactgtggcaagctcgagaaattctctttccctgctacatgtgtcttatcagca

SEQ ID NO: 456268 - DNA, 403 bp, Homo sapiens
ttttcaggtagcttttctccattcccagtctcacatgycatcagtcactagatcccctctggcacatacatggtgttggtcttggggggcatgggttgggaaggggagaaagggggcaaatagttcctcttcactgcacacaattatgtcatctttcaaactagggacatgagtgttgctaacattgtgcacctaatcctggaatccctggggtaaacagccacagttcctattttttgttcatcactaaatcatctttatcatttatgcatttacagatcccatccatcatcctaataagtttgctgtaacaccctctaaactatcagtgaatggggccatgctgtgaggttcaagctgagtccatcaccaaccagcgtgtccctcctgagaatttccctga

SEQ ID NO: 456269 - DNA, 403 bp, Homo sapiens
ttttcaggtagcttttctccattcccagtctcacatgtcatcagtcactagatcccctctggcacatacatggtgttggtcttggggggcatgggttgggaaggggagaaagggggcaaatagttcctcttcactgcacacaattatgtcatctttcaaactagggacatgagtgttgctaacattgtgcacctaatcctggaatccctggggtaaacagcmacagttcctattttttgttcatcactaaatcatctttatcatttatgcatttacagatcccatccatcatcctaataagtttgctgtaacaccctctaaactatcagtgaatggggccatgctgtgaggttcaagctgagtccatcaccaaccagcgtgtccctcctgagaatttccctga

SEQ ID NO: 456270 - DNA, 403 bp, Homo sapiens
ttttcaggtagcttttctccattcccagtctcacatgtcatcagtcactagatcccctctggcacatacatggtgttggtcttggggggcatgggttgggaaggggagaaagggggcaaatagttcctcttcactgcacacaattatgtcatctttcaaactagggacatgagtgttgctaacattgtgcacctaatcctggaatccctggggtaaacagccacagttcctattttttgttcatcactaaatcatctttatcatttatgcatttacagatcccatccatcatcctaataagtttgctgtaacaccctctaaactatcagtgaatggggccatgctgtgaggttcaagctgagtcyatcaccaaccagcgtgtccctcctgagaatttccctga

SEQ ID NO: 456271 - DNA, 600 bp, Homo sapiens
gaatgaagttgatccaaatttattacttgtcccttcttatgggcaaagcccaatcagcaatacattgaaacagcattcttaaccagggataagtcaatctcaaggacatttgcaagctctgccacatttgtgtgctcatctactgaaacaaatatcttatagagtagagtttcaaaataatcaaaataagcactcgattcattacaaaaccttcaaggggtgcaactgctatayaactgtcatcagacattggtacatccagataaataaatccttttttatacaaactatgtactacattgtaatctagtgatccagagagttgagggcctgaatcaacggtcttatcagtagcacatttctcaggccaagtgcatatcttgatgtcatcttctgtgatatatccagcctgcaccacccaccatgcctctatggcaatttccactggctttattggtagaagatcaccggctgttttccttctgaagaatttttttgatgatctacactgaatcataagatcaatatactggtttcttcctatgccaagaagccttagacagtcagcagcagtaaaattgtgcccactgttcataatat

SEQ ID NO: 456272 - DNA, 600 bp, Homo sapiens
gaatgaagttgatccaaatttattacttgtcccttcttatgggcaaagcccaatcagcaatacattgaaacagcattcttaaccagggataagtcaatctcaaggacatttgcaagctctgccacatttgtgtgctcatctactgaaacaaatatcttatagagtagagtttcaaaataatcaaaataagcactcgattcattacaaaaccttcaaggggtgcaactgctatacaactgtcatcagacattggtacatccagataaataaatccttttttatacaaactatgtactacattgtaatctagtgatccagagagttgagggcctgaatcaacgrtcttatcagtagcacatttctcaggccaagtgcatatcttgatgtcatcttctgtgatatatccagcctgcaccacccaccatgcctctatggcaatttccactggctttattggtagaagatcaccggctgttttccttctgaagaatttttttgatgatctacactgaatcataagatcaatatactggtttcttcctatgccaagaagccttagacagtcagcagcagtaaaattgtgcccactgttcataatat

SEQ ID NO: 456273 - DNA, 285 bp, Homo sapiens
cctttgggtcttttagaacaggtatccagagattttacttctccagtgctaggcagrttctatgcccataacatcagcaggaagcagttacagaagatgaacctccacccttctacaagccccttaagattaaggaggagtatataatctctgatggggaaatgaggtaggagaccagaaggacttattttccagtcacaaccccattgaacagagcaggatctggtcaaaacaaggtgcagtgaagaagcctgctgaaaccagcagatgatgatgaaagtgacc

SEQ ID NO: 456274 - DNA, 285 bp, Homo sapiens
cctttgggtcttttagaacaggtatccagagattttacttctccagtgctaggcaggktctatgcccataacatcagcaggaagcagttacagaagatgaacctccacccttctacaagccccttaagattaaggaggagtatataatctctgatggggaaatgaggtaggagaccagaaggacttattttccagtcacaaccccattgaacagagcaggatctggtcaaaacaaggtgcagtgaagaagcctgctgaaaccagcagatgatgatgaaagtgacc

SEQ ID NO: 456275 - DNA, 285 bp, Homo sapiens
cctttgggtcttttagaacaggtatccagagattttacttctccagtgctaggcaggttctatgcccataacatcagcaggaagcagttacagaagatgaacctscacccttctacaagccccttaagattaaggaggagtatataatctctgatggggaaatgaggtaggagaccagaaggacttattttccagtcacaaccccattgaacagagcaggatctggtcaaaacaaggtgcagtgaagaagcctgctgaaaccagcagatgatgatgaaagtgacc

SEQ ID NO: 456276 - DNA, 285 bp, Homo sapiens
cctttgggtcttttagaacaggtatccagagattttacttctccagtgctaggcaggttctatgcccataacatcagcaggaagcagttacagaagatgaacctccacccttctrcaagccccttaagattaaggaggagtatataatctctgatggggaaatgaggtaggagaccagaaggacttattttccagtcacaaccccattgaacagagcaggatctggtcaaaacaaggtgcagtgaagaagcctgctgaaaccagcagatgatgatgaaagtgacc

SEQ ID NO: 456277 - DNA, 226 bp, Homo sapiens
gatgagttgctctgaatcctgctcccagggccaaaaacgtcaacctagaaggaaggggcttaarcacaaaatatgatttaaagagtttatttgagccaatgtgaggatagttgcctggaaggctgagacccaagcaatcttggatatgggttctgtttggcctttgttacaagcaggtttgtaaagaccaaaaagggagacagggagttggctggtagaaagttgc

SEQ ID NO: 456278 - DNA, 452 bp, Homo sapiens
gaatgtttgctatcaacatctttgtacttccaaactaatgttttctcttggcagggttctctccagtaaggccgtgaaatagttatcatagaatgcataaatggcacattatccaaaatatagggctccagattgttttcttggagtctaaggggcttcacaaaagtagctccatggctgttgtagttggagaagtgctgggacaatgttgagcagatgggactccagtctaaaccagtggttctgccaaaatggctgttctcttacctgattacatgagtgatgtttacatagactttgaaaaacgaattcaaagawgtattgtaactgggatgggggctaagctattgaagttaccttatacttcaatgccttaaaatatatgcatgtataacttttgcaaacctatttaagaaaaaatgaattctaaggctattgcaagtcttaaatcc

SEQ ID NO: 456279 - DNA, 438 bp, Homo sapiens
ttttaatgaaagagtgataaactcacatttctgtattcatgtcatataattgactacttatttgagaacatgaggaaattgattatttatattttatctcacttcaccaactatgcccctatattttttgttgtttctgatgtgctttttatttagacagtggttttattcacccattttttctattctgttcctgacttttgccattgtgctgtctatcttcctcattaacttgtaagttcttctttgagcctctttctgggcatatcatgttattgccaacttctttgattctgtgacaatgtaattgcattattctayggtatccttaggccattcttatgatgtatgtagttcttgtgtttttgcgcatccatttgttcttttgggggaaagattgctaatctctaagtgtagcttttctcttagttttttttc

SEQ ID NO: 456280 - DNA, 655 bp, Homo sapiens
gttaaaagaattatgtccttctctgccatggtaccattcctagagtataagcccaatgaagctagggctgtggctttattatctttgtatttccaagtaacatgcaatactatagattatattaaatgcttctttaataaatgtctgagtgaaattctatattacatttaaaacctcatgaaatatctatttcaataataacctgggaatgtcagtgtgtactacatggaattatactaagtgctttacaattaccgtcttgaggcttcaaacaactttacaaaaaagctatgatgatcattactttatcattaattgaagctcagaaaaaaataagttgcccargtcatatctttaaaggcagattcagtattcaagctggctcatgtttgatttccatttacatcatgtctactcagatagtcttcagtgaaatacccagataaaatttgttttcagtaaactgtctattggtatattatgtgcatatgcacacatgcaaaattaggttacacatatgctcatgatatacatatgtatatatgagttatatacatatatttataatgtatatagtaaattttcactaaagtgcctgtatatatatattgcaattatatatataaacttaactatatcatgtctatgtaattgt

SEQ ID NO: 456281 - DNA, 577 bp, Homo sapiens
tgttttaaaaaactatttgctaatgctaaattataaacatcaccaaaaggtataagcagataaatgaaacatcatttgcataataaaaacagatttgtcacagcacaaaaattttcaagggaggtttttaaaacaggtatctatcatcttgaattttaaataccttttaattcccccaaaatagctttatgtatacattttttaaattcacctatttacaagcttagaaatttgaaaaatgacttttttaaacatagagacctatttcataaaaaaatcactgccaacaaataattgtaagaattattttatttttattgattgasaaacaacactgatggcagataattccctttaaaactttaatctaaatgaaaacatattaaatgatgttttaaaatatatatcatacttttgcaaacataaatcctctgtgatccagtgtttcttttagaaagaaaggattgtcgtatgattgcatgatagtgtttggattgtaatatagctaagaatttattctcctcctttaaaaagccttatatgattcagcagctatcttctgccgaaatcactgata

SEQ ID NO: 456282 - DNA, 589 bp, Homo sapiens
tatgtccttattctagaagcttttaawttttttactttttaaaaatttttaattttaatttctaatgtttttactttttaaaaatgttttgttcaaaactaagacacacacacttacccaaggcctacacagggtcaggaccatcagtatcactgtcttcatctccacatcttgtcccactggaaagtcttcaggggcaataacatgcatggaactgtcatctcctatgataacaatgccttattctggaatcctcctgaaggacaggcctgaggctgttttacagttcactattttttttataagtaagaggagcgcactctaaaatagcaataaaagatatgtcacaaatacatgactaggaacacatagtcacttactatcattatcatgtataatgtgctgtatataattatgtgctatactttagtgtgactggcagtgcagtatgtttgtctatacctgcatcaccacaaacatgtaaatatgcataacgctgtacaatgtcactaggaaataggaatatttcagcttaattataatcctgtgggaccatgatcatatgtgcagtctgtcattgaccaaaatg

SEQ ID NO: 456283 - DNA, 589 bp, Homo sapiens
tatgtccttattctagaagcttttaaattttttactttttaaaaatttttaattttaatttctaatgtttttactttttaaaaatgttttgttcaaaactaagacacacacacttacccaaggcctacacagggtcaggaccatcagtatcactgtcttcatctccacatcttgtcccactggaaagtcttcaggggcaataacatgcatggaactgtcatctcctatgataacaatgccttattctggaatcctcctgaaggacaggcctgaggctgttttacagttcactattttttttataagtaagaggagcrcactctaaaatagcaataaaagatatgtcacaaatacatgactaggaacacatagtcacttactatcattatcatgtataatgtgctgtatataattatgtgctatactttagtgtgactggcagtgcagtatgtttgtctatacctgcatcaccacaaacatgtaaatatgcataacgctgtacaatgtcactaggaaataggaatatttcagcttaattataatcctgtgggaccatgatcatatgtgcagtctgtcattgaccaaaatg

SEQ ID NO: 456284 - DNA, 593 bp, Homo sapiens
catgaggaactgtgagtcaattaaacctctttttctataaattacccaggctcagtggtatatttatagcagtgtgaaaacagactaatacacaaatatatatatatatatttctttacaaataaatatatttgtaaatatgtacatatttccttacacatacacaaatatatttccttacaaatatatatccttagmaatatatatatatttccttgcaaatatatacatatatagataattcagttataagcaaattatatcattgattattaactgaaaaatgtgaagagataatgaaaacgctaaattagttttatgaataaagacactgaaacattagaaatctttaaaataatggcttttcactagttgcggctcaaaggaaactagaaatgttatctcaggaaataaaagcaaactctattgtacccatatttttgtctgtagctagaggagccatattacatttacaatagcaacagagagaatatgctgactaccacagggtgatatgttaagtatagtttattgtgtatagtggatgtgaaactcaaggataaggaaataatttgctgatagggtgtagagaa

SEQ ID NO: 456285 - DNA, 493 bp, Homo sapiens
accttcaagtgcaaagcctggatttctctgaagtgagatgtttgctcacacagtgcctttcttgaatgtactttgttctccgctggactcacctttgctaggggccagttatattcctgctgagtatgggtatacatagaaagggcaagtaaggaatgttttgccttctggaaatagattattaattgtgaacaaggagatgagacacaagcactaaaatgctgaatgaaattyataagacattaggcatttgcaaggagaaagttgttttgcagacaaagatatgatgtgactatttagagctagatgggccactttattaaacagtttccttggtgctcagggagggaaagataatctttccagagattctgtgagttggatttctgttggttcttctaatttactcaagaacctgagtgacccaggccattgatgaggaagtaagtgctaatgactgataatgggcatcaagaattgggccaggtgaaaa

SEQ ID NO: 456286 - DNA, 609 bp, Homo sapiens
aatcttctccttggaattttttcttctattgacttttatgaaattattcacattttatcagtcagaacaggatttggcagaataagctcatttgggaattgatgcaccaaactaaaagttttgaaacaacttagaggtagccattggcatagtagcaggtttcgtttatagactgagaaatcaggaaacctgattgtacagtggggatacaaagtacagtggatacaaggttaaacagtggatgagagttgagtcaaccgggcatcatagaagaggtttatcacaggggattatcctgagatgcatattcagcctggaaagtggtggtcaagaaataggcagatggttaagatgcagcaagaggcccatactgcatcagagattaaggcagtrgggagtctcatatgtaggcacaaacctatatctagagaaacagctagcaacctgggaatacactatcaacagaaaaacccaggtttgggcttaagatccaatttcttcagttgaatacagagccaaagagcccaattggtaaatttttgatttgtataaggtatctgtttactgagctctcaaggctgggcctagggtgaggcaaacaaggcactt

SEQ ID NO: 456287 - DNA, 663 bp, Homo sapiens
ttaacctgaactttgtttttatactgcaaagttgtgaaggtattgagaaaaagacactgccgggaagatgcccatcccacctctctaagctgtatggaagcaagaggtcctataaaatctcattccaattctaggctaaaaccaaaatcagatagataatcactcagtgacattgaaagatattgagcatgaaagaaagtatttgatgacaaaagggaagaatacattcctgcaaataatttcatatataaacagaataaatttagtctttttttggtccaaaaattttcataacttttaaacattaaatgcataacacaacacaaagtgctaaattacaatggagaaacaaacatcaagttttgcaaagaaatgattgtgtcccaagacttttatgtccaaccagattgttgattatgtataaaggtgaccatgatgtgactcagaacctgtaactctagtgcatattttttgagactgtattcatagatcaaaccaacttagaagctaatcaaagtcagraactcaagcatagaagtagattattcaattgcatgagtatagaatagaatgaaggcaattaatctcatattgcttagactgactacattaaattaaactggtcattgttgagaagcagctgttgtatcactggttaaagcc

SEQ ID NO: 456288 - DNA, 529 bp, Homo sapiens
gccaactgtgggatttcagtagtgcaggttttggtatgtgcaggggtcttggaaccaatcccctgtgtagactgagggacaactgtaattttaagggctgggttaaataggggttgaaagattgaaaaagccaaaaagagaagatcaagataacacagacccccggtaacttcrgtatgtagctaccaggccttgggctgggaaatcatattttgaagttatcaatatgtagaggattgaaaaagagcatcaaagtctttttacctgaggtttctaaggagtggatgccacccagttggtactgataccttggagctttgagaagaggtcttgcaaagctatgactcagactttggggaaagcagcacagcccttattgtgtctatacctctgaggaggtcacaaagaagctgattctggagggacaaatggaagtaccagccaatgtcagggtaaagagctgtcaacagtgacaatgtcaggagcagcagataaacagcaaagagcaagttcttcctagtttcctcct

SEQ ID NO: 456289 - DNA, 593 bp, Homo sapiens
tggaattccaaacagctgcaagtagtaagtggaaagcgatttttgctaatcatccaggaggttatgtggcatggtggaaactggttccagacaacaacttgcgtgtagagtcaggacttggaagcagcttctggatatttgctttttggactgatacaaagtaagagcgaagcrgtgacgtgatcttgcacacttgcatttagtattctctaaatgtgaacctgaatttgttttacattagaaaaccccttttcaacagtttttgggcctggttcccagcatctgaagaaaatgcacaaaagcaaagatgtggtccacttatgggggaaaatgggaaagctacctcctcatgcttctccaaaggacttaaacattcttctgaggatgtgtgtggttttttaaaatctatgttgaatgtagaattaacttacatccattcagccagagaaaagttgatcttggtttctcagtaaaagcacattttcaagatatcgatgtggaatcaggggctttggtggtggtctaccaagaagtatacctaatctgtgagtatccctgcccaagttggccactctaaaactcaagatttccta

SEQ ID NO: 456290 - DNA, 593 bp, Homo sapiens
tggaattccaaacagctgcaagtagtaagtggaaagcgatttttgctaatcatccaggaggttatgtggcatggtggaaactggttccagacaacaacttgcgtgtagagtcaggacttggaagcagcttctggatatttgctttttggactgatacaaagtaagagcgaagcggtgacgtgatcttgcacacttgcatttagtattctctaaatgtgaacctgaatttgttttacattagaaaaccccttttcaacagtttttgggcctggttcccagcatctgaagaaaatgcacaaaagcaaagatgtggtccrcttatgggggaaaatgggaaagctacctcctcatgcttctccaaaggacttaaacattcttctgaggatgtgtgtggttttttaaaatctatgttgaatgtagaattaacttacatccattcagccagagaaaagttgatcttggtttctcagtaaaagcacattttcaagatatcgatgtggaatcaggggctttggtggtggtctaccaagaagtatacctaatctgtgagtatccctgcccaagttggccactctaaaactcaagatttccta

SEQ ID NO: 456291 - DNA, 600 bp, Homo sapiens
tgccagctcagtttcccaggacttgggcctaatcccggtctcacgcctcacatggagctggctggttcccgttagcatttcagtctacccctaatggcgagcaccgttgctgccaagaactcatgaaactggattcccatttggccccttctgatcagactcttctggacaactttgcctgcttggaaacaggcggcagttatgccacgtcccttggacttgtctatggctgctcagggaagggctgtgtctggtccgtatgttctgattcatgatatcccctccccccagcctgtagtgcaaytggcttcaatctggaattctaggtaatgctaaccccttttggaatagctccttatagctatgatctgtgctgaacgaaataatcttatcaagtgcagaggctttcagagaatgttatctacctttcaaagtaaagttctcaagaacattctagaagatcacatgttttgttttttctccacagcctagctcaaggaataggagatttgatagatttatgacaaggcctttttcaaatgcattgatctggctagctttggtcctcaaaagaatgttctgccctggagcaggccggtc

SEQ ID NO: 456292 - DNA, 420 bp, Homo sapiens
ggggatatgatggcttagcttgggctcagaggcctgacagccatgtgagatatgtcccagcagaacagttagccaaactgttgcttggagtaatgaggtaaagaaagatcttgaggatcttgctaaacagattttcaggcagaatgctgaaagtgctacttggctttttctaataattttattatttatacagtaaaatatgagaagtgaggaaaaaattaaagatggaactgttcactttttgagaatttatagggtatattaagaaggaagaacttgttcatttkaaaataaaagtcaccagccccatctctttcagaaaaatactatcaaagtaggaaatggcttcagagcaaaggaactattgatataggtctggttgggtttcataaatattacagactagtggctgctatgaac

SEQ ID NO: 456293 - DNA, 585 bp, Homo sapiens
tttgtgatttttaaaaatttgcctcttctgtaagagtaaaatattaaacaaaaccactgttgctcgggcttgaatttacttagcaaatagttytcaatgcctactatgtgttagagactgtatttggcttagggctataaatacaaatgagatatagttttttcccaaatgaagcatgtgatctggtagaggaagacagacctgaaaacaaaacaaggccaaaaaaattgtaaatattcaatgatataagttcgcaaatggtccaagggctcacaaatgtcatggggttggttcttcttggggtaggggttgcatcaaaaaggattcaacaagaatttaatacctgaatacagtgtagaaaaaggagtactgtacatattttctagggaactgggatgagggaaatagcacatgaacgcaggaatggagatacaaggccgagtgcttcttgatgagtactgcaagtcattagtcatggctggagcatagtatgtgaggacagtagggtgaaagataatgctgtagacacaggcagagaacagagcagaggggactttgccttgcaaagaatctcacatttatcag

SEQ ID NO: 456294 - DNA, 598 bp, Homo sapiens
tggtccccggggatagtttgcttgctgtccagggtggctttggattgggcgtcagaagaggaatgagacattaacgaaatccctggggatgccaacttcctgaaagaggtccagatgcacgtaggatgggcataccccaggaagttcagccagatttctttgattcagggagaaaatcagggtcagggcttaggtaggctcctgatgagtgaaattcactaactagtactactaatgtttgttgagtgcttattcactgccaggccctgggctaagcattttacatttaaccccttcaacaaccctataagaaaacatctgggaggccgttatctacccgtttccttaaccaataaatgacacagcctgggactctccctgcaycagcccacccctcctccctgaaccccacaggtgggtttggtgccagaatgtatcactgtgctgtcaggtggagactatttggttcaattcctaaattttgggggtgaggggacagctagtttccctgcttagttacctggtgttttgccgctagttactatgtatctctgtgtatttgtctacaaaacatagagcattgttgaaactatgttat

SEQ ID NO: 456295 - DNA, 598 bp, Homo sapiens
tggtccccggggatagtttgcttgctgtccagggtggctttggattgggcgtcagaagaggaatgagacattaacgaaatccctggggatgccaacttcctgaaagaggtccagatgcacgtaggatgggcataccccaggaagttcagccagatttctttgattcagggagaaaatcagggtcagggcttaggtaggctcctgatgagtgaaattcactaactagtactactaatgtttgttgagtgcttattcactgccaggccctgggctaagcattttacatttaaccccttcaacaaccctataagaaaacatctgggaggccgttatctacccgtttccttaaccaataaatgacacagcctgggactctccctgcaccagcccacccctcctccctgaaccccacaggtgggtttggtgccagaatgtatcactgtgctgtcargtggagactatttggttcaattcctaaattttgggggtgaggggacagctagtttccctgcttagttacctggtgttttgccgctagttactatgtatctctgtgtatttgtctacaaaacatagagcattgttgaaactatgttat

SEQ ID NO: 456296 - DNA, 602 bp, Homo sapiens
tcagatagaatgtccctgaaaagcatctaatggcaggccttctaaaactttcattcagtctacaagatcatttgtgttcaaatttcagtcgcccaattaggagatcagctttttgctaatcagattcttcatgaggcaaagaggtcatccratgtaataccaacatcttttgacaggcgagacattaaattataagccaagaagttaaaattaccttcccactaaagggaagactaccaaattcctgaaaagttccagaaaggagtcttgttattctaaagatgaaagtatttaaaaataaattgtgaatagaaatggataaagctagaagcagttctgaaaaatagtaaggaacttgagaaagtgttgttgaaatactagggcttaggcttgtgttttaaagcatgaatgattgcttctggatctcttaggttgcaggaaaagtccagaccaaactttctgggtgacttttaggtaacgaaatggggcactctgggtgcaagactgcttatttctgaaatcgtggtttatcaaggctgaagtttatttcccttcctgctctgtctcccagtggtctgaagaaaggagtttgtgtgtgcggc

SEQ ID NO: 456297 - DNA, 574 bp, Homo sapiens
tctcatttcattaccggaaaggagtcctgatccagaccccaagagaggattcttggatctcaygcaagaaagaatttgaggtaagtccacagagcaaagtgaaagcaagtttatcaggaaagtaaaggaataaaagaatggctactccacaggcagagcagccctgagggctgctggttaaccatttttatggttatttcttgatgatatgctaaacaaggggtggattattcatgcctccctttagaccatatagggtaacctcctgatgttgccatggcatttgtaaactgtcatggcactggtgggattgtagcagtgaggacaaccagaggtcactcttgtcaccatcttggttttggtgggttttaactggcttctttactgcagcctgttttatcaacaaagtctgtatgacctatatcttgtgctgacctcctatctcatcctgtgacttagaatgccttaactctctgggaatgcagccgagtagatctcagcctcattttacccaactcctattcaaaatggagttgctctggttcaaaagcctctgacaaaagcattttgtaaa

SEQ ID NO: 456298 - DNA, 574 bp, Homo sapiens
tctcatttcattaccggaaaggagtcctgatccagaccccaagagaggattcttggatctcatgcaagaaagaatttgaggtaagtccacagagcaaagtgaaagcaagtttatcaggaaagtaaaggaataaaagaatggctactccacaggsagagcagccctgagggctgctggttaaccatttttatggttatttcttgatgatatgctaaacaaggggtggattattcatgcctccctttagaccatatagggtaacctcctgatgttgccatggcatttgtaaactgtcatggcactggtgggattgtagcagtgaggacaaccagaggtcactcttgtcaccatcttggttttggtgggttttaactggcttctttactgcagcctgttttatcaacaaagtctgtatgacctatatcttgtgctgacctcctatctcatcctgtgacttagaatgccttaactctctgggaatgcagccgagtagatctcagcctcattttacccaactcctattcaaaatggagttgctctggttcaaaagcctctgacaaaagcattttgtaaa

SEQ ID NO: 456299 - DNA, 574 bp, Homo sapiens
tctcatttcattaccggaaaggagtcctgatccagaccccaagagaggattcttggatctcatgcaagaaagaatttgaggtaagtccacagagcaaagtgaaagcaagtttatcaggaaagtaaaggaataaaagaatggctactccacaggcagagcagccctgagggctgctggttaaccatttttatggttatttcttgatgatatgctaaacaaggggtggattattcatgcctccctttagaccatatagggtaacctcctgatgttgccatggcatttgtaaactgtcatggcactggtgggaktgtagcagtgaggacaaccagaggtcactcttgtcaccatcttggttttggtgggttttaactggcttctttactgcagcctgttttatcaacaaagtctgtatgacctatatcttgtgctgacctcctatctcatcctgtgacttagaatgccttaactctctgggaatgcagccgagtagatctcagcctcattttacccaactcctattcaaaatggagttgctctggttcaaaagcctctgacaaaagcattttgtaaa

SEQ ID NO: 456300 - DNA, 580 bp, Homo sapiens
  misc_feature (1)...(580): n = A,T,C or G
nnnnnnnnnnnnnnnnnnnnnnnnggtaagccgaatgacacctgacagctgtgagagagccccccaacccccgccgctggggggtggtcctcctaatccccttcgcaagaggaagctaattgctgcagccagagaaggcaggataaaagcgagcgggcacccacacccaccaggccyggagtcttgctatttgctgctaaattaatatattacctaatgcagaaaccacgttaagaactccagctttcggctccaacaggagcttctgatgggttaaaggcaacatcttgctttaattcccccctttttcccatcctccccccactccgcaccaccaccaactacaaatgtcagaaataaattattgaaaccagatgtaaggtttttgggtgcacattttcaggcagttgtgcgctaacagatgccttgtattaataatgtacagttgtgacaggaaatatggtttagagtcctggaaaaacatgaaagctaattccattaccccttttcatggtacccagttcttctcaaatgttcaactggtttggattacagtgaaattctagaggaaaaacgattt

SEQ ID NO: 456301 - DNA, 566 bp, Homo sapiens
aaggttgcagagttactggcagagccagcactcacaatttaatctatttaattttaaagacttttaacaacctcaactatcatttattctaataggtaaggaaagtatgctatgaattatgggtaaatccacactgtgtcattctcttaacgaaactttttttttttcaggcttggtgtacagttgatgtctagaatatattaacagaaggctgccctgtagaagttttgagttaatggtttccatcaacgyaggagtggaagaagctactggggatcaggaatcagaagtcctggctttaagccctagctttagccctcactggtaataaaatcaaagcaattggtctctttgacttcagtttctccacttttaaggttgacctgataatacttgccctgcttgtgaagagcatgtgaaataatagctattcaaatttttacaaagcaccaagcaaatagctgtgtgaccttgggcatgttctgttacttttctgatccttatttatcttaactgtgggatagaatgaaagagcatccaacttcacctcctgctctgaaactgta

SEQ ID NO: 456302 - DNA, 566 bp, Homo sapiens
aaggttgcagagttactggcagagccagcactcacaatttaatctatttaattttaaagacttttaacaacctcaactatcatttattctaataggtaaggaaagtatgctatgaattatgggtaaatccacactgtgtcattctcttaacgaaactttttttttttcaggcttggtgtacagttgatgtctagaatatattaacagaaggctgccctgtagaagttttgagttaatggtttccatcaacgtaggagtggaagaagctactggggatcaggaatcagaagtcctggctttaagccctagctttagccctcactggtaataaaatcaaagcaattggtctctttgacttcagtttctccacttttaaggttgacctgataatacttgccctgcttgtgaagagcatgtgaaataatagctattcaaatttttacaaagcaccaagcaaatagctgtgtgaccttgggcatgttctkttacttttctgatccttatttatcttaactgtgggatagaatgaaagagcatccaacttcacctcctgctctgaaactgta

SEQ ID NO: 456303 - DNA, 566 bp, Homo sapiens
aaggttgcagagttactggcagagccagcactcacaatttaatctatttaattttaaagacttttaacaacctcaactatcatttattctaataggtaaggaaagtatgctatgaattatgggtaaatccacactgtgtcattctcttaacgaaactttttttttttcaggcttggtgtacagttgatgtctagaatatattaacagaaggctgccctgtagaagttttgagttaatggtttccatcaacgtaggagtggaagaagctactggggatcaggaatcagaagtcctggctttaagccctagctttagccctcactggtaataaaatcaaagcaattggtctctttgacttcagtttctccacttttaaggttgacctgataatacttgccctgcttgtgaagagcatgtgaaataatagctattcaaatttttacaaagcaccaagcaaatagctgtgtgaccttgggcatgttctgttacttttctgatccttatttatcttaactgtgggatwgaatgaaagagcatccaacttcacctcctgctctgaaactgta

SEQ ID NO: 456304 - DNA, 571 bp, Homo sapiens
cctcccaagagggaaaagctgaacacattattacacgtccacaccatggcatagtatgtaaccaatgaacatggaaaatcagagtatgccagatagcttggaggagtttctatgaggtggtgttgagatgaggagagaaaagatgtataaatgatcccacattgtaaaacaataaacagcattcccctgggtatgtgtataggtatatattctatacagaattacataaaaaaaaagtatactccatattcaaggtgttatggtgggaagaaaatggggcgagggctraccatagaaaaggaaatggggagaaaagactgcattcaaaaataataagataacatgtatttgctcaatgcatgtgtttgtgtaaagatctatattgtgaatacgtgctacttttttttttaacaggaattacaccccccagaagttctatttttttaaatatgaaccaggcatttttattaaaaataactaaatttttttcgtttagacctgtatcttggtgcaagagagtactcacatacataagaatcgacctgctgctatgcccctcacctgttgactg

SEQ ID NO: 456305 - DNA, 571 bp, Homo sapiens
cctcccaagagggaaaagctgaacacattattacacgtccacaccatggcatagtatgtaaccaatgaacatggaaaatcagagtatgccagatagcttggaggagtttctatgaggtggtgttgagatgaggagagaaaagatgtataaatgatcccacattgtaaaacaataaacagcattcccctgggtatgtgtataggtatatattctatacagaattacataaaaaaaaagtatactccatattcaaggtgttatggtgggaagaaaatggggcgagggctaaccatagaaaaggaaatggggagaaaagactgcattcaaaaataataagayaacatgtatttgctcaatgcatgtgtttgtgtaaagatctatattgtgaatacgtgctacttttttttttaacaggaattacaccccccagaagttctatttttttaaatatgaaccaggcatttttattaaaaataactaaatttttttcgtttagacctgtatcttggtgcaagagagtactcacatacataagaatcgacctgctgctatgcccctcacctgttgactg

SEQ ID NO: 456306 - DNA, 547 bp, Homo sapiens
gctctcagctgtttgtacttccaaacccccamccccgccccccgttttaaaagcgttcaggtataggaaacagaacccattataccaattttaaacaaaaagattatgtagtatcaggaattagacgcctgaaagattattgccagggctgaagcagccgaccccagactgtgcctcctagaacaactttcagaacagcacaccagaactggcccaataggggagctgctaccaaggtgggtaaatctgaagctgatgaattaaaaatccatgtggccatagccatagctggattcaggcatctgctaccaccaccaacactgccaccacatcattgcccctgacacctacaaggctggtgacagagcactggaagtctgctattgagaaacataacgtctgtacagccatgcttgctgctggttccagggatggctctgagcaagaccctgaggtaggacaagcttagctgcttggttctccagtagatacttaatagtcaaagctgcaggaagagagcctttgtctcacttgagtcaggcacatc

SEQ ID NO: 456307 - DNA, 547 bp, Homo sapiens
gctctcagctgtttgtacttccaaacccccacccccgccccccgttttaaaagcgttcaggtataggaaacagaacccattataccaattttaaacaaaaagattatgtagtatcaggaattagacgcctgaaagattattgccagggctgaagcagccgaccccagactgtgcctcctagaacaactttcagaacagyacaccagaactggcccaataggggagctgctaccaaggtgggtaaatctgaagctgatgaattaaaaatccatgtggccatagccatagctggattcaggcatctgctaccaccaccaacactgccaccacatcattgcccctgacacctacaaggctggtgacagagcactggaagtctgctattgagaaacataacgtctgtacagccatgcttgctgctggttccagggatggctctgagcaagaccctgaggtaggacaagcttagctgcttggttctccagtagatacttaatagtcaaagctgcaggaagagagcctttgtctcacttgagtcaggcacatc

SEQ ID NO: 456308 - DNA, 598 bp, Homo sapiens
tccaacagtttaggctgccttagtttgacaaatacaattcctcacatgaagctgctacattgcatgcccaaactctttctcagacacatggtcatttgtgttccatggacatggaactagcatttgaaggctgttactataaagctcaaatgcacaagcctctttactgcaggttaaattggccccacagtgatagatctccacaggctctgcctggatgccacttgctttcctgtagcamtgagcagagacatgatactgggattcagtccttaaaagtaaaaaccttataataaatatgtaagttcctcttgatgaaatatgtagtaagcaaaggctgctttttttacagtctcagcaatgtaccacaatgtagcagtctctcattgtgaggtatcaccccaagttctttgtctcacaaccaagagaattaaggagcatgaacacaaaggatgaagttggagtgaaagtttaataagcgaaagaagaaagctctccacagcagagaggggtcccgaatgggttgccatttttatagttgaatataaagccttttataagaaactgataagggctaggcctctcatgtacataaggc

SEQ ID NO: 456309 - DNA, 598 bp, Homo sapiens
tccaacagtttaggctgccttagtttgacaaatacaattcctcacatgaagctgctacattgcatgcccaaactctttctcagacacatggtcatttgtgttccatggacatggaactagcatttgaaggctgttactataaagctcaaatgcacaagcctctttactgcaggttaaattggccccacagtgatagatctccacaggctctgcctggatgccacttgctttcctgtagcaatgagcagagacatgatactgggattcagtccttaaaagtaaaaaccttataataaatatgtaagttcctcttgatgaaatatgtagtaagcaaaggctgcttttkttacagtctcagcaatgtaccacaatgtagcagtctctcattgtgaggtatcaccccaagttctttgtctcacaaccaagagaattaaggagcatgaacacaaaggatgaagttggagtgaaagtttaataagcgaaagaagaaagctctccacagcagagaggggtcccgaatgggttgccatttttatagttgaatataaagccttttataagaaactgataagggctaggcctctcatgtacataaggc

SEQ ID NO: 456310 - DNA, 531 bp, Homo sapiens
acatggttactattctcgggaaatctcttctgccccctgtcttttaccaagctaattttcatgcattcttcagatctyagctcaaccaaggaaacccttcctgactctccctcaccttctttgtaatgtcttctgtaatatactgtcactgctccatgtgcttttaaatcccagcctgtctctgtctttaattgcacatcatccatgagactatttgattagtgtctcccttacaagactgaaagctccaggtcggcaggaaccacatgtctgttatgtcccttacaccacgcacaggcattccgtaaatatctattgcttatggaatgaatgaacgaaggtgtgaatccaaagtgagtaacagagcagcaagttccagccttgaggcccaggactgcatttctcagtttcatgaacccaatacactggggagagcctgttgtgaaccacacagcaccctcttctttctccagaagatacattttctttttaacagaatatacattttcttcatgtttcacattccacacc

SEQ ID NO: 456311 - DNA, 390 bp, Homo sapiens
atactctgttgcccatttctcattctcaagccatatggttcagttttgttctcatttcaggacctacccatcagcaagcctrctacaaatgaacctcaccttagggaaaaatatatactcttcaaaaatagagagacagaatgtaattttgtaaatggaattctattttgaaattatcagtgggtttctgagtttactggcaaaacagaagggataagaatttgaaatagggataaccaacctctagttgaccttatacatggaaactgtatcccagttattttataataggctgtgtccttggttgtggttatccagacaattctgctttggcctccaaaattatcaggtagaggagcacaaggaatagcgtttagtctaaattatctc

SEQ ID NO: 456312 - DNA, 215 bp, Homo sapiens
ggaggtaagcaagtaagcaagttttgyaaccccttctatgaaatgtgctgccagtggtgactacttttctagaagaaatctctggagtggccctcataactcaaactccggccagtgatctatctttagaaagccatcccacttctgtgtataaaagatgtgtgtgctctatgtccatctcacagagctgtgtgaacagatgtgagttaagggca

SEQ ID NO: 456313 - DNA, 545 bp, Homo sapiens
ctacttgtatacacacattcaaggatgatgagtctacccataagaggtcaggaaaagccctgtgtaaccacccccatgtggacacacagggaagtagcattggctgcaggagccagaactcagactggggagaacatgacaggaaagaacgagcgcattccccacacacaaaagtgtggaagaaccataacccaaaacacagtctgagaaatattaaatcatacgttaaaaaaaattccttggattacataattttgacatttctgggtagaatagctcttgccagctttttcttcaagtacttgtgaaaaataacacaggacccaaaaaagcgacaacgattaatgaggctccactgagaagtggctcattttcattgcttgggtgaaacaatttaattcctggaagtggatcaagcaactgttamtaagtatcttaaactcttaataaaaataatgactattaaaaaaacatactttatggctacagctgctgagtggtgggtgaaaatcctcttcttccacatacttcctcttaaagtatgt

SEQ ID NO: 456314 - DNA, 587 bp, Homo sapiens
aaaatacataaaatcaaaaggagcaaattaagcataaaattgagaaataacatgagactaagttatcagcatgggtgcactggcatctttggagctttggctcggagaaatgagccttctgggaaactggcattgcccttgggtggagaagactcttggctttaatgttacaacaaaatggtatcacaagtatcaaatcattgtacttcacagcatccttgcagttctgagtatgaactagaccctgtcctcatcagatacattaggttagcatgttttactgacagctttccctgccctacctttaatcytaagcttaatgttttttgagattcaatacccaactgttgacaacatgaacctgtgtctacaagtacaagaggcagacaaatgtctatggaatgagaaacctcattacaaatttaaggtgactatgtggtagctatggcatgaaaaaagaaccaactataaatcaataatgaaaaatttggaatgagtaattgttatttataatgaggtacaatatttaattgacaactatgatgtcatcattttggggtgtgtgtgtgtgtgtatgtgtgtgtgtg

SEQ ID NO: 456315 - DNA, 618 bp, Homo sapiens
tacacatcctgcacacacaggcaagctctgcacacacatgcacagaattcatctctgacaatttaattgtttaatggtaggactaacaaggaatcctttctaaagtaatggcatacaaaggcttcctagtgaagttaatattcctgctgcatttgatgggtgtttcccatttgtgcagttctgccctaccagactccttgtgtttgatggtggggagacaggaggggcggtagtgtctgtattcaacagcagaatctggagaatgccttagcctgtgaccttagccattaaagcgataaatctgaggccacgattggcaccagagcaattcctcacatcggttgtaatgtcytggcttgcactcctaggatctggacttcctgaactgcagaatattctgagtacaaagtccttgcttgcctcactgtctgttttctcttagttcactagaatcgaggtttggcagccatttgtgctgaggctgctgcaggacctcagtttgaccagccttctagataatggtatgcatgatgcctctgatgctatggtttacactttcatcctgagctaaagtctcttatcatatttccttatggttcaccttgcttacatctgcat

SEQ ID NO: 456316 - DNA, 573 bp, Homo sapiens
tatcatatttccttatggttcaccttgcttacatctgcattttaattgaatcaaataactaagaataactgtctcaagaaccataaagttctcagagcaaagcctaacgtgttctcattttgtagtttccactctcaaatcaatacattttacatttttaactcaggttaccaggctttgaggggaaaartttcattgcctccatcagagaaacccagtggatgagctttgaccacagcagaaagttgctttgctcaggagtacggttttctttgggttgtggatttactcttgccatgctgtgttggctcagctcgtggaagcgtgatctgtgtctttcagtctaggaaaaggcttagtaggcagagtggaaaatgacagactatttttaacacagctttctatcccacagttctgggtcttacttctattatcattacttattcatagactttcattcccaaatatcattaccctttacagtaataggatcagcaaagcaaccacttaaaacaaaacaaacaaacgcaggaatccaagtcctgtacacagaaacattttctccactcttgc

SEQ ID NO: 456317 - DNA, 573 bp, Homo sapiens
tatcatatttccttatggttcaccttgcttacatctgcattttaattgaatcaaataactaagaataactgtctcaagaaccataaagttctcagagcaaagcctaacgtgttctcattttgtagtttccactctcaaatcaatacattttacatttttaactcaggttaccaggctttgaggggaaaaatttcattgcctccatcagagaaacccagtggatgagctttgaccacagcagaaagttgctttgctcaggagtacggttttctttgggttgtggatttactcytgccatgctgtgttggctcagctcgtggaagcgtgatctgtgtctttcagtctaggaaaaggcttagtaggcagagtggaaaatgacagactatttttaacacagctttctatcccacagttctgggtcttacttctattatcattacttattcatagactttcattcccaaatatcattaccctttacagtaataggatcagcaaagcaaccacttaaaacaaaacaaacaaacgcaggaatccaagtcctgtacacagaaacattttctccactcttgc

SEQ ID NO: 456318 - DNA, 573 bp, Homo sapiens
tatcatatttccttatggttcaccttgcttacatctgcattttaattgaatcaaataactaagaataactgtctcaagaaccataaagttctcagagcaaagcctaacgtgttctcattttgtagtttccactctcaaatcaatacattttacatttttaactcaggttaccaggctttgaggggaaaaatttcattgcctccatcagagaaacccagtggatgagctttgaccacagcagaaagttgctttgctcaggagtacggttttctttgggttgtggatttactcttgccatgctgtgttggctcagctcgtggaagcgtgatctgtgtctttcagtctaggaaaaggcttagtaggcagagtggaaaatgacagactatttttaacacagctttctatcccacagttctgggtcttacttctattatcatyacttattcatagactttcattcccaaatatcattaccctttacagtaataggatcagcaaagcaaccacttaaaacaaaacaaacaaacgcaggaatccaagtcctgtacacagaaacattttctccactcttgc

SEQ ID NO: 456319 - DNA, 573 bp, Homo sapiens
cacgatgactgaagcctgtaatggtagcactttgggagactgaggcaggcagattgcctgagctcaggagttagagaccagcctgggcaacatggtgaaacccagtctctactaaaatacaaaaattagccgggcatggtggcaggcgcctgtaatcccagctactcaggatgctgaggcacgagaattgcttgaacccgggaggaggaggttgcagtgagccaagattgtgctactgcactccagcctgggcgactaagcaaaactctgtctcaaaataaaaaaasaaggagggaaggaagaaaagaaggaaggaaggaaggaaggaaggaaggaaggaaggaaggaaggaaggaaagaaggcaggcaggcaggcaggcaggcaggcagttcaacaccaacaaaagttacaaaaagaaaaattagataattgtccacaccatgcatgtaaactcacactgattgaagtggcaacatttggtttgaatatttgaatattttttcagcttttcttaaggcatactcatgtatcagaattacctaggatgtttccaaaaaatgtggatttctgag

SEQ ID NO: 456320 - DNA, 573 bp, Homo sapiens
cacgatgactgaagcctgtaatggtagcactttgggagactgaggcaggcagattgcctgagctcaggagttagagaccagcctgggcaacatggtgaaacccagtctctactaaaatacaaaaattagccgggcatggtggcaggcgcctgtaatcccagctactcaggatgctgaggcacgagaattgcttgaacccgggaggaggaggttgcagtgagccaagattgtgctactgcactccagcctgggcgactaagcaaaactctgtctcaaaataaaaaaacaaggarggaaggaagaaaagaaggaaggaaggaaggaaggaaggaaggaaggaaggaaggaaggaaggaaagaaggcaggcaggcaggcaggcaggcaggcagttcaacaccaacaaaagttacaaaaagaaaaattagataattgtccacaccatgcatgtaaactcacactgattgaagtggcaacatttggtttgaatatttgaatattttttcagcttttcttaaggcatactcatgtatcagaattacctaggatgtttccaaaaaatgtggatttctgag

SEQ ID NO: 456321 - DNA, 573 bp, Homo sapiens
cacgatgactgaagcctgtaatggtagcactttgggagactgaggcaggcagattgcctgagctcaggagttagagaccagcctgggcaacatggtgaaacccagtctctactaaaatacaaaaattagccgggcatggtggcaggcgcctgtaatcccagctactcaggatgctgaggcacgagaattgcttgaacccgggaggaggaggttgcagtgagccaagattgtgctactgcactccagcctgggcgactaagcaaaactctgtctcaaaataaaaaaacaaggagggaaggaagaaaagaaggaaggaaggaaggaaggaaggaaggaaggaaggaaggaaggaaggaargaaggcaggcaggcaggcaggcaggcaggcagttcaacaccaacaaaagttacaaaaagaaaaattagataattgtccacaccatgcatgtaaactcacactgattgaagtggcaacatttggtttgaatatttgaatattttttcagcttttcttaaggcatactcatgtatcagaattacctaggatgtttccaaaaaatgtggatttctgag

SEQ ID NO: 456322 - DNA, 573 bp, Homo sapiens
cacgatgactgaagcctgtaatggtagcactttgggagactgaggcaggcagattgcctgagctcaggagttagagaccagcctgggcaacatggtgaaacccagtctctactaaaatacaaaaattagccgggcatggtggcaggcgcctgtaatcccagctactcaggatgctgaggcacgagaattgcttgaacccgggaggaggaggttgcagtgagccaagattgtgctactgcactccagcctgggcgactaagcaaaactctgtctcaaaataaaaaaacaaggagggaaggaagaaaagaaggaaggaaggaaggaaggaaggaaggaaggaaggaaggaaggaaggaaagmaggcaggcaggcaggcaggcaggcaggcagttcaacaccaacaaaagttacaaaaagaaaaattagataattgtccacaccatgcatgtaaactcacactgattgaagtggcaacatttggtttgaatatttgaatattttttcagcttttcttaaggcatactcatgtatcagaattacctaggatgtttccaaaaaatgtggatttctgag

SEQ ID NO: 456323 - DNA, 481 bp, Homo sapiens
aatccactgccaaccttctcagagaagcaaggcctcctggagccatgcagcaagggactggcagaacagggttctactaggttctccgagccgcacctgacctgcgtggagccacctctgcccacggccctggagtgtgtcagtgtgcacgggtcccacaaatcctggcacacataacggtaaagacaatagcaagcgtgggtgccgtgctcactctcagactgaggccaggatgtttccggatsattctctgtctttgagagcatttccctgaccctattctagtccccacacagacagttccaaggcctgagaaataagctgagttctgagctcagccgcgatcccgttcatggtaagtgaaagtgaaatgtgatcattccacagaattagagactggaaagagcttctgattttggaagaacaattttgtaaaatggatttgtatgcataacatccattgcagttggtgacggtggag

SEQ ID NO: 456324 - DNA, 612 bp, Homo sapiens
  misc_feature (1)...(612): n = A,T,C or G
tttgcacccctacatgtaattcataaccccttcctactcacatgcatacatacttcctatccccttttcctgacctgcttttttcctttagcatttataattgtcaaattctatatttttttcttatttacattgatctttgtctgtctacctctttagaatataagcccygtatgggcagagacttttgtttgtttttgttccttgctgtattctcagtacctgggacagagcctgccaaacagccacataataaatgctcagcgtatattggctgaatgaattaagaaaactagaggtgtagtacacatctgtgtagagcagattctgactatgactgaagttaattttaattttagattacactgtcaataaaattgagatccttgataccacatatatatgcatatgtgtatatatctatgtatgtgtgcatgtaagctagaaggggttaggaattatatgtagggttacaaagaagacctcgctgacaaggtgatattttgaatcaaggtctgtagaaagcaaggggttgagttctggttctattgtgtgttgtgtgtatgtggtgtgtgtgtgtgtgactgtgtgtgtnnnnnnnnnnnnnnnnnn

SEQ ID NO: 456325 - DNA, 612 bp, Homo sapiens
  misc_feature (1)...(612): n = A,T,C or G
tttgcacccctacatgtaattcataaccccttcctactcacatgcatacatacttcctatccccttttcctgacctgcttttttcctttagcatttataattgtcaaattctatatttttttcttatttacattgatctttgtctgtctacctctttagaatataagccctgtatgggcagagacttttgtttgtttttgttccttgctgtattctcagtacctgggacagagcctgccaaacagccacataataaatgctcagcgtatattggctgaatgaattaagaaaactagaggtgtagtacacatctgtgtagagcagattctgactatgactgaagttaattttaattttagattacactgtcaataaaattgagatccttgataccacatatatatgcatatgtgtatatatctatgtatgtgtgcatgtaagctagaaggggttaggaattatatgtagggttacaaagaagacctcgctgacaaggtgatattttgaatcaaggtctgtagaaagcaaggggttgagttctggttctaytgtgtgttgtgtgtatgtggtgtgtgtgtgtgtgactgtgtgtgtnnnnnnnnnnnnnnnnnn

SEQ ID NO: 456326 - DNA, 490 bp, Homo sapiens
tagaagtgatagcattccgtatgtggactggatcattcaaaagagacaaatgtttgtagacagatgcagagatgtgctgagaataaagacaagagaaagaaagaatattatattcttctggcagacaaaagacaaatgattctaattttgattctgccataaacttgtgctgtgttctgggacaagtctgagcttccatttttatgcctaaaattaaggaattttagtagatcaacagttttaattttttttagacatagaatcatttcatcaataaaacatatacccaaaaaagcaaattagtttcaggaagcatgacaactttgaccaattcacagtgactctctggggcctaatgtggagaaggattttacaatgagagaaatctgtgattgattagcaatgtctgccagggtcacaaaaagcagacaggcytccctgtgaagaccatcctgtccagaagacaaatatgataagcagatatagagga

SEQ ID NO: 456327 - DNA, 618 bp, Homo sapiens
tgggcataatgacagagctgctcattgtaaaacattgaccaatgctggaggcagcctaattctatcaaattcctcataagctgaattgtcagaattgaggagttaaagcccagtttctgttcttccttaacgggggtcttcacaatatacattgtttgtgcacagtatttagatataaatgaggactggataagcataaccatggattttaattcagctgattttggcctttggaagtaactactcagttttaacatctagagtgwctatcagatgaagatgaagaaggaatcagcgttctaagaattgtcccccaactccagtcaattattcaattgtaaaggatttattgctagggaatgccaagcataatccagaggaaacacaggcaaaatttacacagcctggtcagtatgaccagtgctggccttgggggactcccaacccagaagccaatttataagctgggtgctcagaggaacctctccctgctagctgaagagttaaaagtcgggagacatgcaagacccccagtgtactgtggaagaagtggcttcagtgacctgaagccttaattgaagtcagaagatgtctctcctcaacccagcccgccctgca

SEQ ID NO: 456328 - DNA, 635 bp, Homo sapiens
ccaacctcagaatctcctggcaagcttataaaamagcagattctcgattccaatttcagaccttctgaataagaacttttaaggtcacggcacagcaatctcaattagagtcaagctccccaggtgattcttatagacatcagagtttgagagccattaaagcagcatatttgactccatctcctgacccttctgaataataaaagaatttagtgtatgttgaatgcaaagaacttgtgaataaaaaaagctttttacacagatgaataacaacaatcattctggaggaatccccaaaaggaggataaagtggccttgtgaaaatattgatgattgtattgattccttcaaaatcaacctttggctgagaaagacttcactagtccttctctttggatttttccaacagcttgattaagccagccccactcatctaaaactgaggtctccacgagcatggggttttggggtacaggtgagggttggggttctggggctggaggagggggcacatgcacatgggtgtggcagccagcaggtagggtgtggcccagagaaggtggcgacatgaacttccagatctagaagctaaagctactcccatcccaactggaaagtggagacagaagaccatg

SEQ ID NO: 456329 - DNA, 635 bp, Homo sapiens
ccaacctcagaatctcctggcaagcttataaaacagcagattctcgattccaatttcagaccttctgaataagaacttttaaggtcacggcacagcaatctcaattagagtcaagctccccaggtgattcttatagacatcagagtttgagagccattaaagcagcatatttgactccatctcctgacccttctgaataataaaagaatttagtgtatgttgaatgcaaagaacttgtgaataaaaaaagctttttacacagatgaataacaacaatcattctggaggaatccccaaaaggaggataaagtggccttgtgaaaatattgatgattgtattgattccttcaaaatcaacctttggctgagaaagacttcactagtccttctctttggrtttttccaacagcttgattaagccagccccactcatctaaaactgaggtctccacgagcatggggttttggggtacaggtgagggttggggttctggggctggaggagggggcacatgcacatgggtgtggcagccagcaggtagggtgtggcccagagaaggtggcgacatgaacttccagatctagaagctaaagctactcccatcccaactggaaagtggagacagaagaccatg

SEQ ID NO: 456330 - DNA, 527 bp, Homo sapiens
ataatgaaggccgggcctggtggctcacgcctgtratcctagcagtttgggaggccaaggtgggtggattgcctgagctcaggagttccagaccagcctgggcaacacagtgaaaccctgtctctactaaaatacaaaaaattagccaggcatggtggtgtgtgcctgtagtcctagctactcgggaggctgaggcaggagaattgttgaacctgggaggggaggttgcagtgagctataattgcgccactgcactccagtccagcctggatgacagagcaagactctgtctctaaaacaaaaaaagaagaagaagaataatgagaataaaggtagagcagaaagggtgaaaaagaattggtggagaagataaagcccagagggtgaacaaaaagcaaagggcagactgcaaggatcggactatgcttcccagccatctagccctaggaaatcctattagacagcaaaaaatgagattattgtatttttactttgccacagtatgcaaatgactccatttagctgtt

SEQ ID NO: 456331 - DNA, 527 bp, Homo sapiens
ataatgaaggccgggcctggtggctcacgcctgtgatcctagcagtttgggaggccaaggtgggtggattgcctgagctcaggagttccagaccagcctgggcaacacagtgaaaccctgtctctactaaaatacaaaaaattagccaggcatggtggtgtgtgcctgtagtcctagctactcgggaggctgaggcaggagaattgttgaacctgggaggggaggttgcagtgagctataattgcgccactgcactccagyccagcctggatgacagagcaagactctgtctctaaaacaaaaaaagaagaagaagaataatgagaataaaggtagagcagaaagggtgaaaaagaattggtggagaagataaagcccagagggtgaacaaaaagcaaagggcagactgcaaggatcggactatgcttcccagccatctagccctaggaaatcctattagacagcaaaaaatgagattattgtatttttactttgccacagtatgcaaatgactccatttagctgtt

SEQ ID NO: 456332 - DNA, 568 bp, Homo sapiens
tgcatcctccatgcacccccttgcattttccttgtgtgcttttcccaccctcgttggagctggcattatgccagtggaatgccaaagaccaaggtcctgaaagattgcatattatgacttaagaggctatgacactgaggacattctcttgctcaatctttctcacaccatggagatgctgaataagatgattacacaaatattttccaagttaaaattggatttgaggcttcatgggactcatgcgccaagtgcagcctgtcctctttctcatcacttcacagtcccragtcattctcagcaatttaagtaaacacctaaatgtcatcccaaggagaattgctcaagaatttttattagtttggatgaattcttccttccttcctttctctctcttgttttaacttcttcaaaatttaatacacattctctgtcctggtttagtctttccactttccactgggcaataacagaaaacagcttgcattgtacactttgtttaaaaaattgtttccaatgaagcaccaggagggaacattaggagtctgaggtccaatgactgcagttg

SEQ ID NO: 456333 - DNA, 579 bp, Homo sapiens
tctccagggaggacaagaaatggggatgagaaaatgagttgcaggaagagggggctccaatggaaggaagagcatcttgcctagaaggtaaattggtcctaggagggcagcaaccaagactgctggggaagccatctctggaaattcttaaatgtaggcatgaccaacacacagcctggatctcttaggtggtaatctgctgcaaaaaaggaactgagaccaaagtaaataattcccatgggtgtttatagaagagactctcaaagatgttctgcacattggtatatgcacatgacataaattaaacctgggttaatacacagagaagtatgtgtggtcaagaacgtgtgcacacacacctttctctttatgctttgggttcaagggagctcaagagaacaatatcaggtacagaagctattggcaggcacatgtgaagtctcttaagctaacaaggtgggaaaaacrgagaactggaagacttggctaggagcggttcaaagggggaattagaccattgtgtgagttcttgttgtggaaatcaagcaccaccagaatttagccctggaatgggagctg

SEQ ID NO: 456334 - DNA, 583 bp, Homo sapiens
tagctcttttcccgccacatcagttttaggcctctcttatgatacaagtgattcagattacaaggtaacctcagtgcaacacaagggaagaaataaatcctctctgttattgagtgctgggtctagtgtttaattttctttcttttcttttctttttcttgagacagagtctcgcactgtggcctgggctggagtgcagtggcgcgatctcggctccctgcaacctccacctcccaggttcaagcgattcttctgcctcagcctcccgagcagctaggattacaagcgcccaccaccacgcctggctaattttttggatttttagtagagacggggtttcactatgtaggccaggctgttcttgaactcctgacctcatgatcctccagccttggcctcccaaagtgctgggattataggtgtgagccaccgcacccagcctagtgtttaattttcaatttaatttttggcactatttttttttaagttgctcatcttaggacagtataactggaatgagccttgtgtttccagttacaaaaacaagacagaacaaaggatraggctagatttttgtattatt

SEQ ID NO: 456335 - DNA, 595 bp, Homo sapiens
  misc_feature (1)...(595): n = A,T,C or G
gttaaatttagttttaactgagaatgatgtcagcaatctacttgtattcaacaagggaaacctttcttgcctacatttaaattttggttatctgaaaattcgnnnnnccttcatttttgttagtgggccctaaggtaagtctcaaagaaagggcagkgctcactgagatttctcatgcaagaatggcctgctctccttatgcaacatgatattcctggctgagttcttatgaatagtacattagtggcaaaaggccagatgtatatcaaagtttgagaaccatggcatacatatagtattcaaggcactggtacccctctggctctgcagcttcacctcatgctctttcgaaaccaggaagactaagccagatgccattcctcaaatgtctcaaatagcaagcgcctcctaccactttgctcaagctgtcccctctgcctgtagtgccctctacccaactcctctcccctacttaaaataacctcttctcatcctttaagatacagtttaggtctaacccctgcagaaaagtttccctatcctcacagactgggtctaaaacccagcttcacgttgtcagctccgtggttctccc

SEQ ID NO: 456336 - DNA, 415 bp, Homo sapiens
ttttccttaactcaaaaattaatcccttcctttgaaaaaaaaaacttatttataaatgaggacaggcagctttaactgygacaataactattctaactcaccacaaattcaacggaagcctgcttttttcaccttaaattcaatggattttattatcccctttctggctatcttcaaataagagaaaagcagacacaatacaacacattctctcataaattctaaaattcattccgtgacttgggactgaatactggcttgcacaattttgcctggccaagccaggacatgggaataccatgtggacaggtgaacttttttgcctactcaaatgctctgccctgagacatgatggagaaggggcaagattatgttctcctgaaatccttcaccaacatttttttccaatagtgag

SEQ ID NO: 456337 - DNA, 562 bp, Homo sapiens
attccgtggctgtccattccattccgtttgatgccattccatacgattccattcaattcgagaccattctattcctgtccattccttgtggttcgattccatttcactctagtccattccattccattcaattccattcgactctattccrttccattcaattccattccattcgattccatttttttcgagaaccttccattacactcccttccattccagtgcattccattccagtctcttcagttcgattccattccattcgtttcgattcctttccattccagcccattccattccattccattcctttcctttccgtttcattagattccattgcattccattccattcaattcaattccgtgctattcaatttgattcatttccatttaattccattccattagattccattccgtacgattccattccttttgaatccattccattggagtccattcacttccagaacattccattccagtcgaatccattcgagtacattccattaaagttcattacattctaatacattccattccattgcattccattccat

SEQ ID NO: 456338 - DNA, 562 bp, Homo sapiens
attccgtggctgtccattccattccgtttgatgccattccatacgattccattcaattcgagaccattctattcctgtccattccttgtggttcgattccatttcactctagtccattccattccattcaattccattcgactctattccgttccattcaattccattccattcgattccatttwtttcgagaaccttccattacactcccttccattccagtgcattccattccagtctcttcagttcgattccattccattcgtttcgattcctttccattccagcccattccattccattccattcctttcctttccgtttcattagattccattgcattccattccattcaattcaattccgtgctattcaatttgattcatttccatttaattccattccattagattccattccgtacgattccattccttttgaatccattccattggagtccattcacttccagaacattccattccagtcgaatccattcgagtacattccattaaagttcattacattctaatacattccattccattgcattccattccat

SEQ ID NO: 456339 - DNA, 562 bp, Homo sapiens
attccgtggctgtccattccattccgtttgatgccattccatacgattccattcaattcgagaccattctattcctgtccattccttgtggttcgattccatttcactctagtccattccattccattcaattccattcgactctattccgttccattcaattccattccattcgattccatttttttcgagaaccttccattacactcccttccattccagtgcattccattccagtctcttcagttcgattccattccattcgtttcgattcctttccattccagcccattccattccattccattcctttcctttccgtttcattagattscattgcattccattccattcaattcaattccgtgctattcaatttgattcatttccatttaattccattccattagattccattccgtacgattccattccttttgaatccattccattggagtccattcacttccagaacattccattccagtcgaatccattcgagtacattccattaaagttcattacattctaatacattccattccattgcattccattccat

SEQ ID NO: 456340 - DNA, 562 bp, Homo sapiens
attccgtggctgtccattccattccgtttgatgccattccatacgattccattcaattcgagaccattctattcctgtccattccttgtggttcgattccatttcactctagtccattccattccattcaattccattcgactctattccgttccattcaattccattccattcgattccatttttttcgagaaccttccattacactcccttccattccagtgcattccattccagtctcttcagttcgattccattccattcgtttcgattcctttccattccagcccattccattccattccattcctttcctttccgtttcattagattccattgcattcsattccattcaattcaattccgtgctattcaatttgattcatttccatttaattccattccattagattccattccgtacgattccattccttttgaatccattccattggagtccattcacttccagaacattccattccagtcgaatccattcgagtacattccattaaagttcattacattctaatacattccattccattgcattccattccat

SEQ ID NO: 456341 - DNA, 570 bp, Homo sapiens
aattccattccattcgatttagttcgattctattcacttccattccattcgattccattccattggagtcaattcctttcgacacccagcctttccagtcaatgattttggattccatttttttgcattccattacattctatgacattcgattccgtttcattgcattccattccatacatttttattccattcgagaccgtagcattccactttattccaggcctgtccattacactacattyccttgcattccaatgaattccattccattccaatccattcctttcctttcgcttgcattccattctattctcttctactgcatacaatttcactccattcgtttccattctattcaattccattccattcaattccattccatttgtttccattctcttcgattccatttctttatattccatgccattcgattccattctattggattgcattacattcgtgttcattccattccagaccattccatttgactccattcctttcgagccctttcaatttgagtccattcctttccagtccatttcactccaggccattactatc

SEQ ID NO: 456342 - DNA, 547 bp, Homo sapiens
tgctattcaatttgattcatttccatttaattccattccattagattccattccgtacgattccattccttttgaatccattccattggagtccattcacttccagaacattccattccagtcgaatccattcgagtacattccattaaagttcattacattctaatacattccattccattgcattccattccattccattcgatgccattcgattccattccatgccaaatcattgcattcctttccattccgttcctatcaattccattccattcgatttagttcgattctattcacttccattccattcgattccattccattggagtcaattcctttcgacacccagcctttccagtcaatgattttggattccatttttttgcattccattacattctatgacattcgattccgtttcattgcattccattccatacatttttattccattcgagaccgtagcattccactttattccaggcctgtccattacactacattcccttgcattccaatgaattscattccattccaatccatt

SEQ ID NO: 456343 - DNA, 539 bp, Homo sapiens
cattccaatccattcctttcctttcgcttgcattccattctattctcttctactgcatacaatttcactccattcgtttccattctattcaattccattccattcaattccattccatttgtttccattctcttcgattccatttctttatattccatgccattcgaytccattctattggattgcattacattcgtgttcattccattccagaccattccatttgactccattcctttcgagccctttcaatttgagtccattcctttccagtccatttcactccaggccattactatccattccataccattccatcccattccattccattccattccattccattccattccattccattgcattccattccattccattccattgcactgcactccattccattacattctactctatctgagtcgattttattgcattagattctattccattggattactttccattcgattacattccattcatgtacattccattccagtcaattacattcgagttcattacattacatt

SEQ ID NO: 456344 - DNA, 539 bp, Homo sapiens
cattccaatccattcctttcctttcgcttgcattccattctattctcttctactgcatacaatttcactccattcgtttccattctattcaattccattccattcaattccattccatttgtttccattctcttcgattccatttctttatattccatgccattcgattccattctattggattgcattacattcgtgttcattccattccagaccattccatttgactccattcctttcgagccctttcaatttgagtccattcctttccagtccatttcactccaggccattactatccattccataccattccatcccattccattccattccattccattccattccattccattccattgcattccattccattccattccattgcactgcactccattccattacattctactctatctgagtcgattttattgcattasattctattccattggattactttccattcgattacattccattcatgtacattccattccagtcaattacattcgagttcattacattacatt

SEQ ID NO: 456345 - DNA, 523 bp, Homo sapiens
ctactctatctgagtcgattttattgcattagattctattccattggattactttccattcgattacattccattcatgtacattccattccagtcaattacattcgagttcattacattacattgcagtatattccattgaattcgatcccattcctttcaattccatttcattcgactccattatattcgattccattccactcgaatccattccattagaggacattccattccaatgcattccattccattccatagcattccattgcattcgatkccattccatttgatgccattccatttgatgccattccatgacattccattccattcgagtccattccgttccaattcattccattccgtttcatgaaattcgagtcctttccagtacatttcattccaatcccatccaatccaatctactccattcaattcctttccattccatttgatttgattccattgatttgattccattcagtttgattccattccgtgaaatttcgttccattctat

SEQ ID NO: 456346 - DNA, 563 bp, Homo sapiens
ttcgatcccattcctttcaattccatttcattcgactccattatattcgattccattccactcgaatccattccattagaggacattccattccaatgcattccattccattccatagcattccattgcattcgattccattccatttgatgccattccatttgatgccattccatgacattccattccattcgagtccattccgttccaattcattccattccgtttcatgaaattcgagtcctttccagtacatttcattccaatcccatccaatccaatctactccattcaattcctttccattccatttgatttgattccattgatttgattccattcagtttgattccattccgtgaaatttcgttccattctmttccattgcattactttccattcaattccattccatttcatttcagtccattcgcttcctttcctttcgattcaattccatttgattcccccccaatatatgcgatttcattccaatcgattcaattccattcgatgacattcctttcgtttccattccattcgagtccattcaatttcagcat

SEQ ID NO: 456347 - DNA, 563 bp, Homo sapiens
ttcgatcccattcctttcaattccatttcattcgactccattatattcgattccattccactcgaatccattccattagaggacattccattccaatgcattccattccattccatagcattccattgcattcgattccattccatttgatgccattccatttgatgccattccatgacattccattccattcgagtccattccgttccaattcattccattccgtttcatgaaattcgagtcctttccagtacatttcattccaatcccatccaatccaatctactccattcaattcctttccattccatttgatttgattccattgatttgattccattcagtttgattccattccgtgaaatttcgttccattctattccattgcattactttccattcaattccattccatttcatttcagtccattcgcttcctttcctttcgattcaattccatttgattcccccccaatatatgcgatttcattccaatcgattcaattccattcgatgacattcctttcgtttccattccattcgagtccattcaatttsagcat

SEQ ID NO: 456348 - DNA, 518 bp, Homo sapiens
aaaatagataaagccgaactgtgtgggggggctctggtaattggaagagtcaatggctatatgattcaagaaaatagtctccctcgagaaggagactgattgtcctgcatttatacagcagctaaccaacactaagcagactttcctttgcatattattggtgccaggccgatgaggcagaaaattgcatcgtgtcatttaatttcccaatctttgttttcattgtattaatcttttggctttgtttcactttataatttgaaggctcagcaagaagcaaaccaaatggaaattcagcttactttcatgtctagctgaatgtgtttggtgcagtttccaaaagtttaattctacgtaatactgtccatgaataataataggctgcttctgcakgcagacttattagtgtttattaagggttgccttaaagtttctgggaaatgtgcccaaaagtcagtcaccaaaacgtgattaacaaattggttacagaaggagaacagataattttttaaaacaga

SEQ ID NO: 456349 - DNA, 567 bp, Homo sapiens
aaaatattgattttaatactcagccacttagtatttggacgaaatatgtatttggtgctctttactaggaatgtaactaattcaatttatacctattgaggtagaatttatagaagctcaactttcaaatgctacctgtcaacagactgggtcttaagttgtgggtttcctgtatctataatccatacaaaaaactctcaaagggaatctgacagactatgaaactgggtctcagagacattaggtgttttactcaaagacactccttggtaaatgacagattcacatacaaatctattaaatttcaaagattgcattctttttcattacactgcatccatcttctacatatctctattgttgcttataagtattaattgtattrtaaatattgtaagcattgttaatagttactatattaactgtattataactattgttaatatgtctgcattttctgctaaactcaagatgagaaccgtatcttactcatctagatatacccagtatctagcacagtgtctggcatatagtagatactgattaaattgttgaataaataatgta

SEQ ID NO: 456350 - DNA, 576 bp, Homo sapiens
cgaaactgatgttttgctgtatagaaaaccattagctcaaatgttttttaaacatataaagcctcctttggtatttgtctacccaatcatatctaaaacattgataaggccaagaaaatggtttgggaggataatataataatactaatgatagtactaccactactaataatactaacctcacttttgcatatataatatttctgatcattgtaattcagatcagattgtgtgtgtcatagtaaacagaaatataagaggaaaaataggatggaggattgggataaaattaaataatttctttatccatcccttcagcaacaatrataccacacattctgttgtagcttttgtagaagtaagagccatttgtgatttagttcacagtaggaaattagaaatggtgattccagaagcctcaatacttacttcttaaaatacttctcaatttatttttatcacaataaaatttgcctagagataattttttatttctaggatcaccaaatgtttttgtggggaatttattttattgttccaagttgacacaagaggaaaaattctggatgtgaaaat

SEQ ID NO: 456351 - DNA, 529 bp, Homo sapiens
cacacctctattggtgctttggcatcatttttacctggggattccaaccttttaaaactcagtgtggatatactagtatactgatccagttagaaaattcacaggatttccttcgtcaaatataaaagccagcagggctttgtttttgaacgatcagtgttagcaaggttcttgctgtgtttattctcaacctatgaaataaccttcagcgtgccaatgtgtttccwgggtttgtttctgacaattattacaatagaaaaaattactaagaccgtgttggtggtgttgggaatcacattttttattaagaaagtcatgcctatcagtctaagtcaggctgtgagtcttctcccccatgagggctccttccttctctctttgttttgtcttcctcaccttgttaacatgtctgactcagctctcctgctctaggaagccttccccaatattgcattaaatgcagtgatctctatttttgtcttttctctgttttcttaatgcattcccattcacctttctcaatatgttc

SEQ ID NO: 456352 - DNA, 421 bp, Homo sapiens
tgcctaattagaatggagtttttatttattaatatgaaagattactaatgtgtagttataaattacagacacatggatattttatgaaagtgcagaattgaggtgttatttataaaaatgtatctaccattaatatgactcttataataacattactgaattgcaactggttggaatgtgtctttatttcctagcagtctgtgagttccctgaggcaagaatagacatagtagacrttcagtaaattgtgtagaaatgaattgctttaagttataatgatgtgcttgtcatcacaaaatcacacttagaaatctaagaatttatatttaaattcctcatataatttgtagccagtctgttgttacccgggtggttggataatatggcatatgaattgatttttttttcatatatgactatt

SEQ ID NO: 456353 - DNA, 587 bp, Homo sapiens
aattctgttcaagaaataactgctttctctgcctttctgtgatcaaaaatagatgttgatataaagagactttgaaaggccttggtctaaatgagaatacaaatacattgtgctcgtgttggaatcctgactcttttgctttaatgtggcctctagaactataaaataggcttaatgtcagaagtcaattgagaacacgtgttctctgttaattgcatgtttatgaatagactctaaattaaatgttagaaggttttttctccaattgcctatcttaaattgaaattcaaagagtagtttttaaaaaaacctttattatgaaataattttagagttacagaagacttgcaaatacagtagaaaatttttgtattcccttcacccagcttcacccaatggtaacatcttacataatgatggtgtatttatcaaacaaagaaattaacattggtacaatactgttaattaaatgacagactttatttggattttacaagtttttccttctgtaaaggacaggtttgaaaatmatttttactgatagaatatagaaagaatattttattaaaaaattcaataaagttgta

SEQ ID NO: 456354 - DNA, 565 bp, Homo sapiens
cttcaggggccaccaagaaagagctgctgctggagagattggctgtaatactctcaggcagtgggaggatggggatttggttcttttctttaggtggagagggtgtggtatcccttggttgcttgagcttagtgatgcccaaactaaccccagaaaagaaaatcatcaagatctgactggttaagcaaataattaaaattatagacaatagtcactttgctagggttttaccatgtgatattgttatgggattgtattaggaatgaaatagaatttaatgaccaactattgttrttattctttaactcaccacctttgtttccagtcccaccttggtcccaaccttcagtagatcctcaaggaagcatgggagagacagaattttaccctatcagcaggacgaaaccacaacttgaaaatactttcaagtatatattagttgtctgttgcactgtaacatgttactccaaaacttagcagcttaaagcaacaaacatctattatctcactgtatgggtcaggaatccagatgtggcttagtgaggtacacctgcctgtttctctc

SEQ ID NO: 456355 - DNA, 592 bp, Homo sapiens
tgtttgaattcaaaatgtgcatgctaaggagctaagaagcaaatggctagacttttaaaaatatggcaaagtatattgctctttttttaaccttgtgatggaaagcaaactargcactggagtaataaacatttcaattccaagtctgttcattttaaagtaggcacatatatatagaattaaaaatttttgaagttaaatttcaattttattttgcaacgaacaacaaaatacttgaataaactctttggaacatgtctgactctcatgggcaccatcatgtttccctgattatatatgctctctgtactctagtagtttttctggtaccatgagattgaaagtctaggaatgtttaaactctcttttacataaaaatcctgcttcctctaggttgatcccccaagtcccagggctgatactttattgggatcttctggaagagactgtgaaagagatggatggtcaagggtgcacaatggtaagctagaagttgtctttattcattgctgtagttgcctgagctacaatcaagcctttaatttggcatcaattaacaaaaacagaatctttgttacattattggataata

SEQ ID NO: 456356 - DNA, 592 bp, Homo sapiens
tgtttgaattcaaaatgtgcatgctaaggagctaagaagcaaatggctagacttttaaaaatatggcaaagtatattgctctttttttaaccttgtgatggaaagcaaactaggcactggagtaataaacatttcaattccaagtctgttcattttaaagtaggcacatatatatagaattaaaaatttttgaagttaaatttcaattttattttgcaacgaacaacaaaatacttgaataaactctttggaacatgtctgactctcatgggcaccatcatgtttccctgattatatatgctctctgtactctagtagtttttctggtaccatgagattgaaagtctaggaatgtttaaactctcttttacataaaaatcctgcttcctctargttgatcccccaagtcccagggctgatactttattgggatcttctggaagagactgtgaaagagatggatggtcaagggtgcacaatggtaagctagaagttgtctttattcattgctgtagttgcctgagctacaatcaagcctttaatttggcatcaattaacaaaaacagaatctttgttacattattggataata

SEQ ID NO: 456357 - DNA, 581 bp, Homo sapiens
caaaaagaaaaggcctgggccttcagaccagatgatcctctccagcatctctctcctcatcacctgcagacttcttattatatgagataattaatttttttttwaatttttttttttttaaattttataatcatttttttaagaaagtgataattgagttttctatttgcaactaaaagcaattcacctatttggcattttcttatgctgaaagttattattactttttatccccttgcaaagaagtataccccatgctaatgttcagagttcagataatgagtgtttctaggataaaaatgttcaatggatttgataaaaatttttaactggtatactggctatactagctttgttaggactgccattacaaagtaccacaaactggatggcttaagcaacagaaattaatttcctcacagttctggaggctagaagtccaagacaaaggtgttggcagggtttcttctgaggtctttctctgtggtttgcagatggctatcttctctctgtgtcttcacatggtcttttctctttctgtgtctatgtcttaatctcctcttttacaaggataccagtca

SEQ ID NO: 456358 - DNA, 574 bp, Homo sapiens
gtttatcaggggtttctgcttttgcttcttcctcattctctcttgccaccaccctgtaagaagtgcctttcaccctcagccatgattgcgaaacctccccagctatatggaactgtaagtctaattaaacctcattttcttcccagtctcgtgtgtgtctttatcagyagcatgaaaatggactaatgcaaacactcttgttacagtgacaatgaagcttcaggttctagatagtacagttataatttgtttagcatgttttatcagcataagtccttgggcagttttgtataatttctcttgctaaactgtgttaccatatagtggaggaaaaatgaacgtttatgatgtccagccactgatttcaaacttaatttgctactgcagtattgcctaacatgctgtagtgtagactaatgtagtgtgtattcttgtctttgataggatcatctataaatttccacacatataaatattatatgcagtaaataaaaaataaatattatttgcagtaaggttttgttagctatcatttagcaagttaaggaagttcccttgaaattccttgtttgaa

SEQ ID NO: 456359 - DNA, 549 bp, Homo sapiens
tagcaagttaaggaagttcccttgaaattccttgtttgaatatctatctatctatctatctatctatctatctatctatctatctatmtagatacatattcaatgaatggatattgaatattaccaaatgctgtttccagcacctgttgagatgataattttttttatggtgaattgataaattttctaatgataatccatccttgtattatttgaataaactgccttgtcatgttgtgttcttctagcttattctttaacattcctgaattaaaatattttagttataatttttccatatatggccacaattgagggtggcctataattatcctttcttgtactgtccttgaatgatttggtagcattgttgtgatcacattataactttagttgggaatgttttctttctttctcagaaagtttgtcagtttgttccttagctgtgtatattggattattggtaaatcatatcgtgagcccatcctttgtgggactttccttgtagaaatcctgttaggcttgggctatgagagtttgcaatttgtt

SEQ ID NO: 456360 - DNA, 567 bp, Homo sapiens
accccaccactactcaaaagcctttcgaactgtcttatacattttatatataatgacaatcttgatacatttaatatttaatcttacagtgactaattactatgttctgaattttatctttatagctgtggcatatgttttattacttttataaaattagtgtgtgtgtgcacatgcatatgactactatgcatactatattactatataatatgttatatacatatgtatctgtatttgtatatctatatgtatataatttttaaaacaggttatcaggacaccccatgggagagacttcgatgactctttagaaaaatgtgaagagtatttgagcccaaggtcgtgtagtaagcccyggcattcagcgaggaccttgctagtccattcagcaccctcaacaatgccaaagcattctccaagccctgtgttaaatagagcttctctcagggaaaggtaattatgtgcggtcttcatttctgtactgatctttgaataataagtattagaaggggaagcagcaattatgcatgtgaaatgaatgtttataaaagtgtaatttgattt

SEQ ID NO: 456361 - DNA, 588 bp, Homo sapiens
aaatgtataatcaccaataattagaatattatcagaaccccagattgctccattgggctgtctccctcccgccacttcacctacccctgttcctctcccaaaggtaaccacatcttgacttctcttacaatatattttgaagttttgaaatctagctatatctatctatgatctgtctattttgtatggtctgaattcttttatgtctaaccaatttgtgggagtttatccttgtggtttatgaggcaatarcccttttttcccttcttaaatgaatataacactatttattcttcctattgttgatggacattctcattgtttctagtttggggatattacaaattgtgctcctatgagcattcttgtatatatctttgttgcacattttatattttaattttggatgcaacattaaataacatgaaataacattatttcaatagttgtattttttatgtggaaaatgacgttgtttgaaaatagacagttttgacttttgcagtacaatcctttgttttgttttgttttgttttgtttgccttgtctttatgttgatggctagaatttctagtatagtgtttaatg

SEQ ID NO: 456362 - DNA, 596 bp, Homo sapiens
tttatgccatgagtgggtcctgcttgtccaccttgggaactgtagcccatgtgatagtgtcccacccctattacccrgcttccccatgtctttgctcaccggcctgacttccaacagccagcacctgtgattttcggcttgctttacctactgaagctcactctacccacatgccaggccagaagggcaggaattaacactctcaaacaatggctgatgagaacaggtgcttaaagaccccagtttccccactccttgggtgggataattctgaggcatatattctaattagctatcagtgttatttaatatgattgtactccagttgcccacagtgaaaatttgcttaataacgcaccctttggtggcttccttcctaccctaattggtgtttcctgggatcacctcctcagtaaactacttacacccaaataattgtctgagggttctgaggcatcccaaactaagacaggaactctgggagaacaaagcttccagaaatcctgtctatataagaacacacagatcttcttatttctggggagacataaaaaagactctgaggccagatggctgagccccagattactggcact

SEQ ID NO: 456363 - DNA, 525 bp, Homo sapiens
atacttttaatttttttcagaaattaccatactgttccattgtagctgtatcattttacattttcttcaactgcacaaggattccaatttcttcacatcctcaccaacacttgttgttttctgttgttttgatagccctttcaatgagtgtgagatggtatctcattttagttgtaatttgcattttcctaattattagtgatcttgagcatcttttcttgtgcttattagccatttatgtatcctctatggagaaatgtctatttaagtattttacccatttttgaatttttttttggtttcgttttaggaattttctgtgtattctagattgtaattttttatcagatatattatttgcaaatgttttctcccattgtttggattgcctttttactgcattgataactgcctttttatgcacgaaattttaamattttcatggagtcctatttgtgtatttttttaaattgcttttgccttggttgtgttatccaagaaatcattgctaaatccagtgtcctg

SEQ ID NO: 456364 - DNA, 592 bp, Homo sapiens
ctcaaaagaaaaaatcttcaaaaaattgttgtcaaatgaaggggtgatcaaagaataaacacaagaaatagagaaaggatatagtgatataacaagcagttaattaataaaaatagactgtaatttttctggattttgagactttaaaaattcaatttgtgatgtattccctcattctaaatatatattcacttccatacttataattttttcattaatatattttgtattcttcttattaaagggtgctctcccaattatgtaaacttcatgctccatgaarccacctggccaccatcatgactactgggaataaaacagtcaagacctggctctttgcctgaaggatctcacagggcacagggccagcctgatacagaagccaacaattacagtgtcaccaggaagcacaaggccatcacctcacttcctatccccagctcattttttttctattcagagatgactttttgggagcacagcctaccctgcttactctcacagtgcttccagccctcattctctctctctcattgtaggtattctctgacttccctcctcctcaccacactcaaacctcagaattcatccc

SEQ ID NO: 456365 - DNA, 595 bp, Homo sapiens
atatattcacttccatacttataattttttcattaatatattttgtattcttcttattaaagggtgctctcccaattatgtaaacttcatgctccatgaaaccacctggccaccatcatgactactgggaataaaacagtcaagacctggctctttgcctgaaggatctcacagggcacagggccagcctgatacagaagccaacaattacagtgtcaccaggaagcacaaggccatcacctcacttcctatccccagctcattttttttctattcagagatgactttttgggagcacagccyaccctgcttactctcacagtgcttccagccctcattctctctctctcattgtaggtattctctgacttccctcctcctcaccacactcaaacctcagaattcatcccactttgttgtgagaggcacttgtgtaccctttctgactgtactaggctgtcctggttatatcctctgggtttctttttccatacctgtagacaagtcttaaagttatttttccaaaaaagcatgattctttccagaagaggaattaggccatttgctttaaaataacagtttattattcctcctc

SEQ ID NO: 456366 - DNA, 544 bp, Homo sapiens
tctcattggctgtgagaaaagggaactctctctaatccctgccctgcgtgtggtgctggtctgggtcctgtggtgggagtgagaagtgattatggaggagcagcgccttctctactgggccaactcttcaggaacaaaggctttgtctcattcttttctgtagccaacatgcttgatggctcaaattcaataagtatctgmtgacatggggagagggaaggagggatgtgttaacactgaaattacttcattttataaaagaaattgtccaaaacctttctgtgtactaatttcaaaggagtttccccattttctattgcacattctccttctctcaggcttcatggaagatgtgttagtctacctgctcaaagccaacttctccatctgtgcctttgaccccagacttcttggtcttctagactaagtcttctagaaagttagcttcaataatcatctttccaataatcatcttcctgatttcaggttgcagcctctctctctcctatctctttctgctcagcctgtgaccgtacttaagttt

SEQ ID NO: 456367 - DNA, 607 bp, Homo sapiens
cttgtgcaccaacctaatactttggtcaatgtctgatttttactgtwttagaatgaaactgccctgggcatagactgtattctttaatgttttggtgaatgcgtaattgtgtgcttccaaatattttcacagatactttgtgactgtccttttgaattttaccatttatctctattatttcaaacagtgttcaaggtggtgattgaaatgttagaaatataagccacattcatttctagatatgaatgtaagatacattataggaaaaaatgttggcagaattagtagagacttatcttttctgttttcaagaactacatgccgaggaactgggttttttgttttgttttttttaaattttaatggacaggccagacccagtggctcatgcctgtaattccagtgctttgggaggctgaggcaggaggattgcttgaggccaggagtttgacaccagcctgcatgacatagtgagatcctgtatctacaaaataatgaaaaaattagctgaatgtggtggtgtatcctgtagtcctagctacttggaaggctgaggggaaaggatcacttaagtccaagagttagagtctgcagtgagctgtgatgg

SEQ ID NO: 456368 - DNA, 643 bp, Homo sapiens
cactggaaaagagaccctcatactgccagggcccctgatagcctgtgtggtatctttttgtgaattagaaaaaggcacttctttctctagttggacaaagcctgacacagtggcttctgggccccatccatctgttgctttgggcaggtgctctgtgcagagcacaacctgtactatcatatgtagcatctctgcagaaggcagtgagctgtctgtcaccaaacgcattcaattaatcactgcatggtcgtctgttttggttctgtaaagagtatttcgtgaccacgtgcagtagctcatgcctgtaatcctaatactatgggaggctgaggcaagcagataacttgaggccaagagtttgaggccagcctggccaaactggggaaaccccatctctactaaaaatacaaaaattagccargtgtggtggtgcgggcttgtagtctcagctgttgggaagtgctgaggcatgagaatcacttgaatctgagaggcagaggttgcagtgagccgagatcacgccactgcactccactcagcaacagagcgagaccctgtctcaaaaataaaaaaaagaggccaggagcagtggctcacacctgtaatcccagcactttgggagaccacggtgggcagatcacaa

SEQ ID NO: 456369 - DNA, 325 bp, Homo sapiens
gttccaaggtgcatcagaccttttttaaagtaccttatgactactaaccaaatgataaaaaactaagttggaaaatgggattggaaccagttacaggggaacatagatccyagctatgccatttgacccagtgctgataataaaaaaagacataataccaaactctgtaatcctgaatgttgaaatcccaaaagattaaattccttaaatctgaaatctataacatctaaaatccagaaaatcaccatctcggaagattaaaatcacaaatattgaaatcctgaaagccaaattctatggaaggcattagtgcattttcagttgc

SEQ ID NO: 456370 - DNA, 551 bp, Homo sapiens
atcttgcctcagcctcccgagtagctgggattacaggcattcaccaccacgcctggctaatttttggatttttagtagagactgggtttcaccatattggccaggctggtctcgaactcctgatctcagcggatccaccctcctccacctcccaaattgctgggattacaggcgagccccctgcctgtagtataatatttttatattaagaaaaattagactattatctgaaattaaataatgtatattgtatagtttgtttactctgcttttgtttccgatagatttttatttttatgtagtctcatttatttatctaccttgtctttcacatctgagttttctgtcgtacttaagaaagtttctttcctttgtrttttcttgtaacaattttacaaaatgtttttaaatgtaaatcatttgacccatctggattttattctgggcataaggagttagatgggctatcacattagtttttcactaatgttctccaattttctcaacacaatttgttgaatggcacctgtttccctccttaaatacattgc

SEQ ID NO: 456371 - DNA, 551 bp, Homo sapiens
atcttgcctcagcctcccgagtagctgggattacaggcattcaccaccacgcctggctaatttttggatttttagtagagactgggtttcaccatattggccaggctggtctcgaactcctgatctcagcggatccaccctcctccacctcccaaattgctgggattacaggcgagccccctgcctgtagtataatatttttatattaagaaaaattagactattatctgaaattaaataatgtatattgtatagtttgtttactctgcttttgtttccgatagatttttatttttatgtagtctcatttatttatctaccttgtctttcacatctgagttttctgtcgtacttaagaaagtttctttcctttgtawtttcttgtaacaattttacaaaatgtttttaaatgtaaatcatttgacccatctggattttattctgggcataaggagttagatgggctatcacattagtttttcactaatgttctccaattttctcaacacaatttgttgaatggcacctgtttccctccttaaatacattgc

SEQ ID NO: 456372 - DNA, 518 bp, Homo sapiens
ttgattaatggatctttattactgtgaaggaggtaaactgcggggttccacacttggcccttttctattcaacagtttcatcaatgaaattggagaaaagcataagtgaacttacctaatttacacattacccaaagttgagaaaaacaactaacaccttaaatgaaagtatctgtgttcatatgatctcaataaaatatggcaaataaaggttaaatgtgatgataggaaccacactaaaacaaacaatattatttctatttaaaatatgtacgtgtacacatataatatgaaggaaaatttgataggaaagaagctgttgtaaaaagatctatgaaatctttttggttttcaaattayattatttagaggaagacagtctattgtaacaaacctacccaaaattatataatcattcaaagacaattccaaatggatttccccgatcagttggtgactctatgagatgttttgaatcagggaccatcttgcaaatgctattttaggcctggattcct

SEQ ID NO: 456373 - DNA, 550 bp, Homo sapiens
cagcagtggcatataagttggggaaggggtcaaaattcagcaacctaaatcttagattatttaagttggagatattaatttcttaaatttgtctgcatgttaaaaaaaattcaaaggcaatcattaagtaaacgacataaaatgtgtaacttccattccagaaaaagagaaacaaagcaacaaaataatctggataatccaatacgaggaaggaaaggaaaaaaaaaaaaagaagyaaagaaatgtattatcagtgatgttctagagccagcttatagtctttcagcagctttcaagagctgctatgcacatctcttttcatcttttcaaatctacttcagttacttcatgtcggttgcttgaattctgccatcttgacagtatttacatcaaggaaataatcaaatgctacaaattaataatcaaatgcttttgtttcagagagcctgtgttttgtatttgtttagaagatatccacataaaaatagtagagttgaaaaaatatgaacttgatgttgagaactagtgacactgagcagagacaattctt

SEQ ID NO: 456374 - DNA, 575 bp, Homo sapiens
agagccagcttatagtctttcagcagctttcaagagctgctatgcacatctcttttcatcttttcaaatctacttcagttacttcatgtcggttgcttgaattctgccatcttgacagtatttacatcaaggaaataatcaaatgctacaaattaataatcaaatgcttttgtttcagagagcctgtgktttgtatttgtttagaagatatccacataaaaatagtagagttgaaaaaatatgaacttgatgttgagaactagtgacactgagcagagacaattcttataaggaggtagcttcaattgcgtagttgttacagagtggcatagggccaaggagaagttgttttataataaggggaaaagcctgagcatgtttacatgtagaagagagggacctagcagaaaaataaagcacacttatgatactgaagaaagagaacagaattgataaacagggccttgatgcattgactgaattaagaacacaaatgagaagaaaagaacagaacacaactgttatgtaatgggaggagaggttgaatgcagaaggttggtgtttctagcaaatat

SEQ ID NO: 456375 - DNA, 575 bp, Homo sapiens
agagccagcttatagtctttcagcagctttcaagagctgctatgcacatctcttttcatcttttcaaatctacttcagttacttcatgtcggttgcttgaattctgccatcttgacagtatttacatcaaggaaataatcaaatgctacaaattaataatcaaatgcttttgtttcagagagcctgtgttttgtatttgtttagaagatatccacataaaaatagtagagttgaaaaaatatgaacttgatgttgagaactagtgacactgagcagagacaattcttataaggaggtagcttcaattgygtagttgttacagagtggcatagggccaaggagaagttgttttataataaggggaaaagcctgagcatgtttacatgtagaagagagggacctagcagaaaaataaagcacacttatgatactgaagaaagagaacagaattgataaacagggccttgatgcattgactgaattaagaacacaaatgagaagaaaagaacagaacacaactgttatgtaatgggaggagaggttgaatgcagaaggttggtgtttctagcaaatat

SEQ ID NO: 456376 - DNA, 588 bp, Homo sapiens
attttatgttaaattttaatgttactttgggctccaaggccatgtttctgaaaawaacatttcaacaggtcatgaaatcttaggtaaattcatatgtcaatgtcaaacagtagattaaatatcaccataaacatgaacagcagattttgataagaaacatgattagaaaacagcagtatttacatgctttaaataatattgagtgcaacagaatatataagtagtcatgtactgccttgcatattgaagttactcaagtaaatgattgcattataaattcgtaaaagtaatcaacctctcaaagcataaagaatcctcagttttccacaaaaacataccaaagaagaaaatttttaataatttggaagtgatgtgcaagaagttagacataagtcaaatctcttaccactaagggtagagggttttcattttataatttaacacctgcttagacactgggaaaaattgaattgggctatagataaattatttataacatttttaaaactgcacaccatatttgtagaatatgtgtatgtatttgaggcaaatgcaaatattcagatatacaacgttttcaaaataatg

SEQ ID NO: 456377 - DNA, 437 bp, Homo sapiens
cttttatactcttggtgggaatgtaaattagtacaaacattatggagaacagcttagaggtttctcaacaaactgaaaaaaaaaaggagctactatatgatacagaaatcacactgctagatatatatgtaaaagaaaaaaagttagtatattgaagagatatctgcactctcatgttaattgcagcacctttcacaatagctgagatttggaagccacttaaatatccatcaatagacaaacggataaggaaaatatgaaatatatacmcaatggtgtataatttagctataaaagagaataatagtctgtcatttgcaacaccatggataaaatcagaggtcattgtgttaagtaaaaaaaaaacaggcacagaaagacaaacattgcatattctaacttattagtgggatctaaaaattaaaacaattgaactc

SEQ ID NO: 456378 - DNA, 524 bp, Homo sapiens
ggatgcccactttcaccactgttatttaacatagcatgggaagtcctagctagggaagttagtcaagataaagatataaagtgcatccaaactggataggaagaagtcaaattatccttattggcagatgacatgatcttatatctggaaaaacctaaagattcttccaagaaactattcgaactgatcaacaaattcagtaaaattgcaggatacaaaattaacatacaaaaagtaatggcatttttatatgccaacagcaaacaatctgaaaaaagagaccaagagcttgaaccagggagtcggaggttgcagtgagccaagatcgtgccactgcactccagcctggcgacagagcaagactcygtctcaaaaaaaaaaaaaaaaaacaaggaagcaatctcatccatagtagctagaaatgaaacaaaataccaaggaatcaacttaatcaaaaagtgaaacatatttacaataaaactctaagacattgatgcaagaaattgaaaaggacacaaaaaatg

SEQ ID NO: 456379 - DNA, 626 bp, Homo sapiens
cataaatacttcctcttgatttcacagacctcctccaattaccatcttctatctctacattttttattgtaaaactcacagtgttgcctctactgtctaactcytcatccagctcacttttatactacatctgatcaggctttctcctcaccacttcagtgaagctccttttatcagtgttagcaatgttaccagtgttcccagctaagcctcagttcccagccttcatctaccttaatacctcagcaacatttgaaatcactttctgttccttgaagaacttgaataatgaaattttaagtaaattgacatttttgcacttatgtaaacattttagttgatatgccatgctcactgttttgttatgatgattgacactatcaataaagtttaagataaagtatgaatcaagattaagagaaaatattgaaaatattcattcaaagtttaaaagaaaacattggaaggctcttgcataaatattaactcattaaataatttttaaataaaattatgttgagggaggcacagatatgagatttccattactgaaagaaataaaatacattaagatatatgactatagagctgagagtgtgtatattactataaaaattgcatcttta

SEQ ID NO: 456380 - DNA, 625 bp, Homo sapiens
ccatctgtatgttctctgcaagaagtaatgagagcctgaattatccatggtgaacgtaagtgagaatgcaaagttgctacctaattgagatgctaaccaattgagttgttaaagtaaatttgggcccaagaaggcatccattatttgcatacttgcattcttaggtatgagctgtgacctagcttactaggtaagcaaactgaaaacctagccaatgcttctgtaacaatagctcrgtctcagctaatcacagcagctacacttcaggcactcccaggcagacagctgttcaaatggtgttcaaatccagctgtttcggtaccttgcttcttttttttgtacatcattttcctttttctgtccctaaatcttaaccaaccatgaggcagcccagagtctctctgaatctattctgattctgggagcttcccggttcaagaattttgttttccttgcccagtgaagatctgttaaatttaatttgtgctaaagtttttcttttaacagtaggaatccaaatgcacttaaaacttgagttgatagtctgctaaaaattttattttctaactcaaaacacattagtggaatcttgaggtcctagataacctatgctctggtctaggtt

SEQ ID NO: 456381 - DNA, 608 bp, Homo sapiens
tatatattttactttagaagtaatatcttactattccccaacccactggacccctagaaatttcagtgaggtagaaggacccagaattttagttgattttatttcccaccctctcacatgcaaatgtcttaataagtccagagtagttgctacttcttcttcattggatccaatcagcataacattattaatgaaatggaacaatgtgataccttgtgaaagggaaaggcaatcaagatctttgtgaaccaaattgtgatacagtgctggagggttgatataatcctgatataggacagtgaaggtgtactgctggccttrccagctgaaagaaaactgtgatacagtgctggagggttgatataatcctgatgtaggacagtgaaggtgtattgctggccttaccagctgaaagcaaactgtttatggttggttttatggacaggtgtgaagaaaaaggcatttgccagattaatagctgcatacagctcccaagagatgtgttaatttgctcaagcaataaaaccacatgtggtacagtagctgaattagagtcactacttggttaaagtatagcaatctgctgtcattcctcaagaatacaccaa

SEQ ID NO: 456382 - DNA, 358 bp, Homo sapiens
actcaatttcccagcagtcctcaaaaatggtgactgacagctaacaagagaattcaggatgtatctatttcctgcctatccccccttctcctgtgcacataagcaacttgtttccagcagcaagacagckaacaaaaagtgttcccaagcctgaagacttcttccatcttaacataaaaatcaatgccaatagaagatcaacttccaaaaacagaaatgggacttaatattttacactgatagatattcagtcaccacctgaaataaagaattgcttaattaagaagtgggcacccttatttcaccagctggtgtctcaaaggggacaagcagtttggattcataaatctacatcttc

SEQ ID NO: 456383 - DNA, 358 bp, Homo sapiens
actcaatttcccagcagtcctcaaaaatggtgactgacagctaacaagagaattcaggatgtatctatttcctgcctatccccccttctcctgtgcacataagcaacttgtttccagcagcaagacagcgaacmaaaagtgttcccaagcctgaagacttcttccatcttaacataaaaatcaatgccaatagaagatcaacttccaaaaacagaaatgggacttaatattttacactgatagatattcagtcaccacctgaaataaagaattgcttaattaagaagtgggcacccttatttcaccagctggtgtctcaaaggggacaagcagtttggattcataaatctacatcttc

SEQ ID NO: 456384 - DNA, 628 bp, Homo sapiens
gaaaatatttgcaaacagttcatctgacagggaattaatatccagaatttacaaagaactcaagaaaaaataatcccattagaaagtaggcaaaggacatgaatagacgtttttaraagaagacatataaatgtccaacagacatatgaaaaaaatgctcaacatcactaatcatcagggaaatgaaaattaaaaccacaatgagatttattttattccagtcagaatgggtattactaaagtaaaagaataacaaatattggtgagaatgcagagaaaggggaactcttatatattgcaggaatgtaaattagtacaacctctgtgtaaaacggtatagagagttctcaaaaaactaaaaatataactgccattccatacagcagtcccactactgtgtatctacccagtggaaaagaaaccattatgtaaaaagaaaacctgcacttatgtgtttcttgctgcagtgttcacaataacaaagatagagaacacttaagtgtccatcaacagattattagataaataaaatgtttatatatatatatatatatatatagaccatatacagactatatatatagaccataaatgagaaagaaatcacatcttttgaagcaacatggat

SEQ ID NO: 456385 - DNA, 646 bp, Homo sapiens
agtaggcaaaggacatgaatagacgtttttagaagaagacatataaatgtccaacagacatatgaaaaaaatgctcaacatcactaatcatcagggaaatgaaaattaaaaccacaatgasatttattttattccagtcagaatgggtattactaaagtaaaagaataacaaatattggtgagaatgcagagaaaggggaactcttatatattgcaggaatgtaaattagtacaacctctgtgtaaaacggtatagagagttctcaaaaaactaaaaatataactgccattccatacagcagtcccactactgtgtatctacccagtggaaaagaaaccattatgtaaaaagaaaacctgcacttatgtgtttcttgctgcagtgttcacaataacaaagatagagaacacttaagtgtccatcaacagattattagataaataaaatgtttatatatatatatatatatatatagaccatatacagactatatatatagaccataaatgagaaagaaatcacatcttttgaagcaacatggatggaactggaggtcattaagttaagtgaaataactcaaaagcttaaagtcaaataccacatattctcacttataagtgggaagtaaatcatgtgcagacataa

SEQ ID NO: 456386 - DNA, 628 bp, Homo sapiens
gaaaatatttgcaaacagttcatctgacagggaattaatatccagaatttacaaagaactcaagaaaaaataatcccattagaaagtaggcaaaggacatgaatagacgtttttagaagaagacatataaatgtccaacagacatatgaaaaaaatgctcaacatcactaatcatcagggaaatgaaaattaaaaccacaatgagatttattttattccagtcagaatgggtattactaaagtaaaagaataacaaatattggtgagaatgcagagaaaggggaactcttatatattgcaggaatgtaaattagtacaacctctgwgtaaaacggtatagagagttctcaaaaaactaaaaatataactgccattccatacagcagtcccactactgtgtatctacccagtggaaaagaaaccattatgtaaaaagaaaacctgcacttatgtgtttcttgctgcagtgttcacaataacaaagatagagaacacttaagtgtccatcaacagattattagataaataaaatgtttatatatatatatatatatatatagaccatatacagactatatatatagaccataaatgagaaagaaatcacatcttttgaagcaacatggat

SEQ ID NO: 456387 - DNA, 573 bp, Homo sapiens
ctcaacatcactaatcatcagggaaatgaaaattaaaaccacaatgagatttattttattccagtcagaatgggtattactaaagtaaaagaataacaaatattggtgagaatgcagagaaaggggaactcttatatattgcaggaatgtaaattagtacaacctctgtgtaaaacggtatagagagttctcaaaamactaaaaatataactgccattccatacagcagtcccactactgtgtatctacccagtggaaaagaaaccattatgtaaaaagaaaacctgcacttatgtgtttcttgctgcagtgttcacaataacaaagatagagaacacttaagtgtccatcaacagattattagataaataaaatgtttatatatatatatatatatatatagaccatatacagactatatatatagaccataaatgagaaagaaatcacatcttttgaagcaacatggatggaactggaggtcattaagttaagtgaaataactcaaaagcttaaagtcaaataccacatattctcacttataagtgggaagtaaatcatgtgcagacataa

SEQ ID NO: 456388 - DNA, 483 bp, Homo sapiens
atgcttattgggcatttatacgtcttcttttgagaaatgtctattcaggtcttttgcacattttaaaattggattattattacttttgctattgagttgtttgaggagagtcgtggaaatgggagtggaaagagattggtcaatggctacaaaattgcagttagatatgagaaatacattattttgctctcttgcaccatagggtgactatagttaaaagtatggtgtatttcaaaataactaaaagaaaggactttcaatattcttgccacaaggaagtattaaatatttgaggtgatagatatgctaaataccctgatttgwtaattatacaatttatacatgcatagaaacatcatactataccctataaatatgtgtaattattatatgtcgattaaaaacaaaaccaaaaaaaagcttcatatgtaatatttagaatcatttggcagcttggggaagtgcttttctattggagaagag

SEQ ID NO: 456389 - DNA, 524 bp, Homo sapiens
tcacatctctcacttagtgaatgcttaaaagagagggtgttaaacatttcctggtgatggggagaaacaggtgactaacaacatttttgttattagttttagttttacagctgagtgggaatggaaaagttttctaaatcagaaagcctaggtgttgagaggtaagaaataaagaggattcagtattaaaataaatgtcaatcaaaaatgtaacataaaaatgttctawtatgaaatgtaaagattttatccagactaatcttaaatcttagaagcagagctctgtatatgattatttcatatgtgtttatgaggacaaagtatgtatttcccacaggacggagaaggggcaccgtagtggacacagaaaccttccagattcactttctatgttctggcacctaatactgaatgatatgctgatgagcaaagaaaaggtgcactcctatagagcatgacaccctacaagtttacagtcatctggttgcttggttctggcaaggctttagtttcatgtatgaaaa

SEQ ID NO: 456390 - DNA, 364 bp, Homo sapiens
gtaaaatcaaaataaagtactttacttttcttattcttagtttatctaacaagtttgttcaagataatgatagcagcartttagtaattatagtttttgagtaagtgaaatgaatgagcacaatgttataagggatgggagggaagaagcaagaatatcctgtcataaggcacctgcactatccatgaagtggtatagtattttgaaagtggccctagaatagtcataagtgtgttttaaactagggtgatatgatttggctgtgtccccacccagatctcattttgaattatagttcccataatccccacatgttgtgggagggacccaatgggacgtatttgaatcatgggggctgctacat

SEQ ID NO: 456391 - DNA, 590 bp, Homo sapiens
aggtttgttcacaaatcattcctagaaaatatctccaattttggattttgctaagatggctgaaggacaaatagccttatatcttctgagagatattttctggtttaatttagggaatctttgagtcataccttcgaactctttacaaagccttttatgtgactaagtactctgctttttgtaatgcttctataacaaattaccacaaatgcaagagcttaaaatagcacaaacttattatcctacatttttgtaggtagaactctggtagatgtctcagtgaactaaaataaaggagtcygcaggttgcattcctttctgggggcttgtagaattcaggtcctagcagttgtaggactcctttttccagctattaggagctcatataattacgctgggcccacttgaataacccaggataactgctctctgttaaagtgaactgattggcaactgtcatgtaatgtaatgtatctacaggttctgaaattaggaattgaagatcgttgttggggttgggggtttggtgggagcaggcacagatctgtctattacactaactaagagcaaaaataaccctgccttttaac

SEQ ID NO: 456392 - DNA, 590 bp, Homo sapiens
aggtttgttcacaaatcattcctagaaaatatctccaattttggattttgctaagatggctgaaggacaaatagccttatatcttctgagagatattttctggtttaatttagggaatctttgagtcataccttcgaactctttacaaagccttttatgtgactaagtactctgctttttgtaatgcttctataacaaattaccacaaatgcaagagcttaaaatagcacaaacttattatcctacatttttgtaggtagaactctggtagatgtctcagtgaactaaaataaaggagtctgcaggytgcattcctttctgggggcttgtagaattcaggtcctagcagttgtaggactcctttttccagctattaggagctcatataattacgctgggcccacttgaataacccaggataactgctctctgttaaagtgaactgattggcaactgtcatgtaatgtaatgtatctacaggttctgaaattaggaattgaagatcgttgttggggttgggggtttggtgggagcaggcacagatctgtctattacactaactaagagcaaaaataaccctgccttttaac

SEQ ID NO: 456393 - DNA, 590 bp, Homo sapiens
aggtttgttcacaaatcattcctagaaaatatctccaattttggattttgctaagatggctgaaggacaaatagccttatatcttctgagagatattttctggtttaatttagggaatctttgagtcataccttcgaactctttacaaagccttttatgtgactaagtactctgctttttgtaatgcttctataacaaattaccacaaatgcaagagcttaaaatagcacaaacttattatcctacatttttgtaggtagaactctggtagatgtctcagtgaactaaaataaaggagtctgcaggttgcattcctttctgggggcttgtagaattcaggtcctagcagttgtaggactcctttttccagctattaggagctcatataattacgytgggcccacttgaataacccaggataactgctctctgttaaagtgaactgattggcaactgtcatgtaatgtaatgtatctacaggttctgaaattaggaattgaagatcgttgttggggttgggggtttggtgggagcaggcacagatctgtctattacactaactaagagcaaaaataaccctgccttttaac

SEQ ID NO: 456394 - DNA, 596 bp, Homo sapiens
ggctctgtccctgcagcacacttctggctggacatccaggcatttctatatatcctctgtaatctaggtggaggttcccaaacctcaattcttgacctctgtttacccataggctcaacaccaaatggaagctgccaaggcttggggcttaaaccctttgaaactacagcctgagctataccttggcccctttgtatgccttggccccttttagccatggctgcaatgactaggatgcagggcaccaagtctctagactgcacgcagcagggggggcctgaacccagcccacaaaaccattttttcttcctaggcctccaggccatgggtgggaggagctgctrcaaaggtctccgacatgccctggagacattttcccctttgtcttggcaatcaacatttagctccttgttacttatgcaaatttctgcagctggcttggatttctcccagaaaatgagtttttcttttctaccacattgtcaggttgcaaattttccaaaacttttatgctctgtcacctcttgaacactttgctgcttaggaatttcttctaccagacaccctaaatcatctctctgatgatccacagatct

SEQ ID NO: 456395 - DNA, 556 bp, Homo sapiens
atgttctttcaaatggagaggacctaatcattaagacatagcttttttttttttttcttaactttcaggagtcagatgtggaggatatagagagaattttgacttttagtccatgttgttttccctgacacattttcaattacattgrcaactaaaaaacaagaccttggcaagaacatcagggagaaatggtgatgagatgaaaagatgctcagataggcagattttgatatatgactggtcaacagaccttgggaggctctctctacaatgagaacagaagcatccttgtgctaaaggctcatctgcttacaacggttgagataaagaggaatttctcgagctagtggaagaaacaggatgagaagtgtgaaaggaaattaaattttgggattcaaaactcatttagccaaagggaaaagtcaagctgtgaactggatcatgcaaacctgcctccacctttcagttcctaaataaaatggctacaagatgcaaagctactcacctttcccatattttgccaacaaggaaattcctgatgagctgttaaaacttc

SEQ ID NO: 456396 - DNA, 617 bp, Homo sapiens
tggaatgtgctatcattccttccattttacacatgaggaaactaaacatcaaagcatttacactgtatatatatgataaatccaggaattcaaataaaggtctccctagcacacataccaaactccttccacaatgcttttccacatttattagaagaaaacaggaacaaaaaaagcagtactcaataaaagcaaaataagttaccctggtgaaaaggaatgctgggaggaatgcttttggctatttataatcatacctacatcctcaaaaatccattgccagagtctatttccctgtttaacaatttgtgaggatccttagagaatcaacagcaggaggcaccactgttcagcccattagatatgatccaagatttgtctcagtgcctgactcttctgttctctagtaaggggtctatcaaaacccaatgtacttcatttttagcagaaaggacacatttcccaggggaaattgaaggtgatccttctcaaagtacaaatctagctgttttttgagrtgcgatatatcgatgtctggatgaccatattgtgcaagacaattctcttcaggcccaaagttcttttcatatttacaataaaggaatgctatacagaaa

SEQ ID NO: 456397 - DNA, 605 bp, Homo sapiens
ccatcctcagtctatcagaggtccttaacgatgcaggagatcatctgaaaatagcttgtcctgtcccatattgattcaagataggccagagagaccttttagttgcaaaggataracagagtaaatagcaagtacctaatgactggagaacagggtagcagcatagacatggatatcaagcttaagtagggataagtgttgacaacctacggtatgctggcattggtggggtgaggttttcttctccttagaaaagaattcagttaaatagaggtatagaagaataaatagaagtatttaatgatatggcttagcttggtggtttgaaatacatgcctgctacatctggattctgaatatttctgtatttgtaaccatctcaaaaactccagggtattaataaatttgtccataaatacttaacaattggaaaggcatatggctttagatttaccttttcatttcaggattttactcattaaatcagtattagatgctgcagcataattaagttgaagctgacatttgagaacattatttgtttttctctttcatgacatctaaatacatttgatattttttcccaattgccaatcaagtattct

SEQ ID NO: 456398 - DNA, 637 bp, Homo sapiens
tcaccaacttgtgtttttgtatgctttgacatatcacttggctgtacatatttggctttatttctgggttctctgttctgygccacgagcctatgtacctacatttataccattgccatgttgttttggtaactgtacccgtgtggtacaatttggagtccagtaatgcgatgtctctaagtttgttcatttgcttaggattgctttggctatccagcctctttttaggttctaaattaattttaggcttgctttatttttctaattctttgaaaaatgctgttaggtgtttgatgggaattgcactgaatctgtagattgctttggcctgcatggtcattatcacgatattgattcttccaatgaataaacatgggatgcatttccatttctttgtgtcagctatgatttctttccagagtgttttgtagttctccttgtagtgatctttcacttccttggttaaggtatattcctggatttcttttttatttatttattttttattattgacagctgttttaaaagggattgaattcttgcttttattctcagcttggtcatttttggtgtgctactgatttgtgtacattgattttgtaatctgagactactcaattcatttatcaaacctaag

SEQ ID NO: 456399 - DNA, 637 bp, Homo sapiens
tcaccaacttgtgtttttgtatgctttgacatatcacttggctgtacatatttggctttatttctgggttctctgttctgtgccacgagcctatgtacctacatttataccattgccatgttgttttggtaactgtacccgtgtggtacaatttggagtccagtaatgcgatgtctctaagtttgttcatttgcttaggattgctttggctatccagcctctttttaggttctaaattaattttaggcttgctttatttttctaattctttgaaaaatgctgttaggtktttgatgggaattgcactgaatctgtagattgctttggcctgcatggtcattatcacgatattgattcttccaatgaataaacatgggatgcatttccatttctttgtgtcagctatgatttctttccagagtgttttgtagttctccttgtagtgatctttcacttccttggttaaggtatattcctggatttcttttttatttatttattttttattattgacagctgttttaaaagggattgaattcttgcttttattctcagcttggtcatttttggtgtgctactgatttgtgtacattgattttgtaatctgagactactcaattcatttatcaaacctaag

SEQ ID NO: 456400 - DNA, 621 bp, Homo sapiens
tgtttcctgttggaggggagtatctctgatttctcaggcaatgggcagggccaagtagctcccaagagattttgatctttttgttgagctaccagggccgatggcagggcaaagccaggtgggagctgggttgggcaggtttgcattctgagtctctgtgtgtagggcaaacagcagcccctgtgggtttttggggacaggggcaggtttcaaaccgctgggttgatgttccagaggagagtgttgctacctctgctacacagaaggttttgtgcagggaatggggagtaagccccatggggtggtaagcccyacagttcccacacacttagcaaggcagatctactcccacagtgttctaccggcaacagtgaactgagttggtaaggcggtaatcagcactcaccactaacagtagtcataagattttcccacagagaaagcaaccatggcttttaggccttgcccttctctgtctgctgcaaagccaggcacctggcatctgcacccagggctcctgcacccatgggcctacactcatgactcttgcactcatggcacgcttttcactctccccatcctggccctggccaagggagttcgtgtccacccaaagttata

SEQ ID NO: 456401 - DNA, 621 bp, Homo sapiens
tgtttcctgttggaggggagtatctctgatttctcaggcaatgggcagggccaagtagctcccaagagattttgatctttttgttgagctaccagggccgatggcagggcaaagccaggtgggagctgggttgggcaggtttgcattctgagtctctgtgtgtagggcaaacagcagcccctgtgggtttttggggacaggggcaggtttcaaaccgctgggttgatgttccagaggagagtgttgctacctctgctacacagaaggttttgtgcagggaatggggagtaagccccatggggtggtaagccccacagttcccacacacttagcaaggcagatctactcccacagtgttctaccggcaacagtgaactgagttggtaaggcggtaatcagcactcaccactaacagtagtcataagatyttcccacagagaaagcaaccatggcttttaggccttgcccttctctgtctgctgcaaagccaggcacctggcatctgcacccagggctcctgcacccatgggcctacactcatgactcttgcactcatggcacgcttttcactctccccatcctggccctggccaagggagttcgtgtccacccaaagttata

SEQ ID NO: 456402 - DNA, 506 bp, Homo sapiens
ggtaatcagcactcaccactaacagtagtcataagattttcccacagagaaagcaaccatggcttttaggccttgcccttctctgtctgctgcaaagccaggcacctggcatctgcacccagggctcctgcacccatgggcctacactcatgactcttgcactcatggcacgcttttcactctccccatcctggccctggccaagggagttcgtgtccacccaaagttatattatkaaatccctttgggagcctctttctacctgtggccaccacttgaaatgtttggctctcttcctcagcaccctttgtgaggaacagtaaagaatagctaccctcagttcacactgggatctaggagtccatgcaagggtcttcccactgctgatcctacttttatactccatgaccctccccaactctgtttctgcacagggtggggttagggccttcccccgtgtattgagctttcagggtccccagtgggagtgtatatcctagaggcaa

SEQ ID NO: 456403 - DNA, 607 bp, Homo sapiens
gtatgtttctgacatccttgtcaaaagtgagtttactgtgggggtgtggatttgattttgtgttctctattcttttccattggtctatgtgtctgtttttatgccagtaccatgctattcttgttactaaagttgtgtagtaaaatttgaaatcaggtaatgtgattcctacagttttgttctatttgcttaaagtagctttggttattctgggtcttttgtggttccatataaattttaggattgttttttctatttctatgaagaatgtsattgttattttgatagggattgcattaaacctatatattgctttgagtagtatgaatattttaacaatattgattctatcaatccatgaacatgaaatatttttccattattttgtttcctgttcaatttctttcattagtgttgtatagttttcattataaaattatttcactactttggttaaattaattcctaggtatttaattttatttctggctattataaatgggactatgtttttatacttcatgctgttgatatgatagatcatgttgattgatttgtgtatgttgaaccatccttgcatcacagggataaataccacttggtcacg

SEQ ID NO: 456404 - DNA, 505 bp, Homo sapiens
atgccatgaagtacagtcaggatcattctgggagtgtttgaagaattgaacaatagtatgctattaaatggctcgtggaagaaaacaaaaacaccatttgtagcacaccaatttccatgatattaatataaccaccaagccccatgtcaaggtaagaatgttattagttagatcatgaagttcctgaaaatttgtcatctagctcttgaaaactgctcctagcaggacaacacacacactgtggaaataatcacatttaggtgaacatgtggtatgagggtctggctagaaatataagtagagaaatactgaactttagcctaatgaattcagactaaagaattgctctttattctgtaggaaataatgacctgtagtaggctttgagtggtgtcatgtgttcagaacagactrtttacagactttataatgttagcatgaggttaatgaattataaactaaaaagctaaaatagagccatatatttcagattgccagaggaagt

SEQ ID NO: 456405 - DNA, 575 bp, Homo sapiens
ctttgtatttgaggtgatgatgatttctgctttacataaatataacttcgaactatctatgggtccttagagtgaatatacccagcaggcaatgaaaccttttggtttagagcttaaagaattaatcrtatatatcagggcttctcccaaaggaaaatatattaaaatcacttaggcttttttttccccagaaaaaaatagccccagtcaaaattattgacctagcagagagatgcaagattgtatttggaaaaaaattccctgtattttgatatgcattttagatttagatctgctggtgatggttgaagtcacttgaatgaaggctactgccaaggggaagggcaaggattacatctgggagataccagattaagacattggcaaataatggattagtaaagataataatatagaaagaataagaggaaagaagataattagaatggaataaatttctcacatacattgatttcaagaaatgaccaacatattcagatgacacagggtcaaattaaagaattaaaaggagcatactgaattaggtaattagaataccattcgagattttgcca

SEQ ID NO: 456406 - DNA, 575 bp, Homo sapiens
ctttgtatttgaggtgatgatgatttctgctttacataaatataacttcgaactatctatgggtccttagagtgaatatacccagcaggcaatgaaaccttttggtttagagcttaaagaattaatcatatatatcagggcttctcccaaaggaaaatatattaaaatcacttaggcttttttttccccagaaaaaaatagccccagtcaaaattattgacctagcagagagatgcaagattgtatttggaaaaaaattccctgtattttgatatgcattttagatttagatctgctggtgatggttgaagtcacttgaatgaaggctactgccaaggggaagggcaaggattacatctgggagataccagattaagayattggcaaataatggattagtaaagataataatatagaaagaataagaggaaagaagataattagaatggaataaatttctcacatacattgatttcaagaaatgaccaacatattcagatgacacagggtcaaattaaagaattaaaaggagcatactgaattaggtaattagaataccattcgagattttgcca

SEQ ID NO: 456407 - DNA, 575 bp, Homo sapiens
ctttgtatttgaggtgatgatgatttctgctttacataaatataacttcgaactatctatgggtccttagagtgaatatacccagcaggcaatgaaaccttttggtttagagcttaaagaattaatcatatatatcagggcttctcccaaaggaaaatatattaaaatcacttaggcttttttttccccagaaaaaaatagccccagtcaaaattattgacctagcagagagatgcaagattgtatttggaaaaaaattccctgtattttgatatgcattttagatttagatctgctggtgatggttgaagtcacttgaatgaaggctactgccaaggggaagggcaaggattacatctgggagataccagattaagacattggcaaataatggattagtaaagataataatatagaaagaataagaggaaagaagataattagaatggaataaatttctcacatacattgatttcaagaaatgaccaacatattcagatgacacagrgtcaaattaaagaattaaaaggagcatactgaattaggtaattagaataccattcgagattttgcca

SEQ ID NO: 456408 - DNA, 615 bp, Homo sapiens
acaacactgcactccagcctgggtgacggagcgagagtccatctcaaaaaaataaaaaacgacataaattcaccaggcgtggtagcacatggctgtagtctctgctacttaggaggctgaggaacaagaatctcttgaacctgggaggcagaggtggcagtgagccaagatcatgccactgcattycagcctgggtgatagagtgagggaccctgtctcaaaagaataataaaaataaaataaataaatgaataaataaaagaaatgttttttagagatcaaggctgagttcttagaaatatatagcatagtagcaaaattttaaaaaaaatactagaaagattagaagataaaccttatatattcctgaaaataaagtaaaaatgtgaaaagattaaaaactattgtatagattatttggagactaaatttcatctcgggttttaccagactggaaatatatcaatgaacacttatcacgtccaaatcaaaacagttcttgatatcaaacattaaaactatggctatcttaatcaaaagggggaaaatgatcattttaaaagagcagatagttaaacttttgtggctgatgaaaatcatgcatttatcctgtca

SEQ ID NO: 456409 - DNA, 458 bp, Homo sapiens
tatgccatatatataatatataattatacaaatactacacgtatttgtatagttatatatagtatatggtgcaagagtaaagaggtttttgcattgttgaaattgcaatttgatattggaatgcattcttaaataaatgtggttatgttatacatcattttaatgcacatttcttgttttttttttttgctaatgacttattacttggtgtttattttatatttattttagactatggaaataatgttagacaaaagcaaatttgagygattttcttattcgtgttcaaaatgggtcataaagcagcgaagtcaactggcgatatcaataatgcattcgacccaggagctgctaacgaacatacagtgaagcggagttcaagaagttttgcaaaggagacaagagccttgaagatgaggagcttagtgaccagccatgggaagttgacaacgaccaat

SEQ ID NO: 456410 - DNA, 580 bp, Homo sapiens
ttaacatcaaccattctaaggtcgttcagcatttgaagcaaaatggaaaggtgaaaaagctcttgagtgcctcatgagctgactaaaaatttttaaaaaatcatcattttgaagtttcatcttctcttattctatgcaacaacaatgaaccatttctcaatcagattgtgacctccgataaaaagtggctttcatacgacaaccagcgatgactagctcagtcgttggacagagaagatccaaagcacttcccaaagccaaacttgtgccaaaaaagggtcctggtcactgtttggtggtctgatccactgcagctttctgaatccaggtgaaaccattacatatgagcagtatgctcagcaaattgatgagatgcaccaaaaattgcaacacttgcagccagcattggtcaatgggaagggcccagttcttcttcaagacaaggccctactgcacctcgcacaaccaatgcttcaaaagttgaacaaattgggcyacgaagttttgtctcgcctgctatattctcgccaactgactactacttcttcaagcatcttaaagactttttgcagggaaaaca

SEQ ID NO: 456411 - DNA, 516 bp, Homo sapiens
acctcgcacaaccaatgcttcaaaagttgaacaaattgggctacgaagttttgtctcgcctgctatattctcgccaactgactactacttcttcaagcatcttaaagactttttgcagggaaaacacttcctcaatcagcagaatgcagaaactaaggcagaaaaggctttccaagagttcatcaaatccgtaagcatggatttttacactacaggaataaacatatttctcattggcaaaaatgcattgattgtaatggttcctatttttattaataaagatgtgtttgatcccagttataatgatttaaaactcacagtccaaaaccacaattgcttttgcatcaacctatgtactacttctgttaagtactgcttgtagtggtgcagtggtgtgtagtggcttgtagtggtgtcaggcccttgtggagtaaacctgggttcatgaaaacatggaacaggaaatatatcrggctgtctctgaagatgttgattgttcagcttactctggacatt

SEQ ID NO: 456412 - DNA, 593 bp, Homo sapiens
aggtcccacttataataataaacaactggcaccctgaatttactaggaaatttcttagaaacactcttcctttcctgtatataacttctttaataatgcttactgtccaggattttgctgtctgtcaaaacacaataaaatatcttagtgatgtcagggatgtaggtctatggattcacctgaaattgctccaagtcctgatgccactggcctgggctcaggtattaacatggatgatccccatgttgtgttagcactctcaaaaaatagatgtgacatttatttgcctcaaacttcagcagaaggaagaataaaggagtctgtgccttgtgaaatttgacttcacattctagtttgtctgagagagagtcttgatttatttctgttgtttcaatgcaattattaagatcacccatctcatcctcaaaagtgagctagttttgatgataaattatataatcatcaaaatattagaataatataatctgcatactagatgtctcagtcatattgctgccaaaaaaatcccaaccaaccaaacagaaaytatagctgaaactgacttcaactgaaatcaagactgaattttgagt

SEQ ID NO: 456413 - DNA, 575 bp, Homo sapiens
cccagcataaacttcacatgttcagaattttcattgacctcactgagactttcatgagaatggatgtaccgagtaaatatgggaaagaattctatgatacaactctctaaatagaaaacctttgtttttgctgtccatatttgcataactaatgttataaaaggtgtatgcagaaaaacactcagagtgaagtccggggccatgacccaaattcaaaaagttgtaasaatagccaagtattcttatgtgatctgttaagctttcaaagctgcaatgaaaaggaaaacaacagaaaaatagctagattgatgagctgtaaattttatagataattatatgtgcttccttgtttgtagaaatacataactatgcatcctagacaaggtacctctagggagttaaagaagaaaataagaatgaaggcaaaaatatcctattcagattttctaaacagcttatgttgatgctaaataaactttaaaaaatagacacagtggcttaattttgtgatatttaagtgttataattttattctgttaagtgtgtatgattgtaaaagcatcaaagttgaaaat

SEQ ID NO: 456414 - DNA, 547 bp, Homo sapiens
cctatattgtctcccaaagttctaatatttatttttaaaattctcttgcattttcttttttcctttgtgttttctttttagttttgttactaaataacatattagtttttttctactacatgttaactccttaaactcactttttttcagtcaatattttcttaagtttcatccatgttattggtttcattgtggctcattttcrttgttgtataatattctctttgctcaatacatcaacgtgtattaatgagttctgctagtgaaaattttgttctccgtgctttgctataatgaataatgggctatagacactttttttgcattattttgtggtacatatgtgccaaagtttgtcttagatatattcttgtgggctttattgctacatcataagttttgcaaatatttagttttgcaatataattttaaaatattttccaaagtgtaccagttagcattaccacaaataaatgagagcatgtccccatataccttccacaccacatgcaaaagtcaaacttattttttccaaccaattgaccat

SEQ ID NO: 456415 - DNA, 589 bp, Homo sapiens
gggtagtttgctggcttttaatattttgttagttgttttggtaatttagtagttttaagattgtatctcaaaactgtttaatatttatatccttaattactgtcaatagtaatcttattggtagctgttagttaccatttacaattctatctctattgtgtatgtttttgctcatttacataatgagataaatattttatatgtattaaaataatcattcctactaattatgaaaatatattcccatactattaattttctgtttaataaattatctttcatatacacatctgaaatataatcatgtcagtgcttttctctgatatttttcaatctctgtaaagtttcaaatgttatttcttatgaaatagtaaatactatattttccttmgactagatttttttggatattgctatgtggattttattaattcattttgattctatattaataattatgaatgtattttaactgtttttaggcagataacatcatattacatattcacaagagtattatttcattgaactgaacatctgattttgattttactcttcctaagctgttaaaattaagtatccctttttc

SEQ ID NO: 456416 - DNA, 605 bp, Homo sapiens
aattcacatttctttttgattaagtgcaagccttgttcctttcctggcacctcccccaaacagaaaagcccggagaaactttgtctgaattaaacccaataaaagcagaatcctaatacyaatatatctgaggttgaattgctaggttccttgttttttcttgagatgacttatatatcatcacaggtttagatccttgaccagaatacccctggcaaaatgtgagaggcaataacaatttacatggtgagataacacaaggaagcttattttaatcaccagcaagtacagccagccattctttgagtaataagtatctctctctcaagatttaacatggagagtaaaatctaattacattttcatccttaactatatttctatttcctatctacactaaagagtgctgctttcggctctctaaattttggtcacattggtttcaaacactatagatttttctctgcaatattcactcataatctttcattctatctgaagttaaatttagattccataaacattatagtatgcattttattcttcaaagcacctgtgtgcccacatatgcaggtaagtgtatccatgtgttgttccatttgtgt

SEQ ID NO: 456417 - DNA, 235 bp, Homo sapiens
actctacagaagctcactgttccttcyttcatggtggatagctaaggcaacttctactgataattcttggtcaccactacttagcagatttagttaactattgctattctaattatttctattttatgacatgtcccaattctgctgcttacttccaggcactgatgcaataggctcctttaccttgttacatagcatcttcaataagttgtgtatgtgtgtgtgtgtatgtgtc

SEQ ID NO: 456418 - DNA, 568 bp, Homo sapiens
taactcttactactataaataaagataatacaatgttttatatgtgttatatgttattttatattaatattattaataggttttggagaatttgtcttatatgagtttatggagatttaaaaagaaaaactaattgctagatacccaaagtagtatagaataatttcatttgactgttaatttaagatcattcttatcaatactttaaactctttgctagtccagttaaaattaattattttaaagctaattttccatttcatggaaaagtatcagagttataagattgcaaattttatccgccacctcctatatatcccagttatatattgtatacctgtaagatttttgcacacttatgtgtgctgcattagattccaatatttaaaaactagaattmgaaaaatcttacaatcagctaagaaaaaaaataggagacatatccaaataataaaatcaatgttaatgccaaacagaagccacgtgggtagtagaaaaagtgatcctaagcactgagaaaacaaagcaaatgcaatccatgggacaattgatcctattttcaaaagtg

SEQ ID NO: 456419 - DNA, 378 bp, Homo sapiens
aggaagcaggtaagaagacaacataaagataacatttctctatgctctgtttcccaaactgtgctatccttacagaaaatttatttccagtttcaagaaagaaatgcaatcttttggctaaaatattgaaaatgtggatgaggaaatacttatcctggtaattcagctaaagcctatgagatttcatttattttatattccacacagaaacctaaaattattgatcactttttcaaaaatagctrcctcttaaaaacctttggtagtgttacttctggtacagccagaaaaaataattacgctgccaataacagaagttccctagtattactagaacatttcctttcctctatgattccagaggcactctaaacttag

SEQ ID NO: 456420 - DNA, 572 bp, Homo sapiens
aattattctctactcaaaaaacttttcaaaatataattattaactctgaactttattttttaataaaaatactggctttagttatcttatgaggaataactgaatagctattcattggaaattttaagtayctatttcatactaatataaccaagtgcctagaaattgtttcattaattcctgagaattttgaatcactttctcaagctaaacctcagaatgaactacattctgagttcagcaaactgataattacaggactgttaagattgctagcctgagtatatatccaaaggaatgaaaatcattctgtcataaagacacatgcatggatatgttcattgcagcactattcacaataacaaacacatagaatcaacctaaatacccattaatggtaaattggatgaagaaaatgtggtgcatatacacaatgaaatattatgcagccatgtaaaagaacaagatcatgtcctttgtgggaacacggatgaaggtggaaaccattattcttagcaaactaatgagggaagagaaaaccaaatacctcatttctcacctttataaatgag

SEQ ID NO: 456421 - DNA, 376 bp, Homo sapiens
agttaccatttagcatactgagaatttcccataagtaaataattattctctactcaaaaaacttttcaaaatataattattaactctgaactttattttttaataaaaatactggctttagttatcttatgaggaataactgaatagctattcattggaaattttaagtatctatttcatactaatataaccaagtgmctagaaattgtttcattaattcctgagaattttgaatcactttctcaagctaaacctcagaatgaactacattctgagttcagcaaactgataattacaggactgttaagattgctagcctgagtatatatccaaaggaatgaaaatcattctgtcataaagacacatgcatggatat

SEQ ID NO: 456422 - DNA, 566 bp, Homo sapiens
aagctgcaggataaaagaggcaccactgcccccaccccaaactaagggtctgtcatgacgaggtggtgtgtcagcttctccaggataaactactctaacaagaatttcctttctagaatgtatcaatattgsgtcagggggattcaaaagatattctcttatgagagtctgaagaaggaaagaaagcaacagtcattgtatagcacaaacatttatgcacatacacacacacatgcgcacacacctttttcccagtttttcagtcaaacagaaatgtaggtactgatgtgaagcgactttgccaatgtaactaaaattcctattcagtggattttaatttagattatcttgggttgtcctgacttaatcagttgctagtccttttaaaagagggcataggccttccttgagaaagtgggcaacaaactttggcccttgctcttgggtttcaatccacttggtctctttccttcctgactgtctgccttgtgaatttcaaacttacttagccagtccccacaagtgaataagccaattcatcagagtaatccatgtatttcctatag

SEQ ID NO: 456423 - DNA, 525 bp, Homo sapiens
attaattagcttaaaaggtttgaaaccatttgggcatagttttaaagacaaaagaaaaatcatcctgcaggaatgcagttcattattgagagaagatgagcaatgaacaatgaattccatcagttttataggcaaccctccttctccttcatacagtactatccattattaatgagcactatttctgagtgtgaaagaactgtttgaaaaacattaacatagtctattggatgtgattgacattgtcatttcttttattttgctgttggcaagtggcttccctgtagatgtaygtgcatctggacattactaatattcttcttgttatgcactctgggcagctgtgatatggaaattttcagcattgtattttatggtttatttttcagcttttacattgtgttctgttgcaagatgcaaaagtcaagcctttttgtatgcaatgatcaatcagaaaaaaattatcttttttctaatctgactcttctccaaaatgtaaaagaaatttattcgaattctggagat

SEQ ID NO: 456424 - DNA, 500 bp, Homo sapiens
cttgtcagggcttcatagcctcttacttgccccagcaaaaaraagaatgccaaattttcctaactacaaagattatcaaaataataacaattttaagtatatttattaagatgtaaaaatgttcatgattatataaagtgaagaaaaggcaacataatcacatttaatgtatacactattcctagatgtgtctgaatttcataaacattaacatttgaaaaatgaatttcttagcatttaggaaataggatatctacaaagaaacaagttaaatgcacacaccaaaaaaatgtaaaatgccatgtggttgttgtgattacaggtactttttattttcttcttttcactacctgtatcttctttgcctataacagtatgaattgctctaataacaaaattgtttaaaaactccttcatgtacatgaagcacttctagctcctcataaaagtgatttgacacttttaatctcaagcaagctgaaacagagcttttccagcct

SEQ ID NO: 456425 - DNA, 549 bp, Homo sapiens
actatatttctacatccctctccttaaaataaaaatctaaaagatccaatacaatggtaaatgacaaggcattgaagaaggaaaggaacaccacaataattcccccatacaaagctctccagaaaaggaggattccaagcaggtttgggcttcgatcacattagtgccataggaagctcagtgaatgtgtttcaatatcaatccttgttcctgagctagagtggaggaaaaacgagttcttcctaagcactgtcttcatccacagaaggaggtaggcagggctattctgactggcttctcagagaggatacccactcaggtatcaacagtcaaatatctgtacagtcactcactggcttcccaaaaataattaaggaaaataaataaacatcttctagccatagaagacatcacagcaagaagcaccaatttattctatgatacaaaattaaatgagacacaaagcaatycaatgttcttttcttcctagttcttatattccagttcctacaacagcatctagcagaactgaataactatttgttgaat

SEQ ID NO: 456426 - DNA, 592 bp, Homo sapiens
gtgtaatcccaacactttaagaggccaaggtgggagaattgcttgagctcaggagtttgagaccagcctgggcaccaaagttagcttgtctccaataaaaactttttaaaaattagccggrcacaatggcatgtgcccatagtcccagatactcgggaggctgaggtgggaggatcacttgagcaaaagaggtcaaggctgcagtgagctatgagcatgccactgcaatccagcctgggcaacagagcaagaccctgtctctataaaaacaaacgaatcaatgacatttttcacataaatagaaaaaatatcctaaaatttatatggaatgctaaactcattcaaaaacaccctctcagaaacactgagaataatgttagactaaatatctgggcacgccatggcccactgataaaattaactaccacaaacaccaaagccaaggctcttaacaatataacttctgcagtagtctttaatggaatcagcagagccacaacttgcaaattttcaatgccctcacagtcctagtagtactctgagtttggtaggagtgagcaccatttcaaagctctattttgataaagagttt

SEQ ID NO: 456427 - DNA, 620 bp, Homo sapiens
ctttttcatttaaaaagtatcagctatcatttcaaaatagcaaatgcagtatacacacttatttcctcattcttgaatgatgaaaaaagatggaaatggaacatgaaagtattttatcgagcttgtaggtaaccaactcactgaactgaaaagcaagggcaggcacatactgcctgcttcagacagaacacaggtgtttttgtgtgttgaaaggagtacctaagtgcacatcccctcaccaaattcacccccatgactgaatggtctgcacaaaatgttaagaaaccacttttggctcatgcctataatcccagcactttgggaggccgaggcgggcagatcacaagatcaggagattaagaccatcctggccaacacagtgaaaccccgtctctactaaaatatgaaaaattagctgggcgtggtggcgggtgcctgtagtcccagctgctcagaaggctaagccagggaaatcgcaagccgagatcrcgccactgcactccagcctggcgacagagcaagactcggtcaaaagaaagaaagaaagagagagagagagagaccactttatccaaagaacaagtaattggctctctcagccagggtcttggcagcaaaat

SEQ ID NO: 456428 - DNA, 525 bp, Homo sapiens
  misc_feature (1)...(525): n = A,T,C or G
gacctcataaaatgagttaggggatgggcacagtggctcacatctgcaatcccatcattttaaggggctgaggcaggtgaattgcttgaggttaggagttcaagaacagcctggccaacacggcaaaaccccatntctactaaaaatacaaaaattagctgggtgtggtggtgtgcacctgtaatcccagctactcgggaagctgaggcatgagaattgcttgaacttgggaggcagaggttgcagtgagctgagatcacaccactgaactccagcctgggtgacagagcaagactctgtctgaaaaaacaaaagarctagggaggattccctccttctcaaattttggaatagtttctgtagaaatgtaccagctcttctttgtacatatggtagaattcagctgtgaatccattaggtcctgggctttttatggttggtaggctatttattactgaatcaatttcagagctcattattggtctgttcagggactaaatttcttcctggttcagtcttggatga

SEQ ID NO: 456429 - DNA, 577 bp, Homo sapiens
ttagcagtggttgtggccaagggtcttttgcttgttccctgggggctccacccagagaggtgcaggtcggcaattactcagtgcaatcagcccagaatggagggtctgtgctgtgggcccaagccaggggttccctgtctggtgataagcagtggaaggtgtgtgagaccagtgggagacagactggcatcctctccttgggtcaamtgcagcttgtaggaagtgtggataaggtacttaggcctttgctccttgtttgtctgaaggtaacaagggcagttttactacagaggcagtggcagagaggctttcagttgcccctggagactctgttcagggagttgccgagttgctactggctcaatagctctgacgcagggctggctggaggccaggtgtggaggacctgcctggtgaggagagacggaagtgggcacccatgtaacagtctggccacttttccttagggcttcttcagtatgctggaggcctgctccagtccctagtcacctcagattttctagtaccaggaggtatcaccagcaaaggatgcaaagcagcaaagatggcagcctgc

SEQ ID NO: 456430 - DNA, 577 bp, Homo sapiens
ttagcagtggttgtggccaagggtcttttgcttgttccctgggggctccacccagagaggtgcaggtcggcaattactcagtgcaatcagcccagaatggagggtctgtgctgtgggcccaagccaggggttccctgtctggtgataagcagtggaaggtgtgtgagaccagtgggagacagactggcatcctctccttgggtcaactgcagcttgtaggaagtgtggataaggtacttaggcctttgctccttgtttgtctgaaggtaacaagggcagttttactacagaggcagtggcagagaggctttcagttgcccctggagactctgttcagggagttgccgagttgctactggctcaatagctctgacgcagggctggctggaggccaggtgtggaggacctgcctggtgaggagakacggaagtgggcacccatgtaacagtctggccacttttccttagggcttcttcagtatgctggaggcctgctccagtccctagtcacctcagattttctagtaccaggaggtatcaccagcaaaggatgcaaagcagcaaagatggcagcctgc

SEQ ID NO: 456431 - DNA, 554 bp, Homo sapiens
ggcagtggctagcacatatttccaagatatctgattctatggggtctttgtgcctttcatggcctttgaactatttacaactctgtaacttatagatgactgatagcgatgcaaattattcttatccatagactgcaaatgaattatttttcacagtgtttcagttgattttcctccccggtgttgaagaagccagttttacatttttgaagcaaattcatttatgtattcctgacagctcatgtggccaaatacgtgtctgtacttgattctcctgtgaatcygttttggtttttgtagcatcttactagttccctcattaataaatgagttaaataaagtatttgacctgtgtttatatttgtataagatacaatatttttcctttaaaaatatatatttttctattggaggatgggagaggcttccaggcataggaaataatggtatgtttttaagatatgataatgagaaagaacacggtatgctggtagcagaagaggcacaggagtagtagagaggtgaggctagaaggataagcaaaatttaggtca

SEQ ID NO: 456432 - DNA, 569 bp, Homo sapiens
tcccacctccaacagtggggactagaatttgacatgagatttgatggggacacagatccaaaccatattattccactcctggccccctaaatctcatgttcttctcacattgcaaaatacaatcatccctcctcaacagtccctctaagtcttaactcttttctgcattaactcaaaagtccaaagtctcatctgacacaaggctactctcttccacatatgagcctacaaaatcaaaaacaagttagttactttaaacatacaatgggggtataggcattgggtaggtactcccattccaaaagggagaaatcaaccaaaagaaaggggctacaagtcccatgcaagtccaaaacccagcagggcagtcattaaatcttaaagctccaaaataatttcctttcactccatgtcccatatctagggcatacttatgcaagggatgatctcccaaggccttgggcagctctgcacctgtggatctttagggtgtagcccctgmagctgctttcatgggatggcactgaatgcctgcagcttttccaggtgcatggtgcaagctgtcagtg

SEQ ID NO: 456433 - DNA, 550 bp, Homo sapiens
ttatcttttttatctggctacttttaagattttctatgactagttttgagaaatttgattattatgtgccttaatgccattgtcttcatgtttcttgagctttgggttcattgagcttctgggacctgtagatttatagctttcatcaaatttggaaaatatttggccatttttttctaaatatttgcctctgtcctacatctctatttcagggaattcaattacatatatactaggccactgaaattgtctcacagctcactgctctttacatttaaaataaattatttctgattaattttgaatactttccattgctatatgttcaagttcattcatcttttcttatgtaattatagtctactgytaatcctatccagggtctttttcatttcagacattgcagttttcatctctagaagtttgggttggatcttttttgtatcttcacatatctacttatctttttgaatgtatacaaaatgtttaaaatacttttagtgtctttatctgttagttctaaaatctgtgtcattttgtgtccaacatc

SEQ ID NO: 456434 - DNA, 548 bp, Homo sapiens
ggctaattgttacacatataccagcacacctctgatggtagtgccttgggaaccaagtaaattcaaaacatactagattaagtagtgtcttaaacaataatatttctcaccaattcttagagttaactgggatcagacattttgaaacatgggagaaacatgataatcaagccgagagacagatcacttacccaggaaaaaaggccagatccttagacccagagaatctggcataccattataatccagcttcttacccacagcaggaaccatgaggctacacaaggtcttgaggaagagaagcaaccagctttgttcttaactggaacagacatctcagtcatttatgtgctggagataaaacttactgatgcaggactgttccttccacgtgccctcactgcctctccacttcccagcacgcccagaaagatcaaagagtgtctgtgctttgccatcacagtttctaggtcttttatgatgcagaattggragaataagtaagaatagtaagaacagggtatgggagaggaggaaatgagatctaa

SEQ ID NO: 456435 - DNA, 525 bp, Homo sapiens
ctttgcagtgggcataggcaaataagacaagtttaatataggctattgaaaagtcatttgaatacctgagattttaatcttttaaccttagatatttgcctttgtgaaagaaaatraatcttggggccccaaagtcactaagctaagaggaaaagttaggttgggaactgcttagggcacacctgcctcccattttattcaaaatcatccctctgctcactgagaaaagtacatagttgatggcctcctttggaaagggtgatcagaaactcagaagaacgcaacatttgtctcttatctacctatgacctggacgccccctccccacttccaagttgtccaagtattgattgatgactcatgtctccctaaaatgtataaaaccaagctgtgctctgaccaccttgggcatatgtcatcaggacctgctgaggctatgtcacaggtgtacgtccttagctttggcaacattaacttccaaaattgactgagatctgtctcagatatttggggttcacactttat

SEQ ID NO: 456436 - DNA, 525 bp, Homo sapiens
ctttgcagtgggcataggcaaataagacaagtttaatataggctattgaaaagtcatttgaatacctgagattttaatcttttaaccttagatatttgcctttgtgaaagaaaatgaatcttggggccccaaagtcactaagctaagaggaaaagttaggttgggaactgcttagggcacacctgcctcccattttattcaaaatcatccctctgctcactgagaaaagtacatagttgatggcctcctttggaaagggtgatcagaaactcagaagaacgcaacatttgtctcttatctacctatgacctggacgccccctccccacttccaagttgtccmagtattgattgatgactcatgtctccctaaaatgtataaaaccaagctgtgctctgaccaccttgggcatatgtcatcaggacctgctgaggctatgtcacaggtgtacgtccttagctttggcaacattaacttccaaaattgactgagatctgtctcagatatttggggttcacactttat

SEQ ID NO: 456437 - DNA, 524 bp, Homo sapiens
tctatagttctgtctattcatttgatcagcagataatgagaatcttcaaatgctgcgcaccatccaaaggccagagttatagagatgaaagatactcaagggctttggagctgaaatgggaacaaggaaaggaaaaaaaaaatagatggtgtatttgagcagggatctgtggagtgctaaggactggaagatagtatagaaacaataatacacatacatgctggcactgttatgaaccctttgtatggattaatgcattaaatctgcactataacataagagattggcataattcttaccccatttaatagaggtagaaattaaggtataaatgttatgttatttgtccaaggtcacactacatttactgccaaacattcaggtggccccacgcacagtaaagtaaatgtcygatcacctccaagaaagcaacagggatcatcatcatcaccaccactcaatgcgttgcacatgccaggcttttctctaagtgttttttgttgttgttgttgttgttgttgttt

SEQ ID NO: 456438 - DNA, 567 bp, Homo sapiens
acaatagggcaactatagttaatagtttactgtatatttcaaaatagctagaagagaaaatttagaatgttcccaacataaataaatttttgaggagatggatctcccagttacccagatctgatcattacacattgtatgctggtatcaaaataccacatataccacacaaatatgtacaactatcatatatcaataaaaatgtttaaaaagcaataaagagcatttaacttggaagaaatcacattgtcctccctttgcagacaacatgaccttatatayggagaaactaaaagactccaccaaaatacccttagaactgataaattcagtaaagctgcaagatacaaaatcaacatgcaagaatcagcagtgtttctatacaccaataatgaactacctgaaacagaaatcaagaaagtaatcccatttacactagctacccaccccccaaaaaaagacacctaggagtaaatttaaccaaggaggtgaaaggcctctgcaataagaactataaaacattgataaaagaaactgaagagaacacaaatggaaaggcataccatg

SEQ ID NO: 456439 - DNA, 567 bp, Homo sapiens
acaatagggcaactatagttaatagtttactgtatatttcaaaatagctagaagagaaaatttagaatgttcccaacataaataaatttttgaggagatggatctcccagttacccagatctgatcattacacattgtatgctggtatcaaaataccacatataccacacaaatatgtacaactatcatatatcaataaaaatgtttaaaaagcaataaagagcatttaacttggaagaaatcacattgtcctccctttgcagacaacatgaccttatatacggagaaactaaaagactccaccaaaatacccttagaactgataaattcagtaaagctrcaagatacaaaatcaacatgcaagaatcagcagtgtttctatacaccaataatgaactacctgaaacagaaatcaagaaagtaatcccatttacactagctacccaccccccaaaaaaagacacctaggagtaaatttaaccaaggaggtgaaaggcctctgcaataagaactataaaacattgataaaagaaactgaagagaacacaaatggaaaggcataccatg

SEQ ID NO: 456440 - DNA, 374 bp, Homo sapiens
tgggtaatttataggagaaaaaaggtttaattaactcacagttccacatggctggggaggcctcaggacacttaaatcatggtggaagatgaaggggaagcaaggcttgtcttacatggyagtggggttggggggaactgccaaacacttttaaaccattaaatctcgtgagaactttctcactatcaagagtacatcatgggggaaaccgcccccatggtccaattacctcctaccaggttcctccctccacacatggggattataattcgagatgagatttgtgtgaggacacagagccaaataatatcatagtggatataatgtattatgtataatgtgtttgttttattgagcacctattacataccagg

SEQ ID NO: 456441 - DNA, 534 bp, Homo sapiens
tgtcttaaaaaatgtaccatgtgtgcttgagataaatgtgtattctgttgctattgggtagagtgttctagagatgtatgttaaggctaactggtttatagtgctgttcaagtcatatatctttgkttatcttctgcctacttattttctccattattaaaagtgagattttgaaacctccaactattatagttaaatcgtctgtttctcccttccattctgtcagttattgcttcatatattttagggctctgtccattgaggtctatttttctcctacagtgtagagcctggagtgtcccttctcagagggtgcaactttgggcatgcatattcaccttgactccctcctcccatcccagggataacagtgcttttacctgacctctctgacagtgtctttcgctgatgtcccttatctcattgtgagtttctggctggtatctctctattggtatcacacctagacattaacctttaccaactgctagctgattgccctcttgttttcaacaatgtcatggatcttaaaat

SEQ ID NO: 456442 - DNA, 534 bp, Homo sapiens
tgtcttaaaaaatgtaccatgtgtgcttgagataaatgtgtattctgttgctattgggtagagtgttctagagatgtatgttaaggctaactggtttatagtgctgttcaagtcatatatctttgtttatcttctgcctacttattttctccattattaaaagtgagattttgaaacctccaactattatagttaaatcgtctgtttctcccttccattctgtcagttattgcttcatatattttarggctctgtccattgaggtctatttttctcctacagtgtagagcctggagtgtcccttctcagagggtgcaactttgggcatgcatattcaccttgactccctcctcccatcccagggataacagtgcttttacctgacctctctgacagtgtctttcgctgatgtcccttatctcattgtgagtttctggctggtatctctctattggtatcacacctagacattaacctttaccaactgctagctgattgccctcttgttttcaacaatgtcatggatcttaaaat

SEQ ID NO: 456443 - DNA, 570 bp, Homo sapiens
gactttgtttttttgtttgtttgtttgtttgtttgcaaatttgacttacttgttacagttgtttttctggggagactttgcacagctcctcatgccaccattctggagtgcttctcctccctagaatgttttacactggttcattctcctgtttgtattattcaatgcaattatatgggaagggattataattttatagtataatttttgtctccacaaacatttttctggccacatgaggctgtgggattgctccagtcagcagctcaatgacctcaaagcccagagaagccctggagctgtgaatatagatgaggggggccttgggaacctgcttggtcaggacttcctcagcagatggctctcrctttatgtcctgatttatattttgtgggaggagtaaggataaaaatagtattttactgaggtttttgtttggttcatgacttaaataagctgcacagaatcttagggaaggcatgggaaggcctcaaacaaatatttgctgtccatcagtcatctgcagcaacatgatgattgtagacttaaagtcctacaacccaaaaagct

SEQ ID NO: 456444 - DNA, 330 bp, Homo sapiens
agacaaagtgatataactgatagtgaaattcaaattgaatgtaaatggagttatagaagaaatagctgattacattggcatttstgctgtttgagggttgctagatatgtagccagaggaatttagtaaatgcaaatgtgttgacataaatgagataaatgattttgtcgaaaggttgtggatgtccaaagtgacatgagcaaaaactaaaaaaactgaaaaactctcaaagatattttatgacattgaaagcacataggataaaatgttggaaattgatccaaatgtagaaaggagtatgacaatttgccaaggcatgaaaaaggtact

SEQ ID NO: 456445 - DNA, 505 bp, Homo sapiens
tatgctggtcaattattttggtgctattagccaatttcttgttttgatgtgctcttctctctattttagtggctagaaatcyacagattctatttcccagactcccttaaaaattagtttctgtttcagttctgccaatgaaaggcactgttgggagattgaagaaaagagagacagaagagtgactttcttcatcttcccagtttccagtgtcatcttcagcagcaggggagcaggattagcattaatgacaggagacacaatgccagaggcctgggagggcaggtcctagtgctaacagcaggaacttgtaacagcagtgacctcaagagctgggaaagatctgcttctcttttgctccttcaactctggagtccacagttactaagcatctggtaaaactactttcccctcttgtttctctaactcctctccccaacattcctgtaaccaactctgaattaaattctctttgtctgaaatactaagggtagtttttcctttc

SEQ ID NO: 456446 - DNA, 423 bp, Homo sapiens
ctaactgctatttctaaaagttgacccttaatacattatttacactattctgactatcttgttgaaygaaaagaaatggacaatatttcacttctttggcctacaaaaatagcaatttaatacagctcaacataatatttactgtaacaataaatattgaggagtgctgttacatgaatatatatttaattgaaaaggtgatgcctgtctggctaatgttttgaacatggggtaagggtgagggccaacggttttacataagaacgtgtttatctctgtttttcatcttatctctcactcttgctctctttgagaatcctgaggatgaaccaaattcttccttcctatggttctgtccattcttactcttggccgtgtctacttctatctgttctctgtcttctatacgttttgttgtattgt

SEQ ID NO: 456447 - DNA, 423 bp, Homo sapiens
ctaactgctatttctaaaagttgacccttaatacattatttacactattctgactatcttgttgaacgaaaagaaatggacaatatttcacttctttggcctacaaaaatagcaatttaatacagctcaacataatatttactgtarcaataaatattgaggagtgctgttacatgaatatatatttaattgaaaaggtgatgcctgtctggctaatgttttgaacatggggtaagggtgagggccaacggttttacataagaacgtgtttatctctgtttttcatcttatctctcactcttgctctctttgagaatcctgaggatgaaccaaattcttccttcctatggttctgtccattcttactcttggccgtgtctacttctatctgttctctgtcttctatacgttttgttgtattgt

SEQ ID NO: 456448 - DNA, 620 bp, Homo sapiens
ctccttcatatggttagtatttttctgcttctttgcatttcttgttatctttgattagataccagacattgtgaatattatcttgctagtattcataaaaatattatcaagccttgttttgggatttggttaagctacttggaatcagtgtgatcctttcaggtcttttattgaagctttgttatgtgggactggaactgtgtttaatatggggttaatctccagcttccatatttagaagggaaggccattcttagtattcttaccaatacctcttgaattatgaggttttccatactgactgttgggaacacacaatattcctgtccctgtgggatctctgagcagtgttctctttgcagtggttcattttccatcctrtgataatttcctcacataattgtgttgatgagctctcaactgaatcctccagaaagacccccggcagatctacagagttctttctctgtgcagctctttcatctctgagactctgctctgtgacctcactgttttgtcttccttggatttccagttgtctccttgactcgagaagaccacaagattcccctctttttgtaccacaatctgaaaactttccccaggcagcaaggtgaggc

SEQ ID NO: 456449 - DNA, 408 bp, Homo sapiens
ctgcaaataaaaattttaaaattatatttttaatgttgtcagatttgaaaaactcacattttacctgagtaaataagtaataaagatgtcattgtctttttttaatcattgacaattttatatagcaaaataagcctctatatgtatatcatagagatgttttagtgtactgtttgtactgtttgataatgaacacatcaataatttgggtataataaaaagtataattttcagaataaaataactgttttaatccttcatagattttccaaaaccatgaaaaatagcataaatycaatatgatgaagtgaaacttattaccacagagttgctgaagctgaatgtattgtttctggaaatggattattactctgcagccaaatagatttgatatttgtatatatctac

SEQ ID NO: 456450 - DNA, 532 bp, Homo sapiens
attaaagtcacaatgaagtactaccaaacacctaatagaatggctaaaatttaaagactgacaaaaccaagtgttgacaatgtgtaacaaccagaacactcagacagtgatgatggggatytaaatgtttttggtactttcttacaaatgtctatagacatgtatcctatggcccaataattcaatgactaagtatttatccaagagaaatgaaaacatacattctctaaaagtcttgtacaagagtgtttctagcagccttattcttaagagtcccaaattggaaacaatccatatctcagcaccaggaaaatgggaaaacaattgcagtataaatacaataaaatgctattcagcaataaaaattaatgaactattgctatacataagcaacaatatgaattaattttatagacattatgctgcatgaaacaagtcatttacagaatacttactgtgggattgcatttatttaacctctgcaataagcaaactatagtaaaaaaaaatcagtaaagcatttgcctttgtg

SEQ ID NO: 456451 - DNA, 532 bp, Homo sapiens
attaaagtcacaatgaagtactaccaaacacctaatagaatggctaaaatttaaagactgacaaaaccaagtgttgacaatgtgtaacaaccagaacactcagacagtgatgatggggatctaaatgtttttggtactttcttacaaatgtctatagacatgtatcctatggcccaataattcaatgactaagtatttatccaagagaaatkaaaacatacattctctaaaagtcttgtacaagagtgtttctagcagccttattcttaagagtcccaaattggaaacaatccatatctcagcaccaggaaaatgggaaaacaattgcagtataaatacaataaaatgctattcagcaataaaaattaatgaactattgctatacataagcaacaatatgaattaattttatagacattatgctgcatgaaacaagtcatttacagaatacttactgtgggattgcatttatttaacctctgcaataagcaaactatagtaaaaaaaaatcagtaaagcatttgcctttgtg

SEQ ID NO: 456452 - DNA, 557 bp, Homo sapiens
gtatgcgataaaagggaataaacgatatcacatggtgaaataattttgagatatttatacactgtagatatgtatactctctgcctgctgagggcactattccaacaacaccgttcactccattccagttggaaccatccctttaaaaaaattcctcattgcatagtggacattttcttcattttctctcctccattttccattgttgtttaaatcattaaagttacccttgctgaatgttaagcagaggaaaaggaaaaagagcaatataaaggtagagcccctcttagacacaactacactgttcagcaaggtcctctatactagtagcttcttattaaagccagaaattccaatattatcacgtctgccttttgtgctgagttgtcttcatcagctgatctggttttccttcctgacttgttcctctctcccttcttttcttcactttctgtccctttctccccttccctctaatacaatagtcgtttaattctctaaacaccccacaactctcctattgtcctcaytttacaaatgagaaaaaaaaaaacaca

SEQ ID NO: 456453 - DNA, 597 bp, Homo sapiens
ataacttcagacaaattacttaccccctttgaactttaacgtcctcacctgtaaaattcaaataatgcttacctcagagggttaataagattaagtgagaaaatatatgaaattactcaatacctgacatcaatattaagcatcattcttactaaaagatatgactaacaaggtggctttactcagtttaggtaccagtttttattaacactaaagcttatttgaatcacagtttggcaatcaccaaatgtattagttaaaaaaaaaaaaaaacaggacaacgtaaggagaaaccatgtacagactttcttcattgcatgcattaaagccctaactttagcacagaatatttaagcttcaaagtatttcatcaatagatcaataaacccctaaattaggaagcctggtttcattttattccccatttaatctctgttttccttttctctcccatccctagtaatagacttttctgattctcacctattgttgtttctaaggttcttaggcttagacttaaggctyttaagtttatctgtctgattactattcaatcacttagcaaatacttattaatttcccatgttatgtaagatt

SEQ ID NO: 456454 - DNA, 558 bp, Homo sapiens
aatcgttttttaaaagcaagctcaccaagaaaggactgcagttgctataaagtcttggcccccaatgttatcttaacaaatattcttgacatacattacattacatcattgctgccatctgtacacaacactattttttgstgacaagtaagtgtgataagatgcagctcttgagactattatgattttattttaaataaatgtgttttagtaatttagcctttaacacaaaatgctattgtactttaagacagggttggttctttttaaagtgaaacaaatcttgaatttgcaatttaaatgtacattgttttcttttggtaaactccacgagaacacatctccaatatcccatttatttttctgcatttaaagaacaaattgtagattaaatccattgggaatcacacattttaaatgactcatgctcattcttgtaagttaataagaaagagtatttatataaattcagaaaaatattctctgcagcttctaaagtgaagacatgttatgagctcagagataatcaaatatgaagccagtatattctggaccatg

SEQ ID NO: 456455 - DNA, 558 bp, Homo sapiens
aatcgttttttaaaagcaagctcaccaagaaaggactgcagttgctataaagtcttggcccccaatgttatcttaacaaatattcttgacatacattacattacatcattgctgccatctgtacacaacactattttttgctgacaagtaagtgtgataagatgcagctcttgagactattatgattttattttaaataaatgtgttttagtaatttagcctttaacacaaaatgctaytgtactttaagacagggttggttctttttaaagtgaaacaaatcttgaatttgcaatttaaatgtacattgttttcttttggtaaactccacgagaacacatctccaatatcccatttatttttctgcatttaaagaacaaattgtagattaaatccattgggaatcacacattttaaatgactcatgctcattcttgtaagttaataagaaagagtatttatataaattcagaaaaatattctctgcagcttctaaagtgaagacatgttatgagctcagagataatcaaatatgaagccagtatattctggaccatg

SEQ ID NO: 456456 - DNA, 558 bp, Homo sapiens
aatcgttttttaaaagcaagctcaccaagaaaggactgcagttgctataaagtcttggcccccaatgttatcttaacaaatattcttgacatacattacattacatcattgctgccatctgtacacaacactattttttgctgacaagtaagtgtgataagatgcagctcttgagactattatgattttattttaaataaatgtgttttagtaatttagcctttaacacaaaatgctattgtactttaagacagggttggttctttttaaagtgaaacaaatcttgaakttgcaatttaaatgtacattgttttcttttggtaaactccacgagaacacatctccaatatcccatttatttttctgcatttaaagaacaaattgtagattaaatccattgggaatcacacattttaaatgactcatgctcattcttgtaagttaataagaaagagtatttatataaattcagaaaaatattctctgcagcttctaaagtgaagacatgttatgagctcagagataatcaaatatgaagccagtatattctggaccatg

SEQ ID NO: 456457 - DNA, 558 bp, Homo sapiens
aatcgttttttaaaagcaagctcaccaagaaaggactgcagttgctataaagtcttggcccccaatgttatcttaacaaatattcttgacatacattacattacatcattgctgccatctgtacacaacactattttttgctgacaagtaagtgtgataagatgcagctcttgagactattatgattttattttaaataaatgtgttttagtaatttagcctttaacacaaaatgctattgtactttaagacagggttggttctttttaaagtgaaacaaatcttgaatttgcaatttaaatgtacattgttttcttttggtaaactccacgagaacacatctccaatatcccatttatttttctgcatttaaagaacaaattgtagattaaatccattgggaatcacacattttaaatgactcatgctcattcttgtaagttaataagaaagagtatttatatraattcagaaaaatattctctgcagcttctaaagtgaagacatgttatgagctcagagataatcaaatatgaagccagtatattctggaccatg

SEQ ID NO: 456458 - DNA, 560 bp, Homo sapiens
aaggaaaaatgatgatgaataaaacactctccttgatctgytgaaatttcagtctattgaaagaggcagaaaattaaaaaagaagttacactgaagcaagttgaataagtctgagaatagaagaagtccagggtgctatgaaaattcaaagaaaagatatataactaaagcatggtgatgtaagaaagacttactgtggaactgatgactaagctgagacccaaatgattatatgatttaacaagataaagtttggacaccttttttttttttattccatccagaggacaaagatcctgcaaaatcctattggtaagagaaagcatgttttaacatggccagacctggatactgctccaacaaatttttattgagtgtcaactctctactaggcactgtgttggaactagggatattatggtgagtaagacaggcatggtatttttcttcacaaaatttaagagaaaggtaaataaacaataataatcatgcatcttaacttcatagtttattttctgaactgcaatgaccatgttttttactctactttagccactcag

SEQ ID NO: 456459 - DNA, 560 bp, Homo sapiens
aaggaaaaatgatgatgaataaaacactctccttgatctgctgaaatttcagtctattgaaagaggcagaaaattaaaaaagaagttacactgaagcaagttgaataagtctgagaatagaagaagtccagggtgctatgaaaattcaaagaaaagatatataactaaagcatggtgatgtaagaaagacttactgtggaactgatgactaagctgagacccaaatgattayatgatttaacaagataaagtttggacaccttttttttttttattccatccagaggacaaagatcctgcaaaatcctattggtaagagaaagcatgttttaacatggccagacctggatactgctccaacaaatttttattgagtgtcaactctctactaggcactgtgttggaactagggatattatggtgagtaagacaggcatggtatttttcttcacaaaatttaagagaaaggtaaataaacaataataatcatgcatcttaacttcatagtttattttctgaactgcaatgaccatgttttttactctactttagccactcag

SEQ ID NO: 456460 - DNA, 560 bp, Homo sapiens
aaggaaaaatgatgatgaataaaacactctccttgatctgctgaaatttcagtctattgaaagaggcagaaaattaaaaaagaagttacactgaagcaagttgaataagtctgagaatagaagaagtccagggtgctatgaaaattcaaagaaaagatatataactaaagcatggtgatgtaagaaagacttactgtggaactgatgactaagctgagacccaaatgattatatgatttaacaagataaagtttggacaccttttttttttttattccatccagaggacaaagatcctgcaaaatcctattggtaagagaaagcatgttttaacatggccagacctggatactgctccaacaaatttttattgagtgtcaactctctactaggcactgtgttggaactagggatattatggtgagtaagacaggcatggtatttttcttcacaaaatttaagagaaaggtaaataaacaataataatcatgcatcttaacttcatagtttattttctraactgcaatgaccatgttttttactctactttagccactcag

SEQ ID NO: 456461 - DNA, 527 bp, Homo sapiens
gcactgccaataagctaatcactttctactytttcaaactgacatttcttaaatatttactcaccaccaatttagtgcagtggctgaattctttgtgaaggatgtagcaaaggaggactaatggtgaaacctgctcccttgacgacacgatttaaccatggacccacatgtgcatatcctattcttgaaagcactgaaagtggcttttcaaatatttcttccaacaattgcaatcattgacagtttctctgtgacatagaattttctccatctcagtatgttcccagtgttatcttagcatcaaattaatattttaaaactcttataaattggctcatagagacaagtggccaaatttttgtctcttaattaccctgtggcagtgtaacaaagttggaagaccatgtgctttagaatcagatacgttgatggaaaaacaagttctaccacataaaagcttagaaaatttctaaacttttgtggccttgtattggcacttgtggaaaaatcctcaataagtttttatg

SEQ ID NO: 456462 - DNA, 564 bp, Homo sapiens
ccgcttactgcacatattatatgtgttaaacrtatattcttgttaaatctctttactcagtaaaacttttgatggattcactcatttcaacagaatgtcatcttacctcttgcattgcatgcctgtccctccctatactttgaaccccattaagcccaatcccagtaacagaaatcacttacttttacaaacggatgttgaaatattatggctttgtctttttaatgtgtggggaagactgccatctctaccctcagaggaagcctaaatattacctattctgttaccatttttctgtgtcccattttattctcctctggatccatagtgcagtttactcatatcaacatcctgtacatcactcgatacatgactatctcctcccttaggttagaggataccagaggacagaaattgtctaaacttcatctttgcctttagtaggagtcttcacttcaataatgttattagtagaaagatttgttctgtgaaaagtgacccaatctatgtttcttatatttggaccagacccatactgcagaatattattcatccctgagccat

SEQ ID NO: 456463 - DNA, 509 bp, Homo sapiens
taacatacaaacataatgtctgaatccccaaactatagactttaacccaaattggtgaaacacaaaggaaaaggaaaagaaactttaaattgtttttaggcctgctgtttggatattacaggaaccactgtgatttatatttggcctgagggtataaagatctatgattttatttatggcttggttaaatcttttcaaaacacaagagccacctattcataatattaagaaatcaggtgatttaaaccttactacactctgctaatatactgttctcttcagtagaaacatgtaggagtatgttagggacaatctctcaattatgagcaaatttacaacttcaatgctgtcttcttaaattacatgccatcacttacaatccaaacatcatttaagagtttataagtttaaaaggaggacaaaacaaaaaccyttaacaactcattattatttaagccagagttgcaccaagttaccccttcaattgtctaaataaattctagacatgg

SEQ ID NO: 456464 - DNA, 350 bp, Homo sapiens
ggtgctgttgtgccaattctaggtgaattggagtatgtggctctggctagcatgggtgtgtaggccccattattagattcctgggcagtttgcctcctttctagtctctgcttcccagactggttctccacactccgcttcacttctagtttattctgtcttcctcaaaactcacccccaggacggtcttctgttagtcttttatgccttaccctgcaccgggtctgcataccctccattctgagaaagccaattrtgtttactgtctcctctttaactgctgaaggaaggatgggtgttggcacttggcggagaaggaggtttgtttggacagaggtctctttcccaaa

SEQ ID NO: 456465 - DNA, 531 bp, Homo sapiens
gtctatagccattactctgtgaataacacaaaaattagtgtaaatattcttctggtattggaaactactctcagatgccacaaagaaagccttcgtgttattggctttatccttgttctggcatatatctctactgtttcactttcatcttactattaatggaaataaaaatatcaaccaacattaatcttggaagtatacatgttcagcaattgcaaccattagttggctatagatataagagtctggccaacatcaattaaaacgttctgtgggaataaagtggccatatggaatttacaataagaagtactatatattttattatttgtgaattgtgtgctatgcatcatttayatcagtaaaccttataataaacttattatacacacacacacacacacacacacacacacgcacctttttctcctggaaagccaatttgtaaatgtttactactgctaataggcaactcaaacttaacatgtccaaaactgagctcttgattttccatcctgaaccagttccccc

SEQ ID NO: 456466 - DNA, 603 bp, Homo sapiens
tagctcctccgccctgtgccctctgagtgtttgttctcaggcaggcacacacacatgttctgaacataaccgggaaagcaatttacaagaaataattgccggtcgatgtgtgcttgggaacagcggtgagctcagactatttctgtctggcgtatcagcccacccagcatcctcccactgcggctgccctgggggaggggctcctatcacacagggtgggcagtttgtttctaatgcaggacccagactagccaaccccagtgacagccggctctgagccttgattgaattcaaaggagaggagctgttggggggcagggaggrgctttatgaggcctaggatgtgtaggtcagcaaaagcagcatgtacattccctttctccaactgttggggaaattctaccaggtcttcagggccttgctcagtgtgcggtctcccccacatctctctggctcggagtcctcaaagcttgtttttgttcttgcagaggctgttgtgctcaaagggtggtctcagaccagcatcatcagcatcacctggaatttgttagaaatgcaaattctggggacttactcctgacctactgagtcagacactggggt

SEQ ID NO: 456467 - DNA, 605 bp, Homo sapiens
ttgcagtttactcgaaggtaaacaaaaatatttttctatctcttattaatactacacaaaaatcttgttcaaaagagaagaccaaattctacctttgtatcagcgtgttactaatactaaagcyagccttaataaaccttgtaaacaagtctatccaatctcaatcagttttgaccacaaggtaaggtttccataaaccttttacaacctcttacaattttcccattttctctctttccccaactttctatatccgttctttttattccttcaatttaaaacaactttttaaaacctcaaaactagacaaaattacttttcctttaacaaaaactacattctcatggctttttataatcttttaaaacaaaaacacagctcttttcttctgtgtcctcagcagaattgcccttaatgcctcattcacagtaacccatgcatttctagcctgcacctctaaattcttccagcctttacccattattcacttccaaagccactttcacatcttcaggtatttgttatagtgacagcccctctctggtaccaatttcctgttttagtctgttttgcgctactttaacacaaatacaacagactgggtg

SEQ ID NO: 456468 - DNA, 582 bp, Homo sapiens
gtcatttaaatctgcctgccaggttagtaggccaggggcgggctggcacgccccctgcccccaccccggatctgcattctgctggaagcggtcgtcttggcaacgctggggcatggcgagctctgtygaagggtaactgttggtgggagcagccctttcatctccccgacccgggtacaagtggcccaactgccttagggccagagccaggccaccctgtgctggcccaggcctgggagaggaagtgggaacatccaagtcccttctgtgcacccagctctccaagttaggggctttacctttgctctcagcctctcaactgccctaggaggggaaagaacctgccccagcttgctgaacaacaatgttgagctggaatccacctttcttaggggtcgctgctctgccttcagagaacattctctagagcccaagacctgtccacagaaaccagagatcagtcagagcctgtaaggctgacagctccctcatctccctgtcctaggaggctgggtatcaattctctctgttctttccagggcctttctctagacgtgtccctgctctgaggattggggtctc

SEQ ID NO: 456469 - DNA, 588 bp, Homo sapiens
ccttttccttctgtccggatgtgctcaaaattccaaggggcttgtgtgtcttcctggcattgcaggaggggcatctgaccaatgttgatcttctgctgcattcatgcaccttggtatctgttctctagtggarctgaggaatctccccttcctatatctgccttcatctcagttatgccacctctcaggtctccagtttgagtcatccaccctgactcaccactgggtccccttgcccactttatggtgatcccccagcaggccctgaagctctcaagtttcagctgttacctgactttggctcattcttaaacctcactccctcatttgcctaaataaactcctcttccaccccagcctctgaggcttcttctcctgcctttctctctcttagcctcttaggccaaatctcgtaggagagaggccaaatcctaagatattctttcctgtctcctgtggggggagaggttttacaactacctttgtcagatgtgttccctatgccataggaagcaaggatgacaagctggggggaaggttgtaaggaagatagtatctcagatccacatcctgcctaaatcagctcac

SEQ ID NO: 456470 - DNA, 501 bp, Homo sapiens
tcagcatggtcactgctgatctgaccatcaggcttggtgtcaggagctagcaatcctcctggctctagttaggtgacttgtctctaggagccctgcctactgtcctcccaacctcaacacctagtgccatgggaatgatgttctgcaccaacaaacctttgcctcctgtgaggaagatcttgtggaatgtctgccgcaatctacagagtctcctagcctgacctgtggactcacagtaatagttggtagccrccttgtaaaatgtgaccctacttcccattccaacatcagttgattggactataaaagccaatagaaatccttcccccggtatttggattgcaggagagagagacagagaaacatggagacagagagatttggtccttctgtggggctgtggttgtctgtttttgtgctgtgcagaggtagcagaggtagcagaggtagaggagcagaggtagcaagtcagtagaaatagcaaacaatgtatcagctaca

SEQ ID NO: 456471 - DNA, 501 bp, Homo sapiens
tcagcatggtcactgctgatctgaccatcaggcttggtgtcaggagctagcaatcctcctggctctagttaggtgacttgtctctaggagccctgcctactgtcctcccaacctcaacacctagtgccatgggaatgatgttctgcaccaacaaacctttgcctcctgtgaggaagatcttgtggaatgtctgccgcaatctacagagtctcctagcctgacctgtggactcacagtaatagttggtagccgccttgtaaaatgtgaccctacttcccattccaacatcagttgattggactataaaagccaatagaaatccttcccccggtatttggattgcaggagagagagacagagaaacatggagacagagagatttggtccttctgtggggctgtggttgtctgtttttgtgctgtgcagaggtagcagaggtagcagaggtagaggagcagaggtagcaagtcrgtagaaatagcaaacaatgtatcagctaca

SEQ ID NO: 456472 - DNA, 549 bp, Homo sapiens
acccaggatttggtgagacatctagaattagagctatcctgagacgtcaattgagcagagkccctcaacaccaggctctgggactgtgttacaaaagcagccaggcagagagcagaacaaaggagggtgggacaggtgctggctttcagcttggactgcttcaccacggtccctacctacactccctccccagggagcctccctgttcttcctcaaccatgccttcactaggtgagaacattgttggtggcactggcgccacagctgactggccagttatctccccatcccaaagcaaaacttggtgggctatgcacgcctcagaaagtctgggtcaacccgctacaaatgttaagcacagtgctggggcacccctgaattaatgaggcatttcttaatgacctaaaaatatatatttcttttgtcaacctgcatctttaatggttaattcaagcagaatcagcgaggtgaattctattccaattggcagctcctccccactttaatgtcctttcagatatctagagtaaaatgtgcagaaaatagttt

SEQ ID NO: 456473 - DNA, 590 bp, Homo sapiens
taacttaaggatccttataagagggaggctggactgtcagagtcagagaaggagatgtgaggaaagaagcagaggtcagagtaatgtggggccatgagccaaggagcgcaagcagtctctgaaaggtggaaatgggcaggaaacagattctcccctagagcctctaaaagcaatgcagcccacctaatttgttttggacttctggcttccagaactgttaagataatacatttgtattgttttaagccactaaatttctggtaatttgtaacagcaataataggaaacgaatacactttctaagcagcttgacttgcacataagtcattgctggataaacctgaaacatggtgctccttttggctttcttcacagataatctgctgctggtgcttccccctccygacttataaatgctgccattagctctgtcatttccagctgtgttcttgttctcttcaactatctccgggatccaccaatgctgtctaattgtccccagtaagtaagaaaactgaaaggagaaaatgatctcattgttcccagttaagtaagaaagccgaaaggagaaagtgataaagacaagtgca

SEQ ID NO: 456474 - DNA, 616 bp, Homo sapiens
tcactacatcaattaataataattgtcaagtataacctaccaggtaccttacaggtatctcctcatttaatccactsaactgttgcattattcccgttttactgggcttctgtgaaaagtcaccgaacaatcacaaccaaaataacaattccccaaacaactagtttccttcttcttgttagatcccgtctctgttaacagcaacaccatctactcagatgtccaaattaaaaagttctggtagaaacaacatggtctctttctactctatacctctgcacaaatccggccctatgtcttgaaaaatctatacctccagctgtggatgcaaataggaaggaaatagcccttcacgcattagtgtaaaatgtgaatgaaccaccaacatggccaccacctgagtctcctctgcacccctctgtggcaaggtgatgtgaggaagctctttttctgattatggatgcttttgcaacagccaagcttgaagatgtttctgctgtagtcatcttcagttccagcttggctgtgtttccttgggatagacatgggagaaatgtctatataatgccttcctaaagcttgggaaaaatagaacttccctggtgtcccaggatgg

SEQ ID NO: 456475 - DNA, 616 bp, Homo sapiens
tcactacatcaattaataataattgtcaagtataacctaccaggtaccttacaggtatctcctcatttaatccactcaactgttgcattattcccgttttactgggcttctgtgaaaagtcaccgaacaatcacaaccaaaataacaattccccaaacaactagtttccttcttcttgttagatcccgtctctgttaacagcaacaccatctactcagatgtccaaattaaaaagttctggtagaaacaacatggtctctttctactctatacctctgcacaaatccggccctatgtcttgaaaaatctatacctccagctgtggatgcaaataggaaggaaatagcccttcackcattagtgtaaaatgtgaatgaaccaccaacatggccaccacctgagtctcctctgcacccctctgtggcaaggtgatgtgaggaagctctttttctgattatggatgcttttgcaacagccaagcttgaagatgtttctgctgtagtcatcttcagttccagcttggctgtgtttccttgggatagacatgggagaaatgtctatataatgccttcctaaagcttgggaaaaatagaacttccctggtgtcccaggatgg

SEQ ID NO: 456476 - DNA, 556 bp, Homo sapiens
ttgtgacctaaaagccccacctaacaacctggatttatacgaagggtgggggagtgattattagactaatatgctttacatgtgggaaggctgtagctcacaaaggctccacatgcattatttcattagatcctgatgatgagctgtgagaggaggcaacacctgtccttggtttactgaagaggaaactgaagttctgacagsctgggcgacttgcccaaggtcatgcagtggatgggcggctgggctagaacttgaacccaggtcggctaagcccacctaagagtaatagccaggttggctaagattccttggcactttcatctgtggcagtttgctcaggttggtagattaagcgctgagagtcaagaaggcatctgtgtggctcactgtgagactctgggaccatcaggtctttattatgcacctacccattagttgctcccattctgaaatggcaaccacaatgctataaacaatataagtgaggcattttgggacaactggccacacataatagacacccaataaatgttggttgttgttaaatatgaga

SEQ ID NO: 456477 - DNA, 556 bp, Homo sapiens
ttgtgacctaaaagccccacctaacaacctggatttatacgaagggtgggggagtgattattagactaatatgctttacatgtgggaaggctgtagctcacaaaggctccacatgcattatttcattagatcctgatgatgagctgtgagaggaggcaacacctgtccttggtttactgaagaggaaactgaagttctgacaggctgggcgacttgcccaaggtcatgcagtggatgggcggctgggctagaacttgaacccaggtcggctaagcccacctaagagtaatagccaggttggctaagattccttggcactttcatctgyggcagtttgctcaggttggtagattaagcgctgagagtcaagaaggcatctgtgtggctcactgtgagactctgggaccatcaggtctttattatgcacctacccattagttgctcccattctgaaatggcaaccacaatgctataaacaatataagtgaggcattttgggacaactggccacacataatagacacccaataaatgttggttgttgttaaatatgaga

SEQ ID NO: 456478 - DNA, 556 bp, Homo sapiens
ttgtgacctaaaagccccacctaacaacctggatttatacgaagggtgggggagtgattattagactaatatgctttacatgtgggaaggctgtagctcacaaaggctccacatgcattatttcattagatcctgatgatgagctgtgagaggaggcaacacctgtccttggtttactgaagaggaaactgaagttctgacaggctgggcgacttgcccaaggtcatgcagtggatgggcggctgggctagaacttgaacccaggtcggctaagcccacctaagagtaatagccaggttggctaagattccttggcactttcatctgtggcagtttgctcaggttggtagattragcgctgagagtcaagaaggcatctgtgtggctcactgtgagactctgggaccatcaggtctttattatgcacctacccattagttgctcccattctgaaatggcaaccacaatgctataaacaatataagtgaggcattttgggacaactggccacacataatagacacccaataaatgttggttgttgttaaatatgaga

SEQ ID NO: 456479 - DNA, 556 bp, Homo sapiens
ttgtgacctaaaagccccacctaacaacctggatttatacgaagggtgggggagtgattattagactaatatgctttacatgtgggaaggctgtagctcacaaaggctccacatgcattatttcattagatcctgatgatgagctgtgagaggaggcaacacctgtccttggtttactgaagaggaaactgaagttctgacaggctgggcgacttgcccaaggtcatgcagtggatgggcggctgggctagaacttgaacccaggtcggctaagcccacctaagagtaatagccaggttggctaagattccttggcactttcatctgtggcagtttgctcaggttggtagattaagcgctgmgagtcaagaaggcatctgtgtggctcactgtgagactctgggaccatcaggtctttattatgcacctacccattagttgctcccattctgaaatggcaaccacaatgctataaacaatataagtgaggcattttgggacaactggccacacataatagacacccaataaatgttggttgttgttaaatatgaga

SEQ ID NO: 456480 - DNA, 639 bp, Homo sapiens
tcttcaagctttcctccactcggctgccctagtgatctttctgaaatatacagtggtgatgttattcctctgcttaaaactgtccactggcttctcagggtccaggccagactctttagcaggattcccaagctgtctcgtgttctgtgaagttgcttatatacacctgttctttggcccacagacctttacccccaagtgcaataggtgttcagtgacccatcttagcaacggtaaaacagggtccagtaaatgtaagggaacctgccgaaagttatctgggcctggaaacaaagcacatttactgatatccytaaggaaagctgagactcccctttgctggggctaggtatagtgagtgttctggagcaaagccctggagcatggagctggaaggttgtgggttgtgggttcacatacccatcagatgcaggaggccgtctaatgtgttgagtgtgtcttggattgtaaccccagcgttcttggctctggtatcaaccttctgggcttctgtaatcacctgaggacaaataagcacaaaccagccttgaaaaggtattttccattttggcaagttgaaagggatctcccgtggaaagcaacaggaactcaccatctgtactgcatccatattcgtgt

SEQ ID NO: 456481 - DNA, 566 bp, Homo sapiens
acctttttcaacatctcccttcctcaacttgtgaaacacacagacacacacacaaaccccctgtaattctttcattcattattctaattcctgtcaattaattttttattcatcacacatttacatttccaaaataactacatttacatttccaaaataactgyatttacatatgatttgctcttgcttacacaaaaaggggtcagctagatacagcaattaaggggatgtgtcagtcaggtttcaattcaggaaacagaaacagcattatgtatttccagaagaaaggagttataaaaacaaggaattaagtgcttataaaattcattagaagcgctaaagaaactgaagttagggaccaccagtgcactctgtatttcaggggtacaccacaatggctgtagcctacaggtcagctgccaaaactgtctgtcaatgctcatgactttggtgactactgaaagatgggttctggcttcaaatacaatttacagtgctgcttagcagcagcagcaataagaaaatgactttcaccctactttaacctgctaaatctcacatgaggg

SEQ ID NO: 456482 - DNA, 625 bp, Homo sapiens
acaacaattttctttttaggataatcttttgatctgagctatttgtccaagcagccatcatagtggtaactaaaagtatcatgttatacaatccttactattcttctagtttctggccctgtttttcatggtgaaaccaaattttgagtgtgtttgggggtattaacagtgggacagtgccccttaaaaccctcgccaaggaggtgggtagagcagaccaattttttggccccaggtgagtatatcagaatggtcccatgactcatgctgagctaataggattttctttctgtgatttgaaccaagacamagaaactgaggtcagcagatgttgggaactggaggtcatgtttagtccgtgccatagtttgggccatgaaaattcaaatcattttaatggagcagcaggaaccaagaagctttcagagaaggatgatgctaatgcatggcatagataacagattatgtggagggagggaataagtaggagggagggagcaagagagaaagaacgaagtttagaagcttccagatgccaacaaggccagcttggattcagagagtattaagctcccatctctgaccctcaagagaggaactcccacactctccttagtccctagaa

SEQ ID NO: 456483 - DNA, 585 bp, Homo sapiens
ttttaacatgcaagtagctatagcttacctaacttgattcatttagaaaaagagagagacagtgccacaaataaagggattacttgctatgctaagttcaatgatagataagacagcacaatcaggccacatcagaatgcagcatcatgaattgaattgaatagagggatgtagacaatgaaggtatgtttaaaggggataaggcaggatgctatgaagactgggaatgtaatgacatccagataaaaagaactagagcttgtgaagccgaaagagaagggtgctgggacagagtagctgtctccacctatttgaatgtctcacagtggaagacaaattaaacttgctgcatggatctcgaggaaaagaactaggtccaacacatgggagtctcaggaagcccactgtcagctcgatagaaaggacaatcttgaaaaaagtgcaattgtgycaaatgctatttggctgctttggaaaatagtgcattctctggacctgaaagatctcaagcagagattggacagaaacttgtaaagatgttttaaaagggatttcagaactggaagactatctgcacaattttga

SEQ ID NO: 456484 - DNA, 505 bp, Homo sapiens
gctgggggagactgacaataagaaaacaaagaaatgctatgaagaaaaatataatggagaattattttaaaartgttggagtagaatgtccttaaataactttgacaggagtcttctttattaaagacagataattgaactgaggactagtggttgcaaacatttaacagttttttattgattaattacaaggtgcaacatcgaattctagatattgtagcaggtgaactgaacataggtcttcaaggaccatatggttaataagggagatgtgacaagtttattagtaattttagaagtgatgagttacctacaatgccatgaaccttccaatgcatttggcagaggtgtttttctttaggaccctgaaattggcccagagtgagaagaaagccctagaagggccccactctgcccccagtttgctacatccctgcctgcttaaggtttcacctttttttccccaaataaatgtgtgcgcctccatattcttcagtttaccagg

SEQ ID NO: 456485 - DNA, 521 bp, Homo sapiens
tttttgttgcatctattccatattttgttgtttttttagagacagagtctcactctgttacccagattggagtacagtggctcaatcatagctcactgcaacctgaaacacctgggctcaagtgatcatcctgcctgagcctcccaagttgtgtcagttaatttttttttaatttttaattttttttattttttatttttattttttgtagagacagggtctcactaagttgcttaggccagtctcaaactattgacctcaagcaactcccaccccacccctggactcccaaaacactgggactacagatgtgagccaccacacccaatcctattccatatttggtaatggtcttggtcatagtatatatacaatatcctgcccagcactctactcagttatactagtgactgctagggcacccaatataccacagwcattaatcttcaatgctttctctcacatttgtgttactctgtgctgggaatattaacacctctaacctcaaggcaatgagagac

SEQ ID NO: 456486 - DNA, 617 bp, Homo sapiens
gggggcagatctcccccttgctgttctcatgatagtgagttctcttgagatctggttgcttaaaattatgtagcacctcctgctttgctctccttctcctgctccagccatgtaagatgagcctgctttcctctcaccttccaccattattgtaagtttccwgaggcttcctcagtcaggcttgctgtgcagcatatgaaactgtgagccaataaaactgcttttctttataaactactcagtcgcaggtagttctttataacaatgtgagaatggactaatgcacagagtaatctgtatcagagcataatgcaacagagtgtggactctggaatcagatgcctggtttggatctgtttctgttctttaccagctatgtgatctagaacaagattgttattctctctgctttgattttctcatctgttaaatgagtatataataattcgtaactcatagtaattctgtgaggaataatgagttaaaataagtaaagtgcttagaatagtgcctcacagagtaactgttattttaggtattagttatcattttactcatttattttttattttatttattttctttttagaaggagtcttacttttttggccaggctg

SEQ ID NO: 456487 - DNA, 606 bp, Homo sapiens
tccattttttaaattgaaggagagatattactttttaaaatgagaactattttccaacagctgcaccccttctgatcccattatctgtccagtcagaatttttcaccctctctcatattcccatagtcatttgtttgtgtctctatgataatgcttagcacagactgtctcatgatatttatgtttacttatttcaaaattgcctttatatggataacaaaaattatatggtaatatttgtcaaaatgtattgaactatacacttaaratggattcattttattgcatgcaaatcatgcctcaataaaattggttttaaaagaaaaactacagcaaaaccatagcaaaagaaaaaataaacagatgagaaaattgagataaaggaaaataagggtaggaaagtaaaataaattcaggggtaaggttagcattaaaaaatgcatgccataagtttccatggactaaagatgtttttcttgagcttcccagctgccaaagaaaatagagaattatgaccagagaaaatagagactttcctagttctgaaacctgaacaaaatctctctcatgagcccttatgaagagaacgctgtgatgtaagggata

SEQ ID NO: 456488 - DNA, 451 bp, Homo sapiens
tgaggccccaaactgtagacactctaaaagcaattaaaaagaaggcagtattatatggaaaaattaaaggaagtgggagaagcagcagctgagggaccacttaaacctatgagtactctaagagagattgcatgggtgatgatgaacaacggtcctcagcagaaatagaaaacttaccaagaggcaagggacctaaattacaatagaagaaatttagttttattcttgaaagaaaaaaaaagattttaagatgctaractgcatttccaatggaagaggacttctgttttgagaagcattataaaataactagcagctttctgattttagtttatacacagttcagtgtcagaggaattgtgaatatgtagagattgaacaaaacgatgtttaattattttattgctgttatagcctagtgtatttaaaaatgtctaaagtgtattaagac

SEQ ID NO: 456489 - DNA, 573 bp, Homo sapiens
ttagttaattttcacacacatattcacatatacacagaaatacagtgccagtgctttttttttttttctttttgtcttattgaaggaagctatacctaccttaaggtcatgaacatatcctatattctgcaagcttgacagttttgtagatttttttctttgtgcctttaatctatttggagttagttttatgtgtgctttgaggtayggatcattttatttatttccctatggatacatagttgtcccagtaccatttattggagagtctttggccccaacaaatcaacatgacatgccattgtacatgaggtctgtttctatgacatttattctgattggtctgtttgactcccccctgcacaaataccacacactcctaattactgcaattgaaaaataagttgtgatatgtgttagaataagtgctctcagcttttgttaagagtatattgactgttcttggcctttcgtatttttatttcataaatttcagaatcagcttatgaaatcccacacacaaaaatagagattttcattgggagtgaaatttgagggaaattgatatattta

SEQ ID NO: 456490 - DNA, 606 bp, Homo sapiens
aactgagaagatgccagcaccatgcttcctgtaaagtctgcagagccatgaatgagttaaacctcttttctttataaattacccagtcttgagtatttctttatagcaatgcaagaatggcctaagacacccagttaaatttgaatttcagatgaacaaggagaaatatgctatatagacatgtcccacggaatcaggcaagcccatgtggggcaggctcaggactgtgcaccaggctggctctctgctcgcccacacttcctggtttctacacaggtgggtttggccakgtgactcgtcctgatgaggtgtgagcagaagtgacatgtgtcacttaagcagaggcaggatcctcccacatctgtctcatggacaacacaatggtacccatcccctggactctgagtgactgcgtggagccgagtgtgcagactcagaagaaggaggtatgtcctggcccagccttccatgcccacctcctgtgggatgacggagctggaccagctgctccacagctgttattggcagaatccctcaagagaaaggtaattattgactgctcacataggaggcccagagcatggcgcccctgggcaaaaagttagg

SEQ ID NO: 456491 - DNA, 473 bp, Homo sapiens
tgggctaagccccaatttttgggctcacctgccctacatcagcataaactaagtaaaagaatgccagaggcagctacatttccaagttacacagctccagcttttggaaattgctggaaaaagtaggggagcattttgagttttgcccaaatgagttgttttatgataacagaacaggttgtatgtgtagaatcgtcaaatgccaaaccagacagggaaaccatccagacctggggtcatagcctcccttctcagggctaacttaaaatttaattcaactgggcaagtcaggatgccataatgagcctttcagatcattcccatgttcgtctgcccataagtattccaagcctttaaaattgktctagatttagggagtaccttttatgatcatgtagccagaccgccctgcctgctttatatcaatgaaggtttctctttaatactttgccagaaaatttaatgtggaattc

SEQ ID NO: 456492 - DNA, 582 bp, Homo sapiens
tttgcttataaaggagggggcggtgcccacggttgctaggggcgctagcgtcttggggctgccagaatggctccagctctgtgcgcggcgccagcgcatgtcacgtcccggctgtgcctctggctcccacgaccccctcctcacgtagcaactattgtggctactcgtccaggcggctcagcctctggagtgggtccaggacccgctgcagctgatctccgatgccctgtggccgatgagcccttgttttcccgctcctctgatctcccacccgaatcgcccccatgcgcttaccctccccccaccacgcagacccggggsctttgaatacctggggtcctctgcttcctcccagatgtcagctctgcctcaggaatcgactgagactttcaccaagactttggttccattcctggacacggatacagctggagagctgcccccgtggccagagcagttcgttgctgcacaccaggatctgaatgacaagctgactcggcaagaaaggctcccagaggtggtcccaatgctggactgggatcagaaccaggccctagctcggactctttgcctcaaaagtaa

SEQ ID NO: 456493 - DNA, 500 bp, Homo sapiens
cttgttgcccaggctggagtgcaatggcgcaatctcggctcaccgcaacctctgcctcccaggttcaagcgattctcctgcctcagcctcccgagtagctgggattacaggcatgcatcaccatgcccagmtaattttgtatttttagtagagatggggtttctccatgttggtcaggctggtctcgaactcctgacctcaggtgatctgcccgcctcggcctcccaaagtgctgggattacaagcgtgagccactgcgcccggcaatgccggcaatttaaacagatacgaatcttcaacattgtcagaggattgcaattgagaattgttagtggtgaagttttgaaaagctcttcttgctgtctctcctgctgctcccttgtatagtgtcaatgctggaagtttctgagagcagtctgcaggtgctgaacatcatactttaaccggtcaacctgaagtttggcattctgccttttgttagggggctccttgctagacaa

SEQ ID NO: 456494 - DNA, 500 bp, Homo sapiens
cttgttgcccaggctggagtgcaatggcgcaatctcggctcaccgcaacctctgcctcccaggttcaagcgattctcctgcctcagcctcccgagtagctgggattacaggcatgcatcaccatgcccagctaattttgtatttttagtagagatggggtttctccatgttggtcaggctggtctcgaactcctgacctcaggtgawctgcccgcctcggcctcccaaagtgctgggattacaagcgtgagccactgcgcccggcaatgccggcaatttaaacagatacgaatcttcaacattgtcagaggattgcaattgagaattgttagtggtgaagttttgaaaagctcttcttgctgtctctcctgctgctcccttgtatagtgtcaatgctggaagtttctgagagcagtctgcaggtgctgaacatcatactttaaccggtcaacctgaagtttggcattctgccttttgttagggggctccttgctagacaa

SEQ ID NO: 456495 - DNA, 500 bp, Homo sapiens
cttgttgcccaggctggagtgcaatggcgcaatctcggctcaccgcaacctctgcctcccaggttcaagcgattctcctgcctcagcctcccgagtagctgggattacaggcatgcatcaccatgcccagctaattttgtatttttagtagagatggggtttctccatgttggtcaggctggtctcgaactcctgacctcaggtgatctgccygcctcggcctcccaaagtgctgggattacaagcgtgagccactgcgcccggcaatgccggcaatttaaacagatacgaatcttcaacattgtcagaggattgcaattgagaattgttagtggtgaagttttgaaaagctcttcttgctgtctctcctgctgctcccttgtatagtgtcaatgctggaagtttctgagagcagtctgcaggtgctgaacatcatactttaaccggtcaacctgaagtttggcattctgccttttgttagggggctccttgctagacaa

SEQ ID NO: 456496 - DNA, 500 bp, Homo sapiens
cttgttgcccaggctggagtgcaatggcgcaatctcggctcaccgcaacctctgcctcccaggttcaagcgattctcctgcctcagcctcccgagtagctgggattacaggcatgcatcaccatgcccagctaattttgtatttttagtagagatggggtttctccatgttggtcaggctggtctcgaactcctgacctcaggtgatctgcccgcctcggcctcccaaagtgctgggattacaagcgtgagccactgcgcccggcaatgccggcaatttaaacagatacgaatcttcaacattgtcagaggattgcaattgagaattgttagtggtgaagttttgaaaagctcttcttgctgtctctcctgctgctcccttgtatagygtcaatgctggaagtttctgagagcagtctgcaggtgctgaacatcatactttaaccggtcaacctgaagtttggcattctgccttttgttagggggctccttgctagacaa

SEQ ID NO: 456497 - DNA, 567 bp, Homo sapiens
tgcatgtggtgatgtctccatgctgaggtttcaggcagcacagcactaagtatcaggtgacctgtggtcccaccagagcatagtcctcatgaaataggcctaaccagataccttttaactcatctttattttggttgcaaagatgtggtttacttagctacttactatttgttcccatttgaagtctcagagcttgccaagttaaacaccgccttcagtaccgarctgctatacaagaacattataaaatacaaagtataaactaagataatcctctttacagaattcagattagtgcattaaaacaacattgatttaaaaagggaagtgagataactggcaaacctccaattgcttttttaatgaaggatgacacaaaatggcacgcaaggtaaacactaaattttgtcaggtgctcaaaaacagttaattgtgggaaagttactttccaaaagtaattttgacctaaaaatattaaccattattctataagacataagggaaggtaaataatggcccacaaaaccagatgatatggttaagataactagtttagtggaataacaa

SEQ ID NO: 456498 - DNA, 567 bp, Homo sapiens
tgcatgtggtgatgtctccatgctgaggtttcaggcagcacagcactaagtatcaggtgacctgtggtcccaccagagcatagtcctcatgaaataggcctaaccagataccttttaactcatctttattttggttgcaaagatgtggtttacttagctacttactatttgttcccatttgaagtctcagagcttgccaagttaaacaccgccttcagtaccgagctgctatacaagaacattataaaatacaaagtataaactaagataatcctctttacagaattcagattagtgcattaaaacaacattgatttaaaaagggaagtgagataactggcaaacctccaattgcttttttaatgaaggatgacacaaaatggcacgcaaggtaaacactaaattttgtcaggtgctcaaaaacagttaattgtgggaaagttactttccaaaagtaattttgacctaaaaatattaaccattattctataagacataarggaaggtaaataatggcccacaaaaccagatgatatggttaagataactagtttagtggaataacaa

SEQ ID NO: 456499 - DNA, 601 bp, Homo sapiens
cacattgacctggaagtagcccttggctccctttacttcaaaactgaaatttcttctgtggaatatgctgtcccacttgagagaagattgcagtgtgtttagcagagataaagatgctttctcttctcagcttcaatagggagtctcycaggaatttaacaggttattggttcaatcgaaagcttcagtgagtaaattgactcttctttcaatccagacacccgactggtgatgtagttcgccagcctgttgtgtgtcaggcaggcccacctttgtattaacccctttgaggtatgctttctggctcctgtggaggtacatgactctgggtatgtctagccatgcttaccgagattcatttataatcttagcattggtgtatcagaaaacttgttttaactggtttatacttttgagggtatttgtggtattatcatttttaaacatacttgtgttcatatttatgttcaaagagtcaaccccatgcaggatgaatggagtaaacctaacacataattaatatgcattttaatttcaactataatgccatgatttttctctaaagcagaacttgaaacattgaatggcatgcttatttgtt

SEQ ID NO: 456500 - DNA, 601 bp, Homo sapiens
cacattgacctggaagtagcccttggctccctttacttcaaaactgaaatttcttctgtggaatatgctgtcccacttgagagaagattgcagtgtgtttagcagagataaagatgctttctcttctcagcttcaatagggagtctctcaggaatttaacaggttattggttcaatcgaaagcttcagtgagtaaattgactcttctttcaatccagacacccgactggtgatgtagttcrccagcctgttgtgtgtcaggcaggcccacctttgtattaacccctttgaggtatgctttctggctcctgtggaggtacatgactctgggtatgtctagccatgcttaccgagattcatttataatcttagcattggtgtatcagaaaacttgttttaactggtttatacttttgagggtatttgtggtattatcatttttaaacatacttgtgttcatatttatgttcaaagagtcaaccccatgcaggatgaatggagtaaacctaacacataattaatatgcattttaatttcaactataatgccatgatttttctctaaagcagaacttgaaacattgaatggcatgcttatttgtt

SEQ ID NO: 456501 - DNA, 594 bp, Homo sapiens
agaattctgattcaacatgccataataggcccaccacaaagataaacttggttaaactacagtgttttcaccctgtttgtggttcttcatagagattgcataggacttagttaagtactctttagattgattttgaaacatagaaattttcttaaagtaattagtgaatacacatcactatgagataaattatgactggctgcattctcaatacatttaatgagcaataaataggacttcccstccatttttattcctaaggaaataaaatcatttttacatgtaaaggatgatcgttttcttacttggctgacatattttaccttccatttccataaacattctactcattttaggacatataaaatgcattaaaattatgctattcaattaaatggaaagacagttaacttaaaatctgtttaataagatgaaatacaccaaataatataaatgaaataaatgtatcaatttcagttttattatccaggctgaatgattccattttccaacgctcgaaattcagtctcctctctagaaactatttatttaaggttcttcatacactagtgtgagaagagtattttcagcaac

SEQ ID NO: 456502 - DNA, 587 bp, Homo sapiens
atttttaagtgaaagttttaatttgtttacattccgggttattattgatatgtgagagcttattcttcttattttattaactgatttctagttgttttgtgtatcctctgttcctttcttactctcttattttttattattgtggttttgtggyttttctgtagtggtaaccttctagtcttttccttctttgtatgtttgctctagtagtttttatatttcatgtgttttaatgatattagatattgttctttcacttttgggtgtaggactcccttggcatttcttatagatctggtctagtggtgataaattccctcagcttttgcttgtctgggaaagacttcatttctctttcattttataaagaataacttttctgggtatggtatccttggttggcagttttttttcctttcagcatcttgaatatatcagcccattctttcctagtctataaggtttctgctgttagtctagtctgacagacgtacctttataagtgacttgatgcttttctcttgcttttttgagttttctctgtgtctttcacctctgatattttgactataatgtgctgagcagaa

SEQ ID NO: 456503 - DNA, 501 bp, Homo sapiens
tccatttgacatgttgtattaagcctaacgttcatgttaggtgcctactataggaaaatcaattttcgagtggctatttcatggctctacagtaatctggcttcaaggacattccayggctattcaatgtcaattattcttaaattttcatgttctaggaaacactccccaaatgaaatcattgagatttatgagtgctaccaatagaagagaacagaagcatggatatttcatgggagaaaaaagatgttctgttcagtatcaagtaataaagcatagcatttctcttcctgtagcaattgatgatgaagaggatgatgacagtgttttacctcaacttcacatttctccaaagctgaaaattttcaaggtgacctccctaaatgaagtgatggacaaactaggttttctttggaactctgactgcctagaaagggttgacttgtttgggatccctctgtaatccagaaacctaacaagatgatcaacagattagcaatt

SEQ ID NO: 456504 - DNA, 531 bp, Homo sapiens
agatcacagttgaccatgggcaacttaacccatggaaccacagataagtgggtctaggcactatcaacatttaaactgcaaatacaaacaaattctttgtgcgaattagacaccagaaaatgaaactgacttctcacaattcaactgtgatcgatattcttaaaactcactgcaaatgacacaccacacaatatgatataaaatcaatcttctcatttctgtgaaagtactttttgtttgcagaagaaaaggactgaggctttttgatacagtgatttatggaacataaaatgaaaaataaggagaagctcttaactgatggcttttcaaaacataggagtctttgattttatggaaagaatatacacttttcttaaattattagaaatcctctctactagaaaaaagagcatggaaatcagacaacttaaggcaagtcctagatttatgaattctacatcattaaaattttgttgaaatcttgaataagttgmaaatgaaaactggttttgaaaggctgccttaaaacca

SEQ ID NO: 456505 - DNA, 575 bp, Homo sapiens
tgagtgattaccaggaactgggagaatgggagaaatgaggagtgactattaatggttatggagtttcttcttggtgggttgatggtagtgaaatattctggaattagtggtggtggttttacaacctgaatatattaaaaataactaaattgtacactttaaaagttgagttttatggtatattaattatatctcaataacaattacttagaaacaaacaaaaagatggcaggagttgctctgtatatcttaaagaaattgaatttgtaaagttgaaagyattcctacaaaaataccttcaggcccatatggctttactcatgaagtctaccaaacatttaaggaagaaagaatccaattctacgtatactcttccaaaataaattaaagaaaacataattctttccaactcattatttgaggctagaaccaaaaccagattaacacattagaagaaaatactctggaatccctgtctcaaaaaaaaaaaaaaaaaaaaaaaaaaaagttaacatatcatgatcaagtggagtttatcccaggaatacagggctagtttaatcttcaaaatcggg

SEQ ID NO: 456506 - DNA, 575 bp, Homo sapiens
tgagtgattaccaggaactgggagaatgggagaaatgaggagtgactattaatggttatggagtttcttcttggtgggttgatggtagtgaaatattctggaattagtggtggtggttttacaacctgaatatattaaaaataactaaattgtacactttaaaagttgagttttatggtatattaattatatctcaataacaattacttagaaacaaacaaaaagatggcaggagttgctctgtatatcttaaagaaattgaatttgtaaagttgaaagcattcctacaaaaataccttcaggcccatatggctttactcatgaagtctaccaaacatttaaggaagaaagaatccaattctaygtatactcttccaaaataaattaaagaaaacataattctttccaactcattatttgaggctagaaccaaaaccagattaacacattagaagaaaatactctggaatccctgtctcaaaaaaaaaaaaaaaaaaaaaaaaaaaagttaacatatcatgatcaagtggagtttatcccaggaatacagggctagtttaatcttcaaaatcggg

SEQ ID NO: 456507 - DNA, 575 bp, Homo sapiens
tgagtgattaccaggaactgggagaatgggagaaatgaggagtgactattaatggttatggagtttcttcttggtgggttgatggtagtgaaatattctggaattagtggtggtggttttacaacctgaatatattaaaaataactaaattgtacactttaaaagttgagttttatggtatattaattatatctcaataacaattacttagaaacaaacaaaaagatggcaggagttgctctgtatatcttaaagaaattgaatttgtaaagttgaaagcattcctacaaaaataccttcaggcccatatggctttactcatgaagtctaccaaacatttaaggaagaaagaatccaattctacgtatactcttccaaaataaattaaagaaaacataattctttccaactcattatttgaggctagaaccaaaaccagattaacacattagaagaaaatactctggaatccctgtctcaaaaaaaaaaaaaaaaaaaaaaaaaaawgttaacatatcatgatcaagtggagtttatcccaggaatacagggctagtttaatcttcaaaatcggg

SEQ ID NO: 456508 - DNA, 533 bp, Homo sapiens
gtagcagtaccttctggacagtgcaaatgaacagaagccataaactaaaggaagtgttggtatggattggatcatgggtttctaawaaagcttcgagcctgactatattcctggcagtgaaatgttggatacagttaaagagttgtaaatttaaaaaaatataaataatgaatattgggtgtttctttatagaaaatcacaatggcacaataaaaacattactattattctgttaaaatacttcttcccaatgtcaagaattttttattttagttggtttactaaaaataacctaatctggttatgttttgcaaagaagtcactatctgtcaactggcaaaagggaaagctacaactgaatgcatgggcagaacaaaagggacagtgcaacgggattttgccctagagtagtctggaccagggcttacttgttttgactacagagtaacctaatttagtactttaaacatggcacatgacagtggaatggacttatctgtcatgaaatctggcttacaagatacatctgcaaa

SEQ ID NO: 456509 - DNA, 617 bp, Homo sapiens
attccacagtggtgaacacagtcttcacttcatggtgtgtgtgtgtgcgtgtattatcaacaaaatttcaatcttgtgatgtcagattacattccacagtggtgaacacagtctycacttcatggtgtgtgtgtgtgcgtgtgtgtgtgtattatctcaacaaaatttcaatattgaggtataagaaaaccagactggaaattacatgattaaaataaaaattacatggtatttgaaataaaataataaagcaatctgtttcacaccataccaagttcagacttttccataaacccataacaaactactgtgaagaagctttccaaaagtgcaatacacattttgtttcaacatttgagcaaagctagtttttccagatactcggaattcctttgaactgaaatagaagtactatttcaatttactttcatctgtatcatcactgtaaaggtaaaattttggaaaacaaggcggggagggtatcacagaagtgatctgtaagcttgcagggttctcaatcattgtggtatgtctccatctgatgcacgtaggtatagtacaatgaacgtttcgtaaagtaaggagagaagtgtcacaatggtgaataaagagttgca

SEQ ID NO: 456510 - DNA, 574 bp, Homo sapiens
aatcccctggccacagacgattatggttcctgatctcgcctcttgtcagatcagcgatggcgtgagattctcataggagtgtgagccctactgtgaactgtgcatgcgagggatctagattgtgcactccagtgagaatctaatgcctgataatctgtcactgtctcccatcatgcccagatgggactgtctggttgcaggaaaacaagctcagggctcccactgattctacatcatggtgagttgtaaataaataaataaatatatatatatatatatatatatatatatatatatatatatatatawtagaaataaagtgcacaataaatgtaatgcacttgaatcctcccttaacctcctccacctgtggaaaaattgtcttccccaaaactggtccctggtgccaaaaaggttaaggactgctgttctaggggctgggggatagagactttccagaaatattactccttttggtagagtccctcttgctggctctgctcagcagtagggttagcaggtttagatggattggagggtctcaggcctgacaagagtgtagagtgcttccctt

SEQ ID NO: 456511 - DNA, 574 bp, Homo sapiens
aatcccctggccacagacgattatggttcctgatctcgcctcttgtcagatcagcgatggcgtgagattctcataggagtgtgagccctactgtgaactgtgcatgcgagggatctagattgtgcactccagtgagaatctaatgcctgataatctgtcactgtctcccatcatgcccagatgggactgtctggttgcaggaaaacaagctcagggctcccactgattctacatcatggtgagttgtaaataaataaataaatatatatatatatatatatatatatatatatatatatatatatataatagaaataaagtgcacaataaatgtaatgcacttgaatcctcccttaacctcctccayctgtggaaaaattgtcttccccaaaactggtccctggtgccaaaaaggttaaggactgctgttctaggggctgggggatagagactttccagaaatattactccttttggtagagtccctcttgctggctctgctcagcagtagggttagcaggtttagatggattggagggtctcaggcctgacaagagtgtagagtgcttccctt

SEQ ID NO: 456512 - DNA, 598 bp, Homo sapiens
gatatatgaaaaactgttcaacattattaagcatgaaggggaatgaagactgaaaccacaatgatatcaccttcacatctgttagaatggctattatcaagaatacgaaagataaggtgaagatatggtaaaaasggatctcttgcacactgtttttagaaatacaaaattagtacagccattatgaagattcctcgaaaagttaaaaataaaactactatatgattctgctatcatactactgagtgtgcataaaagaaattgaatcactaagtcaaaaatatatctgcacttctgtattcactgcagtattattcagaatagtcaagatacagagtcaacctaagtgtccatcatagatgaatgggtaagaaaatatggtatatgtacacaagagaataccattcagccattaaagggtcctgtcatttgcaacagaatggataaacctggagagcattacgttaagtgagaaaagccaagcacataaagacaaatagctcatgacttcacttacatgtggagcgtaaaaagtcaaattcacagaaaaagagagtaacgtgttgattaccagaggctaggatagtagtggtggtgt

SEQ ID NO: 456513 - DNA, 604 bp, Homo sapiens
caaaaggaacaatcaacagagaaaacagacaacctacaaaatgggagaaaatgttcacaaactatgcatctgacaaaggtctaatatccagaatccataagaaatttaactcaaaaagcaaaaaacaaataaccccatataaaaatgggcaaacracatgagcagccacttctcaaaagaaaacacacaagtagccaacgaatgtgaaaaaatgctcatcatcactaatcatcagagaaatgcaaatcaaaatcacagtgaaataccagaatggctattattaaaaagtaaaaaaaaaaacaaaaaaaccagatgctggcaaggctgtggagaaaacagaatgctgttggtgggaatgtcaattggttctgccactgtgaaaagcaggttagagatttctcaaagaacttaaacagagctaccatttgacccagcaatcccattgctgggtatatatccagaggaaaagaaatcattctaccaaaaagatacatgcactcatatattcattgcagcactattcaccatagcaaagaaatggaatggtagactgaataaagaaactgtggttcctatatgccatggaatactatgcagccataaa

SEQ ID NO: 456514 - DNA, 604 bp, Homo sapiens
caaaaggaacaatcaacagagaaaacagacaacctacaaaatgggagaaaatgttcacaaactatgcatctgacaaaggtctaatatccagaatccataagaaatttaactcaaaaagcaaaaaacaaataaccccatataaaaatgggcaaacaacatgagcagmcacttctcaaaagaaaacacacaagtagccaacgaatgtgaaaaaatgctcatcatcactaatcatcagagaaatgcaaatcaaaatcacagtgaaataccagaatggctattattaaaaagtaaaaaaaaaaacaaaaaaaccagatgctggcaaggctgtggagaaaacagaatgctgttggtgggaatgtcaattggttctgccactgtgaaaagcaggttagagatttctcaaagaacttaaacagagctaccatttgacccagcaatcccattgctgggtatatatccagaggaaaagaaatcattctaccaaaaagatacatgcactcatatattcattgcagcactattcaccatagcaaagaaatggaatggtagactgaataaagaaactgtggttcctatatgccatggaatactatgcagccataaa

SEQ ID NO: 456515 - DNA, 604 bp, Homo sapiens
caaaaggaacaatcaacagagaaaacagacaacctacaaaatgggagaaaatgttcacaaactatgcatctgacaaaggtctaatatccagaatccataagaaatttaactcaaaaagcaaaaaacaaataaccccatataaaaatgggcaaacaacatgagcagccacttctcaaaagaaaacacacaagtagccaacgaatgtgaaaaaatgctcatcatcactaatcatcagagaaatgcaaatcaaaatcacagtgaaataccagaatggctattattaaaaagtaaaaaaaaaaacaaaaaaaccagatgctggcaaggctgtggagaaaacagaatgctgttggtgggaatgtcaattggttctgccactgtgaaaagcaggttagagatttctcaaagaacttaaacagagctaccatttgacccagcaatcccattgctgggtatatatccrgaggaaaagaaatcattctaccaaaaagatacatgcactcatatattcattgcagcactattcaccatagcaaagaaatggaatggtagactgaataaagaaactgtggttcctatatgccatggaatactatgcagccataaa

SEQ ID NO: 456516 - DNA, 580 bp, Homo sapiens
tccctttccatttaaaagtcagtattaggttaattttgtcattttcattccattaattttcttcccattgactttcattcagttaatgttgtcattttggtaattctcaggctattcacatgacaygaacctagttaatatcatgagaactattgaactatccctacctgaactccctcacatcaatatcttccctacccatcttcctatcaatgcaccaatatttccaaaatggaaacagaaaatattactctcttgtgtgctcagagcctttaacaacatcttactgcctgcacagcaaagctaagaactttatttcacccagtgatttctacagtttgactccaagtattttattttctaagcataccttcagcactcacctttttgaatcttttttaaaaaaaaactatacttaaataaaacagtatttatcgtgttgtacatgataaatatatacaattttaatttgtcagttaaaaataaatgaataaagaaataaaaacaaagtaagtaaagaaataagaacaaaacaaacaaaaaactgttttaaaatttcaatagctttgagggtacaagt

SEQ ID NO: 456517 - DNA, 580 bp, Homo sapiens
tccctttccatttaaaagtcagtattaggttaattttgtcattttcattccattaattttcttcccattgactttcattcagttaatgttgtcattttggtaattctcaggctattcacatgacacgaacctagttaatatcatgagaactattgaactatccctacctgaactccctcacatcaatatcttccctacccatcttcctatcaatgcaccaatatttccaaaatggaaacagaaaatattactctcttgtgtgctcagagcctttaacaacatcttactgcctgcacagcaaagctaagaactttatttcacccagtgatttctacagtttgactccaagtattttattttctaagcataccttyagcactcacctttttgaatcttttttaaaaaaaaactatacttaaataaaacagtatttatcgtgttgtacatgataaatatatacaattttaatttgtcagttaaaaataaatgaataaagaaataaaaacaaagtaagtaaagaaataagaacaaaacaaacaaaaaactgttttaaaatttcaatagctttgagggtacaagt

SEQ ID NO: 456518 - DNA, 566 bp, Homo sapiens
actcctttccactgaatatttttgtatatcaatatgactcttgctagtctgtatagactaattttttaatttttttctcctttattctttttttgcatattttctcaccttgacaggcactgaagagaatctagtatggccaatgtcaccttggtgacaggatttcttcttatggggttttctaatatccagaagctgcggattttatatggtgtgctcttcctactgatttacctggcagccctaatgagtaaccttctcatcattactctcattaccctggacgtaaagctccaaacacccatgtacttcttcctgaagaacttatcctttttggatgtcttcctggtgtctgttccaatcccaaaattcattgtcaacaacctaacccacaacaattccatttccattstaggatgtgccttccagctacttttaatgacttccttctcagcaggagagatatttatcctcactgccatgtcctatgaccgctatgtagccatctgctgtcccctgaactacgaggtaatcatgaatactggagtctgtgtgttaatggcaag

SEQ ID NO: 456519 - DNA, 617 bp, Homo sapiens
tttcaatttgttgaaaggttcagtcaagtcagtgaaaaacaaaaatcctaggatagattgaattgacttattttaatctaccaaattatttttatcagttaaagtgttttaatttctgccctcgtgtagagaaaagtattgattaaacaagaaaacttcttgagtaacacaaactccattggttttgttgatgcagaaagcaaaactgtaaaatatttgaagaggtttattttgagcccawtgtgaatgaccatggcccatgacacagtctcaggaggtcctgagaacacgtgcccaggtagctgggttatagctcgcttttacacattttagggagacaggtgcccaggtagctgggttacagctcgcttttacacattttagggagacaggtgcccaggtagctgggttacagctcacttttacacattttagggagacaggtgcccaggtagctgggttacagctcgcttttacacattttagggagacaggtgcccaggtagctgggttacagctcgcttttacacattttagggagacaggtgcccaggtagctgggttacagctcgcttttacacattttagggagacaggtgcccaggtagctgggttac

SEQ ID NO: 456520 - DNA, 617 bp, Homo sapiens
tttcaatttgttgaaaggttcagtcaagtcagtgaaaaacaaaaatcctaggatagattgaattgacttattttaatctaccaaattatttttatcagttaaagtgttttaatttctgccctcgtgtagagaaaagtattgattaaacaagaaaacttcttgagtaacacaaactccattggttttgttgatgcagaaagcaaaactgtaaaatatttgaagaggtttattttgagcccaatgtgaatgaccatggcccatgacacagtctcaggaggtcctgagaacacgtgcccaggtagctgggttatagctcgcttttacacattttagggagacaggtgcccaggtagctgggttacagctcgcttttacacattttagggagacagrtgcccaggtagctgggttacagctcacttttacacattttagggagacaggtgcccaggtagctgggttacagctcgcttttacacattttagggagacaggtgcccaggtagctgggttacagctcgcttttacacattttagggagacaggtgcccaggtagctgggttacagctcgcttttacacattttagggagacaggtgcccaggtagctgggttac

SEQ ID NO: 456521 - DNA, 617 bp, Homo sapiens
tttcaatttgttgaaaggttcagtcaagtcagtgaaaaacaaaaatcctaggatagattgaattgacttattttaatctaccaaattatttttatcagttaaagtgttttaatttctgccctcgtgtagagaaaagtattgattaaacaagaaaacttcttgagtaacacaaactccattggttttgttgatgcagaaagcaaaactgtaaaatatttgaagaggtttattttgagcccaatgtgaatgaccatggcccatgacacagtctcaggaggtcctgagaacacgtgcccaggtagctgggttatagctcgcttttacacattttagggagacaggtgcccaggtagctgggttacagctcgcttttacacattttagggagacaggtgcccaggtagctgggttacagctcrcttttacacattttagggagacaggtgcccaggtagctgggttacagctcgcttttacacattttagggagacaggtgcccaggtagctgggttacagctcgcttttacacattttagggagacaggtgcccaggtagctgggttacagctcgcttttacacattttagggagacaggtgcccaggtagctgggttac

SEQ ID NO: 456522 - DNA, 485 bp, Homo sapiens
gtttaccatcatcctcttggggctgttcttrtgatactgagtgagttctcttgagatctggttgtttaaaagtgtatagcccctccccgctctctctctgttgctcctgctgccaacatgtgagatgcctcgctccctctttgatttctgccctgattggaagcttcctgaggcctccccaggagcctggaagataccagaatcacacttcctgcacagcccatagaaccttaggacaattaaacttcttttctttataaattacactgtccaggtatttttttatagcaatgtaagaatggactaatacaggcttcatcatggaagcgatcacctctttatatagtcattggactgctgtgattagaaaattcacagcaatgagttggtctcattttgtatatattttattgagtgtttgccatatttaggttacctctgggatggggtgcaattctcatatacaatatacagaccgtttactt

SEQ ID NO: 456523 - DNA, 557 bp, Homo sapiens
tactacacatagaagaaatatatatcaacaatttatttgagctcctggtgttctcctcccatcttctctggagagccacaacattcttaattttgttttgtaaatcatttatctttacacttttatcataaatgcccatatcttcaaatatttgtgtgcatgtctcttgagctttatattgacagaatcatatcaaaagcattttgtttgtttgcacttaacattttgcttgggagattcattcatgcaagtaytgatggttaagacattttaaaaatatataactgttacatagcatttcactgtttaaaaataactatttgtattttctgtcctccagttttctgctatctagaaaaggctctttgttaagacttttattctaaggcagatgggaagtcaacatagggtgttgtgcagagaagaagtacacatattatttttgctactctgtagggagtaggttgctgagggtcaagggtagaagcagcaagattacataaacatttcataaatacacgaagaataagtggcccaaagcaggtaggtagcagtga

SEQ ID NO: 456524 - DNA, 557 bp, Homo sapiens
tactacacatagaagaaatatatatcaacaatttatttgagctcctggtgttctcctcccatcttctctggagagccacaacattcttaattttgttttgtaaatcatttatctttacacttttatcataaatgcccatatcttcaaatatttgtgtgcatgtctcttgagctttatattgacagaatcatatcaaaagcattttgtttgtttgcacttaacattttgcttgggagattcattcatgcaagtattgatggttaagacattttaaaaatatataactgttacatagcatttcactgtttaaaaataactatttgtattttctgtcctccagttttctgctatctagaaaaggctctttgttaagacttttattctaaggcagatgggaagtcaayatagggtgttgtgcagagaagaagtacacatattatttttgctactctgtagggagtaggttgctgagggtcaagggtagaagcagcaagattacataaacatttcataaatacacgaagaataagtggcccaaagcaggtaggtagcagtga

SEQ ID NO: 456525 - DNA, 557 bp, Homo sapiens
tactacacatagaagaaatatatatcaacaatttatttgagctcctggtgttctcctcccatcttctctggagagccacaacattcttaattttgttttgtaaatcatttatctttacacttttatcataaatgcccatatcttcaaatatttgtgtgcatgtctcttgagctttatattgacagaatcatatcaaaagcattttgtttgtttgcacttaacattttgcttgggagattcattcatgcaagtattgatggttaagacattttaaaaatatataactgttacatagcatttcactgtttaaaaataactatttgtattttctgtcctccagttttctgctatctagaaaaggctctttgttaagacttttattctaaggcagatgggaagtcaacatagggtsttgtgcagagaagaagtacacatattatttttgctactctgtagggagtaggttgctgagggtcaagggtagaagcagcaagattacataaacatttcataaatacacgaagaataagtggcccaaagcaggtaggtagcagtga

SEQ ID NO: 456526 - DNA, 557 bp, Homo sapiens
tactacacatagaagaaatatatatcaacaatttatttgagctcctggtgttctcctcccatcttctctggagagccacaacattcttaattttgttttgtaaatcatttatctttacacttttatcataaatgcccatatcttcaaatatttgtgtgcatgtctcttgagctttatattgacagaatcatatcaaaagcattttgtttgtttgcacttaacattttgcttgggagattcattcatgcaagtattgatggttaagacattttaaaaatatataactgttacatagcatttcactgtttaaaaataactatttgtattttctgtcctccagttttctgctatctagaaaaggctctttgttaagacttttattctaaggcagatgggaagtcaacatagggtgttgtgcagagaagaagtacacatattatttttgctactctgtagggagtaggttgctgagggtcargggtagaagcagcaagattacataaacatttcataaatacacgaagaataagtggcccaaagcaggtaggtagcagtga

SEQ ID NO: 456527 - DNA, 521 bp, Homo sapiens
ttagggcctaactgtgtagtctagaagtgcaacacattggtgctattgagagttaaaagtcagaactcatgatggagcctcrgtcatgaaagagcccaaggcaggcagttgcccccagaatgataagacaacgtaaagagagaaaaagtagcttgaagctattcttgaaaagtcagtcagggagagaagcaatctaaagggaaagaagagtaggaataaaggtatagaggaatctgtagtaatttgagaaacagagcagagctgcatgatgtgcagggccaagacaggggtgcatgggacggggagttacgagctgcagaggggagaggtaaattaagcacggtttttgcaagctatgctgaagatcttagaagggccaacggacaacagtgaaagattttaagcaggaaagaaacatggacaccatcagactggtgtcagaaaccctgtaaagagaaactagaattccagaaatccaaagacaaagccaggagattctaaagatagagagagtaagaaga

SEQ ID NO: 456528 - DNA, 532 bp, Homo sapiens
aggggaaaaacaattcacatgacagtagatttcctatcagaaaccatgaaggccagaaggaaggtacacaacattttccaagtgctgaagaaaagaattgtcaacccagaattctataatcagtgatagttccttcaagaatgaaggagaaatcaggacattttcagatgaaagaaaactaagagaattttttgccagtggatctaccctaaaagaatagctaaaggaagttctctaaacagaaaggaactgataaatcaagaaattttggaatatcaggaatgaataaaggacataagagcaaaaatttgggtaaatacaatagacttttcttctcaggttttctaaagtatctttgatagttgaagtgaaaattataactgttyaatatgattctcaaagaatgtagaggaaatatttaagacgattataagtgggagagggtaatgggaaatataggaggtaagactgctgtactcattcaagctggtaaaatgttgacagtgggaaactgttataatcaggtatatat

SEQ ID NO: 456529 - DNA, 404 bp, Homo sapiens
taatgtaatacctgtaagaattaaagaagaaggaaagaaacacgaaaggtggattgccagttaagacaggtttattttagagaaaacaaacctgagagaggcatttggctgagttaggtcagaggcacacttttttacagactaagagtttttaaggatttrgggtgggagagtttattagatgcttggcctgcttctgtgtttctttgttgtgcttatttgggagggagagttgtgtgtctgttcccatacatctttctgcagctgcaggcatatcccctgagtctcttagcttccctagcttagtgcacctgaagggaaaggaatgtacttattaaggcccactgttttactggggcccattgtatgagggtgaagtttggcagttacccaagagacttttc

SEQ ID NO: 456530 - DNA, 607 bp, Homo sapiens
tcaccagctctttctcttctgggagtaccttgggccaaatgttctttgagtctttggcctgtcttactgaactctttccaactcctgtttaattccttcaatgggtaaaagtgttccagattcaggatgaacagatggatgcttaagaaatgaaattcacatagtcattatgggcacttgatactcatcgcaaggtcagtttacagaatcaggctttaggagaccccctgccctacacaagatttgggggatcatggccctcagggctccagctatgggtaggctgctcctagggacccactttctcattgctggtctccttgaggcaatggcayctgtttctggaacatttgacattagacgaataggttaatctaatggccagagtggtaaaataagtctatgaccagagtgaggtgcccctgagaccaggaggtcagtctaagatgctgtcagagttccatccatggccccaagggatggggaaagatttggttcataaccaacaatctaatttctctcactgggaagcagatcaagtactgcagcaggacagaagtatgcagatgtgggttttggctggtggcagtggtactttttcccaata

SEQ ID NO: 456531 - DNA, 614 bp, Homo sapiens
gatgaccaacagtgcctggcctaacaagcggcccttacagacattggctataagagaccaaggacgggaaggaaatccagtggaggtgcaaccacaactgggccttgagtaatttgcaggaattggacaagctgcaggaaaacagtggaacagaggcgcactctgcaagagtgaggggtgagcaatgccaaggagtgggttgagcaggccgagccagcgtacagctagctgaatgtagggctggcaagacaagtctaaaacaatttattccacagccaaatgtcattagctcccactccacacagtgctgaaagsttgggtgttggtttgattaattatgcattctgttatagttgtaattatttacagattagagggtaaagaagtatcaggcagtgatggaatggcagggattcaggaagttagatctgatgaaataagtgatggggagccaatgaagcttgttgagcaggagagtggcatgatgaaagagattgtgattttgcccctgccaggaggaaataaaatatcttccaatgcccttttattcctagcaaggcatctccttctttcccccagtgagcactcacagttggttccctcaccccacctct

SEQ ID NO: 456532 - DNA, 540 bp, Homo sapiens
aattgggacagcaaggctcacagacatgacccaaaacaacagtataagcccagctgattccaactagaggaagtcagaaaaaaagaataaagcagagccttatcccccttgagatggggattcctgtgaatgtcatttattagcaatgttcccagagtggggaaatgtaggggagtaggaaggaaagaaggccaggcaagggtgtgagatcaaccaaagggccaggaagggtaactttgaatcagtactgcaggaggtctcatcccagattcatcctgattagggacagggaagctggggtatttataccctgacacttgtcagtcattagttaagagctgcccccagggtatagattcctacatactgkaatctttgtgcccaaagtgggttccaacacaaaggagtctgggaaatgtggatctctgtggagagaaaaggacaagaaatggatctgtgagcaaacccatgacaggcatgcctagtgccttaggagactcagtcttacagtcataatgcttgagatatgctttccaattt

SEQ ID NO: 456533 - DNA, 612 bp, Homo sapiens
ttggaaaatgtacatatatcttcagacatattgccatccccaacaacagagggatttgccactaaacacatataaagagataaatatgtagatgtgtgcctgtgtgtgcacacatttgtgtatatattatctctagaaagattctaagagactggtaacaattcttacctacaggggcaaatttggaagacagacatacttttcactgtttgcctatgtgtttcaatatgtgttgaaagtggttaggaacctgacattgtggaaaataaaatcagcgatggagggagtgaacgcaggaaaagcttctaggatgccatgcaacaggccaaagagatggaattaataaaaaggaaggatgacaattcctgaagaacaaaccaggaagccaccwtaaaaatggaaaggaagtaacaatcgaaggcataaactaatatttttctgagatgagaaaggatgatcaaaagagctgaactgtgtttcaacaaaacatattgaaaaatataaaaaatattaacagagtctgatatttcaatgcatcctggtgaagattttatgttttgggtaaatgggaaaagaaattcagtctgaacttggatctctcctttatcaaga

SEQ ID NO: 456534 - DNA, 555 bp, Homo sapiens
tttagtggctcagtagtgtcacagtgagttctcatgcctcttttccatggttacaagatggttgctgaagctccagccatcacatccatattccaggcaggagatgggagggaagacagtaagagggagaagagttcatcacaagctaagtctgttatatccttttaagattttctggaagctttccaaataatttttgcttgcatctcattgaccagacctgtgtcaagcaactgttcctatctcaagggaggcttggagaygccttttagttgggttcatggtttttgccaacaaaatcaggttttgttgtaaaggagagaatggacactcggtagatgtctagtagattttatctctagtacaaatttttataaatggaattgctggattaaatactctcagacatttaaaattttgactgtgccaaattgtcatctaaaggggttgtgccagggcatctctacagtgcatgaatatgtctgtttccctacatcactgcctacagactgctgccaaactcttcatggtttgctaatccattgggtgaaaaat

SEQ ID NO: 456535 - DNA, 608 bp, Homo sapiens
tcttctttctggctgtgtgatttaccatgagttatttaccatctctgtctgtgcctccgtttcctcagtggtaaagtgaagataataatagtacttacctcataggattgttatggggaagaatgagttaatacaggtaaaggaattagaacagtgcctgactcaataaatattattgttattattatcacagtcacattattcactgacggcaacagtctcttgtcttccagcctctcttcaagcctcctggccttgcagcctggcctgctcggtgctgtgaaaacagcagccttgtgttgaataagtcactccccgccttgaaagtcttcagtggcttcctatcattgtcactgattttaaggaccactaccacctccaactccttttttagcaatagaaccctttgttcctttgcttttagtgggctcttacagataatagaggacctgcttgggttgaagtgaggggatgcgaggcccttccagcttcccccttgcccttccttgtcccacaggagatgtccctgaggaamcctggtatctgagaaatcctacctggaaacttctggcctatgaaatccaaacagccaatcaaggtgctcattt

SEQ ID NO: 456536 - DNA, 605 bp, Homo sapiens
tggtggtgtgaagactaggcagtttcatgctaacggtgtgggttttcttggtgacatttgagatgagattataagccgaatgggaattggtggatgtattttgaggactgagaaggagctagaaagtggtcatcttgtatcatgggaaggtagcycttggagtaacatggttcgactcccgagcagtgttgaatgttcatttgtggtaggtaagcatgaaattgacttgaagctggcctgttaagcaatgcttagctgctaggatgcaggactgagatgatggagagagggcaggacactgtggttctccaccctgtcttaacatgggaatcacctgggaagcttttaagtatcccctaagtgactcctttcaaacaaacaaacaaaaacaaaactgatacctacattttatcttcccattcctggaattcttgatttaattggtataaggtaaagtctggacatcaaatccagtggtgtcttccaaccagccttgtggccaggtctgacatttacagccatattggccacatgctgcacaattccagaaggcttcattcacataatctatattggaaatagtttgttctaaatttgtgctgtac

SEQ ID NO: 456537 - DNA, 598 bp, Homo sapiens
gtatctctgctgggctgctcacctggtccacccttcaagatggcattggtctaaacttcccaccaaactatctagtctcactcagctactcrtactcccagtcagcctagtcccaagggaccatgaagggaccatgccttcctcttgaccctaatgtcccttgtatttgtcagacaccctcccagagggcagggaacagactctggggagccctgaaaccagagaaacccaggacaagctatttccaactcagaatgttctggccacccacccaggctttgtctgatttctgatgttctttagaatcttctcattacatcactaagaaaagcatgattaagtccatacacacacacacacacacacacgcacacacacatacatataaaagataaatgtgtatctttaataacttttattatgttttctgattacaaaagtaatatattgccacaatattagaagaactgtatcgaatacagaaaattataaaaaataaaaaagataaagtataaggcctccacacagagataggcattattaattctttggtatagtccctttgaatatttttatatgaatacattcacatttgttc

SEQ ID NO: 456538 - DNA, 605 bp, Homo sapiens
agggtacctgacaagttggagagacacccgggaagttaggacygccaaagtggagaaggggaggaggagagtggtaagagataaggccattttgaaggggacacagtcatggaagcctgtcaggaagaggtgacctggatatggtccagatctcaaatggattgtgaagactcgaaggggtgagtcgagggcaccgtgggcctgctataccaagccgagcctctcacattccttgcatcaccaattttctgtggtgagaggtaactgacagggtcctttcacttgagatgcgccgggtgtaggtcagaagtccttctgtgccctcgtgtttgcttcaggatccttgaactacctggggctggccccagactcccttctgtagctgaggggcaggtgaagggagggcagctcctagagcaacggaggctgcctggtggagcccaagttcagggagatgagccataggcctgtcccgcatcctcttgcatcctctaggtctccaccaggccccacccatttctctttgactctttttttccctcctcttctcccttctctcttcccacattccctcttcctcccccttctttctcctctttgttgtc

SEQ ID NO: 456539 - DNA, 565 bp, Homo sapiens
ctgtttcaaaagtgcatcactctgacctcgtgcactttacaggtaaggccttctgcccaaaatggttcaagaaaagctagcaagattacatgaaagtggctttacagccattccttgacctttaccttgattttgaaatccagttgtaagtcarcaaaggggatggtcccctccacgtgccaggctatgctgactgcactgaggaggagaaaagaggagatggagaaggacttgcattcaaacccgctgagcttacagctaagtcagaagaagcaggactttctggcatgaaggggctagtggaggtccccacccccctctgaagtgtcgagggagagagctccaggaggattgggtgggctgtggagggagctgttcaggactgcttcaagaagatcttgccaagccttgtctatatggggcagttaataaacattctcttatactttcccctcttctgaaaaagaaacttctgtcccatcctgctccaaagctcaatggcttttgagtccaggcatgctaagggtgatcacagtttttctgtctcccaggctttgcacagaac

SEQ ID NO: 456540 - DNA, 565 bp, Homo sapiens
ctgtttcaaaagtgcatcactctgacctcgtgcactttacaggtaaggccttctgcccaaaatggttcaagaaaagctagcaagattacatgaaagtggctttacagccattccttgacctttaccttgattttgaaatccagttgtaagtcagcaaaggggatggtcccctccacgtgccaggctatgctgactgcactgaggaggagaaaagaggagatggagaaggacttgcattcaaacccgctgagcttacagctaagtcagaagaagcaggacttyctggcatgaaggggctagtggaggtccccacccccctctgaagtgtcgagggagagagctccaggaggattgggtgggctgtggagggagctgttcaggactgcttcaagaagatcttgccaagccttgtctatatggggcagttaataaacattctcttatactttcccctcttctgaaaaagaaacttctgtcccatcctgctccaaagctcaatggcttttgagtccaggcatgctaagggtgatcacagtttttctgtctcccaggctttgcacagaac

SEQ ID NO: 456541 - DNA, 565 bp, Homo sapiens
ctgtttcaaaagtgcatcactctgacctcgtgcactttacaggtaaggccttctgcccaaaatggttcaagaaaagctagcaagattacatgaaagtggctttacagccattccttgacctttaccttgattttgaaatccagttgtaagtcagcaaaggggatggtcccctccacgtgccaggctatgctgactgcactgaggaggagaaaagaggagatggagaaggacttgcattcaaacccgctgagcttacagctaagtcagaagaagcaggactttctggcatgaaggggctagtggaggtccccacccccctctgaagtgtcgagggagagagctccaggaggattgggtgggctgtggagggagctgttcaggactgcttcaagaagatcttgccaagccttgtctatatggggcagttaataaacattctcttatactttcccctcttctgaaaaagaaacttctgtcccatcctgctccaaagctcaatggcttttgagtccaggcatgctaagggtgatcacagttttyctgtctcccaggctttgcacagaac

SEQ ID NO: 456542 - DNA, 581 bp, Homo sapiens
tatccctctccctatggtagcactgggtgccagtgctttatcataaaggctagtggtttccaaaaggggcaggcagccatcaagcccagataatatcttacacaattggcatcatatccatccctgctcctactggagataggctgcaggtaacaaatgcaggcttcaaatagagaaatacacacacacacacacacacacacacacacacacacacggctaatcaaagtcttgagggaaactaacaccattcacaaacagaatcccaactcaacaaagaagaaaaaccaacacctgggacaaggagaaacataaatatctatcaaataagaacatgctgyctgacaaaagagccaactaggaatcttggaaataaaaaatgtgatgtaatttgtatgtcttattttgagaaatgtctgttcatgtcgtttgcccactttttaatcaggttttgttgttgttgttgttgttgtttgtttgttttgctgttgagttgtttgagttccttatagattttggatattagccctttatcagatgtatggtttgcaaatatgttctaccaatccataagttgtctc

SEQ ID NO: 456543 - DNA, 586 bp, Homo sapiens
ctgtggtttgggcaggagtaggactgctgctgcctaaaagttttctgtctttctaggctgcctctttcctgggctttggctgggtagagtaagccttcctggaggctttatttatctgtttgttggtatttccaggtgttagcttcttmagtgtgtagcccgggatatacagggcaaaatgaaaacaaaggaaactcattaccatgtttttccccaggtcctgagctccctagccaatctgcctccttctcactacttttcaaagcctcatgtttgttttatatataatgttcagagattttagttagtgggaattacagaaaaaaaacatatattctccatcttcccagaagtacaagtcccagactgaattttaacaagcaaaatcatgctattaatatatgctatttaaaggatatacctaaaaagtataatagtcatacaaatgcaaacaccaaatgacactgacttgaaaaataaagaaaaaaattggcaaaatttcaatgcaaaaattgacaaatccacatccagagatggtacttataaacaccttgctctcaaaaactaattgatcaagcagacaaaa

SEQ ID NO: 456544 - DNA, 456 bp, Homo sapiens
tgaaggaggttcccacttctaactccctctcacttcactcccagggcttggactttagcccctttctccatgaacactttagtagccaaaccagctgatactggaagctgaagtgtttcttaatcttagctgcagaaaagaatcacctggagagatttttttwaaaaaaaacctggatgtccaagtcacactcagaacaattaaatcaaatgtatgaggatgggatccaggtatcagtatttttttaaaactcccatgtgatttcgatgtacagacaaggttaggaaccctcagtgaggattatatgcccacaaagaaaaataccatgctagctgaggactgctactacctctataagagaatacacactaaacaacccataaaaagcaaagcaaaccaaagtactgcaactataaatctaaaagaagaatcagtagaaatgccaagtatgaaaaa

SEQ ID NO: 456545 - DNA, 599 bp, Homo sapiens
cacactaaacaacccataaaaagcaaagcaaaccaaagtactgcaactataaatctaaaagaagaatcagtagaaatrccaagtatgaaaaaaatgtaataactgaaataaagaactcaataatgggttgaacagcagaatgaaaacaatggtgtaatggattaatgtgctccaaggtcaggatgaagaacaagtcaaaacacatggagagtcgggagcaatgtaaaaatacacataaaaaggtaagaaatatagcacatagaggtgtagaatgagttctagaaagagagagaaaaataaagaaatgtgattgttaaaaaataatgatcaagaagttcccagaattaaagatccctttcaggttgaaagggatcatagagtgcaaaatagaagatataataataataataaacacttagaagcattattgtcaaatttaaaaaccccagagacaaagggagtaacataaaaccttctagagagcaatggcagcccatccacgtaagaaaaattatcagattgatatcactagcaatgctaggtgcaagaaaacaacagagtaatcatttcttccaatttgggatgtgttaactttgttc

SEQ ID NO: 456546 - DNA, 593 bp, Homo sapiens
aaaagctaagtcaattttaaagaagaaaagcgaaaggacttattttaccaatattaagacaggttaaagtttagtattaagaacaacaacaataactgcaaagtactggtctaagaccagacaaaataatcaacagatcagaaatgaagttcaaaaccaaatgcatctatatatggaaacttaaaacgtgataaagatagcatcagaaatcagtggagaaaaatgaattctttagtgcagtggttctcaaactgcaggtgaaccagtctttcctagtggggtgggggcaggggcggggtcrtggggtgttaaatgcagttgctgggccccatcctgagaatttataatttggcaggaatggggtggaatgcaagaatttgcaagttcccaagtgatggcccatgctgttgatccagttaacacttgagtagacaatatcaggaaatctgtctcactatataaagaaagtaaatcccatgccttacacaagggtgaaatttagttggatgacagatgtaaaaatgaaaggaaaaaggacaaaactaatagaagaaaatgcaggtggtgttgactgaattctgcctgctaaaatg

SEQ ID NO: 456547 - DNA, 549 bp, Homo sapiens
tgggcatgttgccaacaatgatttagtagagaaatggattccaagttctagagaacaaataagactgtggactgcctgtgtaagccccaaggaacctgagtatggagtttataattaaagttcagaagcagtatttctaattctttctcacagtgttttaattatggtctcattgcacgggagaagtgtagaatgaaaaagaactgtaggcgaaggatttgctcctggggaggtagagagggtcttttgtgacattcctccagaaagttattccctgcttctaaatggtgtactttcccacatagtatagtctcttaatagtcaagastcagtcaggaacaatctgcaggttcaattggaccccaacagaagatttcactcaagtaaaagtcacacgctcgcccttgagggagagaggaagggtgttcctcaattagcagctctgatctggatggttacacctggaatgaccatcaacaggcgaggaccagcccttggtgtaagtggagtagatgccacaaatgcaatattacttaaggggcacccaca

SEQ ID NO: 456548 - DNA, 549 bp, Homo sapiens
tgggcatgttgccaacaatgatttagtagagaaatggattccaagttctagagaacaaataagactgtggactgcctgtgtaagccccaaggaacctgagtatggagtttataattaaagttcagaagcagtatttctaattctttctcacagtgttttaattatggtctcattgcacgggagaagtgtagaatgaaaaagaactgtaggcgaaggatttgctcctggggaggtagagagggtcttttgtgacattcctccagaaagttattccctgcttctaaatggtgtactttcccacatagtatagtctcttaatagtcaagactcagtcargaacaatctgcaggttcaattggaccccaacagaagatttcactcaagtaaaagtcacacgctcgcccttgagggagagaggaagggtgttcctcaattagcagctctgatctggatggttacacctggaatgaccatcaacaggcgaggaccagcccttggtgtaagtggagtagatgccacaaatgcaatattacttaaggggcacccaca

SEQ ID NO: 456549 - DNA, 436 bp, Homo sapiens
catctgctagaatatcatgccagacaaaatcttcctgccactcctgctgtgaaacacacattgtcttaagaattcaggtgtctgacctaagtgtctatcaatggatgattgaataaagataatgtggtatatatacacaatgcaatactattcagccataaaaagagactgaaattgaccaggcagagtggctcacactgtaatcccagcactctgggaggccaaggtgggaggatcacttgaacccaggakttcaagaccagcctgggaaacatagtgagacctaatctctacaaaattacccagatatgatggtatgcacctgtagtcccagctacttgagaggctgacgtgggaggatcaattgagcccagggggttgaggctgcagtgagtcaaagtcacaacactgcattccatcctgggtgacagaacaa

SEQ ID NO: 456550 - DNA, 436 bp, Homo sapiens
catctgctagaatatcatgccagacaaaatcttcctgccactcctgctgtgaaacacacattgtcttaagaattcaggtgtctgacctaagtgtctatcaatggatgattgaataaagataatgtggtatatatacacaatgcaatactattcagccataaaaagagactgaaattgaccaggcagagtggctcacactgtaatcccagcactctgggaggccaaggtgggaggatcacttgaacccaggagttcaagaccagcctgggaaacatagtgagacctaatctctacaaaattacccagatatgatggtatgcacctgtagtcccagctacttgagaggctgaygtgggaggatcaattgagcccagggggttgaggctgcagtgagtcaaagtcacaacactgcattccatcctgggtgacagaacaa

SEQ ID NO: 456551 - DNA, 436 bp, Homo sapiens
catctgctagaatatcatgccagacaaaatcttcctgccactcctgctgtgaaacacacattgtcttaagaattcaggtgtctgacctaagtgtctatcaatggatgattgaataaagataatgtggtatatatacacaatgcaatactattcagccataaaaagagactgaaattgaccaggcagagtggctcacactgtaatcccagcactctgggaggccaaggtgggaggatcacttgaacccaggagttcaagaccagcctgggaaacatagtgagacctaatctctacaaaattacccagatatgatggtatgcacctgtagtcccagctacttgagaggctgacgtgggaggatcaaytgagcccagggggttgaggctgcagtgagtcaaagtcacaacactgcattccatcctgggtgacagaacaa

SEQ ID NO: 456552 - DNA, 227 bp, Homo sapiens
atacactgcaccctatttgtagacttttatccctcacccccctcccactctttcccccaagtccacaaagtcaattgtctgacattgttttaaaaagaaagaaaacagaattataaaatgttcaattaaaaccacaaaaagaaggaaaagagtggaagacaaatataggaacaaagaataatggcaataaacrgaaaacagtaacaaatatggtagatattaaccca

SEQ ID NO: 456553 - DNA, 624 bp, Homo sapiens
ctgctttcattccataccaaatggaattaaagtagaaatcaataaaagaaggatagctaggaaatctcaaaacaattaaagattaaacaacacacttccaaataacacataggtcaaaaaagaagtctcaagagaaatttaaaagtactttgaacaaaatgaaaatgaaaacaccacttatcaaaatttgtaagatgtggtaaaagaagtgcttagttagtaatttatagcactgaatacatacattagaaaagaataaaaatctgaaatccataatctaagcttccaccttagaaaaaagaaaaacacagcaaattaaacccaaagtaggcaaaagaaaagaaataataaaatcaaagyagaaatcaatgaaactgagaacagaacatcaataaggaaaatcaatgaaaccaaaagctgtttatttttaaatatcaataaaattctttagcccttagaataagaacaaacaaagaggacacaaatttataatatcagaaatgaaagatgaaacatcactgcagatcccttagacattaaaataagaaaatctgactgaaactaatccttgacaaaagagtaaaggcaacacaatgaagaaaagagtgttttcaacaaatggtg

SEQ ID NO: 456554 - DNA, 566 bp, Homo sapiens
ccctaagccatgacttagaatgggatgccatggaaccttcccaataagtatagagaagctttggggaatttagaaagccattttatagcccaacaaygcttagctctggcaagcacaaatccttgccttccactattgccctgaaaagggctttctagatagcttatattgagtgtggaaggctaaactctaagtcttctgtcctccctgggttctggtttcacctgtgaatcatagaacggaggcttaggaacagctagaactatcagtgacaaggattacatccgtgtgtggaagggttagcatcatgtctgggctgatgtaggcttgggaatgaccttgacctttctcttcttattgccctgtttctgcagagctacaggataaatataaaatcttgagttggcattcaggccctaggcctcactgactcaagcagtgtagaaagatggcagaaagcaaaggctgtggtttctctgtgtcaaggtgacccaaaagtgctggggctacttgaggcctacgaggctgtgcagttgggtaactgctggccttgctgaggagaacat

SEQ ID NO: 456555 - DNA, 565 bp, Homo sapiens
ccctaagccatgacttagaatgggatgccatggaaccttcccaataagtatagagaagctttggggaatttagaaagccattttatagcccaacaatgcttagctctggcaagcacaaatccttgccttccactattgccctgaaaagggctttctagatagcttatattgagtgtggaaggctaaactctaagtcttctgtcctccctgggttctggyttcacctgtgaatcatagaacggaggcttaggaacagctagaactatcagtgacaaggattacatccgtgtgtggaagggttagcatcatgtctgggctgatgtaggcttgggaatgaccttgacctttctcttcttattgccctgtttctgcagagctacaggataaatataaaatcttgagttggcattcaggccctaggcctcactgactcaagcagtgtagaaagatggcagaaagcaaaggctgtggtttctctgtgtcaaggtgacccaaaagtgctggggctacttgaggcctacgaggctgtgcagttgggtaactgctggccttgctgaggagaaca

SEQ ID NO: 456556 - DNA, 530 bp, Homo sapiens
tttccttgcagactatacagagccaagcctgggaatgggcacccagcctctcgctgactgccaaagagacacccctggctgatttggtcttaggaagtgttctgcagaaggtacaacctccactcaccgagaagacagcaaacctgttgtggtcttcaaaatgaacatcttctcttacatatgctcagcgcttcacagtttgcaaagcacttttacattcatcatcaatgggatccatcctaaataatgtgaggcatctttgttctggtctctcttgctgccttaggcagccaaggagggagttttccaggcctctcttgctggttgctctaagtcactgcacttgctcaagctggcatgacacgtaggaggtcatggtgaggtttggaggcttcctggtctccaacctcaaaaacgttccaggctgccagcttgatcttgagaggagagaggcaaaccaarccccagcgtcaataagctgacatctgaaagggcaggatggctacgatagtttacagccttgagaaatg

SEQ ID NO: 456557 - DNA, 609 bp, Homo sapiens
tgggaacacttaccagtggctcactttgagaggacaaccccagaggagatgcccacacaggacatggaagtgggctgaggcctttaaacagggaattcccgagtcctgcatatcctgagcatggctggggtggggaatggaggcggcagggtggcctgaactcctggtgggcagttctccttggcacagtgcaggagggagaagggaggtccctctaaagcagagctgctcaaatgggatccacaaagcagcgccagtccaagagctgtttgttatgggctgtaaaaggagaggggtctcactgttatctaagactccttccaactatcaagttcataatttgaggttctttgtgcttctggtctgagatactgttttaggactragcctgcagatttagtataccaagaaatgcagtgaaactttcagataacacgggaggcctcacagaatgccgcccaccccaacctacttgcagcaaattgcatttgctcttgtgggccaccccacatgttaattttccatcattctgaacaactttactgtctttgttaggtctgagccatccacgtttatttgtatttccaatgcccttgggaaggatagtat

SEQ ID NO: 456558 - DNA, 643 bp, Homo sapiens
attatttacttacactattatttaatctccacaaaatctccatgaagtaggaattattattgtccacttacaggttaggaaactaagagatagctattagctractgcccatgatcacaaagttagtcaatgataaggacagaatttgaggtggtcagccactgaagcccacactcactactatgctcttcttcttcagataagactgggaaatcatattcccttctcagaaattcacaatacagtgcacttcaaaaccctggaaaatttctgcagtaaagaaacttttttaccttgcttagtgcagtatttcccaaacatatctggggcatggaacttttttgtcaagtaatatttattaacattgggcagaaaatgttccacaaaaccaactttggaaaatgtagtcttaaataatttcttggctataggcagaccacggttcaggattctaagccagacagaccttgcactgtcacttgataccctgcatgagtatgtctcaaactttggtgtgagtcagaagcacctggatttctgattcagtaggtctgaagaatttttcttcctaacaagttccccagggatgctcatggtgctaatccaaggaccatgctttgagaactactggcctggacatcag

SEQ ID NO: 456559 - DNA, 527 bp, Homo sapiens
ttaatcataaatcttcagaaaattagcactgtatactttactcatttaataaaatttactgggtccctatcatttggtgcaaagtgacagagattcagagacaaatacagtcccttttacatggaatgctccctggaatcagggagaatgttgattttacatctgaatccttaatagccacacagtatctggcacagtgaaggaactaaacacatttttcaaaaatrtataaataaaagaatggtttggaatagctcacagacaaatgactatactatacagggtcaagaacaataatagaaatccacccagagctctgttggatcctggagaagagagtgtctctttctatagagtagaagtattcataggaaatagataagatatgtgaacctggggttgaaatgtgagagaaattctcctattaaagaatgaaagagaagcccataagaggaaatggtcttgaagaaaatgagttgttaccaaaacaccgaaactaaaatagcaactgaaagttattgccaaga

SEQ ID NO: 456560 - DNA, 559 bp, Homo sapiens
aatattacctatgaattattagttattaatatagcgattgttgttactattattgaaatatacataaggtgcctggtacagattagttctttttatctactagttttctactttttatgcataaagaaacactgactgccctctrtgatgtaccccacggtgggtgaggttcaagagtcattttcttaagtaaacagtatataggcttgtttttcatgctggtagacaaagtgggattttattttatcccagagataagaaataccttttttttcatttgtagtgcaacatctgattcaaagatggtgtatattttggagagattttgactaaaagtaaggtaatgtcatgtgtattttttatagcaagccaaggaaatggtttagaaggagcagtgaacttggagttcaggaaccaggagcttagatttagccctacaacctgtacacaccccgatacttttctgggcctcagtttgctcatccagaaacacactattgagtgatgtgtcttctgacattcattcctatcctaaaatatgaacgctattttgcccaca

SEQ ID NO: 456561 - DNA, 565 bp, Homo sapiens
catattaagcatatcactcttagctgctcttcatagaaggaacaagatttcatttttattttcccaaccacctctcacaaaaagtattgtcttcattttacacataggggagttgcaaaatcacactctgattcagatatgcaaagaaatacaactcattttctccttaactctcatgagtttaactattaatgagtctctatttactcagtagtgacttagggtagtagttataggacaaagactataatccggtcagctatacttatatcctatgcaataatttaaagtccttttgggttattgtttggctcttgttaggtaaaatgtactgagtctctcatattttggccctcttctctttatcttctgtatattggtgtttgagaggcaggccaaaggcagcagagtagaaaggcaggccctcaggtcactagtgccttcttctgtggaggggccattcagagctgctatttgggctggctatttccactgttgttggcaacagcctgtattcctgggcattgmcctgtcccctgctgctagggctgcagctgggcaactc

SEQ ID NO: 456562 - DNA, 589 bp, Homo sapiens
ggggctgtctaggcaagtctgaaatctgtagggcaggccatcaggaagggcaggctggaactcaggggcacaggataaaactgtagtccataggtggaatgaggcttcttcakcaaagcatcagttctgctcttaagacctttagatggtttaaaacaatcccacccagcttatctaggataatttccttccttaaagtgaattcaatcatatctacaaattaccttcacagcaacctggattagtgtttgattgaataactgggcactcttgcctagccagcgtgacacacaaaattgaccaccacagggtcccaatagcatcgagttgccaccacagtagctctggactacctgcctttgtctttgtagtccagagctacgtggtgctctgtttgttttccagagaaaaacaaatgctattaagatgtagtagccaggtttccattacatacaaccaaatgcaaatcctaattaatatattattttgctcagctttaagcccttaacttatagattcaaacaaatatctaattttagagtcaaaacgaacaataggtctgttcttgtaggagggtgttgtgcttctc

SEQ ID NO: 456563 - DNA, 485 bp, Homo sapiens
cacagcctccctttcttttacacgatgtgaatgtacaaggtagagccatgtctcatcacagctttacaaggccttataattctgtttttaaacctttaaaacaaagcacatggaactggctggaaaggccgatctgctgtcgtacacagcgagaaaggacaacctttcatgagaagggaagcaaaccgaggcccccagggtggtcggctgctcatttttatgttttccaaagacaaggctttactctaaaagcttccctcttccttaggcgtttccatgagcccagggctcagaccagcagcccaggcagccgctcaccatcttacagaataataaatctcgagacagaatctccaagcaatcgccacaacttttcrgttctgacttgagtgtcagtaacttgctgtttctaactcatcccggggataagaaactgtgtgagacagtgggattctctggtttctttcatttcttcgtgtttcttc

SEQ ID NO: 456564 - DNA, 485 bp, Homo sapiens
cacagcctccctttcttttacacgatgtgaatgtacaaggtagagccatgtctcatcacagctttacaaggccttataattctgtttttaaacctttaaaacaaagcacatggaactggctggaaaggccgatctgctgtcgtacacagcgagaaaggacaacctttcatgagaagggaagcaaaccgaggcccccagggtggtcggctgctcatttttatgttttccaaagacaaggctttactctaaaagcttccctcttccttaggcgtttccatgagcccagggctcagaccagcagcccaggcagccgctcaccatcttacagaataataaatctcgagacagaatctccaagcaatcgccacaacttttcagttctgacttgagtgtcagtaacttgctgtttctaactcatcccrgggataagaaactgtgtgagacagtgggattctctggtttctttcatttcttcgtgtttcttc

SEQ ID NO: 456565 - DNA, 646 bp, Homo sapiens
  misc_feature (1)...(646): n = A,T,C or G
gtatctgcccctgctcccattcaggaagtctccagcaaaggtaaatgttggtcactataattgttctccctggggctgtggaaaattcactggagctgtctcaagccttctgtgactcaacaggcctcaccamcatggttgccactgcccatggtacccacccaagcacagggataatctgggacccagagctctcctaggacccagcaaggaatggatggatgggaggaatgagtcccctctgttccagatctccaagtgtatccagagggtctatcactgaagctccacaggggaagagcagcagaggacaaggacacttattggagtcccaacaggctctagcttctcccctcatgctcaccatctttacctaacccagggaattagtacctcttctagatgagacaagctagtctcttggatcttcttactctccctgacctcagctttgtaaactcacaaaaactcaaagtacaaaatgcaatgcctttgtgccactctgacaaccctccccccgggcaatgagtgcctcatagctcagtttgaatggatcaggtgggtggtgataacgatggagttaaaagggattataagatatttattaaacatatgtacnaaatgcccataaaaacatctgttcaag

SEQ ID NO: 456566 - DNA, 510 bp, Homo sapiens
aatgatcaccagttgggcagccccctaacccgaatagtttcagagaggaaaaaaaaagaaaagtgatgttctgtaaacagaagtgaggtgtagaaacagcatgatttttacaggtccacattcgccttatttgaacatgggatggtacaggcgcccaagtttgattggtcaagacttggtgattggcactagagcaagatacagtcctggttagacatccagttaggttacagttcactgtgcgcagagaaacctttaggctgaacttagaatatgtaaggagacagcttyaggctaatttaacgctgcttattctgggggagtcttgtgacagcacaattaacttccctctttcttatttgagtcaatggtattttggtctctgaaatagcaattaaatttgtattctgctaatacatggaataaattcaagggaggggaccaattgatgttgtgggatggaaagaatatagaaaacagggaagcaggcaagggtctcaaagtggaaaa

SEQ ID NO: 456567 - DNA, 647 bp, Homo sapiens
acatccaatcaggggaacaaagtcaagggttgcatagtcaagtcctctgtagagcaccagaaggatcagactagaaaagcaaaaggaaatttgcttagcacataataattgctcaatgaatatttgtggactgactgactaggaaactatcctaagaaaccaacagaacctcaaacacaaacttgggaaaaaggagagacattgaagcattatttgtagtagtagatagaaacacaccaaatgctcaacaatagggaaagattaaataatttatggtacatctatataatggcatatgatatggttattcaaaatgatgttttaaattaaatttttatgactggagaagcagttcaccatgtaatatgaagtgaaaaagcaggctacaaaactgtatgcaatatmattgcaagtaggcataaaataagtgtggttttaacagtggtttatggaagatttttgtatctttacactttctatattttccaggttttccataatgagactatacttcctttatgactataaaaatatctaaagttctaaaatgaatgtgaatcttgattttgaaatggggaccaagatgttaacttcttaagttatatcaagtaccccttatatattctcctgtaatttgattggtagca

SEQ ID NO: 456568 - DNA, 582 bp, Homo sapiens
acggatatctctagcaggagggagcaagagggactgatcacttgatttcttcatctatacaatggagatgatttttcttgcctcttggaatggttataagtatgcaatgaggccatatttgtgaatcatgagtacctcctgcaactccagtgcagaggaggtgctcagagaattccagcatctttcctctgtggcagagcaggaccttgcacacaatcacaggattgagagccctggaggagggtggagytccacaaggctctggttggcaggggtggcctttcgcccatctcttgccgcagtctcctgtagatagaaagacccaggactgtgcttcttaactctctttttgggacgtgatctatttgagaatcaaataaaatccatggtcccttttcctacaaaaatgaacatgtaagtaggaatgacggcaacttttatggagtactgaccctgtgccaggccttatgctgaatgtttccatggattatctaacctctgaacaagcctcaaaggcagatactatttattctcgccaaatgcaaatactgaggcatagaaagttaagtaactcagccacag

SEQ ID NO: 456569 - DNA, 618 bp, Homo sapiens
ttcttacacaagtaatgtggtcagaggctgcagaatttgtctaatacagtggattgttgtttcacttgtccttaacatagatgaagagatgaaaagagagacaatcatagagaaatgatggagagatgaggtaatggccaaacaagcacagtcaactgcctgacaactaatactctttgttctccaaagcaatatcttccctggagwttgatgaaatcctaaaggtgtgtttttcccattttataatttcaagtgagttctattttacttgcacatttctgcctctttccttatacacttattatctgtggaccataacccactgcaaatgagtagcaagacagctagtggcacagactctagccaaaccaactgaatttgaatctagcttcagccacctacttgttgtgtgtctttggacaagttagtgtctcagtataaaatgtagataatggtaggacctgcctcacagagttgttgagaagattaaatgaagaatgtaaatggctcagacgagtccctgatgcatagcaaggtctagaaaagtgcttgctatgattaaatctgactaaatccaaaaggttgatatcaccacaagttgtttctagaaagactcta

SEQ ID NO: 456570 - DNA, 567 bp, Homo sapiens
accttgcccatggatacccagctactgagtgaaagaaaagatttgcccccctggctccagggcttatgctcttaccaastcaatttaatccaacatgcttcattttgacacttgctccacttctagaaccatctgaatcttatggctctgtctcagaagatctaggaagcacctggtaaggaccaagagctactcttaccccttgagaaccaacgctctctgagcaaacaaagccagactgggtaccctggcatccttcatatggaattcattcattcagctattcattcatccattcatctgtatacagagggacttggggcttgggatgagaggcggaggaaaagtggatggcagagcagaaggattgttttcaataactcagcctcaaggaagagggaaaaactcaggactttgagactaccttctcatctcatgagggatgtcgggaggtagaaaagccctggtgtgccaccgttgctcttgactcagttcaagccaattgtctttgactcactttaggccaggagttctcaatcttgccactattcacattgaggacctgat

SEQ ID NO: 456571 - DNA, 567 bp, Homo sapiens
accttgcccatggatacccagctactgagtgaaagaaaagatttgcccccctggctccagggcttatgctcttaccaactcaatttaatccaacatgcttcattttgacacttgctccacttctagaaccatctgaatcttatggctctgtctcagaagatctaggaagcacctggtaaggaccaagagctactcttaccccttgagaaccaacgctctctgagcaaacaaagccagactgggtacmctggcatccttcatatggaattcattcattcagctattcattcatccattcatctgtatacagagggacttggggcttgggatgagaggcggaggaaaagtggatggcagagcagaaggattgttttcaataactcagcctcaaggaagagggaaaaactcaggactttgagactaccttctcatctcatgagggatgtcgggaggtagaaaagccctggtgtgccaccgttgctcttgactcagttcaagccaattgtctttgactcactttaggccaggagttctcaatcttgccactattcacattgaggacctgat

SEQ ID NO: 456572 - DNA, 589 bp, Homo sapiens
tggcttatgccaaagacaagaaaaagaagtgaggtccatggaatggaatagaagagacaaattgtaatttccagatgttatgattttatgattgcccacattaaaaactccaaaagaatccacaaacaattagaactaataagagactgtatcaggataggatagaaaatcaatctcctaaaattagtagaaggagaagcaaaaagagaaagtagacatatgaacaaagaaacaaaatgtgtttctagttaaatacctcattgtctttgggagaaaggggagggatatggaaatttttgatcaagcaaagcacagggccctttggccacatttcagcttgcaacaaggaagactttcctaaccagggagaactctatggaggccttcaagctgagktggcacagagagtatgggacatattattaaatgtgaattgaattagatgacctttctggttccctctaatcctgagacccatttaggataaaacactctggcatattcaaaaggaagaacatacacaatcattgctttgtttggagaatgtcataggcaacctctaagatggcgtccaatgatcccagcctcc

SEQ ID NO: 456573 - DNA, 510 bp, Homo sapiens
tgagagtgcagccctggctgacactttgactccaacttcatgagaggccacaatcccagagatgtctagctaagctgcagccagattcctgacccatagaaactgtaagataatatatgtttgctgttttaagctactgagttttgagatgatttgctatacaggaccagtaactaatgcaggggtcttttcacctgtgcttcacaccgggaacctgtgcttctggtcagtagcctacattttttacaaggaattttaaaatttaaatctcttggagtcccacttcatgacagtcatatttctttgaattctgggcctcaccctacttttgaatattaattggagagaagtaggaggagggtgctacagggtctgccttaaccttcagggatgtgtacttacgttgacttgatgatcctcattcagaaaactaacaatctactaacatgttccyactgcatcttctctggccacagagtgcaactgtcaaaagcatcaatcagcgcacta

SEQ ID NO: 456574 - DNA, 543 bp, Homo sapiens
gacatactcaaaggacagtggaagaacaagacagccatccagataacacaagccgtcagacacactttgtctgcagttcactggtgaattcaggtgggggtgtgctgttggcctaaattatctggataagccttcattttgctttggtccataaactcttttatctcctctacagttgggaagttggcaaagcttgcttctcccaccagagaatgcagatgagctcccaggcactggccttcctcctattcagtttcatcccttttagttccatttcatttcctttagttccagttggttccctgggttaaggattccagaactgtttcagagctactttctatttcaactgatcttacgatcgaacctcagtgagctttakcacatggtattcactttgcacattattccagctttgagaatgtcgatgctaaactttttaaatatgatggaaggaacaactttaaaatagtttcagaaaaaaattattgatgtcttaaatctccttgtcttttgcaacttattttaagccacatgactgta

SEQ ID NO: 456575 - DNA, 543 bp, Homo sapiens
agtttatataattttctgttataatataatttccatacaatttgccttgttcatttcccatggatactctttgaaagagcacttatttccattttatggacgacaacactgaggcacaaagaagtgaagtagaatgtccatggttataccactaataaatgacagagctgggatttggactcagtatcacattgctctgaaacctgcatttctacattcccttttgtgtataacccaagtactggctggttsctaacaggttgctaatctgaattcaaacatttttttaaaaaaaattcatgtatgtaggcagcagcctcagtcttgtgtttatcaaatattttcaaaatattttgcagagattatttttattaccagttcaaaaaaacctcaagccccagatgtggttagtcaggctctcttctcctgaacattcaagccctaaggcaatttatggtaatgaaacctcaacttcttcaactccttagtgacattccttctcacttataaacagaaataatcttcttttttgaaaccatgaaa

SEQ ID NO: 456576 - DNA, 615 bp, Homo sapiens
tcctgaacattcaagccctaaggcaatttatggtaatgaaacctcaacttcttcaactccttagtgacattccttctcacttataaacagaaataatcttcttttttgaaaccatgaaattctgctgcaggctccacccttggaagagacaagactcagaatctctgggctcattccccaccccagctctcctttcaaaaccatggggaactgggaccagaaccagggaaactgcctctttgcatagataagaactggtcatgtgagcccatcaagtttcaggcagattactaaccactccaaaaatgaaaccagagccacagtgagcagtgcctcaaagctggtctctccccagtccctgcgaaggtgggttttctccatgtcctgtttctgcctctcctctcctcctggtgctctccctttcttactggtctctttggccctctccttccatttccatttcttctaatccaaactttctttcctccccatacccctcyttgactgaggaataccattaggaataccacttctattgaaatgagtccaaaagatgcctttggctgtaatttgaagagatggaagacccaggaggtgaattaaatgcactcaatg

SEQ ID NO: 456577 - DNA, 628 bp, Homo sapiens
gcagaggcaattgggattctgaggggagcagggcaaagtccccaccctcttgaagcttacgttgcaataagaggaataataaataatcaaaaaaaataatataatgtcaagtactgacttctgctgacaacagtctctgtgtagccaccctgtattatttgtatgtgctgctaattatgcttggtttacatgctcttggttcaggccttcagaaattcaatgaaagtgaagaagagtagggaggtaaaggctgagagggagaagacctattttagatggtgtggtcaaaatggccctttctgcacggggtatttgaatagacacttgaatgatatgagaaagtcagycatgccttccctgtacagccatgactcctatgcatgcacctgttcacataacgtattctaattatttgtttttgtcttatcttccctcattgacagatagctctcataggcagacagaggcatttcgcattcagatcctctgtggtttgggcagtggttgatgcccagtaggtgctcatggaacactgattgaccgtatgaaagcatgtcacatggccatccactactcaacacaaggcttaaagtcactgagccaggaaggcccaatatgtagctgctac

SEQ ID NO: 456578 - DNA, 583 bp, Homo sapiens
ggggaaaacccaggggacttgagttctgcctcctcctgcactcagcagtcagactgcacgttccaggcagacgtgacaggagggaagcctggtggagcagaggcatttgctcagcaagagaaactctgtccttccctgtcctcctgactccacctcatctggcccactagaaacaacacctcagttggcctcatgaaaaataccacgcccgatttcaacgaagacaccttggttgtgcacagccccaggcccacagggtgtgctttcccctctgcccttcccaccaaacgctsctttattatccaacagaccagatagcaatagggcgacttcatcctcctgagcggctccacattccacaaaggggccattgctatttgccactctgggagagaaagcccgtcacgggccttcccctatggagccctctctctttccctgcctctcctccagctgctcctggttcaagccgctgcctgccccggctaataatgccttgtcatgcagtgacagaattacggtctcacactggtttcacatgtcacaaataattgtgctcattgcgcatcatattgaagttgtc

SEQ ID NO: 456579 - DNA, 659 bp, Homo sapiens
tattgagtggttatgttctaggcactaggctaagttcttttgtgtcattattttatttaacattcacattaaatcaatgagctatctattattatccccttttacaaatgaggaaatcaaggctcctgagtcggagggcatgtggagtaacatggacatagtacaaaagctttgccttcaaagcrggacgtgcccacagatgtctctgggtggcggcggcatagaaaaaggacacgggaatcccagggcacaatatcatgggtacttaagaaatgcctggtgatctcataatctccaaaaccggtattgtttaggctaagggatcaagagacaaaaagctaaggaatatttcatgatctggaaactttcagttcctttaatatgaaaatgctcaacatgaagtattaaagatgtaaggattcagaggttgcaggaggccaaagaagattaagagattctttcccccaaatgaagtgcacagtgtatccattacagggcatggagattttccctcccctcccccacctcctccacttaatagagaaaatgctgaaaattttgaagaaatgcattctttgttccttaagttccatgattaattaggtataagccatgtttcaaaatgtttcgtcatttatttttaattctccccagagtgt

SEQ ID NO: 456580 - DNA, 572 bp, Homo sapiens
tgtgtcaatgttttcaccttaaaataattcacaaagctatattttatatataattttctgtgtccatattctcttttacaggaaaggggcaaatatcacaattggtgtaagtgcttccaaggagtagtttctgaaagtgagaggacttaaatacgttccctagtctggaggagatggttaagctaggaaatggaagyggagttccagacagaggaaagggtaggagcaaaggccctgggatgggaaagagcattgatcagcccagtgcctgccatggaacctggagatgaatagaagatctttcaataaatgcttatcacacaggtgaataacaggtgggacagggattccttcaccaggtgtgctgctggcacagtttaccacaaactcagttgctttaaaccacacaaatttattatcttacacttacataggaaagtagtttaacatgatctcactaggctaaaatcaaggtgtaaacagcgctatgggtttttttctgggagttctaagagaggatccatttcctggccttttctgccttctagaggccacccacattccttgctggg

SEQ ID NO: 456581 - DNA, 572 bp, Homo sapiens
tgtgtcaatgttttcaccttaaaataattcacaaagctatattttatatataattttctgtgtccatattctcttttacaggaaaggggcaaatatcacaattggtgtaagtgcttccaaggagtagtttctgaaagtgagaggacttaaatacgttccctagtctggaggagatggttaagctaggaaatggaagtggagttccagacagaggaaagggtaggagcaaaggccctgggatgggaaagagcattgatcagcccagtgcctgccatggaacctggagatgaatagaagatctttcaataaatgcttatcacacaggtgaataacaggtgggacagggattccttcaccaggtgtgctgctggcacagtttaccacaaactcagttgctttaaaccacacaaatttattatcttacacttacataggaaagtagtttaacatgatctcactaggctaaaatcaaggtgtaaacagygctatgggtttttttctgggagttctaagagaggatccatttcctggccttttctgccttctagaggccacccacattccttgctggg

SEQ ID NO: 456582 - DNA, 290 bp, Homo sapiens
ataatgggacactattcaattagcaaggtccctggttgttctgaaatgtataggaagagtggctgacttttagaggaagcctgtgactcaacggaatctggcttctgctgcccaaactcattccaagctcatctgtcccagaaaagcaattaaatgacattcctgacaactggacagaaactcttatctcttggtcaccatattatccyctcccaggtggaatttcctgggatgcctatttgagatcagagtgtttctcagtgaatgtacataattggcattcaatctgt

SEQ ID NO: 456583 - DNA, 521 bp, Homo sapiens
taatgtaggtgccccttgctgccccttaataaaaaaataataaaaaaataaaaaataaactcatctgcaatattttactctttgargtctttggattcaaaactttcctccttctgaatgtgccaaaccagctttaagtgtcatgaaacaaggcccagtttgatttgagcaacattttcattatacctggccagtgagagagggagccgaaattcatcctcggagaggtgacaagagaagcctgcagctgaaatgagagagagcaagagaggactgagacattggctctgccatctgtaaggcagaagaggaagaggagcgggtgatagagactgagaaagcatcccagcctcaactacagggcaaggagtgtgtcaccttgagtatgtccaaattgtctttttcagggaacatactgtgggcatgtgtgtgtctaccaaatctaattccagttttgttttcttccatctgtaaactctttgagcatgcttgtgtagacacagaaattgcctgaaagccat

SEQ ID NO: 456584 - DNA, 572 bp, Homo sapiens
aacatcccaaacttacaaaaagcgcaatgagttccaaatagaacaaacacaaaaacataaagatctagacacagtatttcaaatttgaaataatgccccccccccaaaaatyttgaaatgcagctagagagtaatgacttgttacatataatgtattctgaataagataaaaaatagatttatgcttctaggaacaatgattataaaatagacaaaatgcaatttgctaacattatgaacgacagaagaagcattactacacatcttaacaacattaaaaaatgattaataattattattttaattatttgctaattaatccaataatttcaattaaataaacacatcttagaaaaacctgaatcacaaaactgacaccagaatatataaaagtgtaaatagttctgtatctataagaaaaaatattaatttataattaaagatcttccccatgccctgccccattacaaaattttaagtctaattgggatcactagtgacttctttcaaatatttaaggaagaaataatacaactctgacataaattcttccagaaaacagtgaaagagca

SEQ ID NO: 456585 - DNA, 572 bp, Homo sapiens
aacatcccaaacttacaaaaagcgcaatgagttccaaatagaacaaacacaaaaacataaagatctagacacagtatttcaaatttgaaataatgccccccccccaaaaattttgaaatgcagctagagagtaatgacttgttacatataatgtattctgaataagataaaaaatagatttatgcttctaggaacaatgattataaaatagacaaaatgcaatttgctaacattatgaaygacagaagaagcattactacacatcttaacaacattaaaaaatgattaataattattattttaattatttgctaattaatccaataatttcaattaaataaacacatcttagaaaaacctgaatcacaaaactgacaccagaatatataaaagtgtaaatagttctgtatctataagaaaaaatattaatttataattaaagatcttccccatgccctgccccattacaaaattttaagtctaattgggatcactagtgacttctttcaaatatttaaggaagaaataatacaactctgacataaattcttccagaaaacagtgaaagagca

SEQ ID NO: 456586 - DNA, 656 bp, Homo sapiens
ggcatttgctggtggggactgtcctaggtactaggagtaaaataatgaacaaaacatgatctttgctctcaagtctcttacattttaggtcagattactgaagaggtcgttgcactgatgtctgagaagcacttgcaatgggatacacagtgcattatcccaaaggagaggatccacaattgtcaccatgtcactctgtttatttccaggatggccacagattcttctaaatcacaagacaaaagtaaaacagtgttgatgactatacctccatatgatgacgtggagaatctaccagtgggggttctgaaatacattcaaactaaaatgtgttagggcatccagagacatgtgcctagtttaggatgttttatgtaagggagtgtagagctatcccaaagcttaaacctctaccaatatcataacaaaactacctctgttagtgctttggtaatctgttytttctgaagttgacttttcctgtattttgattatgtggcatagttttgaaagttgtacagtgaagcataatctgcacaacacaaaatatctgctcaataaactaaataaattgctttttaaactgcaattttcttaactaagaataaaagatacaaaactatcataagattcaagcaagaaaaaatatataccaa

SEQ ID NO: 456587 - DNA, 656 bp, Homo sapiens
ctgtttattctgtaattatagctgcagataaaatacagaatgccagtaaaatctgaatttcagataaatgacaattttttagttaactgggttctaaacattacaagaggcctatttatattacaaatgattcattgtttatttgaaattcaaattcaactcagaggcctgtatttttgtttsataactctgataaccccaactttaatttagatgtataccctttccagtcttttattatatgaatgctttagaaagatgtgccatatttacccaggttcttttcttaccctatgactcaaagagtgatatatattggaatatattcatctcaattttgtgtgtatagttggttatagacaaatgaataaacaatgaggatttcacacaggtggcaagctaatagagactatgtttgaggcaagtaaactttttagatttcttccaattctaagtgtttatatacataaaccccattaagatatccttctatgtttaaaatttctgtaattttaatatttaaagatacaaccgttgtaatgtccaaccacatatataattagaacctgtatacctaatattattatgttgatatatactgcagagctatagtcaggactctcagatttcaaatagcatatttatattcttctata

SEQ ID NO: 456588 - DNA, 582 bp, Homo sapiens
gatgttccagcttagatttaacagcatagctaaagtacagaactacagtcaggattggtttcatggacatgcaacataagcacaaggcaccatgcattgaaaggcctcacacttactraaacactgtatcaccaacttaaatttcttaataattttttatcaaggcaccccctatttccatttggtgctgggccctgagacttaagtagccaattcttactactgtcaacattttatatagttaccagtgtgtgacttagtaactcaaatttggactcaaattttgtgatttctaatatattgtacttgtgtccaaataatcactttgcctgaactactttgtgaagtcagtggcctggaagcgatcatatactagaaggaaggtgtttatcacattgcagaatcctcacaaatcattatgtatctttggatgaaattgacaactagttaaacagatggaactcctaatttgaaagcaaggaacatacggtatctctcactgtccctcattataagagacatacctcattttagacccaagtgtaactccatcccacacagacctgatgttatctgacattt

SEQ ID NO: 456589 - DNA, 591 bp, Homo sapiens
cgtcatcaacttggagataaaaatggacaacttggaccacagatactctgtgaaataattgttactattgcttgtatacttatgatttgaatggctaacaataaatatatgaggttaaactgtatgaaattgctagcattttgccatttttgacctataaatacagtaattttctatgtttaacttaatagataaaggtatagataagatttgagttacttggttataatagagagctctattagcaaattttaacggagatcctctgtataccctttctcctcccacccccaatgacaagttgtttcagatttcagcaaaaacaaactggccctgggattaatttctagcctacttttcctcgtcccttcttttccttctgctaatattaggcactttgattcctcatcttacattccaccttccaytgggtgttgtgagaaggggctggccctccaacaggggacgcctatttgtgcccaagagaggtggttctttataaacatggccatgggacagcagctgctgaagagggggtcatgggaaagttctttactcccagatattttctccacctcccctagacagaaa

SEQ ID NO: 456590 - DNA, 576 bp, Homo sapiens
gcatcttttctcctaagtcctgaaatccagaccgtgtctctctcagccatctctctccccacttgccatactagtcctggcctttttcatcagctcttgcctccctattcatgggtttagggccaagttgttagacttcagatatttcaaaaatgagtaatgatttactgatttgagtgagacctcaagagaagaaataagccacaactttttttttttctggcaagaactatgtataagccatccaagagacatggagactatgttggcttttaatcagtttgagggaaaattacttaacaatctcactcacaacccatatcaatgaataataattctccataagtagatattcttcttgaaattttacccagttctcttgttcttcctctccatcatctatggggcgatccatcaaatatacattttaatatgcyttattgttccacctctccttcctctttccaaaataaatcaccccaatttatttagcatttcacaaaccaaattattcaatatgttaatcacttccaatgttaattaaattaattttagacttaagatccacttgatttt

SEQ ID NO: 456591 - DNA, 587 bp, Homo sapiens
ttcgaagtcagcctggccaacagggtgaaacctgtttttactaaaaatacaaaaattagcaggatgaggtgacacatgcctataatcgcagctactcgggaggctaaggtgggaagatcacctgagcctggggaggtcgaggctacagtgagccatgatcgcccactgcaatctagcctgggcaacagagtgagaccctgtctcaaatatatatatatataaaaatatatatttaataaataaataagttttgatcaaataatacatccatatttctttttcttttctcatttgaaactgtgtcttctttcccrccccctgcccttgttctctgttcccacttcccatctctgaatataaatagttgttttcacattctttggatttgggcacaatgagcatagctcaccatccaaaatgcttctagttttgaagcctccttctgagcatcaaaaaagttgagatgatttgccaggtgtgcgagttcttgctgtgtgccaaagtaatgcgccaaatcactcaggaagagacataagattttccagtgtccagatgagccaatgaaatatgctttcaaatgcttgaaa

SEQ ID NO: 456592 - DNA, 591 bp, Homo sapiens
cattctgtttctttgtgcctgggtaggtcatgaatactgaggacttcctcctttccttatattttttatatgcagataaaaccttacaaggaaattcacacaaaaaaataataacaattaactatagataatgggataaagagtcatatgtttttaatattttcaaaaattttaactagaataatgtattacttttcaaataaggagggaaaagaccataaagtttgtttgaagaaaggttctagggcccagttctcatttaattagggtttttccatatakatggaagatactcaattacctggagttcatctacatcactttatcttcatacatgatgaaggactcccaagtctttgtattcacaaccctgcactctttctgccacctttcaccaattagcctttttctgcatcctgacaaaatggaatttgcctctaaattgtttctcaacccacatacttcctcagtgagaatcaatgtaagaagctaccatcccttaccaatgtatgaaacaaggccctgaatataagaccttaaccatctgcatttattcaactcctactgattgagtaattgagaaggcttggc

SEQ ID NO: 456593 - DNA, 597 bp, Homo sapiens
ttcttgctctggggtacctgctaatagcatctcagggaaacagaaaagaataataatctttcctcctgctgattctctttctataatacaggtagggcaacaaactttcctggacctaggactgaccaagtcttagcactgagaatcccacatccccaaataaaccrttagtttcaggtaaagcaagaaggttggtcgtcgtctctgaacataccacgtgaagtcctgagttgccactaagcacacacagcaggactggggagtagcatggaagtggtaactggaacaacacaatagactaactacctccctcacagttttgtagagacccaggtcttgattgaagaagagctttaacccatttttttgagactaaaaaatatgaaaattcaaaaatgggtagaatattccccaaaattcttttattctggataaattaggatgcttcaactaaaaaaatctaaaataaaagccacattttttcattttagttgtttcaaattgaaaacaactagcctttgtggtgaaatattgaaactatggaaaatgtcttagggaaatgttgaccttctcttaaaaaagtttaaaagttaaaat

SEQ ID NO: 456594 - DNA, 594 bp, Homo sapiens
ctgggaatcatcttgatccctaattcccacacagacacatgtgcaaatcatcaaataagtctcataaattctccctccaaactatatcttgagtttatctacttgtcttcatcctgactgctgccaacttggtatatcccatgactgtctctcatctagaatctcacaatagccacctaactgacctcctcatttccactccyagtccctacaaggcattctccatgcagaagccagagtagaacttttaaaatatgttttatgttctttccctgcttaaaacccttccataacttctgtgatagttaattttatgtgttgatctgaccgggccattgagtactcagatttttggttaaacattatttattggtgtatctgaggcaagggcggtgtttctgggtaagattaacatttgaatgaatagactgagtatgcatctgagctgctataacaaaatacctcagagagggtaatttataaacaacagaaatttatattctatagcacagcataacacaatattaccatgtaacaaaactgcacatatacccccatatctaaaataaaatttgataatcttttttaaaaaga

SEQ ID NO: 456595 - DNA, 314 bp, Homo sapiens
actgtgattaaaaatatcactataacaggtggccaaagatctttttacacactacttcagatcctygagtgctaacattatgctagaataatgtaagtatgtaaataaaatattctatcatagaaattaagtatgcacaacaaagcaactcaaaaataagaagaaaaacatatcaaaaacaaaagctgatagttaatgatttaatgatttagcaaatatatccaagagctggttcttttaaaattttaataaaacagaaaaccctttgggaagtctaaagataatgtaatgtaaatactcaaaattagaaatga

SEQ ID NO: 456596 - DNA, 556 bp, Homo sapiens
ggcttacttgagacaatcatttggtataactccatggttctcaaacttggctgtatgaaaacgcctggggaagtttgggtttttttgaatttaatgtttaattatggcaaatatacataacataatatttgccattgtaactatttttaggtgcatagttcactggcattaagtacattcacattgctgtgtaccatctccaccattcatctccagaactttttcatcttcccaaatggaaactctgtattcattaaatgactccccatttccccctcccccagccccygtcaccagcattctactttctgtctctatgaatttgactactctaggtatctcatataagtggaatcacctagtattggtcatttatattgggctattcacttagcataatgtccttaaggttcatttatcttgaagcatgtgtcaaatttttcttaatttcttttttttttaaaggctgaataatactccactatatgtatattctactgtttgtttatctatttgtcagtcaatgtgcatttgagttgttcccatcttttggtta

SEQ ID NO: 456597 - DNA, 556 bp, Homo sapiens
ggtgattttctaaattgtatttcggactgcttagatatgatattatgactctagaccctattaaaaattctagatgttatattatgagattctggatctgtttaattttcttttcttagcagacagtccccctgttaaggtataacataagagccaagtagctgtgtgtgctcattttcccactggactttactaataccaccccagcaattagaacactgactcataccaccaaatgcttccgagtagrggggtaagctcagcttcctgttggaccatactgactccaaggaggaaagacgtggtgatctgacacaagctttgttgtgcaaggccccagtgacactaggcctttttgctgccaggtggggtggaggctcagctatttgctgggctctactgacactatcttggtgagggaatcagagcaccatatggcagagcagggcatggaagacttctccccattcagccttttacatcacctggcaggggaatcaaagcatcaaagcactgcctgcttctattaggcagtgaattgaaaatcaattgtcta

SEQ ID NO: 456598 - DNA, 527 bp, Homo sapiens
tctgcagccctcaaaacacaaaacttgaaacaaatagaaaagtggagtttcataattcaagctaaccaaaaacattttcaagcttcaacttttcaagttttattatattgttgttcatccttcactcctaccagcataacattataatattctttcaagaatgccatcatatgtgggtgtgtgtttgagaaaaaggtagaaatgtcatttttattcactgaaggataccacctattatttagaggtaaaacctctccacttctcttccttctgagttgtttcaaagaaagagctgaaaggacagagaaaatgttcccctgctgcagcatctggctctgsttgactcacctactggccacattggcagctttgggtctgctttttagggtattcctcgtataggcaaaaaagatgaacttgcccttgtgtgacgatatctcatttggcttctctctcaatttggggggtctatatcaatatttaaataagattgtaaaaagcccatcatgaaaaggacaaacacatac

SEQ ID NO: 456599 - DNA, 619 bp, Homo sapiens
ggaatggcaccaaaccattcatgagggatctgcccccatgacccaaacacctcccagtaggctgtacccttcaatattggactagggatcaattttcaacatgagaccatgagttttggtggagacaaacttaaatcataacaatatcttagtatttcataaataagcattaacctattttggcttgttttttataatgtcaacaatttgaaactttcagtagtaaaaatggaatgtaatatttgtccaagtcttgcattgtcaatttgaagccctttggtttcaacccttcggattatatataaaataaccttttaaattatattttttaaaaagataataaattatcacaaagttgtatttatttcagaattataaaattgtttaaaatttgaaaatcaaagtaattagccactttaacataacagagaaaaaacrtgacttacaaaaagcatttaataaaacttaacactgattaatgattaaaaaaacacatgcacacataggccaggcacagtggctcatgcctataattccagcattttgggaggctgaggcagaaggttcacttgtgtccaggagtctgagaccagtctgggcaacgtgctagatccctgtc

SEQ ID NO: 456600 - DNA, 651 bp, Homo sapiens
ttgcaatgatatatcttacatgcagaagcgtgtcagaaatttgtaacatcaaatatgtgggcctgtaataggcattccattaccacattagctataatctgaacatttggttttccaatgattttactacaaaattacatatttttagactcytcttcattttcatatcttccctggtcactcctgatcatgttactttttcccctttgatgatatactacaatatttaccccatcctctcatttgttgtcaacagctctgttttactatataacttttttcaaatgacataattgtctttcccagattgttgtaatgtctccaaatcagggggtgtgtctcccctctttggcattcacataatacactgaaccagggttttcagagttaatgttaacttttgaagtgccagtactgaatatgtcctggatgtttctatagaaatgctactaaaatataaacgcagattatatggaacataaaatgttttcttcttgccagtttatctaatgttgtctggtcctgacactagtcactgtcagtgtcagcattattttttcatagtgctaattgttatttaaaattatttattatttaacttgattatcacctatctccttcactagagtctaagctccgtgaggacaggga

SEQ ID NO: 456601 - DNA, 391 bp, Homo sapiens
agaaatttggtgctgaagtgagagcagtgaaggatcatcccagctttaaaagcagtgtaggctgagttacagaattatctagtcttctccaaaggtccaccaggtgttgatatttgtattatggcagtatctgtatgtaaatttaccatgtttttttaagtattgctgaattttataaaatatatatcacattcataaaatctcttaaaaatcaacatccatcttttcaataaatttagcaagagattgtattagtatgtcttgtaatagtagatcatcaaatggaggatttgtaaactctggatataaaacagtgtgcatcagttaagawtacttcagtagcaagtgacagaaacccataagtcaaattggtttaaacaagaaaacatca

SEQ ID NO: 456602 - DNA, 535 bp, Homo sapiens
tctgcagggacggtttgggctttgtttcctttagtctctgggtccacctcatttttgggttagcttcatccttatactgatagcaagatgactgtagcatttccagccattacatacaggcacagcaatatccagaaagaactgtcttttgtaataaattcttactttgaatggaaaactctttagcatttagaattcactcattcaacagttatttattgagcacctgataagtgtaaggcagtactctaaagcttgaaatgyagctatgagcaaaatgacagacctccctgttacaactcactcaaataaatgggtcacacagcaccctgtagccaaccagtggaaataggactgggaccactatgattgactgacacccaatccaagatcttaaaaaataaataaataaataaaaaatctcccgctaagttatgtagaggagggatagtcccttgaacaaactagggcttttctagcaaggattcaatggggaaaggtattcaataggcaatcaacactgtctgcaaataga

SEQ ID NO: 456603 - DNA, 576 bp, Homo sapiens
ccagatcaatcaagagacaagcaatttttaaataaagaagaacccccttgccaagaatctttagatcaatgatcaggaatatatgatattttatagttcaaatatgtatcaaacattatgatgatgataaatttactagatatattcttacagctatatttgattttggttaatgtaagcattaaccaaactctcttatctttgaattaattataatttaccagaaaatctgttttatggtatatagagaatagtcccagcatcaatattttgatatgcctggagcctagtaaattcaggcctgaaaataagtggtatatagtttgtctctctttctcattactctttggtttcagttttcatggggacttgtgtttgaggggctaattgtgaccrtacaggtcactgggagacaggcgttcttttgggaagaaaaactatgaagctgaaaagcagaaagcctactgtctaccactgtaatcaagataatccacaaagtacactcagtgggaagggtaaaaatgctttaaaggaaaaaaagcctaaacaaaacacatagcatacttttccagctgc

SEQ ID NO: 456604 - DNA, 576 bp, Homo sapiens
ccagatcaatcaagagacaagcaatttttaaataaagaagaacccccttgccaagaatctttagatcaatgatcaggaatatatgatattttatagttcaaatatgtatcaaacattatgatgatgataaatttactagatatattcttacagctatatttgattttggttaatgtaagcattaaccaaactctcttatctttgaattaattataatttaccagaaaatctgttttatggtatatagagaatagtcccagcatcaatattttgatatgcctggagcctagtaaattcaggcctgaaaataagtggtatatagtttgtctctctttctcattactctttggtttcagttttcatggggacttgtgtttgaggggctaattgtgaccatacaggtcactgggagacagrcgttcttttgggaagaaaaactatgaagctgaaaagcagaaagcctactgtctaccactgtaatcaagataatccacaaagtacactcagtgggaagggtaaaaatgctttaaaggaaaaaaagcctaaacaaaacacatagcatacttttccagctgc

SEQ ID NO: 456605 - DNA, 435 bp, Homo sapiens
acacacatcattattttcaagaaatttatttaaaacttcattacaaatgttaaaatacaaaaatctacaagcacaattaaaattgaataataatagcttcatatcacttgtatttacagttttgttttcaaccctcaaccaagttcctmaaactggggtccaatataggtttacaccataggtcaagtttcatgtccaggtggttttatttcttaatttgtaaaatattttactctttgtctttctaaactataatttcttaactaataataatcaatcattgaaaattgaaacacgtgactatcagatagtcatggatattgccattaaactcaaatggaaaaattatggagtcatgtttactagacaaggtgagttggtatcagaacctacataaagcctgcttggaagtgtttcagttaccattgctgggta

SEQ ID NO: 456606 - DNA, 691 bp, Homo sapiens
gttttgtttacaattggaaaggcattgagaccaggaggccagatgcccaagaggataagtcattaggcaagcaggctggtttcccagactgttttcaggagatcttgccagagttttacataattctacatcctctcagagcttccgttcctatcactggaattgatctttccaggtgagaaaataaatttcccaacctgagcacataagcactgggaagaacatttctatttttacttttaatttrcttcagaaattggggtactaagaggataagttaccaaggtcatgtatatagtaaacgatggagctagaatttagcttatgctattactcatcaagttatgctgtctgcaaaatgacaatgggtaggctatgttggatttcttgtgccttggttaatgaaataataagttggaaaactatgagctctaccaaactcagagtgtttaggagagaattaatggaatggtttcataatccctttatcaatatagtgggaaataaaatactttatttcatagaaatgttgtgaggattaaatgagataagatataaaacatgtttagcgtactgtctagttccataagtgttacatttcattttattataaatattgtttccatagtatctcacctattcttttcaaagttcagatgtttggttctttgacatctcaacatatgaacaa

SEQ ID NO: 456607 - DNA, 577 bp, Homo sapiens
tgcatggcactctcactgagttgagtagacacagatcagagtttgggaagattgaggtggctagagagaagacagttgtgtagggaaagggttccaaaaatattgacgcagatcccgtgactctattgttgagtattaaactatatatgaataaggtaaaagtccatggggtcaggaaaacaactcaagacttgagggkctgaaagataccttcactgaaggccccaagtagttacactttcatagtgatgctaagctggccttagaataaaggaagctctggatcagtgatcagcaaagcatggtgcgtgggccaaatccggttgatgacctgtttttgtttgacccaccagataagaacggtcttcacacttttacaaggttgtattaaaaaaaaaaaaaaaggaggaggaggaagttacacaataaagattgggtgttatctagaaagcttaacttaacatttactacctggctctttatagaaaaagtttactgacatgccttaaaaagtctaaaaataattcttgaaataatcaaactgattctcagttcatttgacttcctgcccaaagtc

SEQ ID NO: 456608 - DNA, 552 bp, Homo sapiens
agtcaagtcccaatgcaatttcaaagaactcgtatcatacaaacaaaaaattcaactggacatttactttatggttgaagaaatacaaacagtaaataaatatctgataaattgttcaaattcctagttaccagataaatgcaaactggaagggattggggtactatctttagcctccttaaaagaaaacagttatcagccaagarttttgtatccagcaaaacaaagcttcataaatgaagggaagatacagtctttttcagacaaacaaatgctgagagaattcgctactaccaagccagcactataagaactgctaaaaggagctctaatcttaaaacaaatccttgaactataccaaataaaacctccttaaagcataaatttcacaggacctatacaatagcacaaggaaaaaaaacaacaagttattcaggtaacatggtgaatagaatagtactcacttctgaatacaaatgttgaatgtaaatggcctaaatattccaattaaaagatacagaatggcagaatggaaaagaattcaccaaccaa

SEQ ID NO: 456609 - DNA, 538 bp, Homo sapiens
tatcagcagctctgcctctgtagttcctgccccttggcycttcctggtccacctagggccacggagactgaaagattctccagcctcctgggagcaggtaacccagttcttggctctgtatatgaatattggaatacatttctcaatgagaataacagaactatgctttaaaagttaaaaaagaaaagaaagggagcaagcatgtgggtgaggtttaagggacacccatgacacccacgctagtaagtgcctgaactggatcaagtcttgtggatgcaaatctggcgaggtttttcactttgtcagtgctgccttactattgatagactgattgattggctataccacaatgaaaatagctctactggttttttttcctaattataagacccatactgaccattcttgtaaaagttgaaacaatggatgaaggcatcaagttgaaagcaaaatttgccagcaaatgaatgtgttcaacatgagtttaacaagtatatatggagtacatattctgtaccactcaggctggataaatagt

SEQ ID NO: 456610 - DNA, 605 bp, Homo sapiens
tgacttggggtaatggaatgtatatgtacatgaaatttcttactgatacatacatttatcaagtaactactacacaccagaaactgtcataggcagtagaaatatcagtaattaagatacaattcctgttctcaaagctaacagactaaggttagcaagtgcttccattgttcaaaggagggtaacattatttccaactggsttgaagatcgggaggtaaagtggggaggcaaggtttcaccagaaagattagaataaaggtggaaaacaattgaaggacattccagaaaatgtgagtgacttgtgtattccctttgccactctttcttttgcaccttctgtacaatggtgaatatataccacattgatgaattttctagttactaaggaagacaactcagaaatgaaaatatttcataaatgtaaatagatggcttgattacataaggactttttattgttattgttattggtaacatccaatatctgagactaaatatatatttaagtaaaaatgcttattattattctaaatggacttcagaaaattccagctttctatatatagacttttgtttgctagagagaaagaattgttataagaa

SEQ ID NO: 456611 - DNA, 487 bp, Homo sapiens
ctcatacacacacatatgcatatacatacacataatacacattaaaaataatagaagaaatttaccaatattatggtttaatttgatttaaaatttgatttggctttttaagagatagaactcttcctttgtaatgttcccttgataatgaacagcttcacaccaaarctttctgatccttaatagctcttgtaggttgggatttgttttcaaaggtgatttaaataattcccaaactgcttattttattcaaactaaaaatacttgagaaatcctgaatacaattgtttcatttcatcttttgtctcctgcacaaatgactttttactataaatcatactattactacgattgccacttttttatgagaatctgcaagtcttttttttttattacacaaagaaataggttcaacacagaagcagtacactaaaaatagggctgggaatcacaaagagattttgttgaaatctaggtgagaaattga

SEQ ID NO: 456612 - DNA, 487 bp, Homo sapiens
ctcatacacacacatatgcatatacatacacataatacacattaaaaataatagaagaaatttaccaatattatggtttaatttgatttaaaatttgatttggctttttaagagatagaactcttcctttgtaatgttcccttgataatgaacagcttcacaccaaagctttctgatccttaatagctcttgtaggttgggatttgttttcaaaggtgatttaaataattcccaaactgcttattttattcaaactaaaaatacttgagaaatcctgaatacaattgtttcatttcatcttttgtctcctgcacaaatgactttttactataaatcatactattactacgattgccacttttttatgagaatctgcaagtcttttttttttattacacaaagaaataggttcaayacagaagcagtacactaaaaatagggctgggaatcacaaagagattttgttgaaatctaggtgagaaattga

SEQ ID NO: 456613 - DNA, 547 bp, Homo sapiens
aaaacaacttgtgctaagaggattttaactcaggattttggaaggtcagtgagttggccagtaaaccatgatttccctaatctgtggcaaaacaacaaacatgctactttaaagccatttaaaattattcggtgacattagcactaggacaaaaacaaaatagctaaaataatggcagtgatttagattttgaatttgcttctatgtatcagttttcttttatttaatataacattaattgtcctccctcctcayatctgttctggatatgtgttagatgcttgtggactttagagatgttagttttgtaaataaaaatgtatttggttaatatatttgtaattttgtgttgtataaaataatttcagatgcaaagaggatgttgaatgaggtttctgaataaaccagtaaaatagtaattaccatatcacatactgattatttattctaatattagttgagtgccttctatgtagcaaacattggattcagcattcttggatgttatttcactgaatgtgaacattatcagcctccatgcactgta

SEQ ID NO: 456614 - DNA, 582 bp, Homo sapiens
accaaatttttaagtagaaatatgctgctctccttgtttccagaaaaacagtagtattaaaacttaatgaaaataattaccgttgacattaatgttactgaaaagatgattagtacaaacatcagactgtcagagatcctcagcggttttgattatcagcaggggtggtatttcacagaatcagagccaaaggagagctgacacaactggtatctagtctcttcacctgaagacactgtaacctagagatgctgagtgtctttttcaagagcacacacctgatgagttgtcaaacagaccagattcctggtgaccggatctgtaagagtctagtatcctcttccttctgtaccaccatatgtcctgtgaggtcatttgtgaatgtgaccgctcrcattctaataaccttcattgtgtctccagtgactggggctctggctcactctggtgtgaaacataactgcaattagaatacctctggtctcaaagaacgcaaaactaaaaaactaggacagggcaattccaatttactcccactatttcaaatccattttgaggtcatttacacagggctcttaatct

SEQ ID NO: 456615 - DNA, 601 bp, Homo sapiens
acagtttctatcagaaagaaagagaatcaagagtcatttgctatcatcmgtagtaaatacatacgtaacaaatacacactttttgcctcgtattgtgttcagcaaatcaagtttcaggtagagaaaatagattcctaatttgaatcagtatactatctctacaaccttctcgtttgtttgttcaagattcttgaatattaggatgtaaaagagagaaactctgggtacctgagtacgttcaaattctgaatcttcgctcgaacatttctgaagagggtttatatttttcattagttataaaataatgcttttatatctcaagaagatgatttttacatactttgcattttgttctctgttctaaagtataagtaaatgagttagattataaagcctttattttacagtgaggacactgagacactaggctactttttagacagccaagctcttaactactaccctaatctgcctctaaaaagggacctaaaaactgtgctgtcattcaagtgcgataacattgtcactgatacaatttcagcaagaaatgtatcttgacttacttgattctattattttgttgcaatggggttgggtttac

SEQ ID NO: 456616 - DNA, 601 bp, Homo sapiens
acagtttctatcagaaagaaagagaatcaagagtcatttgctatcatcagtagtaaatacatacgtaacaaatacacactttttgcctcgtattgtgttcagcraatcaagtttcaggtagagaaaatagattcctaatttgaatcagtatactatctctacaaccttctcgtttgtttgttcaagattcttgaatattaggatgtaaaagagagaaactctgggtacctgagtacgttcaaattctgaatcttcgctcgaacatttctgaagagggtttatatttttcattagttataaaataatgcttttatatctcaagaagatgatttttacatactttgcattttgttctctgttctaaagtataagtaaatgagttagattataaagcctttattttacagtgaggacactgagacactaggctactttttagacagccaagctcttaactactaccctaatctgcctctaaaaagggacctaaaaactgtgctgtcattcaagtgcgataacattgtcactgatacaatttcagcaagaaatgtatcttgacttacttgattctattattttgttgcaatggggttgggtttac

SEQ ID NO: 456617 - DNA, 583 bp, Homo sapiens
tctctggacttaccaagagcttttctctcaagctgccattgggagcaggggctttagggtccagtacaagtggattcaaattctggctcagtttcccattgttggagcaatattgggcaagttatgtgatctatgggagcctcagcttcctcttttctaaattggagattaaaatagtatttgcctcaaagggttgtttgggattaaactaactagcgtaggtaaagtgtgcctggatggtattaagctcaataaatgttagctactactatttcccttttccatgctagcttcccccttcaattcatccttagttgcagtgtttggacacccacgaatagcttttcatggtggatctagagggctttggggtcattcttagcacagtgctgagacttattcccatatgtatagtgcgacctaggtttgtcataacaaggtaccacaaactaggtggcttaaaacaacagaamtctaatttaacagttctgaagacacaagtgcaaaattaagatgtcagcgggaccacactccctctgaaacctgttggagagaattcttgtctcttcttagcttttgtagt

SEQ ID NO: 456618 - DNA, 578 bp, Homo sapiens
tggcagggtctttgatgccttttattaatatatatggcatacaattgaaaagtggcaacatggagaacagcctccatattcctccatgaagttcctatgccaggatcttgagctggatgaaccatggctctgacgaacaatttgggatactcttccatagaagacagatacattgaagaaattaaattatcattaaaaactagtggtgccatttaggcccctctttttcttaacatgtaattaaaagcaaaacaaaacaaaacaagtttctcgtgaatgtagtacaactttggttttattttgcctctgatgtgcttttatattgagagactgaaagagttgacatttatttttagtgagtgttacatgaattggagctctacttatattaaaatgtacaaaaagacaattwaaaatgtttatatttttgctttctaagggagatgcatggagcgccataattaatgcaagtatctgtggaggcagtgctcctaagactagtagaaacatctacctaagctggaaccagggtctggtaactgaagtccattaatttgggatgaatttctttgatgcct

SEQ ID NO: 456619 - DNA, 589 bp, Homo sapiens
agcacacacacatgcacacacatgctcatatctcccatttgcatcacaccaactctcgaatttctagggtaatattatacacattggcttgtttaatggaatttgcttctggaggacactggaaaaaactttcatttaagtattttaaaatcacataatgtgtgttgcaggaattcctgacatgggctcatggacactgcagactcagagataggcctcagaggtcctcccctcaaggactgcatgcagacattcagtgtgcaatacatgcatttttgtggaaagaagttctatagcttttatcaattcttgaaggagtctgtagccttgaaaatatttaatraccgctcttctacaagctctaagaatgtaatgcagtggatgagcccagaggttgtctctccaaagagacagatagcttttgtctgatttgatggctctcctttagttctctttcttccattccatcatctgtacagaaagtataaaataatacatgtttaaaaatgaaattaaataatgcacttttaacacagcttttggtaatgttcagcaaatattagctattgtttccacaggtaaatattag

SEQ ID NO: 456620 - DNA, 576 bp, Homo sapiens
tgcatcacaccaactctcgaatttctagggtaatattatacacattggcttgtttaatggaatttgcttctggaggacactggaaaaaactttcatttaagtattttaaaatcacataatgtgtgttgcaggaattcctgacatgggctcatggacactgcagactcagagataggcctcagaggtcctcccctcaaggactgcatgcagacattcagtgtgcaatacatgcatttttgtggaaagaagttctatagcttttatcaattcttgaaggagtctgtagccttgaaaatatttaatgaccgctcttctacaagctctaagaatgtaatgcagtggatgagsccagaggttgtctctccaaagagacagatagcttttgtctgatttgatggctctcctttagttctctttcttccattccatcatctgtacagaaagtataaaataatacatgtttaaaaatgaaattaaataatgcacttttaacacagcttttggtaatgttcagcaaatattagctattgtttccacaggtaaatattagatagcaccctgagagggaggaggggt

SEQ ID NO: 456621 - DNA, 618 bp, Homo sapiens
ttacttcttggtaagtgatgctcagctcaagtttcattagatcagtagttcattccaactttgtataaattgagtttatagttggaaatggttcaattttcagcaactaactttaagtcagatatctcaaaaatagacattgctagtcacaaaagaaacaatgaaggagcgaatggagagatttggtgcatttctttaacctatactatcaagataaattctactgcaagtggaaaaatcacatcatgctatacaagcaggactcatgaggactcaatcataaaagtcrgttttcttctctttcccacaatattgttaaacctgcttagtggggatattccttcccttcccataggataaaaacttgaagagcctcataatttcctggttattcttaggaaataagagaaagataaaactgcaatctcaattcagtaattcattgtgtctagtaatagtcccttataatagtcaaaacttcaaagattcttaaaatctaaattttctccactcccccagctggtcctgctgtaggtgacacactgcataaagaaagtatgctccttcctctctctgcctgctcttcccgctcctgattggcccatgattggaccctcc

SEQ ID NO: 456622 - DNA, 618 bp, Homo sapiens
ttacttcttggtaagtgatgctcagctcaagtttcattagatcagtagttcattccaactttgtataaattgagtttatagttggaaatggttcaattttcagcaactaactttaagtcagatatctcaaaaatagacattgctagtcacaaaagaaacaatgaaggagcgaatggagagatttggtgcatttctttaacctatactatcaagataaattctactgcaagtggaaaaatcacatcatgctatacaagcaggactcatgaggactcaatcataaaagtcggttttcttctctttcccacaatattgttaaacctgcttagtggggatattccttcccttcccataggataaaaacttgaagagcctcataatttcctggttattcttaggaaataagagaaagataaaactgcaatctcaattcagtaattcattgtgtctagtaatagtcccttataatagtcaaaacttcaaagattcttaaaatctaaattttctccactcccccagctggtcctgctgtaggtgacacactgcataaagaaagtatgctccttcctctctctgcctgctcttccygctcctgattggcccatgattggaccctcc

SEQ ID NO: 456623 - DNA, 596 bp, Homo sapiens
ctgttggtgagaaagtccttttctaagtgacatagtttcttttagtcagagggaaaaacagcagcttatcaatgagttcttggacaagagtttctcaaatgtaaaaggaagcttgtggggattttcagggtgagaaaaaccatttagtgaaggtactagttcatataataatggcttactgttactgagctcgcacctcgtgatgagagcttctcattcctgtcttatctctctttcttccttgatcttgaccttccccaagtttctgcctgcttatatgaacagctcccacgatcttgaaattttgttagcaaattcttccctttggatatctattcccaagaaactcagccctgaggttttagaggagcacctcctagccagcacagacctctcactccatccagctctgtgcctgargccgctggacctctgccaaggtgcctgcacccactttggttaccctatggtcattcccttttcttttcaaagcagaactaaaaggacaaggaattaccagaagcctcacattttctgcagaaggaactgtatcctagggtgggagtgagggcagggggtgtgccagccacgagtag

SEQ ID NO: 456624 - DNA, 596 bp, Homo sapiens
ctgttggtgagaaagtccttttctaagtgacatagtttcttttagtcagagggaaaaacagcagcttatcaatgagttcttggacaagagtttctcaaatgtaaaaggaagcttgtggggattttcagggtgagaaaaaccatttagtgaaggtactagttcatataataatggcttactgttactgagctcgcacctcgtgatgagagcttctcattcctgtcttatctctctttcttccttgatcttgaccttccccaagtttctgcctgcttatatgaacagctcccacgatcttgaaattttgttagcaaattcttccctttggatatctattcccaagaaactcagccctgaggttttagaggagcacctcctagccagcacagacctctcactccatccagctctgtgcctgaggccgctggacctctgccaaggtgcctgcacccactttggttaccctatggtcattcccttttcttttcaaagcagaamtaaaaggacaaggaattaccagaagcctcacattttctgcagaaggaactgtatcctagggtgggagtgagggcagggggtgtgccagccacgagtag

SEQ ID NO: 456625 - DNA, 572 bp, Homo sapiens
gctagcagcgtgtctctgtacctcataagcacccattctttttcatttttaatgaaatcagtttctttttcttcttttttttaaaaaaaaaatcagtacaccaatatcttctgggggaaaatggagcaatcacattaaaacatactcctcaaagaagtcmgtaacacctgagctaaggagttcttcaggaaactctgtcctgaggcaagagtaaacaggaactcaattttgtaggtcaaaggatggcaaatttttctgtgaagggccaagaccagatagtaactatttttggccttgtgggcaataaaagggtctctgttgaaaatactgaactcttcattgtagcacaaagacagcataaacaatgcttaaacaaaagggcgtggctctgtcataataaaactttacttataaaaatagacagtagtccaaatttggcccacaggctgtagtttactgacttatacaataggctgctgctatgtacaatgttacatgtgttgacagtaaaaaattctgcagacaataattagtgtctcttatgtgccacagtagataccaaaatgagttaa

SEQ ID NO: 456626 - DNA, 562 bp, Homo sapiens
aggggaatttaaacgccctcagtattaagcagagtatcacatagttaaaaatacaggctttggagaccaacagacccaggtatgagtccccatttcaatayaaccttcagatccaggcaagagcagtcaacctggctgtgggaataggcagaactaacataaacaagaaacaaaacattgggttgggtaaattaactcagggacaaaaacagatatgtcatatagactacaattttcacttctttgccatcagcttttgacaggctatgtaaatagcctcaggcagaaagctcgagacatagcaattccaatgtttggtaagttatagttaattgtttccaaaatgggaaatgctgagttaaacaagattcaaggttttttgactgatgtctctgctccttttataagctaatgtgtactgtgaatctgcaagaggagaattagggactgtttctcaagtttctttagccatttttttgtgtggagtatctcaaggaatgtgtgctctgtgggatatatgttcagaaataagctctggccttaggaggtcccatcacaccaa

SEQ ID NO: 456627 - DNA, 562 bp, Homo sapiens
aggggaatttaaacgccctcagtattaagcagagtatcacatagttaaaaatacaggctttggagaccaacagacccaggtatgagtccccatttcaatatarccttcagatccaggcaagagcagtcaacctggctgtgggaataggcagaactaacataaacaagaaacaaaacattgggttgggtaaattaactcagggacaaaaacagatatgtcatatagactacaattttcacttctttgccatcagcttttgacaggctatgtaaatagcctcaggcagaaagctcgagacatagcaattccaatgtttggtaagttatagttaattgtttccaaaatgggaaatgctgagttaaacaagattcaaggttttttgactgatgtctctgctccttttataagctaatgtgtactgtgaatctgcaagaggagaattagggactgtttctcaagtttctttagccatttttttgtgtggagtatctcaaggaatgtgtgctctgtgggatatatgttcagaaataagctctggccttaggaggtcccatcacaccaa

SEQ ID NO: 456628 - DNA, 562 bp, Homo sapiens
aggggaatttaaacgccctcagtattaagcagagtatcacatagttaaaaatacaggctttggagaccaacagacccaggtatgagtccccatttcaatataaccttcagatccaggcaagagcagtcaacctggctgtgggaataggcagaactaacataaacaagaaacaaaacattgggttgggtaaattaactcagggacaaaaacagatatgtcatatagactacaaktttcacttctttgccatcagcttttgacaggctatgtaaatagcctcaggcagaaagctcgagacatagcaattccaatgtttggtaagttatagttaattgtttccaaaatgggaaatgctgagttaaacaagattcaaggttttttgactgatgtctctgctccttttataagctaatgtgtactgtgaatctgcaagaggagaattagggactgtttctcaagtttctttagccatttttttgtgtggagtatctcaaggaatgtgtgctctgtgggatatatgttcagaaataagctctggccttaggaggtcccatcacaccaa

SEQ ID NO: 456629 - DNA, 598 bp, Homo sapiens
tctttttccccctcatgtctcccataagcatcttgcaccgcatctctcacacatgggagctggtggctgtcctttactgagtgcctctctgtgctaggcatgtgtgagatgtgaagtgttcagctggaatcctcacagtccatctgaggattacaactcttacaaggaaggtgttgtcttctcatttaaaacatggtgaaacttactgtatgatgccctttgtatgaggtacctagagtagccaaacacagagacagaaagtaaagtggttattggctggggctatgggaagaggtgaatggggagtgactgtttaataggtacagcctttgaattgtgcaaaacaaaagttctctgrgtgtatggtagtgattgtagcacaacagtctgagtacatttgatgccactgaactgtacacttaaaaatggtgcagatgttaaattttacgttatgtatatttttacctcaatgtaaaaaatagtaaaaactgaggcacagagaaggaaagtaatttgactaagatcatcaaactagaaaggggtagtgcttagatatgagccctgtctgcccacccctcttgtatggtgttttttgagg

SEQ ID NO: 456630 - DNA, 611 bp, Homo sapiens
gtaaatataaaagattactcaccatattctttcctttcttgccaccaaagaagaatataacaaaaatacttcagtagagtgtaaaaaaaaatgcacttgtggttcaacttttaacaaaaggcattcatgccaggtatttcttaccaccttgcatgtttactttgtggttgttatcactgaaacctcagaayattagttgtttcttaaacaatgtactgtcttatttatttaagctgttgccatgttactgttgtccatggtgccctgtgcatggaggctgacagcctctgacaggccctgcccttctgctgacccccaggctcgtgaagggaggcagaagggcactgcttataaagcataaaagtgggacatgccttcgagcccagttttctaacctttgtcctcacaagattgcacaaatcacttggttccatgcctgaaacacatgcttcatgcacagggagagtctgtcatacttttgagggagtgttacccatctaggagcagagctgctgatcagcgcattttcctaggtacgcatcacaattcatgcacaaatagattctcaacacttggggctgagtattggaaggtagctggagaatgggact

SEQ ID NO: 456631 - DNA, 582 bp, Homo sapiens
taaaatgtctcaaggggcatattaatgaaatgtgtagaagggactgcctctgaaaatggaaatgaggtgtctgaaggagtatggttgggaagcaactctatcttttgtacttttcaaacttagaaccaggcaaacaatcaacctattcaaagcgggggcagggggcaatgtcagctgggttccaaaacctgctgctgctcaacaggacttgtcaaaatcctgtttctatgtgggagcacctctattttttactcactatatcccctttttcccatttacaaaatcacaggatgcctgagtatgaattttccttctctgttttctccctgactagctggtttgtcaccaggacttgccatagaccccactctaccctaaagtcaaatatcaayagctgcaggtactcaaggatctttgcttgaatactgaccaaatttcccagaacacaccaagaagctttccttccaaaagcaaactgaactatcccccgccccccataaccaatttggtttaaatcaacacatatttatgagccctgactatggaccagactttgtgctaactgtggggggtacatggttg

SEQ ID NO: 456632 - DNA, 567 bp, Homo sapiens
gggctgggggtgggcagtgtagctgtgagggcacgcagtggagccaccccagctataggctcagcatgcaacccccctggcacctcatagcctcagcctggcaataaccttcccagcactcttgacacagaaaccaaagtccccattaagcctatgtccagycggcctatggccagtgtgtccacacagcttggtcaccccctttgcaagccccacgtgtcctgaaggccttcttctccactaacacctagatcctgctgcatgctgtaccgatgctgattgcctgctccctgcctgaactctggggagtgggctattgcttgctcagcgactccagaccagctctggcctgatcaaaccagtgagtttctgtgccaggttccaaaccacttctaagtttgtccttccctggctcctctccctcagccctagggtaccatagagagtttccttatatgtcatggttactcttttatcttagttaaaacttcatgttgaatttctcctgtttaagctaccatgtagtttctcactcctgattggacccagactacatcagatgcttaa

SEQ ID NO: 456633 - DNA, 601 bp, Homo sapiens
aaacacaaaaggggacattaaatattgcaaaactgagacagatggaatcttcytcactgaaaccatcttgtttgataggtttatttaaataaacttaataaagaaattgagcacccaaacaccaccattacaccaaaacaatatgataggatgaactaaataccctcaagctttgaggcagggcttcccctgcttcatcctctccctgcccctactgctctgccctggcactgtcatcttacttaggttgggacccaaccccagcacctgactctcagaaatgaccttcacctggcccaagtccttccttattcacggtgggtctagtttcttcccttctcatcccctctctgcggactccatcatgaccaaatcctccttgtctgaccactttagtagctctctaacacttctctagaacctccagtatagaagagaaacatctcaaagcagatgaacctgctgatacctgatatccaaatactgaggagcccagatagccaacttcaaagagggaaagagagagtgggcatcctctgagtcagggtgttgcagataaagacaatgctacattttgatgagtttcgaaggaactggtgtt

SEQ ID NO: 456634 - DNA, 601 bp, Homo sapiens
aaacacaaaaggggacattaaatattgcaaaactgagacagatggaatcttcttcactgaaaccatcttgtttgataggtttatttaaataaacttaataaagaaattgagcacccaaacaccaccattacaccaaaacaatatgataggatgaactaaataccctcaarctttgaggcagggcttcccctgcttcatcctctccctgcccctactgctctgccctggcactgtcatcttacttaggttgggacccaaccccagcacctgactctcagaaatgaccttcacctggcccaagtccttccttattcacggtgggtctagtttcttcccttctcatcccctctctgcggactccatcatgaccaaatcctccttgtctgaccactttagtagctctctaacacttctctagaacctccagtatagaagagaaacatctcaaagcagatgaacctgctgatacctgatatccaaatactgaggagcccagatagccaacttcaaagagggaaagagagagtgggcatcctctgagtcagggtgttgcagataaagacaatgctacattttgatgagtttcgaaggaactggtgtt

SEQ ID NO: 456635 - DNA, 428 bp, Homo sapiens
tatgagttcacaatgaagattctggaggggaaaaaataatgtacgggtaacatgagtaatttcaacatgtgagcatattaatggaacttagttctgctttgtattccatttattattatacattttgggacatattttcttttaacgacgctgatagttactctaaatcttgatgattacattttgcagtaattgccaccttcaaaagacattaacagacagtatttttcgtgatttgcacaggaatgcagtaagccaggctgctttctgctgtttgtaataagattagggtgcaygtcccccaacagctgacactaaacttctagcactaaaatttgcttccattacttaaaaacgacaacaaaaaacgaaatatatgctctataaaaaagtaggtctgtagagttagaaaaataccagatgtctat

SEQ ID NO: 456636 - DNA, 468 bp, Homo sapiens
ggctgtcactgagtgcctgtggcttttccaggtacatggtgcaagctgtttgtggctctaccattctggggtttggaggacagtggccatcctctcatagctccactaggcagtaccccaataaggactctgagtgggggctacaatcccacattttccctctgcattgccctaatagaggttctccctgagggctccatccctgcagcaggcttctgcctgcacattcacacttttccataattctctgaaatctaggtagtagagcctcaacttttgcactctgtgcacccacagacttaacaccacgtggatgccaccagtcttatggcttacaccctctgaagcagcagcctgagcartacccaggcccctttaagccacggctggggtagaagcagccaggatacagggagcagtatcccaaggctgcacagggcagtggggccctgggcctggcccaggaaa

SEQ ID NO: 456637 - DNA, 452 bp, Homo sapiens
tcatttctttgctcatgtatatgaacataagttgttagaagcagccaggtcacatcttgaacattttgctgctaacaaatttcttctgccagataccctaaatcatcattcgcaagttcaaagtttcacagatccctagtataggggaacaatgcagccaacctctttgctaatgcataacaaaagcgacatttgtttgagttcctaataagtttctcatctccatctgagactgctgcagcctggatttcattgtccatatcacatattactatcagcattttagtcacagcaatttaacaatactctaggaagtcccaaactttcccccrtcttcctatcttcttctgagccttctacattcttccaactcagttccaaagctgcttccatattttcagatatctttatcccaacccctggtaccatttttctgtattagtctgtactaa

SEQ ID NO: 456638 - DNA, 577 bp, Homo sapiens
catctgtactagaagttgggattgaaaataattatgaggctgggcgcagtggctcatgcctgtaatcccagtactttgggaggctgaggygagtggatcacctgaagtcaggagtccagctgacccacatagtgaaatcccatctctactaaaaatacaaacattagccgggcatggtggcacatgcctttaatcccagctacttgggaggctgaggtaggagaatggcttgaacccaggatgcggaggttgcagtgagccaagattgcaccattgcactccagcctgggcaacaagagcaaaactccattaaaaaaaaaaaaaacagaaaataattatgagagagctgtggatcagccttccaaaggagctcaacagccagagtttgaaaaaaaatgcacaacagggtgggatacacaacagccacggaccaggttagacaacactaagtggagccctggttccattattcactgggatataaccttggacaagtcatttacctcctctgagctttgttttccttattcaaaaatgttagaataagaatcttccctttatatctcacagtgccatg

SEQ ID NO: 456639 - DNA, 577 bp, Homo sapiens
catctgtactagaagttgggattgaaaataattatgaggctgggcgcagtggctcatgcctgtaatcccagtactttgggaggctgaggcgagtggatcacctgaagtcaggagtccagctgacccacatagtgaaatcccatctctactaaaaatacaaacattagccgggcatggtggcacatgcctttaatcccagctacttgggaggctgaggtaggagaatggcttgaacccaggatgcrgaggttgcagtgagccaagattgcaccattgcactccagcctgggcaacaagagcaaaactccattaaaaaaaaaaaaaacagaaaataattatgagagagctgtggatcagccttccaaaggagctcaacagccagagtttgaaaaaaaatgcacaacagggtgggatacacaacagccacggaccaggttagacaacactaagtggagccctggttccattattcactgggatataaccttggacaagtcatttacctcctctgagctttgttttccttattcaaaaatgttagaataagaatcttccctttatatctcacagtgccatg

SEQ ID NO: 456640 - DNA, 538 bp, Homo sapiens
attgaattggttttcccctagagatttaaaaaagtacttgggattaaaagacaaataaaacattagaggagccatcagtgcattggttccttgtgctcaagatgagagggatgtgtagaattaattctcgagtactttccaggcctcctggcctgggagtctgctgtcttcaggtccgcaatgccagtactgtcacctgtgctatccctggactcaccatgttggggtggaagggacayttgacaggtgctccggaacccagcttgacattgacttctacccggctgtgtggctttgagacgagacagttgactttgggagcttcagcttttctctaccagtaaaatgagaatgacacttgtactaagtgccccgcctccacagttttgttttgaggttctaggtaatgtagtacgtgtgcttcataaactttgaaacaacatacagatgtttgcaaatgacaggtcaccaggatgctctcccctggtcactgcagggcaaggctttcatggtcttcttgccttcgctggggctagtt

SEQ ID NO: 456641 - DNA, 582 bp, Homo sapiens
tactctaattttcaggcgagaatctaaaagttgctgtgccatttagtacagcagagcaggaagtatgtgtatttgacctccttgttaatttcttcccataggtacctttctgtaaaaagcaggctcatccccaaaacactgtgtttcaataagctcgatgcagtgcaacagtgaagtgactcctttcttagcagctgggttggaaatgcytctgtgtccctccagacctgctctctagcctcaccactctgcttggggcctggaggctgacagtgggaatagcatcaaggggctccctgccctctggctgcattaggatcagaagtcctaatgcacgcgaagttgggtatttattgccttggccccatccctaccaggccactctgggttggctgcatcccttttccaaaggtcatcctccttccagtgactctttttgggtaaagggtcagatctaagtaaagggtccttgtagttgttctcccatgtataggcctcaattatctcttgttggtgcctgatgtggtttggctgtgtacccacccaaatctcatcttgaattgtagctctcataattcccac

SEQ ID NO: 456642 - DNA, 582 bp, Homo sapiens
tactctaattttcaggcgagaatctaaaagttgctgtgccatttagtacagcagagcaggaagtatgtgtatttgacctccttgttaatttcttcccataggtacctttctgtaaaaagcaggctcatccccaaaacactgtgtttcaataagctcgatgcagtgcaacagtgaagtgactcctttcttagcagctgggttggaaatgcttctgtgtccctccagacctgctctctagcctcaccactctgcttggggcctggaggctgacagtgggaatagcatcaaggggctccctgccctctggctgcattaggatcagaagtcctaatgcacgcgaagttgggtatttattgccttggccccatccctaccaggccactctgggttggctgcatcccttttccaaaggtcatcctccttccagtgactctttttgggtaaagggtcagatctaagtaaagggtccttgtagtygttctcccatgtataggcctcaattatctcttgttggtgcctgatgtggtttggctgtgtacccacccaaatctcatcttgaattgtagctctcataattcccac

SEQ ID NO: 456643 - DNA, 457 bp, Homo sapiens
cccctacacaagctctgtcttgcctgccacmatctaagacatgaccatgctcctcattcaccttccaccatgattgtgaggcctccccagccatgtggaactgtgagtcaattaaacctctttcctttataaattactcagtcttgggtatgtctttattagcagcatgagaacagactaacacagtgcctttaaccctgatcatgccctgagatcctgacacaccatcattgatttccccagcatcactggattctttggtgtaacaggaatgcagggtggtcagaatccttggtaccattgaataaagctacccagatggtgaggagcactaggttaggagtcaggaaacccagcttctactcccagcttggccaatgattagctgtgtgacctcaggcaggtaaaaatcctgccatgcattcattctgatgaaaggacattgtagcctaagaag

SEQ ID NO: 456644 - DNA, 457 bp, Homo sapiens
cccctacacaagctctgtcttgcctgccacaatstaagacatgaccatgctcctcattcaccttccaccatgattgtgaggcctccccagccatgtggaactgtgagtcaattaaacctctttcctttataaattactcagtcttgggtatgtctttattagcagcatgagaacagactaacacagtgcctttaaccctgatcatgccctgagatcctgacacaccatcattgatttccccagcatcactggattctttggtgtaacaggaatgcagggtggtcagaatccttggtaccattgaataaagctacccagatggtgaggagcactaggttaggagtcaggaaacccagcttctactcccagcttggccaatgattagctgtgtgacctcaggcaggtaaaaatcctgccatgcattcattctgatgaaaggacattgtagcctaagaag

SEQ ID NO: 456645 - DNA, 576 bp, Homo sapiens
acccatatcaagtctctcctcaagctgtccatgtgaggattagatgaagcatctggctactgttattattgtggaggaacattagctcaagccacctgcagcagacagaccctaaagtgacccccagatccccttgccttctggcattcatgccttatatataatcccttcgagtgtgaatgggatctatggcttgtttctagctaacagaacatagtaaaggaaagattttctgcagatgttatcaaggcctaaatcagttgcttttgaattaarcaaaagagatgctatcctgggtggccttactgggtgaaagctgctagaaaagagattcttgctagtcctaaaaaagcaagctactatcatgtgaatttcctgtgaagagggccagttggcactgtaccataggcagcctctaggggctgagggcctcaatcctaaaactgcaagaaactgaattctaccaacacccaccagagcttggaagaagactcagaactacagacaaggatgcagtcctagctgacaccttgactgtagcctgtgagatacagagcagaggacccagctaagcca

SEQ ID NO: 456646 - DNA, 634 bp, Homo sapiens
agggttgctatagtagaaagagaggttaatgagacagaatgtgaggagctcaacactgatacttgacagccttgtcaaacacagctattggttgaaactgtgtgaatccrtaacaagatttttaaaaaattagactttaattgttatgttgtggatttgtgcataccatctacttcctaaaagactttaggggcactcgaaatcaaaacaacttatgatcatagcaaaaataattaacaagaggaaagatgggcatcagaataaggttgataaagggcagcgatggaagagaaagttgtatcaagagttccagaggctgtgaggcaagccccttccccactctcaggccattctaacctaccatcttcaatggtatcaggtgctcacacctataaagcccacctctaaatctgactctgccttggggaccttgtcctgcattcctgcacatcctgtgggatacactgtgatgccccacacgtaggagatgctcagcagatgtctagtgaaatgaattgttgacccagctcatttctaacaggcagcctttccagagaatgacagcgaatgtgtactctctgtgtttgaagactgtgtgatgttaattgaagtgcctgcaagtcaaaataagaat

SEQ ID NO: 456647 - DNA, 634 bp, Homo sapiens
agggttgctatagtagaaagagaggttaatgagacagaatgtgaggagctcaacactgatacttgacagccttgtcaaacacagctattggttgaaactgtgtgaatccataacaagatttttaaaaaattagactttaattgttatgttgtggatttgtgcataccatctacttcctaaaagactttaggggcactcgaaatcaaaacaacttaygatcatagcaaaaataattaacaagaggaaagatgggcatcagaataaggttgataaagggcagcgatggaagagaaagttgtatcaagagttccagaggctgtgaggcaagccccttccccactctcaggccattctaacctaccatcttcaatggtatcaggtgctcacacctataaagcccacctctaaatctgactctgccttggggaccttgtcctgcattcctgcacatcctgtgggatacactgtgatgccccacacgtaggagatgctcagcagatgtctagtgaaatgaattgttgacccagctcatttctaacaggcagcctttccagagaatgacagcgaatgtgtactctctgtgtttgaagactgtgtgatgttaattgaagtgcctgcaagtcaaaataagaat

SEQ ID NO: 456648 - DNA, 634 bp, Homo sapiens
agggttgctatagtagaaagagaggttaatgagacagaatgtgaggagctcaacactgatacttgacagccttgtcaaacacagctattggttgaaactgtgtgaatccataacaagatttttaaaaaattagactttaattgttatgttgtggatttgtgcataccatctacttcctaaaagactttaggggcactcgaaatcaaaacaacttatgatcatagcaaaaataattaacaagaggaaagatgggcatyagaataaggttgataaagggcagcgatggaagagaaagttgtatcaagagttccagaggctgtgaggcaagccccttccccactctcaggccattctaacctaccatcttcaatggtatcaggtgctcacacctataaagcccacctctaaatctgactctgccttggggaccttgtcctgcattcctgcacatcctgtgggatacactgtgatgccccacacgtaggagatgctcagcagatgtctagtgaaatgaattgttgacccagctcatttctaacaggcagcctttccagagaatgacagcgaatgtgtactctctgtgtttgaagactgtgtgatgttaattgaagtgcctgcaagtcaaaataagaat

SEQ ID NO: 456649 - DNA, 596 bp, Homo sapiens
aatacccaagactgggtaatttataaagaaaagaggtttaattgactcacggttccgcagggctggggagacctcaggaaacttacaatcatggtagaatgcacctcttcacagggcagcaggagagagaatgactgccagcaggggaaatgccagacacttatgaaaccatcagactcgtagactcactcacyatcacgagaacagcatgggggaaacaacccccaagattcaattacctcccatcgggtctctcccttgacacatggggattattacaattcaaggtgagatttgggtggggatgcagagccaaaccatatcacagagcctctttttccagctcttcattgaccatcccccatgtcacaaacctcttgtcaactaggtgcatctgataaccactctttgaaatgaagtctgggtattccttcactctacagtgttcaccaacaaggcattccctttgagaggcatttttctcccactctggaatgaaagttgcctcgccctagttagagcaattcttggcatacagatggaaaatgctttctgaggagtgttaggcctagataagcctcttatcatcctttagg

SEQ ID NO: 456650 - DNA, 596 bp, Homo sapiens
aatacccaagactgggtaatttataaagaaaagaggtttaattgactcacggttccgcagggctggggagacctcaggaaacttacaatcatggtagaatgcacctcttcacagggcagcaggagagagaatgactgccagcaggggaaatgccagacacttatgaaaccatcagactcgtagactcactcactatcacgagaacagcatgggggaaacaacccccaagattcaattacctcccatcgggtctctcccttgacacatggggattattacaattcaaggtgagatttgggtggggatgcagagccaaaccatatcacagagcctctttttccagctcttcattgaccatcccccatgtcacaaacctcttgtcaactaggtgcatctgataaccactctttgaaatgaagtctgggtattccttcactctacagtgttcaccaacaaggcattccctttgagaggcatttttctcccactctrgaatgaaagttgcctcgccctagttagagcaattcttggcatacagatggaaaatgctttctgaggagtgttaggcctagataagcctcttatcatcctttagg

SEQ ID NO: 456651 - DNA, 596 bp, Homo sapiens
tcttccttcctcaaaggataagagacccaaaaatgyttcaaaaaactgtatgtacacacaaggaaccattttaacagaatatgggaaataacgctgggaaaaggaatgcaagaatagtttcagtatcaggtggaagcagttgaagttgatctagcagatggggaatcgatgtcatacaggagaaggttcttctttaggaagattaagtggacagtattaagcatggtcaacaggaggtgagagaggctgcaggtgggatgccagtttgtagtaggaaacaagaatacataacttagtttctacggtagagactagctccaaacctgcttcctctctgtccttgcagcacagttagatgacacttcccagcttcccttgcacagaggaacagccacaggattgagctctggactatggaaagtgggtggaagtgattcgaccatgcaaacctaccatgatgtcctccaacttcaatcttccctgtgctggctgactgtagagagcccagcaaaggagttggccgtcccgcagggtggcagaactacagggtggagggagtccaagtgggggagaccactcactaaacactgcattga

SEQ ID NO: 456652 - DNA, 596 bp, Homo sapiens
tcttccttcctcaaaggataagagacccaaaaatgcttcaaaaaactgtatgtacacacaaggaaccattttaacagaatatgrgaaataacgctgggaaaaggaatgcaagaatagtttcagtatcaggtggaagcagttgaagttgatctagcagatggggaatcgatgtcatacaggagaaggttcttctttaggaagattaagtggacagtattaagcatggtcaacaggaggtgagagaggctgcaggtgggatgccagtttgtagtaggaaacaagaatacataacttagtttctacggtagagactagctccaaacctgcttcctctctgtccttgcagcacagttagatgacacttcccagcttcccttgcacagaggaacagccacaggattgagctctggactatggaaagtgggtggaagtgattcgaccatgcaaacctaccatgatgtcctccaacttcaatcttccctgtgctggctgactgtagagagcccagcaaaggagttggccgtcccgcagggtggcagaactacagggtggagggagtccaagtgggggagaccactcactaaacactgcattga

SEQ ID NO: 456653 - DNA, 539 bp, Homo sapiens
agggaaagactcggagtacatagcagaaatgggttagtctccttggaagcattctatgaacacattagaatggattaataacataaataaatgtcaccatgatggcacttgaaagcctaacttggcaaaataaggtatcaggcctgacatataggtatttggaaaagagcaagaaattcaaagtctaaactgctagatttgaggactggatctgaatgctatctgccatctacctttgggcattttacctactttctgtgagcacatgtattgttcaacagaacaggaggaattatcattcttagttccctgggctgttacaagaagagcaaactgcagctcatcaagtgctctgacagcgagtctcataaggtacctgtgaatccagtttatttgttttctttatctttcacataagtgaatcaagccttataaagttgctgatgatcaaatgagataaggtayttgaacatacttattatgtcctaatatgctgcaatctttccttcttcttatcattatcattatcagcagtagta

SEQ ID NO: 456654 - DNA, 517 bp, Homo sapiens
cgaatccaaaccgtatcaagtggttatttcaggatagtaagattggggagggagaacttttcagcttttactttatgcatttttatatcatctgactttctccttttttcacaagaagttaggtgttagttctaattaagtkttggggaaaggccaaggcatgccagcatgctggactctgcccaacccacacagaatccctcaggctatgtgtgctgcctccaaccccccatatgaagtcaaccacgtttatctttgggaagtgaatttcctcatctacagactcatccctggattcagaaacctcttttcattcattccataaacacatattgaaatcctcttcgtgcccttattcttaagtctgccaaagccgagaggaacttagtgagctactcgggctggtcacacctgcatcttaaaagcaactctcagagaatacattacataacacaaaagcctgatttccatgtgaggggagcagaggaagcagtttccaaggacaatctgtagcaga

SEQ ID NO: 456655 - DNA, 429 bp, Homo sapiens
tgctggtagattccaaagggtttgtagtttccatactttatatgttttgtagtataagaattgtgatagcttgtttcaaaaataataagggaagtcttgttcttaagaatcactgcactccaaattctctatctccttacttaaaaatttaaaataagataattaaagtctccttagtatagtctataaaagttgaaacacyaattttgagattcttccagaagaacaagcaagaaaaaaataccttcccccatttttttttcatccttagtttaacaacccatattcaaccaaaggtcttcatatttttcatacagatgccatgtgtcatttcttttgcttccttcatgcatatccaaggaccttcatcataagaaggacatcactgtcattctggccggtgaatgattattcatttttcccccttta

SEQ ID NO: 456656 - DNA, 611 bp, Homo sapiens
gaattatttcttggctctctattctgatccattggtctatgtgtctgtctttgtataagtaccatcctgttttggttaccacagccttgtaatatagtttgaagtcaattaacatggtatccccagctttattctttctgtttatgattaccttggctactcgagctcttttttgattccatatgaattttaaaataattttttctaattatgtaaagaatgtcatagtttgataggaatgccatcatactatggcatttgcttcagcattcaaagggaaagctttcaacttttccctgtttggtatgatgttagctgtggatgcatatatgtgcacatatgttgaggtgtgttccctctacacctaatttttcagcggttttatcatggaggaatgttaaattttatcaaattctttttttagcatctattgagakgatcctatggtttttgtccttcatcctagtaatgcaatgtaacacatttattaatttttgtggtttgaactgtacttgcattactgggatgaatttcactaaatcatggtcaatgaccttataatatgttgttggattcagtttgctagtactgtattatgggtttttgcatct

SEQ ID NO: 456657 - DNA, 586 bp, Homo sapiens
  misc_feature (1)...(586): n = A,T,C or G
ggataaaccagaaaacaataaaattggttacctactggaagagggagaaagaaatgaacaataatctctctgagtatactggaagtagtttcaggttattaatgttcaacatatttaattaattattttaatacaataagaatgggaaaggaaaaaaattcataaaattagaagtaagtagaaataagagcctaataaacttcaagtgaatcctatctctatattgatggaaaaagaaagtaaaaaagtagggaaataggaggagaggtaagggnaagaagagaagagggaaaaaaggaatgaaagaagaaaggaagggagggagtaagagaagagggagggaaggaaggttcaaagtaacttaggaacccaaaatttgactacatactccgaattggtgcagggcaaggtggaggagggaagcttgaaatcagattccagaatcttttatgtaggttttcttactgaagtgatataagcaaagtaaatctgaaactattttagattacaatatagaattgagcaaacaagtaaatatrttgatgtcattggaagtcagtgttcatttactgtagaagaaggaaca

SEQ ID NO: 456658 - DNA, 635 bp, Homo sapiens
aagaaataaacaaaggcatctaaataaaaagaagggaagtcaaactatccctgcttgcagacaacatgatcctacatctagaaaaccccatagtctcggyccaaaagcttcttcagctgataaacaacttcagcaaagtatcaggatacaatgtgcaaaaatcaatagcattcctatacactaataacagtcaagctgagagccaaatcaggaaagaacttccattcataactgccacacaattatgtgtgcctaggaaaacacccaggcaagagaaagatctctacaaggaaaactaaaaaccactgcacaaaaaaatcagagatgacacaaatggaaattcatttttaagttacaatttttgacgatcagctgtgttttgggccaaaaaaagactgaaaactgtcattactacagcaaaatgaatcatttggtgctcatctaaatgaatattttgactgtactactgatgccctgcccactgcggctgccaatcccttccacaaggtacaatacaaggaatgctctcttaaaatgttcattttttttacctgagcaactggtggaagggaatggcagccacagtaggtggcttgaaaactctacaaagagtatgctctccatactctaccaat

SEQ ID NO: 456659 - DNA, 600 bp, Homo sapiens
tagtgtagtcctaaaaaatgtcaaatgacattaaacaaaatgaaagagttgggaaattacccaggttaaagactaagacaggtgcaggaatccaccatggcacacgtttacctatgtaacaaacctcctccacattctgcaaatgtatctggaacttaaagtaaaataaatttttttttwaaaaaaaaagactaagaaggcctcaaaaatgaacacaactaataatcggattttttttttgctttaaaaaacaacattgagacaattggcacaatctgaataaaatctatatttaataacaatatgcatcaatgttaagtttctgatttcaataattatactgtggttaagagaattcctagtttttaagaaatatgcactaaagtatttaaggggtaaagagaccttaagtttacaatgtttaactgaaagccatgaagagagaaaggcaatttgggggaactgtttgtattttctttatagctctttcacatggacttatgtcaaaacaaacaaattaaatagaacttttccattttataaatactaaacatttctacacttagaaatagacaataaaatgcatttttattcttttga

SEQ ID NO: 456660 - DNA, 510 bp, Homo sapiens
atttggactacctattatggacaatgctcctcacaagggtccaagatactagtatttggctactatgtgatgaataaacttaatctcatccaaaaagccaagctggatgggaacatgaaaacctggtactctccttcagccaggcaaccagagcacacattctagttttcagggctataaaataacactccatgactcatttgcagatactcaacctttgttgttgttggttttttgtctttttgttttttgattcaggtataacctatgagactcaacaaagcctatgaatatggtgawgtttgccaaagataagcagacattatagtcaaacaccacagacatagccattgctatgaaatgttttaaacctttacttaacaaccaaagcatcttacattaagctgagagtcttttcctatttacatagttacttttactattatttagctaggaatattatattttgtcttggggattgtttataaatagaagatactgacagacata

SEQ ID NO: 456661 - DNA, 436 bp, Homo sapiens
atcccacttttaggtatatacagatcaaaagaaactaaactcaggatctcaaagtgatatctagacttctatgttccttatagcattattctcaatagacaagacatggaagcaaccttagtgtttgttgacagatgacagataaagaaactgtagtatatacatacaattaaatattgttcagcattaaaaaggatggaaattctgccatttgcaacaacatagatagacctggagaacatgatgctaagtgaaatragcctgaccagaagaacaaatattgtattatcccacatttataagaaatctaaaataatcaaattcatacatgcagagaatagaaaggtggttaccaggtgctgggatagggagaaagaaaaggggaagggttactcaaagggtacaaagcttcagttatgcaaaatgattaagctct

SEQ ID NO: 456662 - DNA, 606 bp, Homo sapiens
ccacaacctcaccagcatctgttatttttttactttttaataatatccattctgactggcatgagatggtatctcaatgtggttttgatttgcatttctctacaatcaacgatactgagctttgtttcatatgcttcttggccacatgtgtgtctttttttgaaagtttctgttcatgtcctttgcccactytttaatgaggttgcttgtttctttcttgaaaatttaagttccatatatatgctggatattagatctttgatagacgcatagtttgcaaatattttctcccattctataggatagttgatagtttctgttgatagtttctttgttgtgcagaagctctttaattagatccaacttgtcaatttttgcttttgttgcaattgcttttggtgtctttgtcatgaaatctttgccagttcctttgtccaggatggcattgcctagtttgtcttccaggatttttatagttttgtgttttacatttaagtttttaatccatcttgagttaacttttgtatatggtgtaaggaaggggtccagcttcaatcttctgcatatggatagccagttatcccagcaccattgattgaaaaggga

SEQ ID NO: 456663 - DNA, 606 bp, Homo sapiens
ccacaacctcaccagcatctgttatttttttactttttaataatatccattctgactggcatgagatggtatctcaatgtggttttgatttgcatttctctacaatcaacgatactgagctttgtttcatatgcttcttggccacatgtgtgtctttttttgaaagtttctgttcatgtcctttgcccactctttaatgaggttgcttgtttctttcttgaaaatttaagttccatatatatgctggatattagatctttgatagacgcatagtttgcaaatattttctcccattctataggatagttgatagtttctgttgatagtttctttgttgtgcagaagctctttaattagatccaacttgtcaatttttgcttttgttgcaattgcttttggtgtctttgtcatgaaatctttgccagttcctttgtccaggatggcattgcctagtttgtcttccaggatttttatagttttgtgttttacatttaagtttttaatccatcttgagttaacttttgtayatggtgtaaggaaggggtccagcttcaatcttctgcatatggatagccagttatcccagcaccattgattgaaaaggga

SEQ ID NO: 456664 - DNA, 586 bp, Homo sapiens
acctttaaataagacagtgaggtaacaaatgttaaaaaaaaaaaagttaagggtaatattgcattgtttgccacttataaygtatctgaaacatttgttctttaatcttaagcgtagagtggtccaagacctggaaatctgggcagtgggttttgatttctaaggaggcagttttacaggctgtgcaaggctaaccctaccaatgagatcacactggcgtatccgatattgacatttgcatgtcttgcctatggtttacagctctcactattttagatctttggtgaaaaatctttagattcagaagagaaaaataaaagagtcaggcaagcaaaaagagataacacctcatttgtttaaaatcttcctactgcccatctctttccatctgattgtggcaggcactgtagccacaggtttggtgttgtgggattgcaaggggcaggtattgaaagacctggctcctaggcaaaactttgcccctgaatggctgtgggatctgagcagtacctgtaactccattgccttagctgcagactaaggtggtagtgtaatttcagggaagggaataaggtcatctttgact

SEQ ID NO: 456665 - DNA, 599 bp, Homo sapiens
tcagaagaagaggaggaaagcaactccactgtgtttcctgctaggtctcatcttcccaacagatgcttggactctcttcatcgccactttgaaatatgaggacactcttaatttaggtcaaatttttttcctcctggacttgcaatatgttgtttcctttttctggaacacattatgatacttccttgaaayggcaagattcttttattcccattgtttctgcttcttgaagtattaatcagaatatttcatctgccatccccttctgcttactttcacatagttttcaggagttagtttaaatgtcacccccctctggttaggtgcctctgctatgcattcctgtaacaagtgtaataattacttaattcaatgtatatctcctcccaacctgcagttcctcccagtattggaaggataagaatcataactggtttgtgtttggtgtctgttctagctcattgtttgacacatattaggtgctcaaaaaatattgaaatgaatagtaggcatttagggtgttccgttttttttttaataagcaatgatgaaatgaacatcttttatgcatgatgtccatattttggaatttttaaatt

SEQ ID NO: 456666 - DNA, 599 bp, Homo sapiens
tcagaagaagaggaggaaagcaactccactgtgtttcctgctaggtctcatcttcccaacagatgcttggactctcttcatcgccactttgaaatatgaggacactcttaatttaggtcaaatttttttcctcctggacttgcaatatgttgtttcctttttctggaacacattatgatacttccttgaaacggcaagattcttttatycccattgtttctgcttcttgaagtattaatcagaatatttcatctgccatccccttctgcttactttcacatagttttcaggagttagtttaaatgtcacccccctctggttaggtgcctctgctatgcattcctgtaacaagtgtaataattacttaattcaatgtatatctcctcccaacctgcagttcctcccagtattggaaggataagaatcataactggtttgtgtttggtgtctgttctagctcattgtttgacacatattaggtgctcaaaaaatattgaaatgaatagtaggcatttagggtgttccgttttttttttaataagcaatgatgaaatgaacatcttttatgcatgatgtccatattttggaatttttaaatt

SEQ ID NO: 456667 - DNA, 526 bp, Homo sapiens
tcttacctgttttatgcgctaacgtattgtgagtgtccaataccatgtctggcacatgacaaggcactctgtcaatatttgttgagctcaatttaatcaactctcatccctggaaagagcagggttttgatgaggtggggagtcattctgcttaatgatgtcatgcaggacatagctctttataactctattttttttttttgatgttggctctatcctaagtcagsctccttctgtgattcctagatgactcttgcttcttattcaaatacaccaagagggagagaggaacttcgtcttgtattccaaagcagagatcctgagactcacactgaacaaatgggcttaggtcacagtcactgtggccggggttgatagaacgtgctgatggcttagcccaggccacgtgttcccttcttgccactcagatggaattagactctcaggtatcatacgtatccccaaacagaaattgaggggctgctggagagggaaacatggagaatggatgtccacattactcgac

SEQ ID NO: 456668 - DNA, 580 bp, Homo sapiens
tacataacatcaaaatatacttgctcagggacttcatagaacattggaaaaaccatcaataagaggtggttttcctcaacaggtctttattgtaattgaaattgcttgatttcagaaaggagatgcctgaggcaactgcaacatatccaagtaaagagaaaatgtatgccaactttcaaagcatgaaagaaatcattccttcttctgtttggtaggaatacatcaagaagtaatacaatattaaacacttttggtctccttttacttataaacaaaaggattgatgaataaactttgaaaaccaaacctgtttctgagtagaaragctcctagattagaaaattttgcaaatgctttttcacttcaaatataaagctggtctctcacagcagtgacctaacttgagagaagagagactggatcttaccattctttgttttcctaaagtgtttgtaagatagcacatctttgatatgtgcttattatttgctgactgtgtgaaaggaatagtcctttatacagcttggaaggaaagagcccagaacaaaaacagtaaggttctgacatatttaaagtacag

SEQ ID NO: 456669 - DNA, 576 bp, Homo sapiens
ctagctgactcccagcagtggtgagcctcatatcaggtccttcagcttcaggagcgtgttaagatggagatgcactcatcaccactgggctctcttagagattcwgattagaaagatgggtcccaggaaattgcatttttagcaagcacctacgacaattctgaaagcaagatgtttgtgggctgaactatgaaaaactcaaggcttaaaggaagcatcaccaatagcaagttagagattaacttaaaggatcaggaagggttgcagcaggaagcagactccaactcctgtgactgaataaagaatttcagtgaagaaattatgagcatgtgggtaggtttaaaggaaacaataggggttgttaaagcattcagagactggcaatagctggaaatcatcaccgtccatagggctgaaggaacaaggggaatgtaatagtgtcactaaattccattaagcaatggggctgatgaggacaggcccccaacaagggctgtagccaaaaagggatgcagcaggtgccagagacagggagggtgcataaaaacagggagggtcaaacaggccaggcaccta

SEQ ID NO: 456670 - DNA, 585 bp, Homo sapiens
gtctgtatgtctaactgtctacttggaatgtccacttagatgtctgaccatctttaccccatcaatcccaaaccatctctccactgctcttccttatcttagcaaatgacattgccttacctatcagcctatggctcaggtctaacatctgggaatcatctctgatctctttcttccctcatatctaattctttgggaagtcctgtcctctctgcctccaaaatatatccccaatccaaccacatctcacctgctccatcrctgaggatcacctgagcaacctttcacctgaatgactcccacagtgtcctacctggtctgcctgcttccagcctttctccacccgtgagaactcaccttcattcttcatacagcacacagaatagtctttctgaaaattacatttcatcatatgactctcctgcttaaaaccctcccatcatttcccattgtaattaaaataaaatctaagctcaatttgggccttcaagggcttacttgaattgactccaccaatacctaggacctagcctataccctcctctgccactcataacatgccacttataacacttctttcgtgtc

SEQ ID NO: 456671 - DNA, 608 bp, Homo sapiens
gcagtcacctgctgacagcatgtatctcccgggggtgttgtgatggtatcttgccacttgaggtggaaactgtgtttgttgtccttccagctcagctttaggaaaaactcacacagggatggggggaggcaccctcctattaatactgtcagaaatgcttcagccagagtgactctatcttgaataggggctgagaaaaacgaggctgagacatgctgggctgtattcccagaaggttaggcattcttagtcacaagctgtttayggttaagaaacaaattaataatgtttaccaaacagacacaggacttaacagacccagaaaggtcctgatgtccccatatctcaagaacaaaagcattcctagtccaagaataagtttaaagataataatatcgattcttcggaaaggtggtaattacaaagattaatcctttatcatgaaccttgtagtcagcacatctccccatgatttgtttgttatcttatatgtaaacaagcattgcacccagggtgggtgcattcctcctcttactgtcaggaacaccctattctgtctatggagtagctattctttcactcctttgctgcattatttcactttacta

SEQ ID NO: 456672 - DNA, 518 bp, Homo sapiens
agggcaaactttccttgggccaggcatgatggctctcttacctgtaaacccagcactttgacaggccaaagcaggaagtttgcttgagcctaggagtttaagaccatcctggagagtatagtgagaccccatctctacaaaaataaaaaaaaaacagccaggtgtggtggcatgtgcctgcagtcccagctacttgggagactgagggaggaggattgcctgagcccaggaggtcaagactgcagtragctatgatcgcatcactatactccatgcactctggtctggacaacagagtaagaccctgtctcaaaaaaaaaaaaaaaaaaaaaacaaagagaggacaaacttccaatgcagtaccctgtgcaggaaacaaagcaatggcctttgtccctcaatgctttagatctggggttagtgatcagtgtcttccactgtgttctctgcccttcctggggacccttcaggcccaggtcaacctcccctcccaccacactggcaggggagagggaaaa

SEQ ID NO: 456673 - DNA, 595 bp, Homo sapiens
tgtccctcaatgctttagatctggggttagtgatcagtgtcttccactgtgttctctgcccttcctggggacccttcaggcccaggtcaacctcccctcccaccacactggcaggggagagggaaaaatggctttcatccaccttcctaggacttttgactgggctacaaattaaattgacatgagacagattaacaggagaaaaaatattgtagctgggcacrgtggcttatgcctataattccagcatttggacaccaaggtgggaaaaacagcttgagctcaggagttcgagaccaacctaggcaacataatgagacctcatctctaaaaaaaacaaaaaaaacaaaaaaaaacaaaaaaaaggcaggaggatcgcttgagcccagaagatcaaggctacaatgagctgtgatcgcaccactgcactactgtctgggtgacaaagtgagaccctgcctcaaaaaaaatatgaaaaagaaaagtcattttattatatgtacttgcatgggaaccccacaaaaatgactgaagggccagatgactgaagcttatataacatcctgagctacaaacaggaacagtggcctggggc

SEQ ID NO: 456674 - DNA, 605 bp, Homo sapiens
attattctgaataatctgctctggcacaggaacatttatgcaaggtgttgaatgtcttaaaatatgcagtgctacatgagtgcctacagcacctcagggtaaaaattgggcccagtgtaagaatgaatcatggagcctttgtgtttttctcaatgttcaggcaggtgtgttggcatttacacatgcctatgtgatgtagtattcagaggaagataaaactctttgatgattctacatttctactgtacaaagaattcatcaccttgctaagacggtttgcttctaattgttatgttgtttcctcctttctcacattatcttgtttcatggacgaggtgatttttacaaagttacatttgcttttcatttaattttgcaaatatgcaaccaaatcaaagggaattgcagcgtgctctcatgtttaaaggaaaaatacacgttgatatcttcactttagggaagaatccaatgtcartgcattctgaaactgaatattttcataagatagattttgttactaaagaaaattataagaatttctgctgaaaaaatatgattaaatatgtatgcgggaagttgcaggggcagtttgtgcaagaagtgaa

SEQ ID NO: 456675 - DNA, 619 bp, Homo sapiens
tcagtaaatgttcaatactaagtaataataataaaattgtaataaatttattttaatgtcaggatcatatataccctcaatggttatatgtttcaaaatgcctaagaagagttggtggaggaggcagcactggaagcaggcacattgatagaaagaaactacatttttaaaagtaagttaaaaagcagttataaataagaaaagcatagctgttacaatctgtagcatagattccctgtaacaggctttaaagrcatggttatatcacaccacagtgttatgactgataattatttcagaaattcaaattatctgaacttctagttcaggaggccagaatatgaataacccaattaagaaatgctttcctcccaatcatgaaaataaaaacaaaaactttttagcaataatgaatattaatttcagttacctgggaaattgtctttatgtgactttcatcattactctaaaatggaaaaatatactccattttttattatctagcttattgactaatatacagcctaaagcaatatctactccaaacccataaagacctcagttgaacagattgaattaaaaagaatttgacctgctatctaaagttttccaaaccttg

SEQ ID NO: 456676 - DNA, 619 bp, Homo sapiens
tcagtaaatgttcaatactaagtaataataataaaattgtaataaatttattttaatgtcaggatcatatataccctcaatggttatatgtttcaaaatgcctaagaagagttggtggaggaggcagcactggaagcaggcacattgatagaaagaaactacatttttaaaagtaagttaaaaagcagttataaataagaaaagcatagctgttacaatctgtagcatagattccctgtaacaggctttaaagacatggttatatcacaccacagtgttatgactgataattatttcagaaattcaaattatctgaacttctagttcaggaggccagaatatgaataacccaattaagaaatgctttcctcccaatcatgaaaataaaaacaaaaactttttagcaataatgaatattaatttcagttacctgggaaattgtctttatgtgactttcatcattactctaaaatggaaaaatatactccattttttattatctagcttattgactaatatacagcctaaagcaatatctactccaarcccataaagacctcagttgaacagattgaattaaaaagaatttgacctgctatctaaagttttccaaaccttg

SEQ ID NO: 456677 - DNA, 597 bp, Homo sapiens
cccccaacaaaatacagttgttcgtgtgattcaatataatttcttaaaaatagtttagtgtgacaaaatatacagtgctggagtagaaaaaagaaggatagttgagaccagattttaagggcattrtatgacttgatgaatgtggcagacagactctaagatgaccttgtgatattcatggctgatgcaatcccctaccattgagtgtgggcagagtctggggcttgttctaacccacagaatgtggcaaaggtgatgtgattgcattgcctaagattgtaaactccatcttataaggagactctttcccttgctggctttgacaaagtaagcgtccacattgggaagattcatggaacaaggaattgaggcagtcttaggtcaacagccagccaggaactcagaacagcttctggccaacagctcacaggagctgaaagatactaacagccacatgagcttggaaatggatttttccccggttaaacttcagagcttgaaacagcagcaccagcctataccttgactgtaaaccttgtgaaactctgaatcagagtagacagccaaaccatccctggactcctgacccacagaaac

SEQ ID NO: 456678 - DNA, 601 bp, Homo sapiens
taatgggattgctgggtcaaatggtaattctgttttaagttatttgagaagtcatcacactgtgttcctcagtggctgaactaatttacattcccaccagcagtgtataagcattccccattctctgcaactccactagcawctgctgttttttgcctttttaataatagctattctgactggcatgagatggtatctcattgtggttttgatttctctaattattagtgatgttgagcttgtttccatatgcttattggccacatgtatgtcttcttttgaaaagtgtctgttcaggtttttagcccacttttcaatggggttgttttttgcttgttaatttaagttccttatagattctggatattagaatctatgaagaacctatcttcatcaaatcataatttgcaaatattttctccccttgtggaagttgtctgtttactctgttgatagtttcttttgctgtgcggaagctctttaattgggtcccgtttgtcaatttttgtttttgttgccattgctgttggcatctttgggaagaaaattttcccaggacctatgtccagaatggtaatttgtaggttaccttctaaggtct

SEQ ID NO: 456679 - DNA, 574 bp, Homo sapiens
actgcagccctggggtaagctcaggctttatgttccctccccagcttggaggaagcaagagatgggaccttggcaatggttgtggcagcaggactttcacttgtttcttggggctccactgcagagatatgcagagccactaccagttggtacaatcagccctgggtggggcagctgtgttgtggattcaagccaggagtccctgcccaatgacaagcagtggggaccaggggacctggggagacagactggcctcttctctttagggcagccrtggtttattggaggtgtggttaaagcactcatggtctttgttcctttcccagtctgagggcagcaaaggaagtaccactgcagttacagtggcagaggagttttcagttgcctcttggagcttcacctcaaagaaatacaaggatcctgctaaccggaatgttcagctgggtgtggctgaatattcatccagggaccctgcttggtgaaaagctgggggtcaaggctcacaggaaggggtgactatactcctatctgtatggtgactgtggcaagctggaaatgtgagtaaagccctcaa

SEQ ID NO: 456680 - DNA, 574 bp, Homo sapiens
actgcagccctggggtaagctcaggctttatgttccctccccagcttggaggaagcaagagatgggaccttggcaatggttgtggcagcaggactttcacttgtttcttggggctccactgcagagatatgcagagccactaccagttggtacaatcagccctgggtggggcagctgtgttgtggattcaagccaggagtccctgcccaatgacaagcagtggggaccaggggacctggggagacagactggcctcttctctttagggcagccgtggtttattggaggtgtggttaaagcactcatggtctttgttcctttcccagtctgarggcagcaaaggaagtaccactgcagttacagtggcagaggagttttcagttgcctcttggagcttcacctcaaagaaatacaaggatcctgctaaccggaatgttcagctgggtgtggctgaatattcatccagggaccctgcttggtgaaaagctgggggtcaaggctcacaggaaggggtgactatactcctatctgtatggtgactgtggcaagctggaaatgtgagtaaagccctcaa

SEQ ID NO: 456681 - DNA, 574 bp, Homo sapiens
actgcagccctggggtaagctcaggctttatgttccctccccagcttggaggaagcaagagatgggaccttggcaatggttgtggcagcaggactttcacttgtttcttggggctccactgcagagatatgcagagccactaccagttggtacaatcagccctgggtggggcagctgtgttgtggattcaagccaggagtccctgcccaatgacaagcagtggggaccaggggacctggggagacagactggcctcttctctttagggcagccgtggtttattggaggtgtggttaaagcactcatggtctttgttcctttcccagtctgagggcagcaaaggaagtaccactgcagttacagtggcagaggagttttcagttgcctcttggagcttcacctcaaagaaatacaaggatcctgctaacsggaatgttcagctgggtgtggctgaatattcatccagggaccctgcttggtgaaaagctgggggtcaaggctcacaggaaggggtgactatactcctatctgtatggtgactgtggcaagctggaaatgtgagtaaagccctcaa

SEQ ID NO: 456682 - DNA, 574 bp, Homo sapiens
actgcagccctggggtaagctcaggctttatgttccctccccagcttggaggaagcaagagatgggaccttggcaatggttgtggcagcaggactttcacttgtttcttggggctccactgcagagatatgcagagccactaccagttggtacaatcagccctgggtggggcagctgtgttgtggattcaagccaggagtccctgcccaatgacaagcagtggggaccaggggacctggggagacagactggcctcttctctttagggcagccgtggtttattggaggtgtggttaaagcactcatggtctttgttcctttcccagtctgagggcagcaaaggaagtaccactgcagttacagtggcagaggagttttcagttgcctcttggagcttcacctcaaagaaatacaaggatcctgctaaccggaatgttcagctgggtgtggctgaatattcatccagggaccctgcttggtgaaaagctgggggtcaaggctcacaggaaggggtgactatactcctatctgtatggtgactgtggcawgctggaaatgtgagtaaagccctcaa

SEQ ID NO: 456683 - DNA, 578 bp, Homo sapiens
ttactcttggatgatctagttgaagagctagtgtttactgatcacactgtcttctctccttgaaattggtgcatattagctgcttctagtcagccctcttgcccagaatmcccaaaaagaaaattgttagttcagggattgtagcttttttttttgttttaacatgagatatgtgattataataaacttcaagttttcaggaccattttatggataaaaggagaatctaacttttaaaagttgggaaaatgatttaatattggaaactcaagagttacaaattcttacagttatttcaaaactaaaggtttctttagaaccaaatttagagctataaatcctatatccgtaatcaaatccagtactgataacaatgaacaattgctgaagagtaatattctctctctctttaccaatgtaagccttagcattggtactttcttgtattatctttttgcatgccattatgatcagaaaaaacaaaaagctacccagaaagggcagctacattctaaatgatagcttttacctccctgaggagctgctagtacctacctgattagaattcatttgtaaac

SEQ ID NO: 456684 - DNA, 578 bp, Homo sapiens
ttactcttggatgatctagttgaagagctagtgtttactgatcacactgtcttctctccttgaaattggtgcatattagctgcttctagtcagccctcttgcccagaatccccaaaaagaaaattgttagttcagggattgtagcttttttttttgttttaacatgagatatgtgaytataataaacttcaagttttcaggaccattttatggataaaaggagaatctaacttttaaaagttgggaaaatgatttaatattggaaactcaagagttacaaattcttacagttatttcaaaactaaaggtttctttagaaccaaatttagagctataaatcctatatccgtaatcaaatccagtactgataacaatgaacaattgctgaagagtaatattctctctctctttaccaatgtaagccttagcattggtactttcttgtattatctttttgcatgccattatgatcagaaaaaacaaaaagctacccagaaagggcagctacattctaaatgatagcttttacctccctgaggagctgctagtacctacctgattagaattcatttgtaaac

SEQ ID NO: 456685 - DNA, 576 bp, Homo sapiens
acaatattgtttagagtttaaaaatatgaactttgttctatgtgtaatgagaagccaataaaagttttgaacatgaaaatgactactgtggttagtttgcagatgatggaatacaatgtgtaataatgtaaacaggaagaccaattagagaactattgcaagggctaaagttaaattagaaacaaaaaacaatgatgactgggcaaggatatcagacgatgctagatggtaaatttaggatgctaaatttcagatttactgggttttaacaaagtttaaaattattcaaatttttaatgtgagcaacagtgagaaatagtattttcatttcctaagatgagaaagaatagaaggacatgtttgatgggagggtaagcaggaatcagaaaaaaggctttgttttggatttctttagttagaaatatagattttgcagttgaacatatgaatttggaattcagraaacaaattggcatcagtaatataatgtttggaaactttaatgttgaggtgatgtttaaagacttaggacccaataagattattactgagggagtatgcaaaagaagaagtctg

SEQ ID NO: 456686 - DNA, 535 bp, Homo sapiens
agtttatcaaactaccaattcttccaagtgtttcccattttatgaaatatttcccaaaagacagcctctcctagcaccrttgcctgacataccaagctctccactacaacttttttcacactagtgacacacacacacaaaatctgtattttattggcctcaccagccaaactcgtgtgccatatttataaaataaacaaaatatcaaaattctgatgcctgctgctccttttctccttttaatatcttggagttttgtcctttctaaggatctcctacttgagaccacggaaagcagcactgttagtaatagaattctgatgttgatgccaagacattaaccatgtttccaataggacactgacaaggccaacaggaacaaagtgtatttctaacaggacgtggccaagatcacactgaagctacttctgagttactgctgctttcttgcgtagctgatctggcctcctgaacaaagattactgaaatgtccggtaactaaactgccccctcttcttgacagtgtatccagatc

SEQ ID NO: 456687 - DNA, 323 bp, Homo sapiens
ttaaaacagttgctaggcagcctattcctcatctcacaatgggttagaactttaatcatgtttacagagataccatgtaaaactctaaatgaatagtcttattttatagctccaatttaattaatagctaatatttttggcatgtttatactaattgattacatagaaatatactctatgatatatacatatttcagaaattctatratatttttggaaacttggtttttttaaactttcatattttactgccttggagtttacttggaaattgcatacaccaatctgctcacacatatctagtctgtttttttcattctaca

SEQ ID NO: 456688 - DNA, 537 bp, Homo sapiens
tataactccattaaccatgataaaaaaatatgtctttcttctctttataatttagatatctctatagacagttttctttattcatgttgggaaaatctaaagtacttttaatttttcttcatttatttctctattgtgttatgtacttttactgcttttcccttgaatttttatttaagatgttcagtcaaataaaatagyccaggtatagtctccacaaaaaaatggggagtccagggatacagatccttatctaagtcacgctactgaaggactagcatatttcaggcccaggttcttctatatccttgccattggtctcctattccttcatggctcattgtgaattcgtctgtaacattctgtcatctattagtctttcagttcttactatgtttcaaagctggtacactgattcaatctcatattcccagaccagggtttcttaacctacaggtaatgaacaatcccatgtgtatctgttttacctttttgtttcttggtcttttcagttttgctttgtttttgttttatttt

SEQ ID NO: 456689 - DNA, 574 bp, Homo sapiens
caatgaagaatatttctaaaactcaagtgaataaaagctgctttattacaattttactctattcacgttttggcatgcactttctctttttatttagctaataattactctttgggaaaaatgcatcatttaaacatttataaaatttaattttaagacttttgatttatgatagcttcttaagtgattatgaaatctatttttgtagaatattcagaaataacattcatgtaaatgacttcagtttatcttgttagaagtatctatgaaacaaaactttcccaagtaawtttacttaagttatccttggaatgataattaaacacaaagacatggtaaattgaaaagtaaagaaattaaaaggataacagacaggtgtgtctttgtttgtttcttccttccttcttttctgaattatttaggaagtgtcataacatttgcaacttactctcagtagattcaggatgaaaagagaaaaagaaaaatatgcaaatgcaaatatagcaaaagttttagcaaacatgtataattattgtactactgtttcagattttccctaggtttgaaagttttt

SEQ ID NO: 456690 - DNA, 378 bp, Homo sapiens
catttactaaatgacagatttttttttttttaggattatggcttaacttactggtctcagttatatatcttctcattttgccacaaaatgctagtaaaaactttcatttagcaagtgcttacaatatgataggtatatttccaaatattatctttactctaaacaacagctcatgtttccaaaatggcagttccagatgtcagagatttttttgactaatccatgctgtctcagcatgttttckcatatcttgaaactccttctaacttcatatattatgagaaatcatgaaaggaacctcttatctgcccagaaaatctcaccatatctttgggaaaaagaaataatatctacctcattcgtaaatgttgtgattaa

SEQ ID NO: 456691 - DNA, 432 bp, Homo sapiens
tgattagggcctgtcttactgaaaaagacttgagcaaatacttgaatgagataagggaaagttaaccacattatagaagttcattttcaggatagaaacaacaagcacaaaagccttcagttgggaaggtggagggagagcagcagacagttgtagctggagcagagtgatcaatgaggacaacaatggtccagaagatcagagaggtctgggctgtgggggcgggtaggttatgtaagaccctgtcaggcacatgygaagttagggtttactctgagtgacatgaggggtggggtgggggaaaaccagtgaggatttcagaataggaggcgcaagacctggcttctgttttaaaaggttgtttctgactgccatgctgggaatagattgtgtagggtgagaggacacatgcaggaagatcaggtaaaaggc

SEQ ID NO: 456692 - DNA, 432 bp, Homo sapiens
tgattagggcctgtcttactgaaaaagacttgagcaaatacttgaatgagataagggaaagttaaccacattatagaagttcattttcaggatagaaacaacaagcacaaaagccttcagttgggaaggtggagggagagcagcagacagttgtagctggagcagagtgatcaatgaggacaacaatggtccagaagatcagagaggtctgggctgtgggggcgggtaggttatgtaagaccctgtcaggcacatgcgaasttagggtttactctgagtgacatgaggggtggggtgggggaaaaccagtgaggatttcagaataggaggcgcaagacctggcttctgttttaaaaggttgtttctgactgccatgctgggaatagattgtgtagggtgagaggacacatgcaggaagatcaggtaaaaggc

SEQ ID NO: 456693 - DNA, 549 bp, Homo sapiens
tgaaaaatgtggtcaggttgggaaacaagtaataacttgtttacatgctgatgagaatgatccagtaggaaaaggggagaaaatggtgttaaaggagagayaaggaaattgctggaaaatgttctttgctaagtaaaagctgctggaatgtagtgcacgtgggaagaaactgactttagatagtagttcagatagttcacccggggcaacaagatgggcagcagggagtgtgggtttgtaaacggtgtgggggcagacgtggtgatgggaatctgtgatgttttcttttaatcatttgaatattcttcatgaaatcagatgtacagtgatcacttgagagtaaggacagggaggaggtgttttacatataagaaagcagaaaaaggtgtgaaattgaaacaggatagtgaaggaattaaaggaatgggaaacactgtaattgcctgactagcattaacagatctctatgaggtttgtggttacgaatttaagatgagaaatgatggttgtgtattgatctctacctatgtttagctgcagaattataga

SEQ ID NO: 456694 - DNA, 549 bp, Homo sapiens
tgaaaaatgtggtcaggttgggaaacaagtaataacttgtttacatgctgatgagaatgatccagtaggaaaaggggagaaaatggtgttaaaggagagacaaggaaattgctggaaaatgttctttgctaagtaaaagctgctggaatgtagtgcacgtgggaagaaactgactttagatagtagttcagatagttcaccyggggcaacaagatgggcagcagggagtgtgggtttgtaaacggtgtgggggcagacgtggtgatgggaatctgtgatgttttcttttaatcatttgaatattcttcatgaaatcagatgtacagtgatcacttgagagtaaggacagggaggaggtgttttacatataagaaagcagaaaaaggtgtgaaattgaaacaggatagtgaaggaattaaaggaatgggaaacactgtaattgcctgactagcattaacagatctctatgaggtttgtggttacgaatttaagatgagaaatgatggttgtgtattgatctctacctatgtttagctgcagaattataga

SEQ ID NO: 456695 - DNA, 549 bp, Homo sapiens
tgaaaaatgtggtcaggttgggaaacaagtaataacttgtttacatgctgatgagaatgatccagtaggaaaaggggagaaaatggtgttaaaggagagacaaggaaattgctggaaaatgttctttgctaagtaaaagctgctggaatgtagtgcacgtgggaagaaactgactttagatagtagttcagatagttcacccggggcaacaagatgggcagcagggagtgtgggtttgtaaacggtgtgggggcagacgtggtgatgggaatctgtgatgttttcttttaatcatttgaatattcttcatgaaatcagatgtacagtgatcacttgagagtaaggacagggaggaggtgttttacatataagaaagcagaaaaaggtgtgaaattgaaacaggatagtgaaggaattaaaggaatgggaaacastgtaattgcctgactagcattaacagatctctatgaggtttgtggttacgaatttaagatgagaaatgatggttgtgtattgatctctacctatgtttagctgcagaattataga

SEQ ID NO: 456696 - DNA, 596 bp, Homo sapiens
catgtcctggtgaagacaagtgcacaggtggctgtgggagtggttggctgaagtggagttaaggtaagggtccttggaaatgaggcactagcagctcaactcagtgctggggtttcactttcctggagttcatgctgctgtttcgtttggaactcagatgcttttagggtactgagtatgttttcactaatatctgtaccttaatatttgtgcccatacacacagggggtcatgtataaaattctttggtgggtgattctgctgtatctaattatctcatggagaaaatggaacttactgaagaaaagaatggcagctcttctgcaaataaataagcaratacacataagcttgtaatacattactgttaaaaccagagaaaagaacctgctttataattaatttaattaacatattcaccactattggattcagtttaatttaataaaatttggtttaaaagttctggcatagataaaactaaatgtttatataaacaagcatttgaacagctgagggaaaagattgatcgttgagggctaaaggtttaagagccttatagaagatgtaacaattgatctgaaccttagaagatg

SEQ ID NO: 456697 - DNA, 442 bp, Homo sapiens
gaaatcttgccctacatggcaaccaaacagctgtttatcattggcctaattatcaagttaatgagatgctaatttctatattcataaggcatgcatgagcaagtactagtgtatgcaaaacagagtttagtgacaaacttaataaaataaatagtaaggtatgggtaaagaaatacaaatggtattaaaagctaggacttagtttattgagaaattgtacaattccaggatgcacacccrgcaatctactgtgtttaatgcatacacagcactgacaatagccttcttttgctcagtagtcttgattcagctcctgcagtgtctatagaattcttattacagttgctcaatggggacaaaatcaggcacactgtgcagatttatggatagccgtttcaatccccatgggattgtggtgccaggcttccaatttccccagcac

SEQ ID NO: 456698 - DNA, 585 bp, Homo sapiens
ttcaagttgagatttcgatggggacacagccaaaccatatcacctgctatatgacaatactgattgagaggtgtggggcaatgtcaagtctaaagttgtgtcattgttcatgtagatttccaaactgaaaatctacagtggatgctgagtgaatgaaggcacatatatttactcagtgtgtaatcaggttgggatatcctgtaatatgctcccaatcatgttttgaatattattgaaagaaaacagtctcaacagctagttttctcattctaatgacagtattattaatgataactccatcttgcattttatgcttatcataggttaactttttggaattttacactaaccctgagagtttaggttgcacgtaattcagtctcatcattttatgggtgttgttactgaagcccgggttatggcaattgttaagtgacagagctggaactagaattctgaatctgtgctccttcccctttctctatttgaaagtcaagctgaaaaaaatgattaggatatttaacctggcatgccttgcaaatgtgcttgtaaygcacaaaacagaaaagtgtcttatgtctgaca

SEQ ID NO: 456699 - DNA, 647 bp, Homo sapiens
attctgaattgttcctgcatttatggacatttactccaaatgccctggcaggaggagtcaaatggcacaagcttaggtcatttgtgagtttcctttagctgctttttaattttttaaaaaacataaatattaaamtaatttttaattaaaatgtatttagactttttaaaatagaaattaaacatttttaaatagaaaaatacctttttttctccttggtttccctccaggaaccaactttctgtcaagagttacatgatggcagattccagaagcttatgagattttagatgtgaaaaaacaaatgtctacaatactgatcaagaagaagaaatgattactagatcacttaccagaaggcaaaaaatgatggagctcagttatgaaaacagggcacgcgagatagactggggatggggaacagatagagttctttgccagagttggaacgctgagtgaaggctgatctagttgcagcttgattctgagcatggttcttaatctcctgacacagtgaacattcaatcttgggatgcgaggctgttgttgagcctgctgatacccagattgaggctgattatcagccgtgatggtgaagacttttaacatgggatttagtagaccatattggcattttaataaatgct

SEQ ID NO: 456700 - DNA, 542 bp, Homo sapiens
cacagtgaacattcaatcttgggatgcgaggctgttgttgagcctgctgatacccagattgaggctgattatcagccgtgatggtgaagacttttaacatgggatttagtagaccatattggcattttaataaatgctatgataagttatatcaaatcccttattaacaaagcgaaatagtgggtttggaaattttatacaagtaatttagtttgtttttgtgttaattatataagcccattaatttacaggtgacctataggaataatagtgttaccaattgttaaattggtatgtaatgagtggactttgaaaaagctttgtgaaagtaaataaaccttgaaatttaaagttaatactgactagacaccactattctcattttactgcaaaaataccttggctgcagtctttaatagctttcattcccctccaggtctcccagaattccttggctagatgccagggcctgagctggcmactggttggatctgggacctctgatgtttagcaacagttaagctatttgcaactacgtgttc

SEQ ID NO: 456701 - DNA, 617 bp, Homo sapiens
atgaggtacatccagcctcaccaactagatgaatgtggtactgttctctgagttaatgattatagggggagataaggaagtgccttgggaatggcatgaaaagtccacttttgcatattagtttgtgttaacatccatgtaaggtaacagaaggcagctggataacatacaaatgaatcttatgagagtggtgtggtctagaaatataattgaaagttataaggaaataaatggtaattaaagtsatgagagtggacaatttagccctcgaattctgtggtaagagaagaagatttcagagaaaggatcaaaaacatttaaggcacagtcagggactagcagtccgaaatggactctgttggaagatccaagaggagtaagagaaaatccagtagaggaaagaacttggccatttattggatgtgacaataacgcataaacagttaaaaaatgattctacccctataatctcagcactttgggaggctgaggcaggaggactgcttaaccccaggagtttgaggctgcagtgaactatgattgcaccactgcaccccagcctgtctctagaaaaaaaaaaaaagattctaaagttttgactatgagacttactggta

SEQ ID NO: 456702 - DNA, 490 bp, Homo sapiens
tcggatctctgtcttagggtctgcttttaggggaatccaaattaaaactgtggttttagtagaggcattagaaaagactctctggatgataatctggaattgggttgcctgctgatcgcatggaaacaagggtcccgtttctggtgacaaatggaatattatcrgccatgtgtgatgtggtatcataatcatatagattctcatccctggtgaattgggatgagggacagggaagagaaagctctgacttttaatagctctatcacactggttcccaaagtgtggtgtctgaaccaccagcactaccatcatgtgagaacttggtagaaatgccagttctcaaacaccatcccagacttgctgaatcagagactcaggggttgaggtccagaaatctgtgttttaaaaagcccttcagatgattctgatgcattgtaaagcttaacagtcaattctccctaacttaaaaagtatgagaataaatataaaa

SEQ ID NO: 456703 - DNA, 552 bp, Homo sapiens
ggcagagcacgcttttgtagattttaccactggaaaaccagccccttcttccttaaccccagattctcacagtgcagattcaagaaaatacccttctacctgtagcagcaaaagaagactactcatcatgaaatatacctagagatttctccataacaaaggcctgctatcaaggcggggggaggacaaaactggtaaataatgatgtacttgattagccaattttattgctccctttttatattatactaatatttttttagattcataggaccttatattttattataccatattcaaaaaggaactcatgaaacttcttcaccaagctatgaaatttgatgttcataatagaaagacactagtaaacaaatgaagaaactatctggaaaacaacaacagcagtgccatataggaacttcagtgtgatggatataactaaaaytggtgaatttttgaaagtaatggaagaatttatacaataaattttgataattttttggaagagtaaggagtctgtcttctatagaaaaaaaaagcaagcatttacat

SEQ ID NO: 456704 - DNA, 484 bp, Homo sapiens
tgtgctgtgttcatcctccaacccccattttccctgggaggttactgcagctagatggagaccatactacaggtgctgactaatgagtcatgagaagaaggggcttatgggactgggggaacatataatcatagtgtgtccagaattggtgggttcttggtctcactgatttcaagaatgaagccacggacccttgtggtgagtgttacagttcttaaagatggtgtgtccagagtttgttccttcagatattcagacgggtttggagtttcttccttctggtggattcatggtctcgctgtcctcaggagtgaggctgcagaactttgtggtgaatattacagctcataaaggcagtgtggacccaaagaatgagcagcagcaagatttattgcaaagagtgaaagaacaaagcrtccacagtgtggtaggggacccgagcaggttgccactgctggttcaggcagcctgcttttattccctt

SEQ ID NO: 456705 - DNA, 484 bp, Homo sapiens
tgtgctgtgttcatcctccaacccccattttccctgggaggttactgcagctagatggagaccatactacaggtgctgactaatgagtcatgagaagaaggggcttatgggactgggggaacatataatcatagtgtgtccagaattggtgggttcttggtctcactgatttcaagaatgaagccacggacccttgtggtgagtgttacagttcttaaagatggtgtgtccagagtttgttccttcagatattcagacgggtttggagtttcttccttctggtggattcatggtctcgctgtcctcaggagtgaggctgcagaactttgtggtgaatattacagctcataaaggcagtgtggacccaaagaatgagcagcagcaagatttattgcaaagagtgaaagaacaaagcgtccacagtgtggtaggggacccragcaggttgccactgctggttcaggcagcctgcttttattccctt

SEQ ID NO: 456706 - DNA, 609 bp, Homo sapiens
tcatacaaaaaactcttaccaagagaaactcttacctgagaaacaaayatatattgctaacctggaagagttagaaggcagtgtcttttagcattattcttcagtgttacagtggtcacagaatatttcacttctgtttttttctgatgttgcctctgatgtctggcatagaatgagaggtttctacataagacccaggagacatatcagggacttagacctaattgagttgacttaatcaaagtgtctggttatccagattcacataaatagaaactttttaagtgcataaaagtaagcctcatttgatactttaacctaaaatgccattgttaaattgtgtgtttttttattaagtagctttactaaaaataagactcagaaatgctcttcactttctggaaaccatcactgccttcttctgaattgtgacagtggtccctctagggatatgtggtaaaattatcaagtttttacatagatgaaaatttgacccataaggggtacgcacatgctttgtgatgcatggaaaatctagtgttaattagagctcatttttcaactccttctaggattcctagatagtagatagtaaagtaacaatgatac

SEQ ID NO: 456707 - DNA, 589 bp, Homo sapiens
atttctgaatatccctatgtctcttacatggaggaaktttacttaacaaaatttatacaagaattgtaagtagagatttaaattacatttcttttcacatagaaaaaaaatcagcttcttctgtggttatcaagactgagaagcagggattatagataagaatgttatataaccagaatgatgttttgatttagaaaagaaagagaacacattttccagtgtctggcacaattcagtccattcatcgagaccatgaaacacagttcaatccttcgacctcagtttcttctttatgaaaggggcaatggtgctcactataagagggctataacggttcattgccattattattgttgttggctgagatacaggtgtaagaaaatatatcagtcaaagctttaaaatatgggacttgaatgctttgtgatttagatatttttcttcctatctttgtgtcaaacactatccactgaagttttgaatgtttaacttatgtggttgttaaaatattgaagtccagcacaagcaactctattataatgcaaatccagtttctattatcatctaataaaatcgtgtgttagaggga

SEQ ID NO: 456708 - DNA, 624 bp, Homo sapiens
gtttggtgtacaaatgatttcatcaccctggtagtgagcatagtactcaataggtacttgatagttttgctactaaatagtagggaacattctctccctcctcccacctgcagtgtttggttctcagttcctgcgttaatttgcctatgataatcggctccagctgcgttcgtgttgctgcaaagaacatgatttcattttttcatggctgtatagtattccatggtgtatatgtactacattttctttagccamtccaccagtgatgggcatctaggttgattccatgtctttgctattgtgaataatgctgtgatgaccatatgggtgcatgtgtctttttggtagaacgatttatattcctttgggtatatacccagtaatgggattggtaggttgtgatatttctgctttaagttctttgagaaatctccaaactgctttccatagtggctgaactaacttacattgttgctaaacagcttcactccattttgaatccacatcactgactggaccctaagcgttttaagcatcaggcaaaagacagtctactcaggctcctctcttcttaacaaacacttgaattaaaaatgttgtgcctaacagcaaacatttcttggg

SEQ ID NO: 456709 - DNA, 571 bp, Homo sapiens
actgacccatggcaatgaacagagatacattatgcatttcccatgcataatttcagaatacctgtcccttccaaaaataaaccatcctatggctcttggtagtgtttaaataaatcaaactgactcacacagcttccagaccttcagctgagcttctctgtttggactcagaatagagtgcatgcacccctggctggttctttgttgctgagtccaggctccatgtcttgtatcctttaccatgtcatatatcatasgctgccaccctcttgtctgagctctgttaactttgcctcctgctcatgctgaaacagtgccaagggtgggtcatggctgtctcccttcagtgcctttcactttacaactgactcccccagctgactcgtcctctctctgccatttccttgaagcttcctggaatctctctcatcaaggaaaccgagaagcacaggcataagggtattatttgtgacatttcagaagggagaaaatgtttttgcagctctttttccctgccccttaagagagaacactggtggaacctttgaaacagtaaatacacttgaaatct

SEQ ID NO: 456710 - DNA, 603 bp, Homo sapiens
aagagaacttggaaatgtatctagtccaggtctgttataactggaacctgacattcactggaagccttgtttttatagaggaccattgaatccctatggatttaagtggatctttctctttgcccttcttcrctgggtttataattttagaagaacaaggatcaaactgcattgaagttgttatgattctgtgtcttctgttatttttatagcttgaagtaatttgtttatattatcatgccttatcctccttttctgatgcagaaactgaggcacatgcagggttagactaagtacccaacttcaaacaactattaaggggcaaagatgggtcactcaggatttattatctttgcattcccaacatgacataacacttgtctttcaatatatgtttgttatctcataaggtagtctcccaataattgaagaaaaaatatgtttgtttgtttttaaagtgaattaaagttgtagttgtattacagctatttatgtactgagcctaaaggccaaatagttctataaaacatataatgtacaagtagttagtttgtcacctgttcttctgtatccttaatctataatttacaaggacaacatgct

SEQ ID NO: 456711 - DNA, 590 bp, Homo sapiens
ctagccattgagattgttaccagagtagacagacagacaagacccacagaaggcagggagtggaggtggaggaagcatcaaggaaggtggttccttatgcgactgtagctgagggagtttgaggcatctgtcagcagctgttttcagaggcttcagccagtaaaagaaaggtttctctgagacttttattccaagagaaagytggtcttaaaaaaaatctagctccttttttatatgtgtgcaagcatagtcacccatacctcttttggctattcttttaggaataggactagatttatatatattttttgtttcctctagtggacagagaagaaatccctgggtaacggtagaagtctgtgtttttttgcagctcattctctgcaatgtggcaaaagtccattctcactctaaggtgtcagaaagagagtaacagtgatttgggtctttatgacaaatttatcctttctcacttctcagagacagtctgatacatcttttaacagggttgggaagatgcagcatgggtccagcaacgttccatgctatccttctctttattagggcttgattattcaatgaactaggtg

SEQ ID NO: 456712 - DNA, 590 bp, Homo sapiens
ctagccattgagattgttaccagagtagacagacagacaagacccacagaaggcagggagtggaggtggaggaagcatcaaggaaggtggttccttatgcgactgtagctgagggagtttgaggcatctgtcagcagctgttttcagaggcttcagccagtaaaagaaaggtttctctgagacttttattccaagagaaagttrgtcttaaaaaaaatctagctccttttttatatgtgtgcaagcatagtcacccatacctcttttggctattcttttaggaataggactagatttatatatattttttgtttcctctagtggacagagaagaaatccctgggtaacggtagaagtctgtgtttttttgcagctcattctctgcaatgtggcaaaagtccattctcactctaaggtgtcagaaagagagtaacagtgatttgggtctttatgacaaatttatcctttctcacttctcagagacagtctgatacatcttttaacagggttgggaagatgcagcatgggtccagcaacgttccatgctatccttctctttattagggcttgattattcaatgaactaggtg

SEQ ID NO: 456713 - DNA, 643 bp, Homo sapiens
tgacaatgatttgtgaactatgaaacatgtatttctattaacaaattggcaagatcaatagtctgttagcagtattttcatcacattatgacttgtgagcataatattttgaaagtagcaaatgcattcattagcagtgggtcctttttcataagaaaaatttttctaatagcctgccctttgtttgtaaccatggtccagagttggccaaatcgcagagagtatagaaactgatattgaactccattaatctcaccctgtcagacaaatgatgtgggagtaccttgtaagactctgcatctgaaaaaggataatatctactggagggtagttttcaaaattaaggaaattaattcttgcaaaacctttagcataatatatgaaacaaagtattcaatgaatgttagcatctatttttattatcattattacaatgcccacaatctgcaggcaaatataagaaatgtttaatttcttcctgggcatagtggtgaaccactaagggattttaaggcacttttgagtcartagtttgtatcttgaaaatcacctttattttgcgcagcacagggtacaattactatctgaacaccatgtctcaaaaaactgctatactttgttttttgtagaaaataatgtgact

SEQ ID NO: 456714 - DNA, 577 bp, Homo sapiens
ataattatccagcccaggggcacagagcagagtttgattccaaataataaagcaaattaactccccaagcataaaatctgggttccttgaagaaaagcacaattttgaatcagaatcctgttgctagccctttctatttgaccccaacctgaattccaatggaaagacataacaaggaactcaatgtaatatgggtttaacttttttcttccaatccaaaagaatagaaacatttgataaccttccgacatatacgtgggctgtgtgggcttatcagagttttcatcttctataaaagatcctggaaccatttaaatagccaacaacagaaatagggaattctagatctatgactgtaaactggcaagtcaaaagccgcttgcatgtcagattyattttatgtgaactgtgttgtgttttggggaaaaaaaggaaatctgtttgaaggtctttaaatggagcacacattccaatttcccaagtccactctgctttttattaattatacctgctcaattacacaggacgtgttgagtttgcaatgaattgcttttaaatggaaggaggagtatttatc

SEQ ID NO: 456715 - DNA, 512 bp, Homo sapiens
ctaatttatcctccagaataatcacccctctattattctctatcacagcactcttttagttcccttggtgcacataacatttggtgtttttgcttatggttcatgcattatctgtctcctccacaagactgtcagttccctaatggcagagatcaggtctgtttgttcactgctctctctgagagacctaatatggtgtctagcatgcaacgcattctgactatttgatgatcttagtcatcagtccatgatatcttggaaattccctgtggtggttttgactgtgtcaactgagataagctggagctatattacctmgaatctcactccttgtgtggtagcttggtaacaagagaaatgtgaggaggagagcaatagccattatgttctgcagtttgtggagggtgtgaggtcccactgcaacacctccacattgttatgatctgatagttcacccagatggcgtggggcagctcctccagctcctgccagacctcatcgacttctccaag

SEQ ID NO: 456716 - DNA, 395 bp, Homo sapiens
ctgaaattgccctgcaaatatccccaatgatcacttgactaaaaactgcaatgacgtattttcagacttcacactaacatctgctactacatcttcttgttatctttgaaactttctccttttttcagcttctggaatactattgtcttctttttcctatttccacaaatattcatgtttcagttcagacattctttgcacatgtcttaaactccaaccatcagttttccacactttgttgctttgcttttaatttacatgatcattctagttatctcatacacttgaccaacawcaggtttattcattccacccaccttcaaaaccaattaatgaatacacaaagaaaaaaaatctctgttccttcttctcatttctgcatttacaatgtgggt

SEQ ID NO: 456717 - DNA, 630 bp, Homo sapiens
aaaaccaaacatcgcatgttctcatttataagcaagagctgaatgatgagaacacatggacccactaggggaaacagcacacacggggtcctatcgtagggtggggcagggggagggagagcatcaggaagaatagctaatggattctgggcttaatacctaggtgatgggatgatctgtgcagcaaaccaccatggcacacatttacctatgtaacaaatctgcacatcctgcacaggtacccctgaacttaaaataacagtttaagaagaaaaaaaaagtgtccatatgtgtgtcatgaaagtagatatctasatatttctccatctgtgtgtatgtgggtgtgtgtgtgtgtgtgtgtgaattaattatgaagcaagattaagatcaggagaaaaacattttatcacacatggtgtatagtttagaacttatttctcctatattatctgcaatcagaaaagcatatccatgtttgtttcctgtgagactaaattttcataagaattggaagtaattagaagctttggaagtaacaaaatttcttttttaaaagtcagagctatagcaaatgggtgattttaaatccctcatccaagaagaagaattagtcattaagaggtatgtccc

SEQ ID NO: 456718 - DNA, 630 bp, Homo sapiens
aaaaccaaacatcgcatgttctcatttataagcaagagctgaatgatgagaacacatggacccactaggggaaacagcacacacggggtcctatcgtagggtggggcagggggagggagagcatcaggaagaatagctaatggattctgggcttaatacctaggtgatgggatgatctgtgcagcaaaccaccatggcacacatttacctatgtaacaaatctgcacatcctgcacaggtacccctgaacttaaaataacagtttaagaagaaaaaaaaagtgtccatatgtgtgtcatgaaagtagatatctacatatttctccatctgtgtgtatgtgkgtgtgtgtgtgtgtgtgtgtgaattaattatgaagcaagattaagatcaggagaaaaacattttatcacacatggtgtatagtttagaacttatttctcctatattatctgcaatcagaaaagcatatccatgtttgtttcctgtgagactaaattttcataagaattggaagtaattagaagctttggaagtaacaaaatttcttttttaaaagtcagagctatagcaaatgggtgattttaaatccctcatccaagaagaagaattagtcattaagaggtatgtccc

SEQ ID NO: 456719 - DNA, 512 bp, Homo sapiens
agcaaaacaaattcaaataatccattccaaaatacaatgttatcaaccaactgcacaatcagtttatcctgacatattcaagtgataggataaagttggccatgtattatgaaaargattatttgtgcattttattgactgggcaacactgcaggacagtcaaggtgatatataatttcctctctgcctggtaaaattaagcacactaaaccaagttatttttctttttaagagatacttacatttccatttattgtttgaaatgtcgatcaagagaatcaacagatgatagtccaatttttactcagtgactgttgtagcattttcctgtttactgattagagtggttattcattattcctcaggttgctgaatcccatcaggctgttattatgaaggaatttgattgctttgctgcacagcaggacctgtgctttgagatttttttttctcttttaaaatatcctgtaactacaatgatggtaaagccatgttaaatgacttgattgtac

SEQ ID NO: 456720 - DNA, 512 bp, Homo sapiens
agcaaaacaaattcaaataatccattccaaaatacaatgttatcaaccaactgcacaatcagtttatcctgacatattcaagtgataggataaagttggccatgtattatgaaaaagattatttgtgcattttattgactgggcaacactgcaggacagtcaaggtgatatataatttcctctctgcctggtaaaattaagcacactaaaccaagttatttttctttttaagagatacttacatttccatttattgtttgaaatgtcgatcaagagaatcaacagatgatagtccaatttttactcagtgactgttgtagcattttcctgtttactgattagagtggttattcattattcctcaggttgctgaatcccatcaggctgttattatgaaggaatttgattgctttgctgcacagcaggacctgtgctttgagatttttttttytcttttaaaatatcctgtaactacaatgatggtaaagccatgttaaatgacttgattgtac

SEQ ID NO: 456721 - DNA, 426 bp, Homo sapiens
agaggaggaatctagagaggcagtctggccagagtggccttgctgagctgaggtggtgggctctacccaattcgaactcccaggcagctttgtttagactgtgagggtaaaatgcctactcaagcttcagcaatggcagacggccctcctccctccaagctcgagtgtcccaggtcgacctcagactgctgtgcttgcaatgaggatttcaagccagtgaatcttagcttgctgggctccrtgggggtgggacccgccaagctagaccacttggctccctggcttcagccccccttccaggggagtgaatggttctgccttgctggcattccaggcaccactggggtatggaaaataaaactcctgcagctagttcagtgtctgcccaaatggctgcccagttttgtgcttgacacccagggcccc

SEQ ID NO: 456722 - DNA, 506 bp, Homo sapiens
cctgatgaccttgaaattaaatgggtcatgtgaagctaaagattatagaaccccttgattcctttataaacagtatttctaagatargatcaacactaatctttcaaattagttgactgtgtatagaacaacttgtttatttaaagtcatctagtctaatgcaatcaaggagtaaattataaataaccagttagcataaatggaaagaaaatagttccttttctttgaattcatttcatgtttaatttttcttgcgcacatatagaaatgaatagaaatattcccatttcaatatgcaaattcagccactatatagtttgtttctttttggtagctaataataataaatttttaagtaagatctgattttgaaatatgaaaagaagtttatcctttcctgttttaataccacctgatacccgtttaacttactgtgtttgattcttggggacatttatgttcaaggttctgtcaaagcaatctattattcttgtttttacctgatg

SEQ ID NO: 456723 - DNA, 506 bp, Homo sapiens
cctgatgaccttgaaattaaatgggtcatgtgaagctaaagattatagaaccccttgattcctttataaacagtatttctaagataagatcaacactaatctttcaaattagttgactgtgtatagaacaacttgtttatttaaagtcatctagtctaatgcaatcaaggagtaaattataaataaccagttagcataaatggaaagaaaatagttccttttctttgaattcatttcatgtttaatttttcttgcrcacatatagaaatgaatagaaatattcccatttcaatatgcaaattcagccactatatagtttgtttctttttggtagctaataataataaatttttaagtaagatctgattttgaaatatgaaaagaagtttatcctttcctgttttaataccacctgatacccgtttaacttactgtgtttgattcttggggacatttatgttcaaggttctgtcaaagcaatctattattcttgtttttacctgatg

SEQ ID NO: 456724 - DNA, 506 bp, Homo sapiens
cctgatgaccttgaaattaaatgggtcatgtgaagctaaagattatagaaccccttgattcctttataaacagtatttctaagataagatcaacactaatctttcaaattagttgactgtgtatagaacaacttgtttatttaaagtcatctagtctaatgcaatcaaggagtaaattataaataaccagttagcataaatggaaagaaaatagttccttttctttgaattcatttcatgtttaatttttcttgcgcacatatagaaatgaatagaaatattcccatttcaatrtgcaaattcagccactatatagtttgtttctttttggtagctaataataataaatttttaagtaagatctgattttgaaatatgaaaagaagtttatcctttcctgttttaataccacctgatacccgtttaacttactgtgtttgattcttggggacatttatgttcaaggttctgtcaaagcaatctattattcttgtttttacctgatg

SEQ ID NO: 456725 - DNA, 506 bp, Homo sapiens
cctgatgaccttgaaattaaatgggtcatgtgaagctaaagattatagaaccccttgattcctttataaacagtatttctaagataagatcaacactaatctttcaaattagttgactgtgtatagaacaacttgtttatttaaagtcatctagtctaatgcaatcaaggagtaaattataaataaccagttagcataaatggaaagaaaatagttccttttctttgaattcatttcatgtttaatttttcttgcgcacatatagaaatgaatagaaatattcccatttcaatatgcaaattcagccactatatagtttgtttctttttggtagctaataataataaatttttaagtaagatctgattttgaaatatgaaaagaagtttatcctttcctgttttaataccacctgatacccgtttaacttactgtgtttgattcttggggacatttatgttcaargttctgtcaaagcaatctattattcttgtttttacctgatg

SEQ ID NO: 456726 - DNA, 571 bp, Homo sapiens
gactctatttttaaacaaaccaaatcaaatacattcaaagggatgttcactttcaaggtagtctccttaaaaaaactatacttattttaataaacatgctgacattattcagataatatttttaatttctttttgcagaattgccttaaaacagtttcacaggaaaattaatctacactgcaaattgctctctgttttttactaaaaacattagtcaaattaaacttttactttttcaaataacttttggcttaaatgtgaatttaaatatactctttaatgaaaaactattttctaccactaagattacataaaaggatgcattagagacagatttttaaaatattttgagcaatggccatactctggaataaatgcatattatgcaaagacaattgctttgaaggggtcatgtggaggtagttttggagaatttgtttagaactcagtcttgtttaccttaaagcaggggccacaaaatcaaaagctctcaytgagtgtattggtttgggaggaaggcaacaggaagtaagctaagtctgtcaagatcaggcatccactacttagcaac

SEQ ID NO: 456727 - DNA, 546 bp, Homo sapiens
accaatgtgtcatcatcctatctccgagaaaaaaaaaaaacaaaaaaaacacaggactgtgtttgggaaaggggggatgggcaaggactagcaaggagacacactcattttgaaaagtttctgggtgcctgcactaaactagcttcactctcattttgtcactaataactgggaraaaaaccctttcactttaatatttgttaaagaaaaaactactagataaaactcaagatacctattaaaaaggagaaactcatcaaacattaaaaaaaataccaattgggtactatacacttggtgcttttgcataagtaagtgatcttgtaaatcctttagtacactctgaggtaaaacaatcacggattatttcccctatatttttcagccaaggaaacagcatcaaggatgatttttttttactccatcaacgccacacaacttgtcatttgcagagttatgatccaaacctctaaatcaagtcttctgactcaagaggaataaccagttgcctctcatgctaaactgcactgcactaacagtgggcag

SEQ ID NO: 456728 - DNA, 608 bp, Homo sapiens
actccgtctcaaaaaaaaaaaagtgggggggggcaatataaagtccttcaacatacccagcacacatcaatattagctattattgttcttggaactaatggaaaacaaaaacaaggttagatgggaaagatatggccaaagtaaaggaccgtggaaggattgagttcagcagggtctaaagaatgtgcaagatagacgggggcttgctagagtcagagatgcccttgggaaggcagctgggccatcyggatgtggggtggtgtgcccctggcacagccgtagactatagtgtcatgggagaaagaaatggacaggatgagatgatggactacgacatcacatgaaaggcaaaaactagccaaagagggtgccaagggtttggaccaggttcaaactctacactagacagaaaatgtggcacaaaagagagaggagaagtgtgggaagaagatgaggtcatgcctttcctcctgtgcctgctgacttgacagtggctgtgagtgagtcagaaagttgggcagagactgcgggcctcaggaggctccagaccagggccctgcggaagagctggcccaaggaaatcaccatttactgagcatatactatgt

SEQ ID NO: 456729 - DNA, 463 bp, Homo sapiens
ctcccactccctgtcagcccaaactcccatctcttttttttagctcaggtcaatgtgttagtagtttcttctttctttaatgaagagtttttaatgttttcttatgcttaaagtcagctcagttttacatttcacagatcaaaggaaataaatacccagtaagtcaagttcctttttgcacagagcctttcagtgacatttcccctggagatccaggagcttcccctacagtagggtgactgggccactgcaggtctaaaacccagttagtgctacatcccattaaagagaggacagtgcctgcctgatagaattctgaatcaaataatgagccctaaaaaataaatacacatgtatgcatatttatatgtatgtatctaagtatatatatcatatgtattatgcatgtatatatgatatataatatgcatatgtatccrtgtattgtgtgtgtatatacgta

SEQ ID NO: 456730 - DNA, 610 bp, Homo sapiens
gagtctcagtttgagtgacttgaccagatcctataggtaagaagtaacaaaattgggatttaaacctgggcccatatgactctcagtacatgctcattctactacactgtgttgatgagggcattttggaccacaaagggttatagggcctcaaaccctcttaaatgtattattaatctgtaggtgctcattaacaaacaaaatagctgtaatgatgttacagatggaggactctggaacttcaagatcaccamagttgctgtatggtctgctgggtggagtgcccttcctaactcagaaatcaaaggcattgaagagtcttaggttttactgagataacttttctatcactgatcgggaacatttaagtgaagtatgagatgtgtgtataggatatttgtattgttttagacttaagcaatttgttcaaaatggttacctgtgggaataacttcattagttctacagaatccagagactggtgtggatacttcagtcagtaagcaagttcaactggcaggagagagggtgtttcaaagcatgacaggagttgctcatatcaccccttcaggctctcccatgaatttttccagaaaattctgaggtaagc

SEQ ID NO: 456731 - DNA, 597 bp, Homo sapiens
gctaactctgcaatcacattgcctaggtttgaatcctggcactgcttcttcccagctgtttgatagtagacaagtcatttgacctctctgtgccctagtttctgcatctgtagaataggaataatggtagattccctcataggattgttatgaggactatatatgattgactggcccatattaaatattatgagtttttactagataatatgaagcttacattctagtggaaaagatggataattacatatcatgataagtgaaaggaaaacaggttgatatatttgttatcctgatactgtttatatcttgtaacctttwtcctaaaaaaggatctgataaaatcatttatattatgaattgaacagtcttaataaatttatatttttatggaaggtaaaactcacattagatataaaaaattgttaaacctttgtgtactttggaatcatcttggagaacccacccccagagtccaagttggctgctagagttcctgctatcacatctactttccaggcagcagaaaggaggaagaaagaagaaagagtgtgccctctttgaagaagtctttcccagaagttccatgtaatattt

SEQ ID NO: 456732 - DNA, 567 bp, Homo sapiens
atagttttcaaatattttctcccattttgtaggttgtatttttactctgttgtctgtctcctatgctgtacagagctttttagtttgatataatcccatttgtcgatttttgcttttgttgcctgtgcttttaggatcttaccaaaaaatcattgcccagataagtgtcctgaagtgtttactctcttttattttagtacattcatagttttgggttatacrtttaagtctttgatccattttgcattttttaatatggtgagagataggggtctagcttcattgttttgcatgtggatatccactttttccagcaccatttattgaagagcaactatacaagagaaagaaataaaagacatctaaattgggaagaaggaagttaagttgtccctgtctgcagaccacatagtcttatatatataaaaccccagactccattaaaaaactgtcagaacctatacattcagtaaagttgcaggacacaaaatcaacatacaaatgtcaggagtgtctccatacactgtttgtgaattatctgaaaatgaaatcaacaatcacatttag

SEQ ID NO: 456733 - DNA, 675 bp, Homo sapiens
atatattacaccacagtttctttatccactggttgatttgggctgggttcacatatttgcaattgtgaattgtgctgctgtaaaaattaatgtacaagtatctttttcatataatgactaatttttggctaggtagatactcattaatgggattgctggatcaaatggtagttctacttttagttctttaaggaatcttcatactgttttccatagtggttgtactagtttacattcccaccagcagtgtaaaagtgttcctttttcactgcctatacaccaacatctattatgttttgatttttcaataatggccattcttgtgctagtaaaatgstatcacattgtggttttgatttgcatttccctgatcattagtgatgttgagccttttttcagatgtttgtgggccatttgtatatcttcttttgagaattgtctattcatgtccttagcccactttttgatggaattgtttatttcttgctaatttgtttgagttccttgcagattctggatattagttctttgtcagatgtatagattgtgaagattttctcccactccgtgggttgtctgttgactctgctgactgttgcttttgccttgccaaagctctttagtttaagtcccacctatttatctttgattttgttgtatttgctttgggttctt

SEQ ID NO: 456734 - DNA, 555 bp, Homo sapiens
agtagtggctgcttatgcctgaagagtaagaatttatatgtgaacatggaaaaaaggccacaagaaattctggscagcatcaggaaccaaagggcagggtaaggtgtctagcaggcaaaaatcaaaacgtgttcaaaagagtgggaagtggaaaggtttactcaaacagcaatgccctcagtggtggaataatttagttaggctgctctagctccatatatatgaccattaaaatcttctagatttaggtttttaggtaactggatcttcccaagttttaatttaaactgtagatcttgggatatttaagcttgactaggtctttagaggtccccaatccacctccatcataaggaaagtgactcttgaacaggtgaagtaattttctgaaggtcaaatatggccaattactaacttataaaagtaaccaaactaccacaaatattttcaagcatagatttcagtagaacttcaagagtcttttggttatacagaaacatatggaggtcttttaaaaatgacttatgtctgggtcccacttccaaagatacaaat

SEQ ID NO: 456735 - DNA, 555 bp, Homo sapiens
agtagtggctgcttatgcctgaagagtaagaatttatatgtgaacatggaaaaaaggccacaagaaattctgggcagcatcaggaaccaaagggcagggtaaggtgtcyagcaggcaaaaatcaaaacgtgttcaaaagagtgggaagtggaaaggtttactcaaacagcaatgccctcagtggtggaataatttagttaggctgctctagctccatatatatgaccattaaaatcttctagatttaggtttttaggtaactggatcttcccaagttttaatttaaactgtagatcttgggatatttaagcttgactaggtctttagaggtccccaatccacctccatcataaggaaagtgactcttgaacaggtgaagtaattttctgaaggtcaaatatggccaattactaacttataaaagtaaccaaactaccacaaatattttcaagcatagatttcagtagaacttcaagagtcttttggttatacagaaacatatggaggtcttttaaaaatgacttatgtctgggtcccacttccaaagatacaaat

SEQ ID NO: 456736 - DNA, 535 bp, Homo sapiens
tttctctctctatgttgagctgcctggagctgcaggaggggtgacacaaccacccctgtagctaccaccactgggactggactgggtcacacctgaaaccagcatagcacagattaaccagggcccatggtaactactctacctaccacctatgttcacttaagaccctaggtctctacaatcagaagggtggtgaatccagccaggcttgtgtccttcccttcagggtggtgatttttcccctgaccctgggtgatccaaagatgctatccatcagccaagtcctggggtcagaaaccttaggaatctacctggtgctgtattgtcctgcagctgagctggcacctaaggcacaatacaaagtccttcctactcttcccttccctttccacaagcagagaagcctcttgctgtggycactgaccctggcccatggagagtactgcctggctaccatcaatgttcactcaagccccaaggggtcttcagcttgtggtgaattctgtgaggcctggggctctccctttatagtgct

SEQ ID NO: 456737 - DNA, 430 bp, Homo sapiens
tcccgttgccttaggggtggatagtggacaaggtactaacaccaataaatgcctcaaagatttcatttgcttttgaacttgcagaaaygggagtgaagtgatttctgatttttcccttgggaaagcagaaagaaacccttcctcgtacagctgctcccatgagaaaaagttcaacagaaaacatattaaatgcccatttcccaagactctcaatcagagtggtaagaagcaaagggacgacgctacagaggtgtctgggaaactcaggctgattaaaggtagcctccttgacttgcaggctctgtgaaggaaagcacacctcataaatccttttggactgttttttggctaaactctcagatttatacgaagaactattttaaatgaatcagcgtgtctttgtttgcatcttctgagattctgaagactg

SEQ ID NO: 456738 - DNA, 492 bp, Homo sapiens
ttcctcttggccactgcagtttggattggtctgtaatcagtcaggacccgtaagtctttttgccagtgcttctgtgagcaagcactcttctcctgtgggcctgaacctggaagaacgtgtggctggagctgctatagccatcttgctgttctaattggtgaggcctatccaagaatggggctcagacagtgaaaacagagctaagaggggagaaggaagaaatcaggttctggtgtcacttttttttttgagacagagtttcgctcttgttgtccaggctagagtgcaatggcacgatctcggctcactgcatcctctrcctcccgggttcaaatgattctcgtgcctcagcctcctgagtagttgagattacaggtgcctgccaccacgactggctaatttttgtatttttagtagaaatggggtctcaccatgttggccaggctggtctcaaactcctgacctcatgtgatctgcccaccttagcctccc

SEQ ID NO: 456739 - DNA, 585 bp, Homo sapiens
gtcacctttatcacagtctaacgttgtgttattgctgtttcccatgtccacctgttacagtgataagacacagctgtactcctccagtatgtgggaagcaaatgagtctgaaagtcaggaggctgagcttctagttccattgttgtactaactatgcactcttaggcaaatattgcaaattctcttggttttagtgtcctcttctaaaaaaatgggaagtataatagacatggttccaatgaaatggaagctaagtcttacccccaggcattaggggttccttaggtcatagaaccaatatatagaaaaggggtaatatatccttaacagcagtaattagattgctgctacctagcggggayagacagggagagctatgtttagaactcagggattcaatgaacaacttcttagcattccttggcccactgttctggtgaatggaaaagtgcagccacccaataaagacaagattatcaatgcctcatatcctacacgcaacgaagtttgggtctctccaaatctactttggaaaataggcaaaagcatctttactatgggacaagtagcctgggacaaggaaaa

SEQ ID NO: 456740 - DNA, 582 bp, Homo sapiens
tggtgatggctagtagagtgaatttcaactttgcagtacacttccttcgtctttatacttcatatttagacattgaatcacactaatattttggtgaagaacagtctaataactacaaatatgtcaggattatttatttgtctccatacttacccaaccttcagtgtttcagggtaagtattcagttttccaaagctgacagaattgtggtcaagaaatattagttgataatcttatcctttttcgtggaacagctatctaaaattttactctaaaataatcacagtatctttgttcacgtascagatgtttataattcgggtaaaaatgtgcaactatttccaagaaccttaggttatgggatccaactgtgattttttttttttctttaatcttcgttgccctctcgtgtttcaactctgtattacagttggctaagacctagatgatgacctccttaatttttagatatttttgcattttaggcaatgttgtttttaatttgtgtgtaggtggattgtttcattggatgttgcttttctgaagataaggtcattttcatagtacgtaaagttaatagtt

SEQ ID NO: 456741 - DNA, 550 bp, Homo sapiens
atgtcaactcgcagggtgaaataatttgtttaaattttatttagtgacagaagatatagaaacctccgtcaaccgagacagctacaagaagaaacattgtggcatactcccaatcatgggagcctaccaaattcccaaagccctcaaggaggtacacagctccagataatgccttcttagaataagtttccaccagatctgagaaataatatttaccaagcttagagagttttcatactctcctggttctttttcattatgctggatttttctgcaactggctatgtgcctgcctgctcaccaagtgaaatcactggtacaaaacaatctcaacacattcctgagtgtttattgctcaagtgggggaattcaaggtcagcctcccatgagttctggtttcctgttccytggcagaaccaggtctcaaggctcgccgtgtctattccttgacaacctattggaatctgtctgaaaccagtcaaacaaaagacagagctagtcacggtagtgtgccagcatctattttagacatcaattcagaatgctacac

SEQ ID NO: 456742 - DNA, 550 bp, Homo sapiens
atgtcaactcgcagggtgaaataatttgtttaaattttatttagtgacagaagatatagaaacctccgtcaaccgagacagctacaagaagaaacattgtggcatactcccaatcatgggagcctaccaaattcccaaagccctcaaggaggtacacagctccagataatgccttcttagaataagtttccaccagatctgagaaataatatttaccaagcttagagagttttcatactctcctggttctttttcattatgctggatttttctgcaactggctatgtgcctgcctgctcaccaagtgaaatcactggtacaaaacaatctcaacacattcctgagtgtttattgctcaagtgggggaattcaaggtcagcctcccatgagttctggtttcctgttccttggcagaaccaggtctcaagrctcgccgtgtctattccttgacaacctattggaatctgtctgaaaccagtcaaacaaaagacagagctagtcacggtagtgtgccagcatctattttagacatcaattcagaatgctacac

SEQ ID NO: 456743 - DNA, 598 bp, Homo sapiens
ggttttataaagggctttcccctcttttgcttggcacgtcttgcagctgccatgtgaggaaggacctgttttcttccccttctgtcatgactctaagtttcctgaggcctccccrccatgctgaattgtgagtcaatgaaacctctttcctttataaattatccagtcttgggtatgtctttagtagcagcatgagaatggactaatgcaggccacttgtgaaaatattgaatttagaggacaaaaataagaaaaagagaatgtagagatgcaaaggaagaaggaaaagttggtaataagattaattataaatttctgggtatgtttatatttattgaatttcttttacatgttaggcttcattctgggtgtttgaagatacatcactaaataaaaccaattaaaatcttggcattcatgtaattgagagtataattcaggatatagaatataaaaaataaataaataaatgattttatactttaggaagaaaatttggaggggataggagcgtagcaatatgtgtgtagatgttgtgattacatataaagtggtcaagggaaatgacactgaaaagatatcattcgagtgaagatga

SEQ ID NO: 456744 - DNA, 598 bp, Homo sapiens
ggttttataaagggctttcccctcttttgcttggcacgtcttgcagctgccatgtgaggaaggacctgttttcttccccttctgtcatgactctaagtttcctgaggcctccccaccatgctgaattgtgagtcaatgaaacctctttcctttataaattatccagtcttgggtatgtctttagtagcagcatgagaatggactaatgcaggccacttgtgaaaatattgaatttagaggacaaaaataagaaaaagagaatgtagagatgcaaaggaagaaggaaaasttggtaataagattaattataaatttctgggtatgtttatatttattgaatttcttttacatgttaggcttcattctgggtgtttgaagatacatcactaaataaaaccaattaaaatcttggcattcatgtaattgagagtataattcaggatatagaatataaaaaataaataaataaatgattttatactttaggaagaaaatttggaggggataggagcgtagcaatatgtgtgtagatgttgtgattacatataaagtggtcaagggaaatgacactgaaaagatatcattcgagtgaagatga

SEQ ID NO: 456745 - DNA, 635 bp, Homo sapiens
ttgtccaaatatcgattggtatttagattttattctaatcataacactaaggaatgccaatttttaatttggattacactaatggtgggtcctgattcaaccaagccatcttatggctcttaggtggtattacttaatttgtcttagttctcattagttttttttttcctgtttttaaaattaatgcagcatgcactatcttgaaaaggaattcatttctcaacaagatgtactttggttcctatttggaccatattgaagatatatattacatataataaatattttgttctttgcttcatgatagatatcaaaataaataaatttcattttattttgcaagcatttatacagtatgcattatgtgccagcctctgtctgagagtgrcatatatgtacctattcaattaatcttcctaatggcccccatgtaaaacacttctattttaaacataaagaacctgagacaaaacctttgaagtaacttgcccaagatattacaacaaataaatgctagagctggtattgtatctctaggtcaatttggctccagagtacttacttgctcataagctttcagccatgttgtctatccttaacgttgtctgtcaagagttaaatatttatattttata

SEQ ID NO: 456746 - DNA, 538 bp, Homo sapiens
tggttcctttgtcttttcctcctgccccatcttccttgaacatttattttctgataaaagaaggtatttacttatttgaaatacatatgtatttttttatttgaaatacaatttgcttaacttgtttatrttatattttaggcccttttgcccccaatttttaatttttatttatttttgtctatgtcaaatattaaagtggctccaaaagtaaaactgtacaaaaaaggtatactcagaaaatcatattgccccctaattctttccagtgtattcctattccaaatctcatgagtttataacttctctttcctatgctttttctttcaaaagtaggttgattcttttatatattttctcttttttcttatatagaaataacagtttgtcaatattatttacacttagctttttttcactaaaaaattctgagaaatcattttatatttagtcaaagagctcttttataaaacctatccagtacttcattgtgtatgtaccacaattaaccagtatcctatatatttgcatttatatt

SEQ ID NO: 456747 - DNA, 413 bp, Homo sapiens
ggaactaagctcttcaaaagccttgattttagcccagtgaaagccatttcaaaattctgacttctggaagtataagataataaatgtgtgttgtctcaagtcactaaatttgtggtacaattgtcccttgatatccatgggggattgattccaggatccctgtggatgccaaaatcaataaatgcttatgtctttatgtaaaatgcttagcagttgcatataacctgctcacattctctggtatactttaaatcttctctagattactggtaatatctaatgccatttcaatgctatttaaatagtcrttatactgtattactttttacattgtttttaaaaacaatttaaacaataaaactttggttttattgttgaattgttgtttttttggtgtttttttttttcaaata

SEQ ID NO: 456748 - DNA, 631 bp, Homo sapiens
tttaattctaggtgatgctaacactaaaaattagataaccaacctgaaaaaggaaacatactctttttattctgggtaaggttcccagataaagtacrggccactaaattaaatatgaatttcagatacaaagttggtatatgtatgtccaaaattttgcatgaaacacacttatactaaaaattatttgtatctgaaattcaaatgtaactgagtgttctgtatttatatttgataaatgtcaatcctaaatctgaggaacataagatgtagcatgtcattaatattcaagaccacaaaatttcatcccagggcttcaaatactcaaagctttagatctgagcttgaatttaacacaggcaaaccaagccatttcctaaattgatgtattatctagagtgtctaaaataggcccataaatctgatttgcttaggtatatgaggaatgttcattagtagatacatgtttatagaaccctctatcctttggatatttaggataaggatgtgacccaggtttcataacacccctctttgaatactacggaaatgacccaattctcttggcctactgacagggtaattatgatatcttgtcaggaaaagattttagacctgttttaaaaaattg

SEQ ID NO: 456749 - DNA, 631 bp, Homo sapiens
tttaattctaggtgatgctaacactaaaaattagataaccaacctgaaaaaggaaacatactctttttattctgggtaaggttcccagataaagtacgggccactaaattaaatatgaatttcagatacaaagttggtatatgtatgtccaaaattttgcatgaaacacacttatactaaaaattatttgtatctgaaattcaaatgtaactgagtgttctgtatttatatttgataaatgtcaatcctaaatctgaggaacataagatgtagcatgtcattaatattcaagaccacaaaatttcatcccagggcttcaaatactcaaagctttagatctgagcttgaatttaacacaggcaaaccaagccatttcctaaattgatgtattatctagagtgtctaaaataggcccataaatctgatttgcttaggtatatgaggaatgttcattartagatacatgtttatagaaccctctatcctttggatatttaggataaggatgtgacccaggtttcataacacccctctttgaatactacggaaatgacccaattctcttggcctactgacagggtaattatgatatcttgtcaggaaaagattttagacctgttttaaaaaattg

SEQ ID NO: 456750 - DNA, 592 bp, Homo sapiens
aaaaatacctaaaggatgagttgcagtaaaacgtaggtccaaagtctcaattaagtaaccacatttacccaaagtccaaaatattgacacttttatgtattagaaatataaatgaaattcaaggtgagattaatatggcttatattcatagtaatatattttctactgtattataaatatcaatgaagaagcaccatatttaacagaaaatctataagaaatatgattggaagrcacattaacattttattaattacatcttttaggtcaagccaagaataagttgtcaaatactgactatgtaagtatagattttagatgatggaagagaaatgtaaaaaattatttaggaaaacaagctattaacagagatgtcatttagagaaaagtatagttagtaaacatatggaggggcaatgattgtttttgtaattctaaagacaaaaacagttctaaattttctgcatttgtaaaacttgtgttctagagaggagatagtgttgagagacattttaaataattaaatcagtgagacttggtaattaattgaaaaattgggttgaggaggaagaattcaaggatgactcccaag

SEQ ID NO: 456751 - DNA, 592 bp, Homo sapiens
aaaaatacctaaaggatgagttgcagtaaaacgtaggtccaaagtctcaattaagtaaccacatttacccaaagtccaaaatattgacacttttatgtattagaaatataaatgaaattcaaggtgagattaatatggcttatattcatagtaatatattttctactgtattataaatatcaatgaagaagcaccatatttaacagaaaatctataagaaatatgattggaaggcacattaacattttattaattacatcttttaggtcaasccaagaataagttgtcaaatactgactatgtaagtatagattttagatgatggaagagaaatgtaaaaaattatttaggaaaacaagctattaacagagatgtcatttagagaaaagtatagttagtaaacatatggaggggcaatgattgtttttgtaattctaaagacaaaaacagttctaaattttctgcatttgtaaaacttgtgttctagagaggagatagtgttgagagacattttaaataattaaatcagtgagacttggtaattaattgaaaaattgggttgaggaggaagaattcaaggatgactcccaag

SEQ ID NO: 456752 - DNA, 534 bp, Homo sapiens
accatgggcatttgagccactttctcatgtaacttacttgtgccttcaggacctcctaaaacccagtcacatacataccacttccacctgatgatgaatgctgctttgcatgcccaactttatggtgagatgggtcaggaagcacccagttcatgatacgcaggcagttcaggtcacatggtgacttgatgacccatatgcaaatgttcagtttccaccaaagcccagtaacaggccaagaactgtctttcaaaaggagagtagttatttgcagaagatggcagagacttgctccaaaatcttagaggcctctgctgtgattcacctatgggggcctgccaaaggctccaaagagcaaccctatttgccactgacacctcaagcactattggatctgctaggtcatgtgacccaagtggcagagcagcttgcactgcagcctggacctgttgcagagccttctyctgttctgaaccccactcaaaactggcaaccaataaatggaccagactaacacactcaaatgagaaatgt

SEQ ID NO: 456753 - DNA, 614 bp, Homo sapiens
gcaaaaaatcctccatcaactttatctttgaattttcaacctacagaaaagttgtaagaatagtacaactgtaagtgaattacagaattcactaatcattaacattttttcacatgtgcattctctctatgtgtgggtgtttcttgaactagttgagggtaataaatttcttctcctttaagtgctttggcatatatttccttaaaagattatctgatataaccataattaaatcatcatactcagttaatttaaccatgttaaatactaatatataatagtcaatatttaaatttctctgatttctccaataatgttacttatagctgtttgatgtttttcttgtttgtcgtttaatccaggaatcaatcaggaattatgtcaatcaagaattatgcatgaactggatttagtggttrgaagagtttacaaattctcatttattttaatttaactatttattctatcttttatgtcattaatatttttatatatccaggccaattgctttatagaatatccttcaatttgtctttgtccattgtatcttcataattagatacaggttaaagagttttggaggaactattacataggtgatttatctgttcatt

SEQ ID NO: 456754 - DNA, 582 bp, Homo sapiens
gaactagaagtagaaaagttgtatcatatggtgagtgtatgcttacatttataggaaactcacaattgtttactaaaatggttttcagaactataatttgtggggaccaggacacaatgaatatttggaattacttgtcaaaaagttatcaaaaatttcaaggtggtgacaacacagttttaagccaaacacaagactcttctaagccctatgtaactgcataggttgcatgcacacaaaacagccyttgtgtttataccatgtttcattataaccagcaatgtatgtgaggcccggttgctccacatgcttgccagcatttggtaatgttggtctctaattttgatcatttcaggggttaagtagtaatacctagttgtggtaattacgtatatttatcagaagaaaaaggatactattaataatcattttaatagccatttgcaaatgtacctgaagtaactattcttagctgttccatatttttactgagttttgtctttttattcatttttaatagttattttataatctgaatacacatgtgaaatgtctattgaagatattttttcataatgtgtg

SEQ ID NO: 456755 - DNA, 579 bp, Homo sapiens
cttttcctagcaaatataagaaaaaagaatcttaccactcattttatgaagccagcattgcattgatgcaacaactagacaaaacttaacagggaaaaaaatatacaccaaccccatttctcaacataaatgcaaaatcccctaacacaatattaacaaattgaatctggcaatacataaaaagaatgatacatcatgatgaagtggaatttacttcaggaatgcaagtttagtttactacctaaaaacaattaatcaaataaccatattcagagggtagrttaaaaaaagaaaagccatactatcatctcaataaaggcattcaacaaaatttagcacttattcttgataaaaacgaaataggagaaacttttctcaacctgatgaagtaaagttgtaaaaaaatcttgtgctaacatcatatgtatggtgaaagattcaatcatttacccctaaatctgggaaggatgtagggaggtcaactcacatcacttccattccaaactacactggaaacccaaacaaataccataatgcaagaaaaagaaatacaaaagatatagattggaaaaaataaat

SEQ ID NO: 456756 - DNA, 580 bp, Homo sapiens
tgtgtgcatgtctacattttcaatagaccttttttaaagaagttttagattcacggcaaaaaagagcagaagtaaagagtaacacatatggcctgaccctccacccccatccacgtccactgtcaacatccctcaacagagtggtaggtttattacaatcaattaatctacattgacaaattatctgcccaagtccacagtttacattagtggtgtttactcttggtgttataaattctatgggtttggacatatttatccctacatgtatctactactacagtatcccacaaaatagtttcaccaccctacaattcactgtgctttacctatrtttccctccccactaactcctgacaaccatggatctttttaccatctccatagttttgccttttccagaatgtcacatagttaagattctacagtatgtagccttttcagattggtttctttcgcttagtaatactcatttaaggttgttctatgtcttttcatgacttgatagctcatttgtttttagcactgaataatattccatagtcaggatgtaacacagtttagttatttattcacatgc

SEQ ID NO: 456757 - DNA, 580 bp, Homo sapiens
tgtgtgcatgtctacattttcaatagaccttttttaaagaagttttagattcacggcaaaaaagagcagaagtaaagagtaacacatatggcctgaccctccacccccatccacgtccactgtcaacatccctcaacagagtggtaggtttattacaatcaattaatctacattgacaaattatctgcccaagtccacagtttacattagtggtgtttactcttggtgttataaattctatgggtttggacatatttatccctacatgtatctactactacagtatcccacaaaatagtttcaccaccctacaattcactgtgctttacctatatttccctccccactaactcctgacaaccatggatctttttaccatctccatagttttgccttttccagaatgtcacatagttaagattctacagtatgtagccttttcagattggyttctttcgcttagtaatactcatttaaggttgttctatgtcttttcatgacttgatagctcatttgtttttagcactgaataatattccatagtcaggatgtaacacagtttagttatttattcacatgc

SEQ ID NO: 456758 - DNA, 593 bp, Homo sapiens
taccttcaaataatattatgtaccttgttgggtaaagcggcattgttctcattcatttcacttactcatacgttatattcatccaatatattattagtaacatagctttcaacaaaaagatgtcttttaaatcaattacaaatgagaaaaagaaaacacttcatttggtctgcatttatttcttctmtaaaattctccctttagagagaataaataatattcaaatatcttacctatatcattttccttctacctgaagaacttgttttagattcttgcaggacagttcctcctaatgaaattcctctggttttgtttgtctgagaaagtatttattctccacttttgacagataattttgctgaatataaaattctaaattggtggcttttttcttatttcaatcacctaaatatttctcactccatttactactgcctttcatagtatctgatgagttcactgaaattcctatctgggtttttctataggaactaacattgtgccccttcccactttatgacttcttcctttggtttttgttttctacagtttgagtatgatatacctagttatagtttattcattttgct

SEQ ID NO: 456759 - DNA, 575 bp, Homo sapiens
aataatcaacttgtcccttctattctccagtctttttacctctattgagaattgtgtttatgtctccttgacagacaacacaatgtaggagaattaactgaaaggaatcaagttctttctgatatctaaataatatcctattctcttaaacataccagaatatcactaatgaatatgttaccatactttcccaccagtaaaacacctgcgtcatcaactagaatcccaggaaaaaaagaaggtgccatacactgcattttagtatattttacaacctgtttctaatctgccataaaatgtgtgaccatgtgttttcgtcttttaaracaatttaaacattaatttgtgcagtagcaatagaaaaaaaaaacaagacaatttcaacagactgattgtgtaggtctaattaccaaagcattataaatcctgtgaaaatgcatactggtcttatttatgaaacaaagagctcatattctcagagggctttctagtgattagtacctctccccagtatctattttgagaaaaaaaaaaaaggcagactgaggtaaaatcggtataatgggcttattttc

SEQ ID NO: 456760 - DNA, 631 bp, Homo sapiens
tacacatgctttctcacaataacccataggtaggttgttcattgccccagttttatactagaaactaaatttagacctgtaaaattaagtaatttgaatctgggtgtctaagtccattcccactgctaaaacaaaataccacagactgagtgatttatatataagaggaattatttctcatagttctagaggctgggaagttcaagatcaaatccaagatttggcgtctgatgaaggctcactstactttcaagatggtaccttgatgctgtgtcttcacagggcggagagtggaaaggcaaaggatgcttccttcaacctcttataaggtcactaatcccattcatgagagtggagcctcataactttatcatctcctaaaagtttcccctcttaatacatcatattgaagtttaaatttcaccataggaatttgtggagacatattcaggccatagaatagagtatttgaaattataaaagtcagacttttcttttcttttttgatctttaggctgttttttatcctcaaaataccatggttatataaacatggtattgtatgtgcaatagactgaagaaaatttaaatgtcttgtggttttataaaatttattgaccagagaggaaaa

SEQ ID NO: 456761 - DNA, 633 bp, Homo sapiens
cggcgcgggggcccgctcacctgccagggcggcgccgcaggtggtgatgagcaccgccgccagcacccctggcgagggcgcgccgttcttgagcaccaggacgccgatgagcatggtgaccaggggcaggcagcgcttgaagaccacgtacatgggcaggctgaggccgcgcagggaccagagcgtgaggctggactgcagcgtggagagcaccgcgacccccgcgaaggagcgcgccaggctcagaccgaaggggggcacggcgatgagcccgaggcgccgcagcagctccaggctcagcgccgcggtggagctggtcaggcactgcaccagggtcaggaaggagaactggtagcggctgatgaggaacttgagcaagatgttgaggragcccgagaagaccccgtgcgcgatggccaccgagatgcccagcacgcggccccggcacagctgccgcatcgcgccggcctcgccgcacccagcggtggcggagctccgcgacctgcgcgcgaggagccgggagcagcggagtgagggcggcgggggcgcccgcccagcgcggcggcgaagggcagggggcgccggctcggctgcagagggcagctccggccaggcgttcttgcggttaggcag

SEQ ID NO: 456762 - DNA, 558 bp, Homo sapiens
ggtactgtgtattaaaaataatagtcttgttaaatgttaaaaatcgttcagacagccacttaaaatatctggagtatagattgtttcaagaagtaacaaacgaacaatagtagtatcaataatagtaaagatatttataataaatgaaataaaaacaaataatttttgattgtgtgaagatggatgagattgcaatttcaaaataaaaaatattttattggcatgatctcaagtgggacagaatagagatagagaagaaattcaaacaatgaaaagtgacaaatytgacaggtattttattcctttatgtcctgtattatacaccaaaatcagaatagcacagaccagtcacaaaaaggctgagacaggagtatatttaggtttctttataagatgattactattttattgatcaaatttgggttgaccacagttgaagtttaatgtaaaataatgtgagtgatagtaaattagaaatagctggaatttacctgggaagaaagctttattattaatatagattgaaaggacctatataagataacgaattacatagta

SEQ ID NO: 456763 - DNA, 549 bp, Homo sapiens
ctatgccaaccctttcagaacaagcaggatcttgaattcaggagacctgagaattcccttatcttctcaaaagatataagaactgttagcagatgaactaacctagaagaagaggatggacaggaaggctctttggggtgaggaaattgaagtaatcagggttcaagtagttaattccaaggctaggaaggtaatataagaaaggggtcataaaagtgatagggtacatttacttttaatgaaatggcaggaayccatatagccatgccctaggtaccacagctccttgccttagtatagaaactaatgtagcattttggccagaaacagacctacctttaagaagaaatcaaacacgctcctagattccagagtgaaataagaatcccagggctttacaccagtaaaattattaaaatttctacctaatcctggagtgtgtatgtgtttggggctctataaataactggtattacattttctaccaaccagccccatggaggggctaggagcaaattaaactggatttaaataaacgccttagtatgg

SEQ ID NO: 456764 - DNA, 549 bp, Homo sapiens
ctatgccaaccctttcagaacaagcaggatcttgaattcaggagacctgagaattcccttatcttctcaaaagatataagaactgttagcagatgaactaacctagaagaagaggatggacaggaaggctctttggggtgaggaaattgaagtaatcagggttcaagtagttaattccaaggctaggaaggtaatataagaaaggggtcataaaagtgatagggtacatttacttttaatgaaatggcaggaatccatatagccatgccctaggtaccacagctccttgccttagtatagaaactaatgtagcattttgkccagaaacagacctacctttaagaagaaatcaaacacgctcctagattccagagtgaaataagaatcccagggctttacaccagtaaaattattaaaatttctacctaatcctggagtgtgtatgtgtttggggctctataaataactggtattacattttctaccaaccagccccatggaggggctaggagcaaattaaactggatttaaataaacgccttagtatgg

SEQ ID NO: 456765 - DNA, 594 bp, Homo sapiens
atactgtaaactattagttactaaagctgacatcaaaatatccttgattccttctttcccctcttccatccaatatattagcaatcatagtgacttaatttccaaaagatacttcaaatttgttcacttcttccatcctcatagctactattagtccatgacaccatattcttcaacaagattactgaacctcagattggtattgcttcaagtcttgagcccgtgaaaccctccacattgcaggccacacctaaacattttcagttattctccagtatyctttgcacagtttcatggcatgacctttgccaatgacctgtgcctccatgtggctggcatacaacatgcatttaaatagctgctggctgactggaaatagctctccagtaacatgtctcactattctcttgccgctagtcctctgcactatacaattccctctgccaataattgtatttctacttttttttctcacttggctgtctcctaatgatctctcaaatggcattcctttgggtaagtactcttttgaaaaccttgataatcccaccactcagtggaatgcatccctccagactaggtaaattattctgt

SEQ ID NO: 456766 - DNA, 578 bp, Homo sapiens
aactcataagtgcccaagataggggaacagactaaaaaactgatacaatttctttggtgtgtctgaggacaggagtcttttgttacaaagcctccacccccacagccatgctgctttgcttttctaatccactgctttgctcctgggaatgatatgtattagccagccagaccatgtacccttcccttcctgctgtctcctgttaatctatttaagttttgtaatttgcactaatttgcacatattagatttcttcctggctttcttcagccttcagcatgcactagacaaagccattgaacgraatattctaatatcacatctcttctctcttttgaagcctctctacaaaatgtaggctgataatatgatcaaaagttaataatcagagtttacgtgatgttcttttttagcttcttttaattttccatttccctcagtgattaagactgtatgtttgtttgccctccaacgtcatttacagaggagtttttatcttttttcctaagtattgtcacatctaacagatttccataacctttgtattcttttaataatttgtgttgtggttaactttt

SEQ ID NO: 456767 - DNA, 620 bp, Homo sapiens
ggtttttgtctttcaatctgttattgtgatgtatcaccatttattgattaatgtatgttgaactatccctgcatccctaggatgaatctcacttgatcatggtgactgatcttttaaacgtgctgttaaattgggtttgctagtattttgttgcagatttttgcatccatgtccatcagggatatcgtattacagttttcttttttcataatgtctttggctttggtatcaaggaaatgctgggtttgtaatatgtgtttggaaatattacctcctcttcaattttttaaaagggtttgagatgagtataaacactttagttgtttaatagaactcatcagaaaagccatcagatcctgggcttttctttgataggagatgttttattactaatttgatccctactcattattgatctgttcagattttctatttcttcatgattcaatcttggtagaytgtatgtatctagattttttttttcatttcttctagggtatccgatttgttggcatatagttattcataatagtctcttgttgtccttcgtatttctgtgttatcagttgtaatatctcctttttcatttctgattttatttgagtcttctcttttttctt

SEQ ID NO: 456768 - DNA, 427 bp, Homo sapiens
taaaattgaaggtacaatttggaccccataataacatttgtgattttacacttttttctatatactacagaagaaataatattttgaatgaaagctgcacatcatttttgctatcatttctaacagaataaacatgtttagtatgctcatttattactaccacagagaaagggacaactagttatctcaagttctaggagtgtgagacgggaatgctcattttccaggatgaggttataatttgacactgaggaargctgagtttgacactgagaaatcttatctctaatcagagatatccaaagagtgagtaatataattagaattagattatgaaaaatgtttattcataagcttctggtttgtgaacttttcttttggttctgtgttatgtaagagccagacagaaacacaatgctttttgttc

SEQ ID NO: 456769 - DNA, 427 bp, Homo sapiens
taaaattgaaggtacaatttggaccccataataacatttgtgattttacacttttttctatatactacagaagaaataatattttgaatgaaagctgcacatcatttttgctatcatttctaacagaataaacatgtttagtatgctcatttattactaccacagagaaagggacaactagttatctcaagttctaggagtgtgagacgggaatgctcattttccaggatgaggttataatttgacactgaggaaagctgagtttgacactgagaaatcttatctctaatcagagatatccaaagagtragtaatataattagaattagattatgaaaaatgtttattcataagcttctggtttgtgaacttttcttttggttctgtgttatgtaagagccagacagaaacacaatgctttttgttc

SEQ ID NO: 456770 - DNA, 432 bp, Homo sapiens
aaattgtaaagaatttaaaatataatrttttgttcaaattgtatgtggggagcagaaaattaaaacatagacatggccaaaaatcctgtcagtaatgtaaggtagagaaaatagataaatattaaaataatgaaaatattagaatgtaattatgagtgacagaaaatgaagacctacgctaagcattgtaggtgctctgagaaataaaaatatttgaaagaaaagcatcttaaaatctttaatcagtgagcaattataaagatgtttttcaaattattttgtaataatctctagttgaatggtagcaacaatatgaattaggtaattacatgttatggaaatatcaaggttcatttgctgggctagtatacgggcaacttacagaaatactagaggtgtggtgaaaagaaggggtaataatgatattagcca

SEQ ID NO: 456771 - DNA, 432 bp, Homo sapiens
aaattgtaaagaatttaaaatataatgttttgttcaaattgtatgtggggagcagaaaattaaaacatagacatggccaaaaatcctgtcagtaatgyaaggtagagaaaatagataaatattaaaataatgaaaatattagaatgtaattatgagtgacagaaaatgaagacctacgctaagcattgtaggtgctctgagaaataaaaatatttgaaagaaaagcatcttaaaatctttaatcagtgagcaattataaagatgtttttcaaattattttgtaataatctctagttgaatggtagcaacaatatgaattaggtaattacatgttatggaaatatcaaggttcatttgctgggctagtatacgggcaacttacagaaatactagaggtgtggtgaaaagaaggggtaataatgatattagcca

SEQ ID NO: 456772 - DNA, 546 bp, Homo sapiens
ctaatatttgtttagcactgcagagcttataaaaccttctcccttcttatttaatttatatatccagacctacctgcggagttgcttaaggtcagaaaatccactagcaaagaagccagggctcaaaataataggttatttctccaaattccttggttttctcatcatcctgcacagtcacctattaagctatgtactgaattattctatattattttacttaattattgataataatactttattgaacctttattttgtgccatgcatttttactttatattttgaataagtaattctgcttaatccttacaataacctgrtgatgtagacaccgtttttaaaaatatactctctaatataagaagttatagaaacaattgtctacatgcagaatatatgcccacattctttctcaaatacaaatgaacagaatcactttatttttctttttgtagtaaagaaaatttaataattttttaaagttagtgtaacaaatttactatgttttaaaaagtaaagttttaaaactgtataaactcagaa

SEQ ID NO: 456773 - DNA, 509 bp, Homo sapiens
aacatttgtcatgtcatatttttcagaattaaatataagattgagctgacctttgaacaaaaacaaacacataaacaaaaccatttagagcctcacagatgaataatccacagaaaagaatgatgctgatattcctgatcagaatgccactataaatccaaaggatgcatatcctgaactgaatacagagatcacggcaactgtcaaccaaataaactaaatggcagtgktatgcaagacggggaatgggttgtgttgtgggtgatggggatataggaatgaacaagacaaacagtaaacttgtctttaataagcttatattctaatggcaggaaactaaattatcaaagaaactattcaatcattttaggtacagtgtaccatgacaggcacaaataggataatgtgttagagagagactcaacgaatgagaagcagcttgaactagggaatgaacaagattcttctaggaattgatgagtttgatctaaatgacaagaagaaaacac

SEQ ID NO: 456774 - DNA, 509 bp, Homo sapiens
aacatttgtcatgtcatatttttcagaattaaatataagattgagctgacctttgaacaaaaacaaacacataaacaaaaccatttagagcctcacagatgaataatccacagaaaagaatgatgctgatattcctgatcagaatgccactataaatccaaaggatgcatatcctgaactgaatacagagatcacggcaactgtcaaccaaataaactaaatggcagtggtatgcaagacggggaatgggttgtgttgtgggtgatggggatataggaatgaacaagacaaacagtaaacttgtctttaataagcttatattctaatggcaggraactaaattatcaaagaaactattcaatcattttaggtacagtgtaccatgacaggcacaaataggataatgtgttagagagagactcaacgaatgagaagcagcttgaactagggaatgaacaagattcttctaggaattgatgagtttgatctaaatgacaagaagaaaacac

SEQ ID NO: 456775 - DNA, 562 bp, Homo sapiens
tttgggctttaaactgtccttggcttggaggtggagtttcactcgagagtttcacccttatctacctaggcatttgtctgcctcctgcccctatcaaccacattaattcacttcaccaaatttgacattaagtaatacagtttatttctcaatccataatgtcccactaattttgccatttttaagacatacttttaacatacatgacttcttatatatgtgaacagatattaatacaggtatattataaatsattcagatagagacctcagccaaacctatagattaaactcctctaaagcaaattcaaaagccattgcatgtagtaaatatggttaaatgtcactaagttaaaattaagaataactctatcaaattatgttgtgggaaagtgaaaagagaaattactgtcatgaagaagattttttcccttgtaaagcaaataaaaaattaatgtgaagagtgcatgaatataaaatgttggtgcaaaaataaaaggaaaataatactatgtaaaaaagagaaaacaatattgggttaacaaaaagtcaatggttctcat

SEQ ID NO: 456776 - DNA, 595 bp, Homo sapiens
aattttctgggtcagggattttgaaacagttcagctaaatagttctcacttgaattcttcatggagtttcagtctgatgttgattattatcaaattatctaaagggtgatttggttatgcatccaattgggcctattctcagggctggcagttgatgctggttattggctaggtgtgttggcagatgtttctacatgtgacttcttcagggtggtagtaccagaacagtaagaattgttacatggtgggggcttcaccaaaaataggtgtcccagagaaccaggagaatgctgcatcactctttataacttactttcagaagtcacatagtgtcacttccatcatcatttatgggtcaaagcagtcacaagtccatcagattcaaggaggaaaacaaacaaacmaaaaaacccacttcttaatggtaggagatgtgtagatatttgatttttagacaagttttaaaactttcaacatgactaataccttatttggcaataacgattattctaaatgaaatgtctacagacttaattcttaaaattaaatatagaggtgttaagcgagtgaatattccactattaatatgaaaatg

SEQ ID NO: 456777 - DNA, 595 bp, Homo sapiens
aattttctgggtcagggattttgaaacagttcagctaaatagttctcacttgaattcttcatggagtttcagtctgatgttgattattatcaaattatctaaagggtgatttggttatgcatccaattgggcctattctcagggctggcagttgatgctggttattggctaggtgtgttggcagatgtttctacatgtgacttcttcagggtggtagtaccagaacagtaagaattgttacatggtgggggcttcaccaaaaataggtgtcccagagaaccaggagaatgctgcatcactctttataacttactttcagaagtcacatagtgtcacttccatcatcatttatgggtcaaagcagtcacaagtccatcagattcaaggaggaaaacaaacaaaccaaaaaacccacttcttaatggtaggagatgtgtagatatttgatttttagacaagttttaaaactttcaacatgactaataccttatttggcaataacgattattctaaatgaaatgtctacagacttaattcttaaaattaaatatagaggtgttaarcgagtgaatattccactattaatatgaaaatg

SEQ ID NO: 456778 - DNA, 589 bp, Homo sapiens
taagcgagtgaatattccactattaatatgaaaatgtctaatagccaaagaccacatttgcttttaattatactttttgccacactataaagtaggtatgaaatcaagagaaatttttatttgattcagagaacaccagaaaaaatgtgtatactaaagtttcatgttttcctacctaaaatatgaagtttaaacatttatagaaaattaatcatgtaattacctgctatgtagactcagctttaaatgattgttaatttttgcttaaatggtcaacgtaccccaataggaaaataaatctaattagtcagtgtgtaaaaatcaattatccrtatgaaaatatcttcaattatagtagtcattacggaaagtttttatatccaaaggcaatgaaaaacaatggaagaaatactacatattaaataaaaattcaatatgtgttactttttaaatgtgacatttagaatgttattagttaaataatagaggctgacataaaatatctgctatcccaaagggaaatgccgagggatacctccctactaccagatgcattgcaaaagaggacagcatgctctttagtgctgtt

SEQ ID NO: 456779 - DNA, 589 bp, Homo sapiens
taagcgagtgaatattccactattaatatgaaaatgtctaatagccaaagaccacatttgcttttaattatactttttgccacactataaagtaggtatgaaatcaagagaaatttttatttgattcagagaacaccagaaaaaatgtgtatactaaagtttcatgttttcctacctaaaatatgaagtttaaacatttatagaaaattaatcatgtaattacctgctatgtagactcagctttaaatgattgttaatttttgcttaaatggtcaacgtaccccaataggaaaataaatctaattagtcagtgtgtaaaaatcaattatccatatgaaaatatcttcaattatagtagtcattacggaaagtttttatrtccaaaggcaatgaaaaacaatggaagaaatactacatattaaataaaaattcaatatgtgttactttttaaatgtgacatttagaatgttattagttaaataatagaggctgacataaaatatctgctatcccaaagggaaatgccgagggatacctccctactaccagatgcattgcaaaagaggacagcatgctctttagtgctgtt

SEQ ID NO: 456780 - DNA, 671 bp, Homo sapiens
tttacaatgtttttaatttttgttaatcaagtagataaaaaagaaattatattgcttatattgaatttccattagtatattttcaagtgtttattggccatatgaatttctttatctgttacttgttcatatctttttcccttaaaaagcatatgcaaaatcaataataaaattgattattttttaacttttggtcttgtaagaactccttctgtagtttgtgcattaagaattttttctgtatgttatgaatatatgttatataacagatataatacatatttcttatatatttctaatatataagactatatttttatagtcttgctcatttttaaactttataacatttttgtcgtaaattgttttgattttcaggtaaacacaattgtctaccacttcctttagaacatttaggtcttacttcttgtttagaaagaacttctgcatgccaaagttataagattatttgcttatttttataaaacttatattattttgcccatttacatcttaggccaatttggaatttgtttttatatatatgtgagcakagtatctaactttattcttctttcacagatgagtagccaacttttctgtcacaatgtgttgaactaatcgatgaaataatttcataacttttctgctgattggaaatgcgaatttta

SEQ ID NO: 456781 - DNA, 594 bp, Homo sapiens
aagtccagtctgaatacttatcaatttctaagccactgttttcccagagtctgagccatgacccctctctccccacatcattttgtggagcaggttgtcagagggagggatcagacagggtatgccctttctgggagactcctgcttcctaccacacttcactgtcctcagctggaaggaggcctttctcaacccttcttggcctggaagcctctgtactgagaggttcaggaaatccaggcaatgattgatggtttgttcrtgtcagcagagcataggaaaagcttcttttcagataggagattaagctcttttcattttgggatcaaaagcaagaagaaagagatgcatttcatatgcaatctgagttcttttaaagagtaacaccctcctctcaccttcctctaccctcactgtgttggagtggcaccaggagtctgcgcttctgccagctgcaatttctccttgtacccgctggaagccaaccaggatggctgccggcctggtcctgccgagtcctgtcccttgttgatgggctccagggagcaattggccctgggcctggcagcccacctgacctccctgcattatccg

SEQ ID NO: 456782 - DNA, 589 bp, Homo sapiens
ccagtctgaatacttatcaatttctaagccactgttttcccagagtctgagccatgacccctctctccccacatcattttgtggagcaggttgtcagagggagggatcagacagggtatgccctttctgggagactcctgcttcctaccacacttcactgtcctcagctggaaggaggcctttctcaacccttcttggcctggaagcctctgtactgagaggttcaggaaatccaggcaatgattgatggtttgttcgtgtcagcagagcataggaaaagcttcttttcagataggagattaagctcttttcattttgggatcaaaagcaagaagaaagagatgcatttcatawgcaatctgagttcttttaaagagtaacaccctcctctcaccttcctctaccctcactgtgttggagtggcaccaggagtctgcgcttctgccagctgcaatttctccttgtacccgctggaagccaaccaggatggctgccggcctggtcctgccgagtcctgtcccttgttgatgggctccagggagcaattggccctgggcctggcagcccacctgacctccctgcattatcc

SEQ ID NO: 456783 - DNA, 500 bp, Homo sapiens
gtgtcatatgtgaacaagaataatttgactactttctttccaatttggatgctctttatttctttctcttgcctaattgctctggccaggactttgagtgttaagccgaataaaagtggtgaaatgratatccttgtaaagggaatactactgaatgctgctgcccccggagttccaacttaattccatctctctgttttatgccagagaattttggcatctcaatttcacttatcatagaccagtgttgagtccaaattttagtcaatcaagcaaactgttgactactaaagccaatgcattaactacagattcccatatattgattaatatattccctatattgatcaattctgccttatgcaaggttatttctatcctccttggaatctactcctaaacataaatacatattttctgggtttctaataataaaaatgagcagaaacacacaattcttttggtgtgtatagcctatgtcctcttgcatgagactttcc

SEQ ID NO: 456784 - DNA, 500 bp, Homo sapiens
gtgtcatatgtgaacaagaataatttgactactttctttccaatttggatgctctttatttctttctcttgcctaattgctctggccaggactttgagtgttaagccgaataaaagtggtgaaatggatatccttgtaaagggaatactactgaatgctgctgcccccggagttccaacttaattccatctctctgttttatgccagagaattttggcatctcaatttcacttatcatagaccagtgttgagtccaaattttagtcaatcaagcaaactgttgactactaaagccaatgcattaamtacagattcccatatattgattaatatattccctatattgatcaattctgccttatgcaaggttatttctatcctccttggaatctactcctaaacataaatacatattttctgggtttctaataataaaaatgagcagaaacacacaattcttttggtgtgtatagcctatgtcctcttgcatgagactttcc

SEQ ID NO: 456785 - DNA, 607 bp, Homo sapiens
gagtacagaaactggtctagggacagagaaatattatcatgaagataacatggaagatgtgaaagacatgcggtttgaggaggaaagaagatagaaggaggaagagagggaacagcagcatgtcaactccccatttcttctaaggctcattataattttttctgacaattttgctttaggagatctctctrattttttttaaataaattctattttattcaaattagcttgagtgaacatctgttccttgcaaccaaaatatctctaagacatctcatttactcagtttacctctttaattcttatacaatggctagtataattagattgaactactagccccttctccagacctcctgtagtcctgacccaaaagcaagaatcctgtttaagagaaaggccagcctctgttgggactgtatttggcaagtaataattcataatgccaatttataaatgtgatcttggctattcctgactactttttgctctcttcaaatctgtttggtctcacaatatgtaggaatcacaggcagctggcatgagaaactcatggtggctttgagacttcaacaatatgcctgttcccctggctgtggcctgagaa

SEQ ID NO: 456786 - DNA, 555 bp, Homo sapiens
gtcagcattatgcatttgtaaacatgtacaacagctgattttatgacataaatcttgatatccattttaaagygatatatgaaaccataaactaaatcaaaatactgaagtaaagcttgtgtatcaatatacaaaattgttttatatatatatatgtatatatgagtaaaacatttaaagaacaacctcaacaaagcaattaagttaggcttggttagaggtcttaattatatgtctcggctgagggaaaaaaactgacagaagattcagagaaaagaatgttaaatctaatagttatggctacagtaatttaaaaaaataagctccttagaaacacaactactaactaaaatttaatacctcagatctcccccaattacaattaaaaagtgttcatgccaagaataacacttaccagtaataccttcttctagaagatctgtcattttgcaacacgatgccaaaagcttagtggtaaattcatctaaaagcattatcttaaaacaaacacaaatttaaaaatactgtaagcatcctattaccaagaatgaaaaa

SEQ ID NO: 456787 - DNA, 622 bp, Homo sapiens
aaccctttcgggggggccaccaggtccttcctttaccagccatatagctgtgcaacgctagtattacaggcaactgatggagatgcagttatggaatccagttgccttttattaagccagatattcaagatatttgccaaaacgtaaaatgatgccactcttctcactaaattttttagaaatagttattttcattaaaaactgctattttgttaatatgacatggatttattactttttaaatgccataataaataaaattatcttttaaacstctcagtttaaaattctaaaaaaaaagcgccttggaactgctcatttagttttgggaaatctaaatgatttgcacaagcaaaaaatgactagtaatctatacattagtacttctctaccaatccatctgcagtggactgaatgttgaatgctagctgttctccaatgaggggggattttcacctcaggtatataaaatggtatatattatcattttatggtagattaaaaccacagaaacaaaggctgtttagggtcctcaattttaagagtgtaaaagggttctggaatcaaaagtttgaaaactgttgccagtgtatgtcacataactctcacaacatccctgtaa

SEQ ID NO: 456788 - DNA, 622 bp, Homo sapiens
aaccctttcgggggggccaccaggtccttcctttaccagccatatagctgtgcaacgctagtattacaggcaactgatggagatgcagttatggaatccagttgccttttattaagccagatattcaagatatttgccaaaacgtaaaatgatgccactcttctcactaaattttttagaaatagttattttcattaaaaactgctattttgttaatatgacatggatttattactttttaaatgccataataaataaaattatcttttaaacctctcagtttaaaattctaaaaaaaaagcgccttggaactgctcatttagttttgggaaatctaaatgattygcacaagcaaaaaatgactagtaatctatacattagtacttctctaccaatccatctgcagtggactgaatgttgaatgctagctgttctccaatgaggggggattttcacctcaggtatataaaatggtatatattatcattttatggtagattaaaaccacagaaacaaaggctgtttagggtcctcaattttaagagtgtaaaagggttctggaatcaaaagtttgaaaactgttgccagtgtatgtcacataactctcacaacatccctgtaa

SEQ ID NO: 456789 - DNA, 622 bp, Homo sapiens
aaccctttcgggggggccaccaggtccttcctttaccagccatatagctgtgcaacgctagtattacaggcaactgatggagatgcagttatggaatccagttgccttttattaagccagatattcaagatatttgccaaaacgtaaaatgatgccactcttctcactaaattttttagaaatagttattttcattaaaaactgctattttgttaatatgacatggatttattactttttaaatgccataataaataaaattatcttttaaacctctcagtttaaaattctaaaaaaaaagcgccttggaactgctcatttagttttgggaaatctaaatgatttgcacaagcaaaaaatgactagtaatctatacattagtacttctctaccaatccatctgcagtggactgaatgttgaatgctagstgttctccaatgaggggggattttcacctcaggtatataaaatggtatatattatcattttatggtagattaaaaccacagaaacaaaggctgtttagggtcctcaattttaagagtgtaaaagggttctggaatcaaaagtttgaaaactgttgccagtgtatgtcacataactctcacaacatccctgtaa

SEQ ID NO: 456790 - DNA, 622 bp, Homo sapiens
aaccctttcgggggggccaccaggtccttcctttaccagccatatagctgtgcaacgctagtattacaggcaactgatggagatgcagttatggaatccagttgccttttattaagccagatattcaagatatttgccaaaacgtaaaatgatgccactcttctcactaaattttttagaaatagttattttcattaaaaactgctattttgttaatatgacatggatttattactttttaaatgccataataaataaaattatcttttaaacctctcagtttaaaattctaaaaaaaaagcgccttggaactgctcatttagttttgggaaatctaaatgatttgcacaagcaaaaaatgactagtaatctatacattagtacttctctaccaatccatctgcagtggactgaatgttgaatgctagctgttctcyaatgaggggggattttcacctcaggtatataaaatggtatatattatcattttatggtagattaaaaccacagaaacaaaggctgtttagggtcctcaattttaagagtgtaaaagggttctggaatcaaaagtttgaaaactgttgccagtgtatgtcacataactctcacaacatccctgtaa

SEQ ID NO: 456791 - DNA, 592 bp, Homo sapiens
tatggaaggggtttatgaattttttttttgtagagacagggaagactggtcgcaaactcctggcctcaaacaatcctcccaccttagcctcccaaagtgctgggattacaggcgtgagccaccgcgcccagcaaaagttctttgttgtctatgtttcccagttttctgatttattaaaattttatgaaatatttcattcatacaaaaagttcaaggaatgatacataggcaccatttggggctcatttttgatactctgaatttaatgatagctaacatttttcagcttttttaaaacccaarcggatctgttctcagagagtgaattcaaaatcctttaaaggtgaacatgagcccacaccaggaaagtaagtattatttcattatcagtaacgaaatatttctcattggttgggtggatacagtgtacttgatagtgcattaactacctaccccaaggtaacctagatgattaggagtagagccaggattcaaacctaaacctatctaatccttcaatcattcatttgtttattcaataaaccaagtcattgtactaggtactgagaacacaggacaaagtcagccactg

SEQ ID NO: 456792 - DNA, 592 bp, Homo sapiens
tatggaaggggtttatgaattttttttttgtagagacagggaagactggtcgcaaactcctggcctcaaacaatcctcccaccttagcctcccaaagtgctgggattacaggcgtgagccaccgcgcccagcaaaagttctttgttgtctatgtttcccagttttctgatttattaaaattttatgaaatatttcattcatacaaaaagttcaaggaatgatacataggcaccatttggggctcatttttgatactctgaatttaatgatagctaacatttttcagcttttttaaaacccaagcggatctgttctcagagagtgaattcaaaatcctttaaaggtgaacatgagcccacaccaggaaagtaagtattatttcattatcagtaacraaatatttctcattggttgggtggatacagtgtacttgatagtgcattaactacctaccccaaggtaacctagatgattaggagtagagccaggattcaaacctaaacctatctaatccttcaatcattcatttgtttattcaataaaccaagtcattgtactaggtactgagaacacaggacaaagtcagccactg

SEQ ID NO: 456793 - DNA, 592 bp, Homo sapiens
tatggaaggggtttatgaattttttttttgtagagacagggaagactggtcgcaaactcctggcctcaaacaatcctcccaccttagcctcccaaagtgctgggattacaggcgtgagccaccgcgcccagcaaaagttctttgttgtctatgtttcccagttttctgatttattaaaattttatgaaatatttcattcatacaaaaagttcaaggaatgatacataggcaccatttggggctcatttttgatactctgaatttaatgatagctaacatttttcagcttttttaaaacccaagcggatctgttctcagagagtgaattcaaaatcctttaaaggtgaacatgagcccacaccaggaaagtaagtattatttcattatcagtaacgaaatatttctcattggttgggtggatacagtgtacttgatagtgcattaactacctaccccaagrtaacctagatgattaggagtagagccaggattcaaacctaaacctatctaatccttcaatcattcatttgtttattcaataaaccaagtcattgtactaggtactgagaacacaggacaaagtcagccactg

SEQ ID NO: 456794 - DNA, 456 bp, Homo sapiens
gccaagtactaagagacaatatctagcacacattcttacactaaaatcaattccagatgggtgagttacctgtaaaaaaatagaatgaatctatcaaaaatttataatcctggagtgtggaargtatttctaagtagcatgtgaaattcagaagccaaaatggaaaagcgatggatttacttaaataaaaattaaaaatggatatccatcaatatttaaatgcacaaatcccttgaccactgctaggaatttacattatggaaatgtctgtgtaagtctgcaaaggtatgtacccaaacaacgcagcattatttataagagcaaaactctcaatcaataaaactatggtctgccatatgacagaacactatgagggcaagtaaaagaagagatttgaaacaaagatgttccctttgtttaacaaaacacatctgcagacatatattatctaaccct

SEQ ID NO: 456795 - DNA, 456 bp, Homo sapiens
gccaagtactaagagacaatatctagcacacattcttacactaaaatcaattccagatgggtgagttacctgtaaaaaaatagaatgaatctatcaaaaatttataatcctggagtgtggaaggtatttctaagtagcatgtgaaattcagaagccaaaatggaaaagcgatggatttacttaaataaaaattaaaaatggatatccatcaatatttaaatgcacaaatcccttgaccactgctargaatttacattatggaaatgtctgtgtaagtctgcaaaggtatgtacccaaacaacgcagcattatttataagagcaaaactctcaatcaataaaactatggtctgccatatgacagaacactatgagggcaagtaaaagaagagatttgaaacaaagatgttccctttgtttaacaaaacacatctgcagacatatattatctaaccct

SEQ ID NO: 456796 - DNA, 456 bp, Homo sapiens
gccaagtactaagagacaatatctagcacacattcttacactaaaatcaattccagatgggtgagttacctgtaaaaaaatagaatgaatctatcaaaaatttataatcctggagtgtggaaggtatttctaagtagcatgtgaaattcagaagccaaaatggaaaagcgatggatttacttaaataaaaattaaaaatggatatccatcaatatttaaatgcacaaatcccttgaccactgctaggaatttacattatggaaatgtctgtgtaagtctgcaaaggtatgtacccaaacaacgcagcattatttataagagcaaaactctcaatcaataaaactatggtctgccatatgacagaacactatgarggcaagtaaaagaagagatttgaaacaaagatgttccctttgtttaacaaaacacatctgcagacatatattatctaaccct

SEQ ID NO: 456797 - DNA, 284 bp, Homo sapiens
aaaccatatcaaagagtatattatgatccatgctgatatgaaggaaaattattctgccttggtatgagatggattgtgaaaragaaggacaagatttgctgatttattcaaaacatatttactgcatgcttacaatatactggccctcttctaatcaatggctgtactgtagagagcaaagtagataaagttttgctctcaagagacttaaattctataagaggcagattgtgctaagcaggaaatggcccctcaaagacatccatatcctgggccaggtgcgg

SEQ ID NO: 456798 - DNA, 583 bp, Homo sapiens
aacatgggatgtaacttgctactatgctctttatttttttcttttaaccaggtacacatccaagcctaaagaaaaattagtctatgccatttttcttaaatggcccacatcaggacagctgttccttggccatcccaaagctattctgggggcaacagaggtaagagggaattttaccttattcctttaaattgctgattagaacatcttgatgcaaacattaacttttaaggggagccttataactgtttcacttatacttcataaaaggaattgtaaatgagctccagccaagcattgtggctcacactgtaattccagcactttgggaggctaaggcaggaggatgtcttgaggccagaagtttgagactagcctgggcaacatagcaagacccctgtctacaaaaattttttttaaagttagctgagcatggtggcacgcayctgtagtcctagttactcaggaggctgaggcaggaggattgcttgagcccagtaggtcaagactacagtaagctatgactgcaccacttcagcctgtctctgaaaaaataaaataaaatataataaaataaaatgaa

SEQ ID NO: 456799 - DNA, 547 bp, Homo sapiens
aagcttataaaaagcttgtttgatcttgaagttttaaaaattatacagtcaaacctagmcttcttttatataaagttctttactttcattcttagaaataccttctccatcttgaggtcacatagtcacctgttttcgatcagtatatttgtttttacttagtatatttaaatgcttaaacctcctgaattttattagtcattgtaaaatgactaattgttattcgtcttaccaacatatattttgcccacaatcattactaacatcctacaatttttagggctacttctggattttacattctatttcactgacttacctattattttatgagtaacaataattataccttatattatatattatataggaaaagcatatccattgctcttcttttccaataactgcttaaacattctcattccattattcctccatattacctttattatcatttgtcaggtttaagatgaaaaaaatcaaccatcctccaatctccaatagaattttgataatattttgattatattttagattaattttggaa

SEQ ID NO: 456800 - DNA, 603 bp, Homo sapiens
attcattataaattaccctgtctcagatattctgttacagaagcataaaacagactaagacacatgccttctcttctgtgtgtctattttctcctcttctgtctctcataaggaaacttactggatttagggcccacctgggtcatccaggagtatctcatcttaagatccttaacttaattacacctgtaaagrtctttttttcaaataaagtcacgttcacaggttctggaagttaggacatagacatatcttttgaggagccactatgcagtccactacacaattgcttgagaatgtcccttgtatttgaaaaaatacttttagcatttttcagattaagtagtagtttattaatgtattaatagcactaaattagttgacagaaaacagaaagggaaaatgtttgttctgaggctcaatcaagaggaatacaaaacccattgaccttttgtaggcattgactggttctgtgaggtctgcttcaccttccagcctcgtctcctggctcacttctcctccatctctgcacttccataaacgcatctagctagatagcaagttgctctccttatgtctctctgtaagtcttttgtttgagaa

SEQ ID NO: 456801 - DNA, 627 bp, Homo sapiens
ggcagcacagtgagaccctatctctaaaaaaaattttttttwaattagccaggggtggtggtctgcacctgtggtcctagctactagggaggctgaggcaggaggatcgcttgagcccaggaggttgaggctgcagtgagctatgattataccactgcactccagcctgggcaacagagtgagaccctgtctctaaaaaacaaatgaataaataaaaataaaaaagaatgctttctactagaaggttaaatcttcttgaaatgatgtaacatatggcatgttagatactacataaaactcctcttataaaatgctgctgtgggcattcagtgtttgtgttaagtatttaattccttgctttgtaccttccaacaaggaaggctggtattgaagaagggagagaagaaaggatttgtggcataacttgttgctacagtttgtgtcacttcgagcagccattaaatacatgacttgcatgaagcactggttattaagaagacctaggaatgactttttgtgagaaagacttggagttcaagagttctctccaatgtgaaccatctcagttctttccctgctccaaaggctgatccataccagtgtatttctggcttagttccatcacta

SEQ ID NO: 456802 - DNA, 479 bp, Homo sapiens
ctaattatttaattgacattaacatacttcaatcatctgtttgtctagttatcaagtaaagatactaaaaataagtacatttttaaaggttcacaattgaccactaatgtctctattctgaaattaaaatatcagaggctatcgaaacattttcgacattgcatcctaacgtgaagatgaaagcatcagaccaaagagctcttaygctgttacactgtgcatattgtaatatttacacagaatttttgctcagctcattaacttaattccatctaccttgtgccatcccttagtaatagttttttcactaactgtatgcattttccacccatcgctctgagcacaaaagaatcaaacaccacacttgcttcagcctaaatagcagtagtcttcacaaaaggtgaatttggaatacaatctgcattcccagttcctaaacttcaaagtaaacactaattgtcttgtggacaatgcatcgg

SEQ ID NO: 456803 - DNA, 479 bp, Homo sapiens
ctaattatttaattgacattaacatacttcaatcatctgtttgtctagttatcaagtaaagatactaaaaataagtacatttttaaaggttcacaattgaccactaatgtctctattctgaaattaaaatatcagaggctatcgaaacattttcgacattgcatcctaacgtgaagatgaaagcatcagaccaaagagctcttatgctgttacactgtgcatattgtaatatttacacagaatttttgctcagctcattaacttaattccatctaccttgtgccatcccttagtaatagttttttcactaactgtatgcattttccacccaycgctctgagcacaaaagaatcaaacaccacacttgcttcagcctaaatagcagtagtcttcacaaaaggtgaatttggaatacaatctgcattcccagttcctaaacttcaaagtaaacactaattgtcttgtggacaatgcatcgg

SEQ ID NO: 456804 - DNA, 339 bp, Homo sapiens
cagcatcatcattctttccttcccctctctgagaaaataatcacccttcactccatctcccagtgaatcctctgagataattactmttcatatcttttttttttttttggagacagagtctcgctctgttgcccaggctgcggattcaagcagttctcatgcctcagcctcccaagtagctgggattacaggtgcgcgccaccatccccagctaatttttgtactttagtagagatgagccttcaccatgtcatccaggctggtctcaaactcctgacctcagatgatctgcccccctctgcctcccaaagtgctgggattacaggcatgagccaccac

SEQ ID NO: 456805 - DNA, 339 bp, Homo sapiens
cagcatcatcattctttccttcccctctctgagaaaataatcacccttcactccatctcccagtgaatcctctgagataattactcttcatatcttttttttttttttggagacagagtctcgctctgttgcccaggctgcggattcaagcagttctcatgcctcagcctcccaagtagctgggattacaggtgcrcgccaccatccccagctaatttttgtactttagtagagatgagccttcaccatgtcatccaggctggtctcaaactcctgacctcagatgatctgcccccctctgcctcccaaagtgctgggattacaggcatgagccaccac

SEQ ID NO: 456806 - DNA, 569 bp, Homo sapiens
atcatgggagtagggactggtggctttataagaagaggaagaggccaggtgtggtggctcactcctgtaatctcagcactttgggaggctgaagcgggcagatcrcttgaggtcaggagttcgagaccatcctggctaacaccgtgaaatcccatctctactgaaaatacaaaaaattagccaggcatggtggcacatacctgtagtcccagctactggggaggctgaggcaggagaatggcttgaacctgggaggtggaggttgcagtgagccgagatcatgccactgcactccagcctgagtgacggagcaagactacgtctcacaaaacagaaaaaaaaaaaacagaagaagaggaagagagatctgagtagcatcctcaatgccatctccatgtgatgcctgaaacgcctcaggactctacagactccctaccagcaagaaggctctcaccagatatggcccctcgaccttggactcctcacccttcagaatgataagcaataaattccatttttttcaaagtacacagtttcaggtattctgttttaagcaacagaaaagggac

SEQ ID NO: 456807 - DNA, 646 bp, Homo sapiens
ctctctgtggaaagaatgctgggggtcctggctccacacttcaccagaagggaaaatactcctcttgtatttatgatggtttttctttccacttgattaagtaagaagaaagtgtaattaagaaggtacttcttgaagcactgtcaatttgggaacgagattctcaggaatgaaaaatctgtgactgttctcagcatgaaaggtagagagaagattacttgatcattatgtgcttatttgaaagtccttttccttccatgcctcagcatctcactttgttactgtgcacactgaatgcctgggatctctgttttttacaaaagacaaagttgtattattaaaggaatgatattacctgggaaaaagttcagtactgaatggttactctataaagagattaaraaagaaagtcaagggagggtaaggaaggcaacaggtggcttccaacctcatggggtctactagcattatttcatgcccaggctggtctccagctcctgagctcaagcgatccaccctgccctggactcccaaactgctggaattagcggcatgagccaccacttcctgcccattcaaaaatactttttaaaaattttattcactactttgtaaacatttactatgtacctgctatttacaaggc

SEQ ID NO: 456808 - DNA, 627 bp, Homo sapiens
agagtgctgtcttagtctgttggggctgctatagcaaagtaccatakactgggtggcctgaacaacaaatgtttatttctcatagtttggaggccgggaagccctagatcaaagcaccagcagactgggtgttggtaagggtctgcttcctgtggccatcttcttgctgagccctcagacggtggaaaggaataaaacagttctctagggtcccttttattttattttatgtattttattttatttacttatttttgagacaggatcttcctgtatagctcaggttggaatacagcagtgcgatcatagctcactgtagcctcaacttcccaagttcacgtgatcctcccacctcagccttctgagtagctgggactacaagcacacaccagcatgcccaactaatttaaaaatttttttatagagatgggggtctggctatgctgcccaggctggtcttgaactcctggcctcaagcgatcctcctgcctcagcctcccaaaatgtcctttataagggcaccaatccctttaatttaattttattttatttacttatttttgagacaggatcttgctcaagggcactagtcccattcacaaggtccccaccctcatgacctaatca

SEQ ID NO: 456809 - DNA, 627 bp, Homo sapiens
agagtgctgtcttagtctgttggggctgctatagcaaagtaccatagactgggtggcctgaacaacaaatgtttatttctcatagtttggaggccgggaagccctagatcaaagcaccagcagactgggtgttggtaagggtctgcttcctgtggccatcttcttgctgagccctcagacggtggaaaggaataaaacagttctctagggtcccttttattttattttatgtattttattttatttacttatttttgagacaggatcttcctgtatagctcaggttggaatacagcagtgcgatcatagctcactgtagcctcaacttcccaagttcacgtgatcctcccacctcagccttctgagtagctgggactacaagcacacaccagcatgcccaactaatttaaaaatttttttatagagatgggggtctggctatgctgcccaggctggtcttgaactcctggcctcaagcgatcctcctgcctcagcctcccaaaatgtcctttataagggcaccaatccctttaatttaattttattttatttacttatttttragacaggatcttgctcaagggcactagtcccattcacaaggtccccaccctcatgacctaatca

SEQ ID NO: 456810 - DNA, 594 bp, Homo sapiens
gggattgttcgatacctagaaaaaaaataattaggctgagcacagtggctcacataatcccagcactttgggaggctgaggcagggggatagcttgaggccagaagtttgaaaccagcctrgtcaacattagattcttttctgaaaaaaaaaaaaaaaaaaaattagctggtgtgatgacacatgcttctaattccatcagtttgggaggctgaggtggaaggatcacttcagcccaagaattcaaggctgcagtgaggtatgattgtgccattgcactctggcctgggcaacaaagcaagaccctgtctcgaaagaaagagagagggaaaaagagaatgagagagaaagaaagagagaaaaggagagagaaagaaagagagcgaggaagaaagagaaagggagagagaaagagagagagagaaagggagagagaaagaaagaaagggagagaaaaaaaagaaaggaaggaaaaaagaaggaagggaaaaggaggaaaggaaagaaaaaaggaaggaaggaaaagaaggaaggaaaggagggaggaaggaaaggagggagggagggaaaaaggaaggaaggaaataactagaat

SEQ ID NO: 456811 - DNA, 594 bp, Homo sapiens
gggattgttcgatacctagaaaaaaaataattaggctgagcacagtggctcacataatcccagcactttgggaggctgaggcagggggatagcttgaggccagaagtttgaaaccagcctagtcaacattagattcttttctgaaaaaaaaaaaaaaaaaaaattagctggtgtgatgacacatgcttctaattccatcagtttgggaggctgaggtggaaggatcacttcagcccaagaattcaaggctgcagtgaggtatgattgtgccattgcactctggcctgggcaacaaagcaagaccctgtctcgaaagaaagagagagggaaaaagagaatgagagagaaagaaagagagaaaaggagagagaaagaaagagagcgaggaagaaagagaaagggagagagaaagagagagagagaaagggasagagaaagaaagaaagggagagaaaaaaaagaaaggaaggaaaaaagaaggaagggaaaaggaggaaaggaaagaaaaaaggaaggaaggaaaagaaggaaggaaaggagggaggaaggaaaggagggagggagggaaaaaggaaggaaggaaataactagaat

SEQ ID NO: 456812 - DNA, 484 bp, Homo sapiens
tatcttcctaacttacatgttatttcttcaagacaccccataaattggggcttgtgtaacatcttaatttttcacatagtggttttggcaagagaacatatttcgttattttactaatatggccccrgggccagactacccagcttttaatccaggctattaactttctagctgtgtagatctggggaagttacttaatctctcctgatatcagtatcacctttcgtcaaagcggtagaacagcagtaactatctcatagggttatgataaggactaaaggaaataagaaatataaagctcttggcatggtgccgtgtgcgtagtaagcactcaataaatatttgctactattaatactagtgtcatgcatgctactcagatttcacaactacaataataaaagtcaccaacaaatatttatgaataacaccccatgtaccaggcactgctgttgttctttaaacatcaacgcaggcccctgcc

SEQ ID NO: 456813 - DNA, 574 bp, Homo sapiens
cacctaaaatccaagttttagataatgtttctgaacattcaccatggatgagyctctccacactgaggcttctcattcctctgtgctcatctcttgcaatcatcttattctccattccacctcttctgttccacctcttctcccctgctcttgtccccagaccatgtcataaccactcactaaaacccctccattatttcagttgcaggcatcccactttccaactgccatctcccatcttccagaccacttcatctagtttcctatctccaaccattttcagctccaatagaaactacactccactgatccatcaccttttcatatctcttctcaccctcttatcttcacttccttccatccccagtgtgaactccatatcagttgccatgatcactcccttttggggaccaccaaatttctttcccagctctcactttgtcccactgtcttggctaagccacaaacatggttgaatgtagctcttctcccacctgtgcccgcccctgttgagctaaacattgatggtgaaaaataccagcatattgacatctcttacttgaaaattgtgatc

SEQ ID NO: 456814 - DNA, 574 bp, Homo sapiens
cacctaaaatccaagttttagataatgtttctgaacattcaccatggatgagcctctccacactgaggcttctcattcctctgtgctcatctcttgcaatcatcttattctccattccacctcttctgttccacctcttctcccctgctcttgtccccagaccatgtcataaccactcactaaaacccctccattatttcagttgcaggcatcccactttccaactgccatctcccatcttccagaccacttcatctagtttcctatctccaaccattttcagctccaatagaaactacactccactgatccatcaccttttcatatctcttctcaycctcttatcttcacttccttccatccccagtgtgaactccatatcagttgccatgatcactcccttttggggaccaccaaatttctttcccagctctcactttgtcccactgtcttggctaagccacaaacatggttgaatgtagctcttctcccacctgtgcccgcccctgttgagctaaacattgatggtgaaaaataccagcatattgacatctcttacttgaaaattgtgatc

SEQ ID NO: 456815 - DNA, 574 bp, Homo sapiens
cacctaaaatccaagttttagataatgtttctgaacattcaccatggatgagcctctccacactgaggcttctcattcctctgtgctcatctcttgcaatcatcttattctccattccacctcttctgttccacctcttctcccctgctcttgtccccagaccatgtcataaccactcactaaaacccctccattatttcagttgcaggcatcccactttccaactgccatctcccatcttccagaccacttcatctagtttcctatctccaaccattttcagctccaatagaaactacactccactgatccatcaccttttcatatctcttctcaccctcttatcttcacwtccttccatccccagtgtgaactccatatcagttgccatgatcactcccttttggggaccaccaaatttctttcccagctctcactttgtcccactgtcttggctaagccacaaacatggttgaatgtagctcttctcccacctgtgcccgcccctgttgagctaaacattgatggtgaaaaataccagcatattgacatctcttacttgaaaattgtgatc

SEQ ID NO: 456816 - DNA, 621 bp, Homo sapiens
tgcatactgattttgcaggctcttggtagatgttaaagatttaaattccacattaccatatttactagtgatgtggtatcttggagagggttttgtgctctggtaagatgattcgtttggaaaagatgactgctggggctccatgctgtgaacttctgtagtattttatctgaacctctcctattgcagttaggacattctattctgtgatatttttcttgaatatcacaactctgcttttgaaagcaagtttcatatcagactagtctttgtttcctcccagcatacatttcttgtcttagagtgtagtctaaaaaaaaaagtttgagagaaagaaaagacaattattgtgtacttttcaagtcaaataaatatttttctatctacattttaaaacaattatcacaaatatctttatgaaggtctccagctacttatgacacttcttttcttcagaagctaaataatatgatayaaagaaagacacagaaatagtggaacaatttagaaattgctgtagtcagtatttaaatatattcactgacgtgagatatgagaaatgcagaaaagaaaaatggttttggaacagttagtctaccagtaatgaggaaaacagacttc

SEQ ID NO: 456817 - DNA, 544 bp, Homo sapiens
atccattatattttatgcactcttctttatttagcttaattaagaaaataaaaagaacttagagagtgaaaaagacaaggccaggtgyggtggctcacgcctgtaatcccagcactttaggaggccgaggcgggcgggtcacgaggtcaggagatcgagaccatcctggctaacacggtgaaaccccgtctctactaaaaatagaaaaaattagccaggcgtggtggcgggtgcctgtagccccagctactcgggaggctgagacaggagaatggcgtgaatccgggaggcagagcttgcagtgagccgagatcatgccactgcaatccagcctgggcgacagagtgagactccatctaaaaaaaaaaaaagacaaattgttctagcagcagttcacttagtggacatttaaaccctgtttcacccagcaatgggaacactgcagccccataaccttgggctggggtgggactcctggggaagggtgatgtctgggtggtttccagaagctttgtgctgtgtgtttcggacccttatctctgga

SEQ ID NO: 456818 - DNA, 544 bp, Homo sapiens
atccattatattttatgcactcttctttatttagcttaattaagaaaataaaaagaacttagagagtgaaaaagacaaggccaggtgtggtggctcacgcctgtaatcccagcactttaggaggccgaggcgggcgggtcacgaggtcaggagatcgagaccatcctggctaacacggtgaaaccccgtctctactaaaaatagaaaaaattagccaggcgtggtrgcgggtgcctgtagccccagctactcgggaggctgagacaggagaatggcgtgaatccgggaggcagagcttgcagtgagccgagatcatgccactgcaatccagcctgggcgacagagtgagactccatctaaaaaaaaaaaaagacaaattgttctagcagcagttcacttagtggacatttaaaccctgtttcacccagcaatgggaacactgcagccccataaccttgggctggggtgggactcctggggaagggtgatgtctgggtggtttccagaagctttgtgctgtgtgtttcggacccttatctctgga

SEQ ID NO: 456819 - DNA, 544 bp, Homo sapiens
atccattatattttatgcactcttctttatttagcttaattaagaaaataaaaagaacttagagagtgaaaaagacaaggccaggtgtggtggctcacgcctgtaatcccagcactttaggaggccgaggcgggcgggtcacgaggtcaggagatcgagaccatcctggctaacacggtgaaaccccgtctctactaaaaatagaaaaaattagccaggcgtggtggcgggtgcctgtagccccagctactygggaggctgagacaggagaatggcgtgaatccgggaggcagagcttgcagtgagccgagatcatgccactgcaatccagcctgggcgacagagtgagactccatctaaaaaaaaaaaaagacaaattgttctagcagcagttcacttagtggacatttaaaccctgtttcacccagcaatgggaacactgcagccccataaccttgggctggggtgggactcctggggaagggtgatgtctgggtggtttccagaagctttgtgctgtgtgtttcggacccttatctctgga

SEQ ID NO: 456820 - DNA, 619 bp, Homo sapiens
ttggaaatccttatgttaccttgagacccagtgtagctgatgtttgtttcataataaagaaggtgttcatgtatagtggagttctcagggttattcaaaaccagccaaagggacagaagccctgtgctttagaaatttccagttaggccaggcgcggtggctcacgcctgtaatcccagcactttgggaggccaaggcgggcggatcatgaggtcaggagatcgagaccatcctggctaacacggtgaaaccctgtctctactaaaaatacaaaaaattagccgggcaaggtggcgggcgcctgtagtcccagctactcrggaggctgaggcaggagaatggcgtgaaccccgggggcggagcctgcagtgagccgagatcacgccactgcactccagcctgggcgacagcgagactcaatctcaaaaaaaaaaaaaaaaagacatttacacttaaaataatcagcacaagtactaacatatatagatataaacatactttcagccaggcacagtgactcacgcctgtaatcccaacactttgggtggccggggtgggagggtcgcttgagcccaagagtttgagaacagcctgggtaacatagggagaccctgtctaa

SEQ ID NO: 456821 - DNA, 553 bp, Homo sapiens
atattcttttgtaatttacatattcctgtacgatcctaaaatctttctgaaacaagcaagaatataaatttattattttgataagtgttagaaattaatttttacatttttttttaagagacggagtctcactctgttgccsaggctggagtgcagtggcatgatctcagctcactgcaacctctgcctcctgggttatagcaattctcctgtctcagcctcccgagtagggcgaggctaattttttgtatttttttttttttttttttagtttcatcgtgttgcccaggctggtctcgaactcctgagctcaggcgatccacctgcctcggcctcccagagtgctacgatttcaggcgtgagccaccgcatcaggccaatttttacctaattttttaaaacacaaagttattcttgtaaccattggcattataactgttagcaaaaagcaagggctcctcctagtgatactgcaagtcagtgcagcgtactaattccaggtgtatttgttttctttgttgtgtaacaagttcattatctttagtaaacacac

SEQ ID NO: 456822 - DNA, 602 bp, Homo sapiens
cgtagtaactatacatatttatgtggtaaagtgtgatgtttcaataaaggcatgcattgtgcaatgatcaaatcggggtatttaacrtagtcatcaccacatacatttatcttttctttgtgatgagaacatttcaaaatcctctcttctagctattttgaaatatacaagacaatattatcaaccatagtctccctactgtgcaatacaacaccagaacttattccttctgtctaactgtaactttgtacccactgaccaacatctctgcatgcctcaggatgtcttgcttctgctcagcaatgtctggagtctcagatgggaagacttgaatggttgggggctgaaacagctgaaggctggatgggtatctctctcttactctgcctttatctctctctctctctcactgtctctctctctccaaaatagcaagcttaggcttcctcacaatatggcaatctcaggttagttggacatcttaaaccgcagcagagcttcagagtgttccaagtatttcaagaaaaggaagtgacatctaccagtctcttaaggcctggaccaagaaacggatacagtatcatatttaccatagtctgttg

SEQ ID NO: 456823 - DNA, 619 bp, Homo sapiens
gggtacctttattatagaattcttagttttctcagaatttttaaaactaccaatgcagaaagtgagtgccattatttttgccattatttttattcgaagtaaatgaaaaagaatatttatatacacttaaaaagtgccatcggggacattttatcttataggaaatctagaatatatactccctagtgccttgagatgatttttaaagaacacattaatctcattagtcccacccctatgggtggcaatgttttactttccttgggtttatttttagtattgtgcttccaaattttgtttggggatgaaaaagktcatatgaaggcctttttttgtattttctgtaaagcatataagggctcattggctacaaccctcttaaaaatcagtggcaggaaaaaagcaagtatcttctgaagcagtgaaatgcttcctttcactggaggcagaaaacaatgtaacccattgtttttactctttccctaaactgcaaggaagctcagaattaaatttaatgttcagttgcagtaactatcttaaacttccccttttatatgctttttgattttctgtctattttaacaaacttactgtgtatgtaacgttttattgaaacctg

SEQ ID NO: 456824 - DNA, 510 bp, Homo sapiens
gtggcctggacttcccaaacaacgtggccagagaccttggcatttatgtttttatctgtccagtaaggatgrtaggattgtaccaatgccctcacgaagatgtttgaggcagctgaggaagcaacaggctcaagatgcattgctgttttggtcacccttcttgcttaataaggcccagaaccagtaggggctgtggtcactcaacttcaagagccctcgtggtgcagcaagctgtgaagttgccctcgtgctgcagtgagctgtgaagttgcagagttctcaggcacacccaccttccctggtgtaggcccctgtaaatgttactattaccagtaacgactatcccttcagagttgggggactttcagacatggtatctcacctgagccccacctcacggccttccagccagtgcaaaccaacaacctcctccattctcacatgccctatatccctgcaggcaggacatgtgggcctggatgctggatgtcaacccgagattcttccttg

SEQ ID NO: 456825 - DNA, 510 bp, Homo sapiens
gtggcctggacttcccaaacaacgtggccagagaccttggcatttatgtttttatctgtccagtaaggatgataggattgtaccaatgccctcacgaagatgtttgaggcagctgaggaagcaacaggctcaagatgcattgctgttttggtcacccttcttgcttaataaggcccagaaccagtaggggctgtggtcactcaacttcaagagccctcgtggtgcagcaagctgtgaagttgccctcgtgctgcagtgagctgtgaagttgcagagttctcaggcacacccacyttccctggtgtaggcccctgtaaatgttactattaccagtaacgactatcccttcagagttgggggactttcagacatggtatctcacctgagccccacctcacggccttccagccagtgcaaaccaacaacctcctccattctcacatgccctatatccctgcaggcaggacatgtgggcctggatgctggatgtcaacccgagattcttccttg

SEQ ID NO: 456826 - DNA, 569 bp, Homo sapiens
cacatacagatatgttgtagcagatagacccaaatatgcratggcttgaagaagtttgcttttcactcatgtagcagtccagataaatgaagacttgtgtatgcacaaaaaccctgtgcatgaatgtttatagcagctttatttataatggccctaaactgaaaacaactaagataactttcaatgataagtggttaaacaaactgtggcaaatccataccacggcttactatgcagtaataaaaaggagtgaactgttgatatgtatagtaacctggttgaatttacagagaattattttgagtgaaaaaggcagtcccccaaagattctattcagtatgatttcatttatataacattcttgaaatgacaaaattataaaaatgaagaactgattgatggtaagggaaactgaggaagggatactctggatctctttatattattttttacaactgtgtgtgaatctacaattatctccaaataaaaagttaaaaaaaatctcctgatttatttcctaaaacatacataagcatggaaaacataacttatatttttaacttccactt

SEQ ID NO: 456827 - DNA, 567 bp, Homo sapiens
catcttggaccctgatcttttgcaagttgacaccaagaagaacagctgtgccctcttattstatctgttggtgccttgtgggtcatggatctcattcattcattcgtcatttatatttctgtgttgggcaccaagaattctagggtaaacaagacagaaggcctgcttaaatgaagcctccagattagtggagggggcaccacgataggtgctatcctaacatcatgttggggatgctatggagcactgagaagcaactactgtagtcagggaagaggggatggcctcacagtggaggtgaggttggtgctgagttttgtagcacaattaggagtttaacagacaatgagtagattagggcgtgtgaacagaggcttcctacagacagaaaaatcatgctgatcagactttcagtgtgcagggtgtggagctaaagaggtcacagaccatgaagagccttatatgtcaggacagggggagattttgatatatctgcaacggagacattgtggtcagatttgagtttagagaacagaggcttaggggatgattcagagtgaatcatct

SEQ ID NO: 456828 - DNA, 566 bp, Homo sapiens
accagacatttgccatgctttcttctacatgttaccttgatttaggaagaagtagctttaaagatgaactgattataagacggaggatgcaaacaggaagtatggaatagtaagaaaatgaaggaagaagattggcaaaataatagagttttatttatctaattttcccaggaaattgtgtgtcttgtataaattgtttttccatagaactgaaccctaactttgaaaaaaaatctgatgtaaatctttctttagaaaatatcacctacttctttgcctaatattcaggaaacagggaagaaacagcctttttctaaaacccagggtcattttgctgaacatagttgttgtgccatgcttatgatacagtgaatttcttgttctggtgctgtcaaaagcttrccatttaaaaaggaaatttggtgatgagaaaaatctagtactgagaaacaataaaaaatcttgatgaatgaaagaaagtgacaatgttagagtaggttattaacgatgaccaggacagtcaagttgccgtgatgggtattactcagggtgactttgttatttgt

SEQ ID NO: 456829 - DNA, 548 bp, Homo sapiens
agtttaaaatgttctaagaaatgcagtactacagtaatgcctacttttaaagtttcccggccttttttttttttttttaaacagccctttaaaaacccaaattaatcaaatgaaagaagcggcaaaagatctaacctagctggcactctgcaagtgtctctcctctgtggaaacgaaatcctgccctgagcacaattcttgacataactgccttctgcctcttgagataaaaatgacctgaccgatggctggcaccctcagccagagctaagaagatggattcctaccttgttaagtaccacatttgcatgtagacccaaaacgtttaagagccacttaaatattcaagacaaatgaaatatgtgagaataaggttttaaaaaaccctttagaagatgttcaagagataytgcctcgcctaacgtgatgtttccaatcttcaaacgtgagtaggtcccaagaggaaaagcacacctcactcagattgatcaaaagtttaagggtgtaccagcatgtttttatagaacaatgtgctcactttgagaaat

SEQ ID NO: 456830 - DNA, 524 bp, Homo sapiens
cttgcaggtggttttattgccccccttccccaggagtggtttaaatggccccagctcttggaaatctgccacttggcccagatccacttctccaaggcctcctggcttatctgaagctcccgggacaactgaatattcatggctgattctgctctttgatgaaatgcagcttctttcaattcactcattcatttgaccaacacaggcacctaccacatgccaggcattgactggggttgtgatgatgaataaatcagtcaggatgtcatagactgytgaggaaaattgaggccaactttgtctgaatttgataagtgctaggatggcagcaggaacagagtgttgtagcagaaattcttcctgggggcgaaggaagggggctcagagaaagcctccctgagggagtagtgttaggttagaacttgctgagaaaatctatcacgtgtcctcagcacttgccatcctcactaaactcccattctggaaactgcccagaccactggaacaaagctcttttctttttt

SEQ ID NO: 456831 - DNA, 587 bp, Homo sapiens
tggcactattcttcactccaccttttaaaaaaattattatcattgttaagttcaccatgtcagcctcatgaagcctgaggctaggcactcatccctatgccgcagtgtggtacagccagtaaaaattataattgtgatgactacacagcaagatgggcaagtgcttcgagtgagcttacacaaatagaaagtrtattgtgtgggggactattttaaaatatttatttatgtggacaaagactggagtgtattaagcaaaatattgtaaaaatggttttgccatggcttttctcttttttcaaaaacaaattctcattttggttaaaacaaagttttaagcaacctgttgagatctaactcttcaaggatgtctatcagttagctcctcactagctgcagagaaggcaatggagtggttgagtaaactaggggacagatgcacacagatgtctaacacaaaaaaattaaatgatgccatgggactctgcaaggctgtgacagaagcccctggatttccaggaacacccctggaatgcagctcccaatcctacggtgttgttcccagttaaccaggcagagtggggctc

SEQ ID NO: 456832 - DNA, 631 bp, Homo sapiens
ctaggaagggggaagaatgttccaagtagaaaagatgggatatatgccagggagagtggggcacacttaaggtatgacttgtccccctctgccctccccctcatcaaccatgaaatgttgaagccctcaggctcagccctagacctctcctctccccagcacacagcctctcctaagatcctctcccctccacccagggcacctgattgaagacttcattctccagcacagaccttgcctctgagctccagaccactgacaatggcttacttgacacctcttctgggatatttcaaaaccctctcaaaaacaagtacaagaacaaattcctgacctgtccctgcactaagcctggccctttctcatctcagagatccacacccactcccatcacctgcaccagccagaacccaggattccccatggctcctcctcccacacagcccatctgagaccaaatctgtcattttttacttctraatgtctcttacctccacccactttgtctctgctaacaccgcctcctagttcaagttcccatcaactcttgcctggactgccgcctccttacaggtctcccacagctgtgctgcctacaacagctacagggatgttttcaagatgcagatat

SEQ ID NO: 456833 - DNA, 607 bp, Homo sapiens
atgggatgaagacctacagaactgaccaaatttgtggataaggagaaataagtatattagacgaacaaatcagaatcccaaaatctccygacgggcagaggcaatctaactcgatgaaatctaatagcattcaatgaaagagttgtgcttgacatgaagaaagctccgtgctttccttcatccctggggagttactcaacaggcagctcagtgttcttcacggcatgctggggctgactacacaggccatctggtttcagatgcacgaggagctgcaggctggggtccggaatgaaaccgcatctgcagcgttgcattcagtactgggtgccatgggggagcaagtgctctgacaacgagtgtccaggtgtcattcctgtcactcacacccaagggaagggccccgccctgcctcctgccatttcctcaggccagcccagcacccttagggtccacttaccccaggagaggctgcagtcttaatggcctcgatgctgctgttgtccaaaagagtgaatcatcttcaaagcacaacctctggtgagacttgaagctctactgcgatggcccctccaaggccccagaaatggcatctgtgcctgaggat

SEQ ID NO: 456834 - DNA, 554 bp, Homo sapiens
aatccatgataaatatctttgtaaaaaatactttttttcatttttatgtttagttcctaagattaaaattgtacaattaaagtttctgagtcttagaatatacaaaatgatgagttattttgatacatattactaaatttcccttcagagatgattttcttaacttgtaaccattctgtagtcttggagatttcctattccctcaaaactttccaacctttactactttcgtatttattttatcagttcataggccaataaaaatgttatcttgtattgttaatttctttcattaccaatgacactgagcatttttatatgtttattaatattgatttcaattttacaattgtctgccccataactgtttttagtttttttagtgttcagcgtttccttttttataagggagccctctgttaagtaaacaattctttattgaacatataagctctttcttggtttctcatttctatttttatataaattctagcatttttatttcttatgcagtcaaataycataattttatttatataaacacttaactctat

SEQ ID NO: 456835 - DNA, 593 bp, Homo sapiens
cctagcaaacatcatagcttagcctagcctactttaaatgtgcttagaacgcttatattagcttacagttggacaaaatcatgyactacaaagcaaattttgtaattaaaaagtgttgaatagctcatgtcatttattgaatagtgtactggaaataaaaagcaaaatggttgtatggtaaagtatgagttctactaaatgcctattgcttctgtaccactgtaaagcccccgaaaaaatgtaagttgaactactgtaagtcagagaccatctgtattgactgttctcaaagtgttcattgccagacaatgcagctttggggagctagagaaaagtcatcaacatttaaaaaaatttacattttccttcagttctcaaaggtagaaaggacactatttagtcctgtgtattccctctagagaggagagaaataagcaacagagaggggaaatgacactgtgagtggcagagaaaatactagcacaaacgcctcatttgtataatttgactactgaacgggaatgtgaattcctttgtaccaatctgaagtgcaagtacagtaactagtaaaataaacacactttaaagtgttc

SEQ ID NO: 456836 - DNA, 575 bp, Homo sapiens
gtcttcaaaaaaatttcccattaccaaactaaaatctattctcaatatataaaaggaaattcctttttcaggagttcagacccaaagtttcatttctatctattgcaattactagctgtgtacataaaaacctaaaaaaatttcaccataccttctgagtaacattgagaatactggaacatgtattctctctgtctgtgattccacagggaccttagtagcttcctagcttaaatgttatctactaggttttgtgacatctgcacatttatttaataaacttttttttttctggggatccattgaatatgttgactgagtagggctaaagacagacacttaagcaaggaagtcccttttggacactcatggcagataggccttcatctttaaatgcttcctaaaactgctttarggttttttgaagttgcctgctaccctctctttctctctttccttcccatccatcccatgctacctgctttgatgatcatgccctttgctttgtatttacacatatatctggttggaatattttgatataagggagttactgaggatctctctttaagctt

SEQ ID NO: 456837 - DNA, 532 bp, Homo sapiens
tgtcaattatatatataattttatatgtcgtgtttgggccatgattccaagatatttggtcaaatattagtctaaatgttgcagtgaagatattttttagattagattagatgttaattagatgttaatcaaatctaaaacataccttcagtgcaacatctagactggtattatttagatggtattaattataatttacaaactgaggtgaataataaatagaatttttttccataactggactttctgtcataggccagaatacaataaataccagaattgtagttctagctcagaacttctctccttcaggagtctaatttagagagaggaacatcaaggacaggaggcattgggttctcagttgtcatgttcctcactgtagtccatggagctattttcaatcctctctaatctttgaactgatgaccactgaacttttcttgccctgtcttcttggcttcatcagatccaccttcttacttgmtctaccctcagaattccagaataaaagaacaatagtgtaggcatt

SEQ ID NO: 456838 - DNA, 562 bp, Homo sapiens
tcagactgactataagaggaaagaaatgccatcttctctgtattgatcaactttatacaaataaatacattgacacatttggattttaaaaggttcatctacatttattatcttctccaccagcacagatgttaaaagtaagctttaatactgataatgttcccattatgctgctcccaaaggatatattttatttactgccttggaaaattcccrgtattaataggttattaatttatgtaagtattcattgctacagaggtgaaagtgtacttcatcatcaatttatagtagccagtgagttgaggaactgtgttgcttctatagatttcataggtgttctagtataactctatgccttttgcaggactgtctccaaaccatatcagttagaaaaatatctattacattttaataggtttataaagatatgacttactgagactttactattttaagtgttaataatattgcaatataatttttctttctttccttttcatactcttgttcccttttgctcacctgccctattcctaggataaaaagaaaaaaaaaatca

SEQ ID NO: 456839 - DNA, 562 bp, Homo sapiens
tcagactgactataagaggaaagaaatgccatcttctctgtattgatcaactttatacaaataaatacattgacacatttggattttaaaaggttcatctacatttattatcttctccaccagcacagatgttaaaagtaagctttaatactgataatgttcccattatgctgctcccaaaggatatattttatttactgccttggaaaattcccggtattaataggttattaatttatgtaagtattcattgctacagaggtgaaagtgtacttcatcatcaatttatagtagccagtgagttgaggaactgtgttgcttctatagatttcataggtgttctagtataactctatgccttttgcaggactgtctccaaaccatatcagttagaaaaatatctattacattttaataggtttataaagatatgacttactgagactttactattttaagtgttaataatattgcaatataatwtttctttctttccttttcatactcttgttcccttttgctcacctgccctattcctaggataaaaagaaaaaaaaaatca

SEQ ID NO: 456840 - DNA, 602 bp, Homo sapiens
agcctttctaggatatatcttactgagtctccaagggacacagaaaccctcagatgtacttccgttagttcttgctaggattaccgtaattaattatattctggcttacctgtcatttctactctcaactgcttacagttggtgcagacgagggtaatgtatgaaggcatacaaaaactagaatatctaatcacattacttcagcaaagaggaaattctgcttgcgtctaggaaagctgtggattgtggttaagcctttattccctacaaacatgacaggcatctgaactatagtcaagtaatctgttctcactaattgcatttttctttaggaaaagtaccaagcattgaaaatattagttccaaaggcaagtatacctcatagaaaacataatagttatgatcctgaaaggttgaaaaattaacattttataaattgattcccattttttgtgaacttggtagaaaggcttaatgtataaaaaaaccttgttcaaaatcacrtattattttgttatgcaaataaccaaccactgtgtttatttgttccataaatgtgaatattagcagtagcatattagatttaataagtcaaagcacac

SEQ ID NO: 456841 - DNA, 602 bp, Homo sapiens
agcctttctaggatatatcttactgagtctccaagggacacagaaaccctcagatgtacttccgttagttcttgctaggattaccgtaattaattatattctggcttacctgtcatttctactctcaactgcttacagttggtgcagacgagggtaatgtatgaaggcatacaaaaactagaatatctaatcacattacttcagcaaagaggaaattctgcttgcgtctaggaaagctgtggattgtggttaagcctttattccctacaaacatgacaggcatctgaactatagtcaagtaatctgttctcactaattgcatttttctttaggaaaagtaccaagcattgaaaatattagttccaaaggcaagtatacctcatagaaaacataatagttatgatcctgaaaggttgaaaaattaacattttataaattgattcccattttttgtgaacttggtagaaaggcttaatgtataaaaaaaccttgttcaaaatcacgtattattttgttatgcaaataaccaaccmctgtgtttatttgttccataaatgtgaatattagcagtagcatattagatttaataagtcaaagcacac

SEQ ID NO: 456842 - DNA, 499 bp, Homo sapiens
aatagctactctgttattaagtgtattttaaacagctattatgtaagtgacctatatgaaagagttttattcaaccaaattttgtgccctttagtaaaatatttttatataataattaataaaagttctatttgttgataacttttagaaataggctttgtaacacagtgaaaatatgctaacataatcaagatcatgtctcttaaaaaaaaaacccaaaaacttaaataaggtttaagatccttgttctcagaattggggagcttaaaaataattttggcaacatttgtggtatggtggwtttggctaccatgttttccccattttattgcctgaaatgcctttcctcaaagttttcagatttggtgatttgctttctgaatagaaatatgaggatcttccatcaaaaagattcagtgcaattcttttatcagagtgtgagttgctagctacaagaaacagatgcctttttttttgcattgcaccatttacaaaatgt

SEQ ID NO: 456843 - DNA, 545 bp, Homo sapiens
aagttttctttcatccatcacaggcatattttcttctacctcaatgagcacatttataatagttgcwgagctgtttttgcctgatgatttcaacatttggatcatcttggaattggcttttacttattttctttttgcttgagattgtcacattttcctagctttgtgggtatagagtaattatacatggtgtcctggatgtttagcatgttatgttttacagtctctggattctgttgtatttcttcaaagaatgctactgttttgttttgaaaagcaattaacttcattggacttaaacttcccacttgtggtcagagacagctttgatcactggctttctcatttcttaggtcccccttactttctgatggctctggttgccacatgtccctttctctagctcctccagccaaaaaagggtcagttttatatcagagttttagccactcccctccatgggtagaattatggctgccctcagggcaaagctacaaaaaacaaggcactccatgccagtgtcttcctccaaattttaactcact

SEQ ID NO: 456844 - DNA, 606 bp, Homo sapiens
gccctgttcctggaactagtttgtatgtgtgtgtttgtctttcagattgttagaaaaatagaacccgatgatctcatataattgggggatattgtaagaatgaggcctcagctcttccttcttgctcagccattctgatgcctctctcacctctctgttggcctcttgatctctttctctgtatttcatcttcaaactccctatgcaagaaggacatgatcatccaggctaattaccatctgatatccagcacaaattttcattagcatttgggctagacatagattatctgtccaacagaaatagtattcttgaaagcacatgactttgctagtcataaagactagtctgaagctgggcagagctgctagctgattcytgaaggccttgagatctgaccagttagagtataggcatagagtatatgaagtcacagaagaaatattgaggaaaaaaaaaagaaaaatataattcccaggaagaaattataaatggtcccagtagcagccaccagcatcatactagttgctaaatccaattagtgttattcagtctttatttacttcatctctgcaaaattcaacattgttaaaaactgtgtcctcc

SEQ ID NO: 456845 - DNA, 640 bp, Homo sapiens
tgaatgaactaaatggtagtcatttctctttttctctttttcttttctctttttcttctttcacaggtatctgtgaaaattactaatagttactgcttcagcatctcatctttgcagtattatgtttgtttgtggtctgtagtggcaaacccagtatttatgtatagaatagtatttgcaaagyatactatggagagaaaagatatctcataaagtgatataaatacataaagagcaaaataatttgaattttttaaaatctacactatcagccactttttcctaatctacttataaattgccacaactggattggttgcaagtatatttccttctagccacaatacacctattctttaacttttctatatttttaaataaatcacagggtgaaatattagactgtgggtaactgatcagttaaggggatatatgagcagttgaggttaactgattatgttaccactttcataccagttcttgctgaagcaagtcactaaggagcctattgcctgtttttcctagtctttattataaagatatccttggtatctgggttatccttgaataatagtacacgggagagaaatgcatttggatcagtggcaaacaactgtatctgtgaaaaaaaatgtgcgaa

SEQ ID NO: 456846 - DNA, 640 bp, Homo sapiens
tgaatgaactaaatggtagtcatttctctttttctctttttcttttctctttttcttctttcacaggtatctgtgaaaattactaatagttactgcttcagcatctcatctttgcagtattatgtttgtttgtggtctgtagtggcaaacccagtatttatgtatagaatagtatttgcaaagtatactatggagagaaaagatatctcataaagtgatataaatacataaagagcaaaataatttgaatttttwaaaatctacactatcagccactttttcctaatctacttataaattgccacaactggattggttgcaagtatatttccttctagccacaatacacctattctttaacttttctatatttttaaataaatcacagggtgaaatattagactgtgggtaactgatcagttaaggggatatatgagcagttgaggttaactgattatgttaccactttcataccagttcttgctgaagcaagtcactaaggagcctattgcctgtttttcctagtctttattataaagatatccttggtatctgggttatccttgaataatagtacacgggagagaaatgcatttggatcagtggcaaacaactgtatctgtgaaaaaaaatgtgcgaa

SEQ ID NO: 456847 - DNA, 640 bp, Homo sapiens
tgaatgaactaaatggtagtcatttctctttttctctttttcttttctctttttcttctttcacaggtatctgtgaaaattactaatagttactgcttcagcatctcatctttgcagtattatgtttgtttgtggtctgtagtggcaaacccagtatttatgtatagaatagtatttgcaaagtatactatggagagaaaagatatctcataaagtgatataaatacataaagagcaaaataatttgaattttttaaaatctacactatcagccactttttcctaatctacttataaattgccacaactggattggttgcaagtatatttccttctagccacaatacacctrttctttaacttttctatatttttaaataaatcacagggtgaaatattagactgtgggtaactgatcagttaaggggatatatgagcagttgaggttaactgattatgttaccactttcataccagttcttgctgaagcaagtcactaaggagcctattgcctgtttttcctagtctttattataaagatatccttggtatctgggttatccttgaataatagtacacgggagagaaatgcatttggatcagtggcaaacaactgtatctgtgaaaaaaaatgtgcgaa

SEQ ID NO: 456848 - DNA, 601 bp, Homo sapiens
ggtaaggcaggctggtcctcttttacagcatctataaacagggccagaatctggctgactagagcctgagaacatgttaggtcgcttcatattcaattcacagccctataaagagaagaaaaatgagccttgtccaaaactcttacctcagcacccactggcaaaaataaaatgtaagctggggaccaagtctctttgaagctgattttttaaaaactctctaacaggcctctggtggttacagatattgatcgtcagaaagtaatctgttcaggtttgggggcatgccagtacaaattgtggaatgcattccttcctctccaaggacatgttgagctttttacattgtccmtactggttcacttgtcagctgtctaccctatttgacatgaattattttctatcttttgtggatgtataattaaatatattttaaaaataggaaattttattaacatagaatctttagcttgagtcaaaacattcttttcatcttttttaaccctcatttttcttccataatcattatttgattccctctggctgcctgctacttatttgtagtagtaccattcatccattgagacctttccatctgtca

SEQ ID NO: 456849 - DNA, 575 bp, Homo sapiens
tggaaagtctccattttgcttaaattattggtgaatttttcttaactatgttatggtaaagtattgaaagacaggattctttctttattgataaacatgttgaaaatgataacctagattattgaatgttttctagaacaaactcaaggtgataaaaataaggagttttatattaacaaatgcaaatgcatttctatttttgcatcctcagaagagtattaacttttctttctgttgtttctgacctaatactttggatttaaatattgaatgatgtgcaatatgtcttttcaaaatagttagcaatattttttaatgaattcctcagtggcacagtaagttttcaagygtgtgtcatgggctggaaggcattgctttaattgaatatccatgttttctgattataatggtttggaaatcagagccaaatgagaagcatgttatgcccactcaactaaaaaataattgagtctccttttcgaggtttacagataaccaaatccacatgtatcaaacctctgttgtgtacatggtgctgaactcacatcagtaagggagtagatgttaagggatag

SEQ ID NO: 456850 - DNA, 585 bp, Homo sapiens
cttatttcatatgtatacagaagtaacagcacatattttatagatatgtttataatgtatcaaataaaataataattcagtaagaccatttgaagaaactctatgtgaatacttttagaagaaaaacaatttaaaaaataatcacccatctaatgttgtttagtttgtagagcaatttgaatatcgtttctcctgctatcttcaaggaagtattattcaaaggatactaagtttatgaataattcttccctaggtttgaagggacttagaaggagtatgaagctcccagaggttatatgctcaatttcctcaagagcctacagcattaaaaacgagcttcattgatcagaaatcctgctggtgagggtgcaaataccrtggatgctatgtgtcctttactaatatagtgtcttagagatgatgcagctgtttagttggagtgtctaagcatagccatgggcattggtagactgagtcacaggatatatcctatgcataccagttaactggctcttcaagcaagtctctgaatagagtgcttgaattttttcctctggaataccaagaagaccagccttttttggg

SEQ ID NO: 456851 - DNA, 585 bp, Homo sapiens
cttatttcatatgtatacagaagtaacagcacatattttatagatatgtttataatgtatcaaataaaataataattcagtaagaccatttgaagaaactctatgtgaatacttttagaagaaaaacaatttaaaaaataatcacccatctaatgttgtttagtttgtagagcaatttgaatatcgtttctcctgctatcttcaaggaagtattattcaaaggatactaagtttatgaataattcttccctaggtttgaagggacttagaaggagtatgaagctcccagaggttatatgctcaatttcctcaagagcctacagcattaaaaacgagcttcattgatcagaaatcctgctggtgagggtgcaaataccgtggatgctatgtgtcctttactaatatagtgtcttagagatgatgcasctgtttagttggagtgtctaagcatagccatgggcattggtagactgagtcacaggatatatcctatgcataccagttaactggctcttcaagcaagtctctgaatagagtgcttgaattttttcctctggaataccaagaagaccagccttttttggg

SEQ ID NO: 456852 - DNA, 660 bp, Homo sapiens
tgcactggggaaagtgaaatgatcagacatttcggggactgctggacactggctctgagctaacgattccaggggacccaaaacatcactggtcctacagttaaagtaggggcttatagagatcaggtaattaatgaaattttagctcaggcccaacttacagtgggtccagtgggtccccggacttaccctgtggtcattcctgagtgccagaatgcataattggcatagacatacttagcagctggcagaactcccatattggctccctgactggtaggataagggctattatggtggtaaaggccaaatgaaagccattagagctgcctttacctagaaaaatagtaaatcaaaaacaatatcacatccctggagagactgtggagattagtgctactaccaaggacttgaaagacgctggggtggtgattcccaccacatccccattcagctctcccatttagcctgtgcagaygacagatcttggagaatgaccatggattattgtaagcttaacaaagtggtgactccaattgcagctgctgtaccagatgtggtttcattgcttgagcaaattagcacatttcctggtaggtggtatgcagccattgtcttggcaaatgtcttttcctccattcctgtccataaggcccacca

SEQ ID NO: 456853 - DNA, 564 bp, Homo sapiens
ataaaactgacttaaattcagggaacttctacctcagtaaaatttctaggggtccagtggtgtggggcctgttgagatattccttctaaggtgaagaataagttgctgcatttgaccaytccttcaaccaagaaaggcacaatgcctagtaggcctatttggattttggaggcaaagcattcctcatctgggtgtgttactccagcccatttatcaagtgacccgaaaggctgtcagttttgagtggggtccagaacagaagaatgctctgcaataggtccaggctgctgtgcaagctgctctgccacttgagccatatgacccaacagatccaatggtgctggaggtgtcagtgacagacagggtgctgtttggagcctttggcaggcccccataggtgaatcacgatggaagcttctaggattttggagcaaggccctgccatcttctgcagataactactctccttatgagagacagttcttggcctattactgggctctggtggaaactgaaggtttgactatgggtcatcaagtcacctggcaacctgaactgcctatt

SEQ ID NO: 456854 - DNA, 564 bp, Homo sapiens
ataaaactgacttaaattcagggaacttctacctcagtaaaatttctaggggtccagtggtgtggggcctgttgagatattccttctaaggtgaagaataagttgctgcatttgaccattccttcaaccaagaaaggcacaatgcctagtaggcctatttggattttggaggcaaagcattcctcatctgggtgtgttactccagcccatttatcaagtgacccgaaaggctgtcagttttgagtggggtccagaacagaagaatgctctgcaataggtccaggctgctgtgcaagctgctctgccacttgagccatatgacccaacagatccaatggtgctggaggtgtcagtgacagacagggtgctgtttggagcctttggcaggcccccataggtgaatcacratggaagcttctaggattttggagcaaggccctgccatcttctgcagataactactctccttatgagagacagttcttggcctattactgggctctggtggaaactgaaggtttgactatgggtcatcaagtcacctggcaacctgaactgcctatt

SEQ ID NO: 456855 - DNA, 569 bp, Homo sapiens
caggtgtgcaccaccatgcctagctaatttttgtatttttagtacagagagcgttttgtcatgtgccccagctggtcttgaactcctgagttcaagcaatctgcctgcctcagcctcttgaaatgctgggagccaccgtgcccagccttaattcttgaaggccctgttttaatttacattggccacattaactattttatttaattttatttatttatttattttgaggtgtagtttcactcttgtcacccaggctgaagtgcagtgatgcaatcttagctcactacaacctccgcctcccrggttcaaacgattctcctgcctcagcctcccgagtagctgggattacaggcatgcaccactacacctggctagtttttttgtttgtttgtttttgtttttgttttttgtatttttgtatttttagtagagacgggattttgccatgttggccaggctggtctcaaactcctgacctcaggtgatccacccgcctcggcctcccaaagtgctgggattacaggcatgagccaccgtgcccagcccgatattattttaactgtggtttt

SEQ ID NO: 456856 - DNA, 569 bp, Homo sapiens
caggtgtgcaccaccatgcctagctaatttttgtatttttagtacagagagcgttttgtcatgtgccccagctggtcttgaactcctgagttcaagcaatctgcctgcctcagcctcttgaaatgctgggagccaccgtgcccagccttaattcttgaaggccctgttttaatttacattggccacattaactattttatttaattttatttatttatttattttgaggtgtagtttcactcttgtcacccaggctgaagtgcagtgatgcaatcttagctcactacaacctccgcctcccaggttcaaacgattctcctgcctcagcctcccgagtagctgggattacaggcatgcaccacyacacctggctagtttttttgtttgtttgtttttgtttttgttttttgtatttttgtatttttagtagagacgggattttgccatgttggccaggctggtctcaaactcctgacctcaggtgatccacccgcctcggcctcccaaagtgctgggattacaggcatgagccaccgtgcccagcccgatattattttaactgtggtttt

SEQ ID NO: 456857 - DNA, 494 bp, Homo sapiens
gaaggcagcaatccagaagccaggaagcacttaccagaaagagaatttgccagcaccttgatgatggacttcaagcctacagaattatgcaaaaataaatgtctgttgtttatgccaccaagtctgtggtattttgttatggcagcccaagcagaycaatacagcatctcaaacatgcccaatccttgcccactcccaatatatccatgggatcttcaaaaatccatactaatggagaaagagactgtcatctcaggaactgaaggagaaagagtcttggctggtgggagcttgaattattcccaactctgtatgagatctgggaagtgtttgtctttgagttccccaataattgctcctttggcagcagctgttctttgccaagccttaaagaacatgacccgttgcatatgcagattggtactcagatttctcaaattgtctctgctagctccctttccagtatgctagtccacatactacagctgccttaa

SEQ ID NO: 456858 - DNA, 478 bp, Homo sapiens
agattctgtacaggtagcatgaacaaaaagaaaatcagccttcccacaaattgcagtggacttcaagatgtttggaaagcccagaacattcttmagccctgaaatctccttttatttttatttttttttttgagatatggtcttgctctgttgcccaggctggagtgcagtggtgtgatcatggctcactgcattctcaacttcctgggctcaaatgatcctcccaaatagctgggactacaggcatgtgccaccatgcccaggaatttttttttttttttttttttttgtagagatagggtctgttgtccagttgcccaggctggtctcaaactctttgactcaagcaatcctcctgccttggcctcccaaagtgttgggattataggcatgaggcactgcacctaacacgaaattcctttaaagatatcaaggagtgtgtcccccgttagcagcaagaaaaattcctctggaggag

SEQ ID NO: 456859 - DNA, 478 bp, Homo sapiens
agattctgtacaggtagcatgaacaaaaagaaaatcagccttcccacaaattgcagtggacttcaagatgtttggaaagcccagaacattcttcagccctgaaatctccttttatttttatttttttttttgagatatggtcttgctctgttgcccaggctggagtgcagtggtgtgatcatggctcactgcattctcaacttcctgggctcaaatgatcctcccaaatagctgggactacaggcatgtgccaccatgcccaggawtttttttttttttttttttttttgtagagatagggtctgttgtccagttgcccaggctggtctcaaactctttgactcaagcaatcctcctgccttggcctcccaaagtgttgggattataggcatgaggcactgcacctaacacgaaattcctttaaagatatcaaggagtgtgtcccccgttagcagcaagaaaaattcctctggaggag

SEQ ID NO: 456860 - DNA, 509 bp, Homo sapiens
agagatcacaccactgcactccagcctgggcgacagagcgagactccttccccccgcccccccaaaaaaagtgaggtcctccaaataattggcttattattggagttagggctttggaaggaaggatacagatactgaaatcttgaaaacttaggcaaacaccactgaaatggtaggaaaatttgaaaattgaatattggtttctttttgctgcattcagcaaagttctgataatagatttaaactaatactacatctaggcatattggatgcagaggtggaaggaaatcatgcatttctttttttttttgtgagtcagggtcttactctgttgcccgtgctggagtgcagtggygcaatcatagctcactgtagcctcaacctgccaggcctgagcgatcctcccacctcagccttctgagtagctgagactacaggtgagcaccaccacgcctggctaatttatttttatttttgtagagatagggtttcactttgctgcccacttt

SEQ ID NO: 456861 - DNA, 572 bp, Homo sapiens
  misc_feature (1)...(572): n = A,T,C or G
ttttagtaggggtttcactatgttggccaggatggtctcgatttcccgaccgcctgatccgtccgcctcggcctcccaaagtggtgggattacaggcgtgagccaccgcgcccggccttcagtgtactactttccttattttattttttgagacagcgcctcgctctgtcgcccaggctggacgcaatggagcagtcacggatcactgcagcctcgacctcccgggctcaagcgattctcccgccttagcctcccaaattactgggaccacaggcttgcgccaccacgccctgccatcggctctcatttccttttcccatcctagtcttccatcaggcgtcctttcggcgcacatttcagtgtcctgcggggctcaccagtgtccttcctccagggcctcaggggcagtcagagggatctttcccgccgctccactccctcctcctcctccccctccccctatcccctcccctcccctcccttctcctctccagaaacgtcctcgcttgtccgncttcaccgcctcccccgccagccgtgtyggctctgctccgcgcccagccggccaaccg

SEQ ID NO: 456862 - DNA, 406 bp, Homo sapiens
tgttgccatcgtttttcaagctcaagttagatgttgcaggtacactwgtctcctttaaacatcatttatgatgtcattctttggagtgttactatacggtcagtaagtcctgtgaagaatggaacaccgctctgagagaacaaagacgtgatggaatgcgggttgtgtatgtgtcttacggagagcctctgaagtgacattaaactgggagctaagggatcaatagtttaaacaggtggctagggaggggaagaacattccaggcaaagagaaccatgcaagaagagacccaaagacctggaaggaggagtgtggtagaccacagggtgcatctaagaaggactgagaagaggtggtgaacatggcctggctcagttatggcgttgaaggccctggtaaaaagtag

SEQ ID NO: 456863 - DNA, 406 bp, Homo sapiens
tgttgccatcgtttttcaagctcaagttagatgttgcaggtacactagtctcctttaaacatcatttatgatgtcattctttggagtgttactatacggtcagtaagtcctgtgaagaatggaacaccgctctgagagaacaaagacgtgatgkaatgcgggttgtgtatgtgtcttacggagagcctctgaagtgacattaaactgggagctaagggatcaatagtttaaacaggtggctagggaggggaagaacattccaggcaaagagaaccatgcaagaagagacccaaagacctggaaggaggagtgtggtagaccacagggtgcatctaagaaggactgagaagaggtggtgaacatggcctggctcagttatggcgttgaaggccctggtaaaaagtag

SEQ ID NO: 456864 - DNA, 574 bp, Homo sapiens
tcctaatccatctgctccttatcatttaggagttcctcaatgtttttattctgatgatatcagcctttctgttttcccaagagtattatggatttcttgtcatttcagtgtaatattaggctattcactctaattgtttaagtctcggggagggttttgtttttgtttttgttttttaatataccagtaagtctaaactctgtattcctagcacagttctctcacaggagttccagacctatatatatctcacagcttackgaccagtactgcaagaatgttccaccaacaccacagattatacaaggcagttctgctgccttccctacttcagcctcttcctgttgcatttcctatctgattatatagcaccaccataccgtcactcaggcaggaatcccaaggaacaggcttggtgcctcctttctcttctaggtttagtttatcatcacatgatctagaatgaatttctcctattctctccacaactatcatccttaccgtttttcttctgatttgctatggcagccgtctcgctacctaaagtcttgctttccagtggtgtttattgtca

SEQ ID NO: 456865 - DNA, 470 bp, Homo sapiens
caggaaggggaacatcacacaccagggcctgtcaggggatggggggctgggggagggatagcattaggagaaatacctaatgtaaatgatgagttgatggatgcagcaaaccaacatggcacatgtatacctatgcatcaaacctgcacattgtgcacatgtaccctagaacttaaagtrtaataaaaaaaaaaaagaagaaatccactacagaaggaaccaaggaatttaagcatcaaaattcccacctgccccccaccatttttttgtgagcccaggatggctttgaactcccaggctcgagcaatcctccccagtcagcctccagataattacaggcatgagctaccaagcctggttcatcttctctgatttttctcaatgtcacttgagtcttttgtggcccacactagttaggggaatagcctgatcatctggccagatctaaactgaaatatctgatgaggcag

SEQ ID NO: 456866 - DNA, 520 bp, Homo sapiens
aggatttctgccttctgtgtgttttctgatgtgctataagtgatgacttctggtagaaagtcttctcacattcattacatttgtagggtttctctcctgtgtgggttctctgatgtactgtgagggatgacttgtggtaaaaagttttgctgcattcattatatttatgaagtttctctcctgagytctttgatgtttagtaagtgctgatttctggttaaatgttttgctgcattgaacacatttatatggcttctctttttatgtcttttttgatgtacagtaagggataacttctgggaaaaacttttcccacatgcattacatttatatggtttctcccctgtgtgtgttctctgatgtactgtaagagatgacttctgggaaaaggttttcccacattcattacattcatagggtttttcccctgtgtgagttctctgatgcacaataagttttgacttcactgagaaagacttcccacattcattacattcacagggcctttctccagtatgag

SEQ ID NO: 456867 - DNA, 528 bp, Homo sapiens
taaactcgtagtgattttcccttctgtgagtactctgatgaacaaggaggtttggattgtcagaaaaggctcttagttgttcattatattcacaaggtttctcccagaagcacactctcttatgggtactgaaggctgcctcctcatgaaaagctttcccacactcaaggtattcaaaaatttgcttcagagtttgaatatcctgatgctgaaataagtcctcattctaacagatggctttctcatttctrtcacactcaaaatgtttctctctggcataaggatgctcatgtcatatgaaggagcaatttcgcatgtgcactgagctcatcaagcttccttccaaaggagtttctattactaacaattaattctgaaatataattcacgttcattatacataagtcatatttatcaggtatttttctcattggaacaaggtttgaatttatattaaatgtttctcctaaaacactatttctgtcttccatcagtattttgttgttgacaaaaccagctttcctcaaa

SEQ ID NO: 456868 - DNA, 587 bp, Homo sapiens
agttttcaacctaatcttagaatctttactgatcttcatacagttaatcctcattattcatggattttgtgacaacaaattcatctactcattaaaacttatttgtaaacccaaaatcaagactcttggtgctttcattgtcaagaacatgcactgagcacttaaaaacttcagtcacccagcacacatattcccaggtgaaactgaacaaggccatgctctagcttcttgtttcagttctcatactataaacaagtgcccgtccctggtactgttagtgccacatttttcagttttgtgggttttgctggtgatttcactgtttaaaatagtccgctagtgtaggactgaagtactgtctctcgtgttcctaagtgcaagaargctgtgatgtgcctgtggagaatatatgtgtgttaaattagctttattcatgagatgtagtgccattggccataaattcaatattaataaatcagctatatatatgggtatatttttaaaaataaacccatattaaaaaggattatgtatggattagctaacaaaaatgtgggcagaggctggcaggaactaaccctgtattt

SEQ ID NO: 456869 - DNA, 508 bp, Homo sapiens
ggacctgtaaaagcctctatttccaagagaccccagtatgtgaccaacagttgctgctctaatgatgtacagtgcaatgtcaaagagggcagtttcttgcgtcaggggctcatgggcaatttgtggccaycatgagttatgagagaaggctgctaaagcccctatggtaaaggagtctttgaggagactcatgggattcctgtcatattgcaatgtggacagattctaaagccttttgttgaagggaatccatccaaggtgggccaacttgcaagtaacagcatcagtgaaattaagtaaaacttgtaaatgaggaatatgtcacctctagatctcaaagaggactgaaagatatttgtattaacattgtgtgtactgagaaagtcaatagctgtttcttgatggtgtcagggatgaaatggccctcagattaccaaataactttcaggaatttaacagaggtggcaagacccctcacacaacgtgtggagaccactttttgtgtgct

SEQ ID NO: 456870 - DNA, 523 bp, Homo sapiens
cttggtgagaatgtcttgctaagggatgccttgataagaattgagttttccaaactatagagttgatttattgggttatttttaaagtatttattatcmactatttagaagcacttcaaatctttgagtaaataactgaggggtttataaatgcaaacatttcaattatataaccttttaagaattgttaatttcaaaaacatctagataaggatgaacagtcagttattttagctattcaatatacaagtgcatgtaattaatcaagtaaaatggaaatcatttgaagagaggaagactttcttcatgttgtcagtcttaagcctaatgagatctgtttgtatagtgcagtgagtatggacaaaatgcggtcgtagcacagataccaaatacttttgtgtttcagatcttttctacagtcctcactaaaggcaatacattatagcgaatgaggttttgaaagtcgtctatattcaaagatgggtagactttaatttgttgtcgtgattataacacaagaaat

SEQ ID NO: 456871 - DNA, 527 bp, Homo sapiens
aatcattcttgtgatgtgattaggttaacttggggctatattcttggtttttagtctagttagaaataattttaattttagtcttgtaaaactttgttcatacttcataaattttcatttatgcctcgtggagaactctttgaacttaaatataaaatatgcaatttggatgtgcaatcaaaatgatatatgatgcaatcacatatatactgtagtaatcaaaagagttattttgcttttatgtcacagtttagacttgtgctttagtggatgaggctaatgagtataataaaatctactttacaatgaaattcagaattgaaagccatatgaactaaatgaaaatatgtgacatgcaggtgataggtctttctgcagtttttttaggaaaaggttttcctgagcacttctatatctacccagaagttacagtagagtaggaataaattggtttttygtagattgaattgaacggactcatggaaatcaaaaatttttcagattgactgtattttgtgtttcctggt

SEQ ID NO: 456872 - DNA, 568 bp, Homo sapiens
gaataaattggttttttgtagattgaattgaacggactcatggaaatcaaaaatttttcagattgactgtattttgtgtttcytggtaacatgagattgtgatcatattactaggcaagaagatccatacagaaaaaaaatctctgtatgagtagtttgaatattaagatgtaaaaaatgtcccagaaattcccttgctagcacattatgagaatgatcatcaggttcaggagctaaagaatatcagagggagttactacaactattttgaaatgtgtgtattctgatgtaggaggaacactttgtaaatgtttatgcttatgttgtttaatgtgtgtcactgaagtatagtgaactagtttgcaatcaggaaagtggagaggatagtcatgaagactaggacgaatggatgaagaaaataagagacaggctatagaggccaacagagctttttaatttggtgaagacattgtagaattattttaaaaaatacttttgcacattttgaaccccattttggaattatgccttgttgctgtttggtatagacaactattttttgcaaaac

SEQ ID NO: 456873 - DNA, 547 bp, Homo sapiens
ttacctcggacaacccagaaagcataactactgatacaaaaaggttgtacttttaagaaaatatagcaaatatactaagtagacagcctgggtttgacttttgcctcctccacttactagctctgtgtcttgggacaaaatccttaacttctctgtgcctcaatgacctcatctgtaaaacgaggatactgagagcacctacttcataagatgtgagcactaaataactgatatatgtaaaagtttctagaacagtactcgtcacagtgctctagaggtatttaataacattaaataaataaatatataacttgttaatcacatagaaagcaacacattaaatctgacagtgctttcattagcttgaaatgttttagagattccctggaattgtttgagacatttgactagttaygcaaaaaggtctttatttcctcatttttgatcagaggtgacattcttctccatcttattcataagtgttggttttaaatctgctttcaaaattaaaaactcccaaaggataaaattttgttgccaatgaaga

SEQ ID NO: 456874 - DNA, 589 bp, Homo sapiens
actcatttttttcctatacctaatgtcagtggcagaaaatgctgagaaattgggatattgctttccaaagatctttttcttcttaaaacaattacatcaaaagttatagctagkgataaatgattgtgacacagatttccaagttactgccaaatacagggttttataaaattaaaaagaaagctggatcatttaagaaaagtaatttatttctggctttgactttttcccggaacaaacataaaaaatgtacgattttccttctcggtattaacaaaatattttccaaatccactgcatgcactgcattcctttatcaggatcttattcagtttgtgactctgctggaaactgatatcttagaattaatctgatacgtgcttttacctagttttctcttgtttaatgcttaaattacgtatattaacattcattttaattattttaggctttctggaacatgctaccacactacaaatataaagtttcaggtcatttttaaaatttctttttctctctttaaaaaaaattctaactttttgaggcattcatagcttaaaaaagtttccaagttggggatctgtttttt

SEQ ID NO: 456875 - DNA, 621 bp, Homo sapiens
ggcagggaatgttgcaatttagaattgggtcactaaggtagcctcagtgagaaggcaatatttgagcaaggtcttgaagaagaggtgagagttcgtgatgagsatatttatgggaaaagcatatcaggaagggcctgtgcaaatgtcctgtggtgggccatacctgccatgttttatgaacaaggctagtgtggttagagagctgggactaagagagggttaacaggaaatttggttggaaatgtaacaggtcccaattcatgcagggtccagtaggccattgtaaggactttagcttttagtctgtgtgggatgagaaggcattgaggtgttttaagcagaggagtgttttgcaagtgtgaaacaggaagactagataggatgttattacagtaatccagatgagagatgatggtggcttgtgtcaaggtggtaacaatgagagtgttaccaccttggttgtaccatggttgtaccatggataacttttgattctgttggtggattggatataggggtttaagagaaagagaggattcataatcactctttgcctgagtgaatagaagtcgccatcaattgagatagtgaggttgatgaactaggttttttttttttttt

SEQ ID NO: 456876 - DNA, 610 bp, Homo sapiens
gcatggttgatttcattcattcaacaaatatttattgtgtatttaccgtgaaccagttactgtataaggagtcggtgatggaattgagtaacatggaagctgtctctgccctcttgggttttagccttcagtggtggaagaygcgagagaagcaaacagagtcttagatcatggtaagtgctatgaagaaaacaaagcaggactttgaatagagttaccggttaggggtggcggtggtagtgagatgtgtagttaatttagactgagaaatcaaggaaggcctttgaggagataacatttgaattgtctcaagctaaaaactcagggttccttctgaattagattccctttttcttagttatggacctatgaagttcagctaaatatagtacttatttggtttttatttgctccttctaaattaggcaaacctttttttctcttgccatgtaaacatttaataagcttgcaaattgggcatagggaagagtttctttccttttaagaatcacagtaaatatctcacaactaggggaagttgcctccaggtaattggtgttactttacaaaaaagagactcatgactttaatagccaggctttagttgtgt

SEQ ID NO: 456877 - DNA, 501 bp, Homo sapiens
cagcttactcatgtaactattggccaggggcttcagttcctcttgtcatgggaatctccatggattgtttgagtctyctcatggtaaaatagctgacttttcctagagtgaatgaactgagatactaagacaaaagctgaaatgcttcttatgactaagtcttagaagtcacagactgtcacttctgccctgttgtactggtcacacaagggcagccttgacacattagaagagggaactgtaaaagggcatgagtacatggaggggaggatcattggaggccatttttgagactgaataccctagtccaccctatggcccccagtgattcatgttcctcctacttaaaaatatatacttatctccttcctcaaggccaccaagtctcatgccattacagtatcagcttaaagtccaagattgggtcacctaaatcagatctgggtatagctccttgaatattgatcctctagatctggagacctgtgaactatggagaca

SEQ ID NO: 456878 - DNA, 601 bp, Homo sapiens
agggatatttgttgaaagtaatttacttcaaaaatttgaacctccaggtttcccagaacatttcaggccaccagaagtagctctctccygctagagaacagctgccccttgcaaaaccactcagctggaatggaggctttgcaggttaatgcatgtcctcctcagaatcatctgcttctctgacctctcattaccttcagaccaataattaagataaagtctgatcatacatagtcccagcagggaaattcagtttctgtcctgggaggaaacagactctcatggaaagacttggatgagctggataatatatactggcatgattcaggggaaggtgtgtaggagtggatctcgagggggtttgaaggagggacgtaaaataaggcagggtaggaaagaatttattgtcatgggagtactctgcttcaaattaggattgaatatcttggcaagaatacttagaagtaatatgctgtaaacattcctattagttttaatattaagattcgaactcaagcttgcccaacctgccgcccgcgggccgcatgtggcccaggatggctttgaatgcatcccaacacaaattcataaactttattaa

SEQ ID NO: 456879 - DNA, 542 bp, Homo sapiens
gctggctgagaaataaagagagacagtttaaagacaggaattttacagctgggctgctgggggtgacatcacatatctgtaggaccctgatgccccctgagcctcaaaaccagcaagtttttattaagggtttcaaaaggggagggggtgtaagaacagggagtaggcacaaagatcacacgcttcaaagggcaaaaagcagaactactaataagggtctaacaaagatcacatgcttctgagggaacaggacaaagggcaaaagcagaacyactgataagggtctatgttcagccgtgcaggtattgtcttgataaacatcttaaacaacagaaaacagggttcgagagtagagaactggtctgaccacaaatttaccagggcagagttttgccccaacctagtaattctgagggtactgcaggagaccagggcgtatctcagtccttatctcaaccccataagacagacattcccagagcggccatttataggcctccccccaggagtgcattcctttcccagggtattaatattaatat

SEQ ID NO: 456880 - DNA, 542 bp, Homo sapiens
gctggctgagaaataaagagagacagtttaaagacaggaattttacagctgggctgctgggggtgacatcacatatctgtaggaccctgatgccccctgagcctcaaaaccagcaagtttttattaagggtttcaaaaggggagggggtgtaagaacagggagtaggcacaaagatcacacgcttcaaagggcaaaaagcagaactactaataagggtctaacaaagatcacatgcttctgagggaacaggacaaagggcaaaagcagaactactgataagggtctatgttcagcsgtgcaggtattgtcttgataaacatcttaaacaacagaaaacagggttcgagagtagagaactggtctgaccacaaatttaccagggcagagttttgccccaacctagtaattctgagggtactgcaggagaccagggcgtatctcagtccttatctcaaccccataagacagacattcccagagcggccatttataggcctccccccaggagtgcattcctttcccagggtattaatattaatat

SEQ ID NO: 456881 - DNA, 542 bp, Homo sapiens
gctggctgagaaataaagagagacagtttaaagacaggaattttacagctgggctgctgggggtgacatcacatatctgtaggaccctgatgccccctgagcctcaaaaccagcaagtttttattaagggtttcaaaaggggagggggtgtaagaacagggagtaggcacaaagatcacacgcttcaaagggcaaaaagcagaactactaataagggtctaacaaagatcacatgcttctgagggaacaggacaaagggcaaaagcagaactactgataagggtctatgttcagccgtgcasgtattgtcttgataaacatcttaaacaacagaaaacagggttcgagagtagagaactggtctgaccacaaatttaccagggcagagttttgccccaacctagtaattctgagggtactgcaggagaccagggcgtatctcagtccttatctcaaccccataagacagacattcccagagcggccatttataggcctccccccaggagtgcattcctttcccagggtattaatattaatat

SEQ ID NO: 456882 - DNA, 542 bp, Homo sapiens
gctggctgagaaataaagagagacagtttaaagacaggaattttacagctgggctgctgggggtgacatcacatatctgtaggaccctgatgccccctgagcctcaaaaccagcaagtttttattaagggtttcaaaaggggagggggtgtaagaacagggagtaggcacaaagatcacacgcttcaaagggcaaaaagcagaactactaataagggtctaacaaagatcacatgcttctgagggaacaggacaaagggcaaaagcagaactactgataagggtctatgttcagccgtgcaggtattgtcttgataaacatcttaaacaacagaaaacagggttcsagagtagagaactggtctgaccacaaatttaccagggcagagttttgccccaacctagtaattctgagggtactgcaggagaccagggcgtatctcagtccttatctcaaccccataagacagacattcccagagcggccatttataggcctccccccaggagtgcattcctttcccagggtattaatattaatat

SEQ ID NO: 456883 - DNA, 543 bp, Homo sapiens
gatgtcctcaattgactctgtaaaattaatatgaattcaaaatacatttagaatatatttacaatgggaacaatttcaaattaccaaaaaaacttagtttaacataaaataagttattcaaaaacataccttctgctctttcttctctttccactttcacagactgtaagaaaaaagaattctccatgattaatacagtttaaaaratagaatctaaatgtggatatgctttgaaaaattatatagtatttgtggattcattttgagagagaattacagttttaaaattggttaatgctcactcttataatgtcttctgttgtccgctcaattgactttagtttctttaaaatggcctcttccttcgttgagatttgcagttcagctttttcaagatcttggatctctttctcaagcctgacaacaaaaaggtatactttttattgcttaacacagtacaaatgcggagttctcaaatatgtcttccccatatataaagtttccttggaatatgcatgtaagtagccagacactttctaagaa

SEQ ID NO: 456884 - DNA, 618 bp, Homo sapiens
gctggtggtttacctatattttgtgagtttttttgtgaaagcccactttctcaggggaaaaaaagactttttacagctctacccatggaaacagaaaatgaacccatctcaaagctaatacacttggcttaatcatttaacccctccaagctttttttctcatttagggaataatagtagtattcactaaaggttgtcttaaggaattaattgaggtaattgttcataaacccctacaacagggcttgatgtagaggagttccttagtaaagatgagttactgggccaggcgtggtggcttaggcctgtaatcccagcactttgggaggctgaggcgagtggataacttgagatcaggagttcgagaccagcccggccaacatggtgaaaccttgtctctactaaaaatacaaaaattagctgggcatggtggcacgcacctatataatcccagtactcgggaggctgagtcaggagaatcgcttgaatctgggaggcagaggtcgcagtgagttcatgccacggcactccagcctgggtgacagagtgagacagtctcaaaaaaaaaaaaaaaatagaaaaggacttacmcttttctccttcttagtttgcttgaga

SEQ ID NO: 456885 - DNA, 601 bp, Homo sapiens
ttctataatttcaggttttacatttatctctatgatatcttttgagttaattttatagagtaaaaggtatgaatcagtttatttttgcatatggatatccaattgttctagtatcttttgttcaaaagactatcttttgtccaatcgtgtttgtgcctctgttgaaaatcaattgaccatatacacatgggtctatttctgggttctgtattgtgattcattcatttatttgtcgagcttgaacaatgccatcatgttttagttaccatgactttataagtyttgaagtcaggcaatgtaaattctccaactctgttcttgttcaaagttgtttggttatttttatgcttttgcatttgcttatgaattttagaattgttttacaaatttctacaaaagaattctgttggaattttgattatattgaatctataatcaatttaggaaaaaatagataacaatatcgcattttctgatgtgtaatctcaatacagctatgacttcatttaggttttctttaacttcatttagccatgttttcagtgtacaggtcttgcacatatgttatcagatttatctataaatattttatgtttttgtg

SEQ ID NO: 456886 - DNA, 601 bp, Homo sapiens
ttctataatttcaggttttacatttatctctatgatatcttttgagttaattttatagagtaaaaggtatgaatcagtttatttttgcatatggatatccaattgttctagtatcttttgttcaaaagactatcttttgtccaatcgtgtttgtgcctctgttgaaaatcaattgaccatatacacatgggtctatttctgggttctgtattgtgattcattcatttatttgtcgagcttgaacaatgccatcatgttttagttaccatgactttataagttttgaagtcaggcaatgtaaattctccaactctgttcttgttcaaagttgtttggttatttttatgcttttgcatttgcttatgaattttagaattgttttacaaatttctacaaaagaattctgttggaattttgattatattgaatctataatcaatttaggaaaaaatagataacaatatcgcattttctgatgtrtaatctcaatacagctatgacttcatttaggttttctttaacttcatttagccatgttttcagtgtacaggtcttgcacatatgttatcagatttatctataaatattttatgtttttgtg

SEQ ID NO: 456887 - DNA, 550 bp, Homo sapiens
gtagctcctctcagttctaggtccttactctgtctcatcttatattggctgaaggaattcctctccattcagccaatataagatgagacagagtgaggcccatgyatggaagttttgtaatgggccacgttgggaaatggacttaccacttccattcacatcccactaagtgcaaggaagcctgggaaatgtagtctaaatctgttcccaggaagaagtagaggtggaactctggacagcactagttatttctgccacaggcaatgggaactattcagaactttgctgaggtttgactactgcagtgaatgagttaccaacaatcaatacaatttcatccttaagtctctctgccccagattttgaatcctaggagaaacttcaattggtcctgcttgatctcacatccatccttgacctaagggagggcagggctcctacactgatagctcccaggtggcatgcagtgatggaggagaaataccccaaaaggagagagcatggtgtttggggggggggggcaaagacaaatgcacatgaaaagcacaaa

SEQ ID NO: 456888 - DNA, 550 bp, Homo sapiens
gtagctcctctcagttctaggtccttactctgtctcatcttatattggctgaaggaattcctctccattcagccaatataagatgagacagagtgaggcccatgcatggaagttttgtaatgggccacgttgggaaatggacttaccacttccattcacatcccactaagtgcaaggaagcctgggaaatgtagtctaaatctgttcccaggaagaagtagaggtggaactctggacagcactagttatttctgccacaggcaatgggaactattcagaactttgctgaggtttgactactgcagtgaatgagttaccaacaatcaatacaatttcatccttaagtctctctgccccagattttgaatcctaggagaaasttcaattggtcctgcttgatctcacatccatccttgacctaagggagggcagggctcctacactgatagctcccaggtggcatgcagtgatggaggagaaataccccaaaaggagagagcatggtgtttggggggggggggcaaagacaaatgcacatgaaaagcacaaa

SEQ ID NO: 456889 - DNA, 550 bp, Homo sapiens
gtagctcctctcagttctaggtccttactctgtctcatcttatattggctgaaggaattcctctccattcagccaatataagatgagacagagtgaggcccatgcatggaagttttgtaatgggccacgttgggaaatggacttaccacttccattcacatcccactaagtgcaaggaagcctgggaaatgtagtctaaatctgttcccaggaagaagtagaggtggaactctggacagcactagttatttctgccacaggcaatgggaactattcagaactttgctgaggtttgactactgcagtgaatgagttaccaacaatcaatacaatttcatccttaagtctctctgccccagattttgaatcctaggagaaactycaattggtcctgcttgatctcacatccatccttgacctaagggagggcagggctcctacactgatagctcccaggtggcatgcagtgatggaggagaaataccccaaaaggagagagcatggtgtttggggggggggggcaaagacaaatgcacatgaaaagcacaaa

SEQ ID NO: 456890 - DNA, 546 bp, Homo sapiens
catggggtgcaatgcaggccactgccccatactgaggattgaccaggtcgatggtggcctgagtccagatcacatcaagtgatccccctgcccagaatttcaaggctgcaatgagctacagtcatcccactgcactccagcctgagcaacaaagtgagaccatgactctgaaaaaaaaaaaaarcttttgatggggctttgcctttactttttctctgggaaatacttgaacagtgacccaaactaattcttaagaatttggaaaagatcaggaaatagaaaggaagttcatattgattggttttctactgttttaagcattatatgtgccatgtgccagttttttcacatttattatctaattttactcttcaaaaccatgttattgttaccacttttcagataaagaaagtacagcttcaaaaatctaagccatttgtccgatgcagaacagcatttgacaactatggaggtgactctgatgacctggctctacctcagcatggggccctgtgtcattgataagtgtggtattagccgcctgat

SEQ ID NO: 456891 - DNA, 569 bp, Homo sapiens
catccttttttttccagaagggataagccagttttaatgtatccaaactgccaaatatctgagagctctcacgcctctctgcacccctcatctgtgtaataagaacataatttcctccttcttaggatcagttgaaatgagggatgtgctgggatgcaaaaagcctggctgcccccgaaatgtgcgaacaccatgtaacagcacgtgttgcttctgctgttaggagaggccatagcgactacaggtcagaggacgggagcagcacagrgagtgtggctccaatactcacactgacctcaggcctttctgctgtggctccccagccccttctcccctcctcccttttccctccttctcttctaaaaagtagagtagtgctcccacctcagcattctgagagccatttcagaagccatttgagcactctagcaatttacattacaatttcttagaactacctgaggaggtagcagggctggcctgtgttgcagatgaaaaactgagacagaagctgctgtcatgaaccattgtcaagttttctggtcaaccaggaccctttgaacagtctt

SEQ ID NO: 456892 - DNA, 599 bp, Homo sapiens
gaaaaaaacacaaaaaaagaaaataaaaaagcaaccactgactgagagaaaatgtttatgattatatatctgacaaaatcttgcttccaggacacctacgaaataataataaaacacaccccaaatttaacatgcaaaagatttgaagagacaactcataatagaagatatatgaatggctaataaacaatgaaaaatgatcagtagcatttgtgatcatgaaaacaaactaaaacacacagaaatactattatatacttgttagaatggtaaaaagttyaaagactgccaatatcaagtgcagacaaagatatggagcaactgaaactctcgtacactgctggtgggagtgtaaaatgatatatccactttggaataaaatttcacagtttcctaaaaaaaaaaaaaaaaagctaaaaatactcttgtcatagaacccagttgtttcactcttaggtattttctaaagaaaattaaagcttacattcacaaagagactttcataaaatattcttggcagcctcattcatggtatttccaaaaccagaaaattaaaaatgtcggtcaacaggagaacagataagcaaattgtgatacag

SEQ ID NO: 456893 - DNA, 573 bp, Homo sapiens
  misc_feature (1)...(573): n = A,T,C or G
aacaatggcagcagcaacagcaatctcaaatgcaggtatagcacacaccacgcacgtgcagggcatcattcaaatagcttatgtgtatcaacccgtttaatccccgcacagactccacgaaatagattctattatatcccccytttataggtgagaaaattgaggcatggagagtttaaatgcctggcttaagttcacacagttggtaagaggtagagtgggaatttgaaccctgggagcctggtcctctcaagcctgtgttatgctgccatgtcggacattaaatttcagcatcttcaataacacttgatatccagggaatgaaccaaacagcacgcacgcacatcagcttgaagtttctctgcttttctaaacctttcttctcaaaacggtagaacgncgcccccaacaaaaaatgtctgtggngttcaacaacccaaagaatttcttttcttgtttttgctgaacaggagagaagtcagtaaatgctatagaaagcacagcctgtgtcggggatggagatgaaatatttctttgttagacatgccatcaaaaagtcccgaagttgagaaa

SEQ ID NO: 456894 - DNA, 566 bp, Homo sapiens
gctacacatttttattcatatcgccccctaaggagcgttttgagacctgttttcctaatcgatccacccccatgacattttaatacagatgtactgtacagctatttatgttatgtatgcatatctgtgcttcatacataaaaatagtaagattttattctcccccaaagaaccaatttttgccaccttctgggcaacattgcctattgagaatggacaggtgaggaaggaagccaaaggtcagactttactttcaagattttactgggtcagattttacttgcccagattttactgggcaagcttgtcttctttctccttctcttcagtgaagtaacaggctaccaggtaggaggctgggcatagctgggtctgatgataggctctgaggaccaaggtgggaaggtgctgtcactccatgtggtcagtgatggactttgagcacctggcaggggcccagccacaccctgctcagcacacttatcaycccatgtgtctccagaggccctgggacgtgggcaggcacatcaatagttgctcactggagtcgttctgcttccacaagg

SEQ ID NO: 456895 - DNA, 564 bp, Homo sapiens
aagtaatttttctggaagaccttcagcctcttagagtcacaatccagagcaagctgagcctctctaactcatcattcagagcctcactatcctgctccactcccagcccagcctgggccccagcccagctcagctgttgtctgcccatggatcagtctcagcaccggccctcctacctggaagagcactcacaagctgtgggaggaggagggtggcgtgtcctctggcagaggcagagcctaaccgtacttggtcagcttcagcacacacttccctcgctccgcaggggcagctgcatacctccccattgggaggaggcaatggatccagccagggctgagagagttgtgggktattgacccaagctcccagctctcctggctgagtctcaactggggacccccgaggaccatttccgaagcacaggcaaagttctcgtgttcccaccaggacttgcaggagcagcctgtcaaaataaattgtatattatggattctgggaggttggaggaccagctgttaccaaaatgcttgggctaattttaaatctattcattattcatga

SEQ ID NO: 456896 - DNA, 598 bp, Homo sapiens
aagagttgctaattttaagaccttatcttgtttacccatcaggctcctctgttgagaattcaggtcccttgagacaaagtctgggtcatgctctctacagagcctcagtttccagctcaggcctggcaacctgggcccttgcacagaagacacagggagggtgacgtgtctccctctgtgcctgtccatgcaaagctacccttrgcaggcctgggggctttcaggggcctgtggagcagggagtaatgccattcagtgaagagacgcaggcagcaaagttcttggttctgccacagttcacttgacagagaccacacattttatggtgtccggggccccgcatggtcaagctctgagctggttaggttggcggctgcagcagctgcactaaaaactgggatgcgtgatgggttttccaacccccaatttcctctccccttaaatgagacagagactccacctagcccagagttagtcaccatttggattggaagcctaacttaagggacccccaggctaggaagcaggttacattctatttattgctcactgagctcctcttaatatcctggtcagtacagaacagagctgggtatgc

SEQ ID NO: 456897 - DNA, 598 bp, Homo sapiens
aagagttgctaattttaagaccttatcttgtttacccatcaggctcctctgttgagaattcaggtcccttgagacaaagtctgggtcatgctctctacagagcctcagtttccagctcaggcctggcaacctgggcccttgcacagaagacacagggagggtgacgtgtctccctctgtgcctgtccatgcaaagctacccttagcaggcctgggggctttcaggggcctgtggagcagggagtaatgccattcagtgaagagacgcaggcagcaaagttcttggttctgccacagttcacttgacagagaccacacattttatggtgtccggggccccgcatggtcaagctctgagctggttaggttggcggctgcagcagctgcactaaaaaytgggatgcgtgatgggttttccaacccccaatttcctctccccttaaatgagacagagactccacctagcccagagttagtcaccatttggattggaagcctaacttaagggacccccaggctaggaagcaggttacattctatttattgctcactgagctcctcttaatatcctggtcagtacagaacagagctgggtatgc

SEQ ID NO: 456898 - DNA, 598 bp, Homo sapiens
aagagttgctaattttaagaccttatcttgtttacccatcaggctcctctgttgagaattcaggtcccttgagacaaagtctgggtcatgctctctacagagcctcagtttccagctcaggcctggcaacctgggcccttgcacagaagacacagggagggtgacgtgtctccctctgtgcctgtccatgcaaagctacccttagcaggcctgggggctttcaggggcctgtggagcagggagtaatgccattcagtgaagagacgcaggcagcaaagttcttggttctgccacagttcacttgacagagaccacacattttatggtgtccggggccccgcatggtcaagctctgagctggttaggttggcggctgcagcagctgcactaaaaactgggatgygtgatgggttttccaacccccaatttcctctccccttaaatgagacagagactccacctagcccagagttagtcaccatttggattggaagcctaacttaagggacccccaggctaggaagcaggttacattctatttattgctcactgagctcctcttaatatcctggtcagtacagaacagagctgggtatgc

SEQ ID NO: 456899 - DNA, 520 bp, Homo sapiens
cacaatatgaaagtagagactttccctcctaattttcagtgttattttctttaagacctatagaatatataaaagtttagatagcaaattatataaatgtgaaaagaaatggaaaaatagaaatggtcaaataggaagcaatagagttatattttatactatatgtatccatacatattaaatttttatacatgaattaaagttttaaaactaaaatattaaccattaagcacctaaaagaatacataagcacaaatttatttgatcttaagatacagaaggaatttytaagcataaaaccaaagaaaaatatgtctaaattttttttttttttttttgagatggaatttcactcttgttgcccaggctggagtgcaatggggccatctcatagctcactgcaacctctgcctcctgggttcaagcgattctcctgcctcagcctcccgagtagctgggattacaggcatgtaccaccatgcccagctaattttgtatttttagtagtgacagggtttct

SEQ ID NO: 456900 - DNA, 569 bp, Homo sapiens
ctatagaatatttgtgagctaaattactaaagctaaattgaaaagaaactttgcttttgtacttgtatttttcttgcaaaaacaacttaaataaggtatttmgactctttaaataaagatttctctacctgggcactactgactttttgggccaagttgttgtgggaaactatcctgtacattgtatgatatttattagtatctctggcctctactcactagatgtcagtagcatcctccctccttatgcctcctttctcccttaaactatgacaaccaaaaactatctccagacattgacaaatatctctggggagcaaaatctcccctcctcactgagaaccactgcttaaggtgaaatagttaatatacgaacaaaatgagcagagctttcataaattggtaatggctgttaaacattcagaactcttttaaaacagtcattaacatgtcagtaatttatattccaattatactaaaattgtgatttttaaatttagaagttttgcagtactgcttatacctcatactctccagatagcagcaatcaattctgagtgtgaagtgtg

SEQ ID NO: 456901 - DNA, 569 bp, Homo sapiens
ctatagaatatttgtgagctaaattactaaagctaaattgaaaagaaactttgcttttgtacttgtatttttcttgcaaaaacaacttaaataaggtatttcgactctttaaataargatttctctacctgggcactactgactttttgggccaagttgttgtgggaaactatcctgtacattgtatgatatttattagtatctctggcctctactcactagatgtcagtagcatcctccctccttatgcctcctttctcccttaaactatgacaaccaaaaactatctccagacattgacaaatatctctggggagcaaaatctcccctcctcactgagaaccactgcttaaggtgaaatagttaatatacgaacaaaatgagcagagctttcataaattggtaatggctgttaaacattcagaactcttttaaaacagtcattaacatgtcagtaatttatattccaattatactaaaattgtgatttttaaatttagaagttttgcagtactgcttatacctcatactctccagatagcagcaatcaattctgagtgtgaagtgtg

SEQ ID NO: 456902 - DNA, 569 bp, Homo sapiens
ctatagaatatttgtgagctaaattactaaagctaaattgaaaagaaactttgcttttgtacttgtatttttcttgcaaaaacaacttaaataaggtatttcgactctttaaataaagatttctctacctgggcactactgactttttgggccaagttgttgtgggaaactatcctgtacattgtatgatatttattagtatctctggcctctactcactagatgtcagtagcatcctccctccttatgcctcctttctcccttaaactatgacaaccaaaaactatctccagacattgacaaatatctctggggagcaaaatctcccctcctcactgagaaccactgcttaaggtgaaatagttaatatamgaacaaaatgagcagagctttcataaattggtaatggctgttaaacattcagaactcttttaaaacagtcattaacatgtcagtaatttatattccaattatactaaaattgtgatttttaaatttagaagttttgcagtactgcttatacctcatactctccagatagcagcaatcaattctgagtgtgaagtgtg

SEQ ID NO: 456903 - DNA, 569 bp, Homo sapiens
ctatagaatatttgtgagctaaattactaaagctaaattgaaaagaaactttgcttttgtacttgtatttttcttgcaaaaacaacttaaataaggtatttcgactctttaaataaagatttctctacctgggcactactgactttttgggccaagttgttgtgggaaactatcctgtacattgtatgatatttattagtatctctggcctctactcactagatgtcagtagcatcctccctccttatgcctcctttctcccttaaactatgacaaccaaaaactatctccagacattgacaaatatctctggggagcaaaatctcccctcctcactgagaaccactgcttaaggtgaaatagttaatatacgaacaaaatgagcagagctttcataaattggtaatggctgttaaacattcagaactcttttaaaacagtcatyaacatgtcagtaatttatattccaattatactaaaattgtgatttttaaatttagaagttttgcagtactgcttatacctcatactctccagatagcagcaatcaattctgagtgtgaagtgtg

SEQ ID NO: 456904 - DNA, 602 bp, Homo sapiens
ctaggagctgtagaccggagctgttcctatttggccatcttggctcctcccctcttttgtaatctttttgaatgctgttactaaaatgcctgccagagacagttacccatttgtaacaggtgcattatattttacaatgagcatttttactgtctatatcactgcgtatgacaatgtttggcaacaacataatttctgcrctttaaaactgaagttctacttgcatatcattttttccttcaaaacagacaattttccttttctctaaacatattaatcataaaggtaaaaatccatcagattatccttgggcactttaggcttttatggaacttgtatgaaattcttgagcacatttcattgaatttcattgcaaattatcagtgtgatgtaatttttattcctataagaaatatgtttatactgctgtgcaaacattaaatgaacaatgaaacttaacgtcttgtgggagggcaaagaaacacctacaatatcaggaactggaactgtctgcatagcacaaagtgaagtggagtatggtaatcagagagatgtcttggttactgggaatgtcgaagttcctaaatgccaggaattggaac

SEQ ID NO: 456905 - DNA, 602 bp, Homo sapiens
ctaggagctgtagaccggagctgttcctatttggccatcttggctcctcccctcttttgtaatctttttgaatgctgttactaaaatgcctgccagagacagttacccatttgtaacaggtgcattatattttacaatgagcatttttactgtctatatcactgcgtatgacaatgtttggcaacaacataatttctgcactttaaaactgaagttctacttgcatatcattttttccttcaaaacagacaattttccttttctctaaacatattaatcataaaggtaaaaatccatcagattatccttgggcactttaggcttttatggaacttgtatgaaattcttgagcacatttcattgaatttcattgcaaattatcagtgtgatgtaatttttattcctataagaaatatgtttmtactgctgtgcaaacattaaatgaacaatgaaacttaacgtcttgtgggagggcaaagaaacacctacaatatcaggaactggaactgtctgcatagcacaaagtgaagtggagtatggtaatcagagagatgtcttggttactgggaatgtcgaagttcctaaatgccaggaattggaac

SEQ ID NO: 456906 - DNA, 636 bp, Homo sapiens
attttagtttagtttatttatttatttattttgaggcagagtctcactctgttgccaggctggagtgcagtggcgcgatctcagctcactgcaacgcctgcctcctgggttcaagtgattctcctgcctcagtctcccaagtagctgggactactggcgtgtgccaccacgcccggctaatgtttgtatttttagtagagatggggtttcaccatattggccaagatggtctcaatctcttgatcttgtgatccgagtagagcaatttataataatggtgtctctaaaaattccaaaatacgtgtgttgcgaattctgctagtttttattttgggaaataytttagtagattaatatgcctctgttttggtgagataaactatgtcatagttatcatcagagatgttgaagtcaaataaaatatagataaaaatctctaaaaatttttttgagggaagcaagaattgcaatttggggcatatatacagacccggtggtcttcagtatatctgaagaacaaagagaagattggaggttttataaaagagaaatgtaaaaataactatttggtactatgcttagtacctggttgacaaaataatctgtacatcaaacctccatgacaggagtttgcct

SEQ ID NO: 456907 - DNA, 597 bp, Homo sapiens
actatttggtactatgcttagtacctggttgacaaaataatctgtacatcaaacctccatgacaggagtytgcctgtatagcaaacctgcacacgtacccctgaacctaaaataaaagtttttgaggggagggggaagaaaaaagaaatgttccatattattgtgaaagaaaattcattggcactagtaaagttgtgcagagctggaaagctctaactggtgcatgatgggtaaaactagttttagagtctcagcagattgtttcagtatctgtcagatacaactaatttcaggttacagctgtcagtttcaggagccaggtttgtagagaattatatttttggagcagtattacgagcccttagtgctttccccgacccctgacctcttgagtctttttgagttgggtttgacaagaatgactcaatttgtaagatcacctttcacagattcagtgcttctttgttttttcagtttttattggtcaaatgcttctgagataaataactgggttttgccccacactgcatcatcttcttttgtgtttgattatttccctcatacaaacttctttactttcagacagagaaaggacta

SEQ ID NO: 456908 - DNA, 597 bp, Homo sapiens
actatttggtactatgcttagtacctggttgacaaaataatctgtacatcaaacctccatgacaggagtttgcctgtatagcaaacctgcacacgtacccctgaacctaaaataaaagtttttgaggggagggggaagaaaaaagaaatgttccatattattgtgaaagaaaattcattggcactagtaaagttgtgcagagctggaaagctctaactggtgcatgatgggtaaaactagttttagagtctcagcagattgtttcagtatctgtcagatacaactaatttcaggttacagctgtcagtttcaggagccaggtttgtagagaattatatttttggagcagtattacgagcccttagtgctttccccgacccctgacctcttgastctttttgagttgggtttgacaagaatgactcaatttgtaagatcacctttcacagattcagtgcttctttgttttttcagtttttattggtcaaatgcttctgagataaataactgggttttgccccacactgcatcatcttcttttgtgtttgattatttccctcatacaaacttctttactttcagacagagaaaggacta

SEQ ID NO: 456909 - DNA, 531 bp, Homo sapiens
tttgggtttaggatttcaacatatgaatgaagggaggagaataaacagtcagaccatagcgatatcttcttcatctttcagttgcacaagtaacacctctcttccttccgtaccatccrctttctaacatggataatttttcccttctgaatttgtttttcaacacaattttaaatgtgagcctaatatttacatgtatttacctaatttaaactaattataaatgaaccagtaaaaacaggttagaaatctggtagtaagtgcatctataagaaataaattcaatcaggcaaaattgaagcagaaattgagctgagagctgtgcttgggagatttaaagatgctactccagcctgtgaacagtaacttgaaaaaaaagtaccgccatttatcatgtttctaaatgagaagtataactacacttagattctctttacaaaactacccagaaaatgtcaaaaataattataaatacatttgtacaatttcacagtttgcaaggttctttcagaggaattattccatttggtt

SEQ ID NO: 456910 - DNA, 502 bp, Homo sapiens
acactctgcgcagtccgggaattcctgtatgacttgctgagctcagctgtgcaagtactctttggtttcatctgctgtatgttggtgctacaagaattattgtagtggtcaaaatcatggaccaatcaaaacaacttctggttatagtaacctaattcctccactgatcmgttgcatacatgcctacttgtttaattgttttacagaagcatgcattgaataagtgacaatcaagacaatggaaggaaatgaatagatattgaaaaatcaatgggcgacaagatcatactagacccagcatatacacaatctcatttaagaggggaataagaatgtttagtatggaatggattcttgaaggatttgagtcaaatgactcacacaaattgtctggaaagttgtctcagaggaactgggaaatgaagagtttaaaatcgttgattaaaaggtcaggaaggagttcagagaaagaaaccaagtgtgcttggagttttttccacta

SEQ ID NO: 456911 - DNA, 502 bp, Homo sapiens
acactctgcgcagtccgggaattcctgtatgacttgctgagctcagctgtgcaagtactctttggtttcatctgctgtatgttggtgctacaagaattattgtagtggtcaaaatcatggaccaatcaaaacaacttctggttatagtaacctaattcctccactgatccgttgcatacatgcctacttgtttaattgttttacagaagcatgcattgaataagtgacaatcaagacaatggaaggaaatgaatagatattgaaaaatcaatgggygacaagatcatactagacccagcatatacacaatctcatttaagaggggaataagaatgtttagtatggaatggattcttgaaggatttgagtcaaatgactcacacaaattgtctggaaagttgtctcagaggaactgggaaatgaagagtttaaaatcgttgattaaaaggtcaggaaggagttcagagaaagaaaccaagtgtgcttggagttttttccacta

SEQ ID NO: 456912 - DNA, 589 bp, Homo sapiens
ctgtggctgctcacacaggcactttatcagctccttttgctactaggtragatcatgaggctgagttctaacccatggaatgtgagtagaagtaatgtgcacacatccaggtgagtccatacagacttccccacactttcccccatgttctgtacctctccacgtggatggaaaagtcatgatcagtgggatagaccttgaaggccagggattgaaggcctgggtccctgagtaaattcaatagaaaagccgccccaccaatctgtttacatgacagctgctgtaaaatggataggagataaacttcctggattatgtttttttgggatctattttgttatagcagtagcctgatatgaaaaggatgtgatgatgatgatggtgacactagcacttatggcgaatttatacgtgcctcattcaatttaagcacattacatattaatatattaactcatgtaattctcaaaacagcttcgtgaagcaggtactacaattcttatgtcacttacctaatttcatgtagttacttaatagccaagccagaatacatgctttggcaccacagtctttacccttagccaacaaa

SEQ ID NO: 456913 - DNA, 589 bp, Homo sapiens
ctgtggctgctcacacaggcactttatcagctccttttgctactaggtaagatcatgaggctgagttctaacccatggaatgtgagtagaagtaatgtgcacacatccaggtgagtccatacagacttccccacactktcccccatgttctgtacctctccacgtggatggaaaagtcatgatcagtgggatagaccttgaaggccagggattgaaggcctgggtccctgagtaaattcaatagaaaagccgccccaccaatctgtttacatgacagctgctgtaaaatggataggagataaacttcctggattatgtttttttgggatctattttgttatagcagtagcctgatatgaaaaggatgtgatgatgatgatggtgacactagcacttatggcgaatttatacgtgcctcattcaatttaagcacattacatattaatatattaactcatgtaattctcaaaacagcttcgtgaagcaggtactacaattcttatgtcacttacctaatttcatgtagttacttaatagccaagccagaatacatgctttggcaccacagtctttacccttagccaacaaa

SEQ ID NO: 456914 - DNA, 589 bp, Homo sapiens
ctgtggctgctcacacaggcactttatcagctccttttgctactaggtaagatcatgaggctgagttctaacccatggaatgtgagtagaagtaatgtgcacacatccaggtgagtccatacagacttccccacactttyccccatgttctgtacctctccacgtggatggaaaagtcatgatcagtgggatagaccttgaaggccagggattgaaggcctgggtccctgagtaaattcaatagaaaagccgccccaccaatctgtttacatgacagctgctgtaaaatggataggagataaacttcctggattatgtttttttgggatctattttgttatagcagtagcctgatatgaaaaggatgtgatgatgatgatggtgacactagcacttatggcgaatttatacgtgcctcattcaatttaagcacattacatattaatatattaactcatgtaattctcaaaacagcttcgtgaagcaggtactacaattcttatgtcacttacctaatttcatgtagttacttaatagccaagccagaatacatgctttggcaccacagtctttacccttagccaacaaa

SEQ ID NO: 456915 - DNA, 589 bp, Homo sapiens
ctgtggctgctcacacaggcactttatcagctccttttgctactaggtaagatcatgaggctgagttctaacccatggaatgtgagtagaagtaatgtgcacacatccaggtgagtccatacagacttccccacactttcccccatgttctgtacctctccacgtggatggaaaagtcatgatcagtgggatagaccttgaaggccagggattgaaggcctgggtccctgagtaaaytcaatagaaaagccgccccaccaatctgtttacatgacagctgctgtaaaatggataggagataaacttcctggattatgtttttttgggatctattttgttatagcagtagcctgatatgaaaaggatgtgatgatgatgatggtgacactagcacttatggcgaatttatacgtgcctcattcaatttaagcacattacatattaatatattaactcatgtaattctcaaaacagcttcgtgaagcaggtactacaattcttatgtcacttacctaatttcatgtagttacttaatagccaagccagaatacatgctttggcaccacagtctttacccttagccaacaaa

SEQ ID NO: 456916 - DNA, 624 bp, Homo sapiens
tcatttaaatataactattataatattatcaaattaagtctatgttaaattttttgatgaagaaactcctcagcatttatttttaatgaagactcctttgaaggaaaacattcaacaacagatatgaagaggtaatacaaaatatgagtgttaagttccagaatagatggtgtattaagccatgcatgcatttctataaaggaatacctgagactgggtaawacttaagaaaagaggtttaactgtctcatggttctgcaggctctccaggaagcacagcaccagcaactgcttctggggaggcttcaagaatctttttctcatggcagaaggccaactgggagcaggcacattacatggggaaagcaggaaaaagagagacagtgccggaggcgggcggtgtgccacactttacaacaaccagattttgtgagaactcactatcagccataagagatccacacccaagaccccaccaggccccacctccaacattgggaattacacctcaatatgatttggaggggacatccaacctatatcagatgtgtattagagaccatctacttcaacaatgtccatgtatctaggttggccagataaggccttgaaagacaatgatta

SEQ ID NO: 456917 - DNA, 604 bp, Homo sapiens
gcacagcaccagcaactgcttctggggaggcttcaagaatctttttctcatggcagaaggccaactgggagcaggcacattacatggggaaagcaggaaaaagagagacagtgccggaggcgggcggtgtgccacactttacaacaaccagattttgtgagaactcactatcagccataagagatccacacccaagaccccaccaggccccacctccaacattgggaattacacctcaatatgatttggaggggacatccaacctatatcagatgtgtattagagaccatctacttcaacaatgtccatgtatctaggttggccagataaggccttgaaagamaatgattaggagtttttcctgaagttcctctcctgcagtttccaaacactcctggtgcctgcaatgttgaaggcaggtcactggcactgacttgaagtctctgagtgaaatcctttggctaagaaaaacaccgcatgcatttcactaggtatgtagcttattaaaaccagtgtgtgaaatgcatcagtgagaggacaatatgacatttcttggccccagctacactcagctgttctaaaaggggtctgctctttaattacc

SEQ ID NO: 456918 - DNA, 541 bp, Homo sapiens
tgatacaggatggacataacaacaatgctactgatattaatgaaaatttagctcattcccatattttctgtcatgtctcctaagtgatgtatgattgtagggtaagaccaaataactgccctctatagcttcagaattacagatatatagagagatcaaacaatccattaactgtacacagcacagacttgcagtctctggttcagcatataaggaactggaaatcattgatccagtcttcacacacaaaaaaaagctgaataaactgaaaatcaacaactatttttagatccattagagcagtgatccccagtctttttggcaccagggaccctttcatggaagacaattttttccacggatggggtgccaggggaagtsactttgcaatgaaactgctccacctcagatcatcaggcattagttagatcctcatgaggagcacacaatctaggtccctcacatgcacaggtcacagtagggttcatgcttctatgggaatctaacgccactgccaccaatctgacaggaggtggagctc

SEQ ID NO: 456919 - DNA, 554 bp, Homo sapiens
gggtgccaggggaagtgactttgcaatgaaactgctccacctcagatcatcaggcattagttagatcctcatgaggagcacacaatctaggtccctcacatgcacaggtcacagtagggttcatgcttctatgggaatctaacgccactgccaccaatctgacaggaggtggagctcagaagttaatgctcgctcacctgcccctcaccttctgctgtgcaawctggttcctaacaggccatgggcccagagcttggatacccctgcattagagaattgaggtcataggacaaactgctgcctctaaaactgaagaaagaaagagggggacacatggaaccacaatgtactagaacagaagaccagggaaaggtactcctgcaggaactaagacaagggtagaaaatcctaaactgtaattgatcaactgctggaggctcagggtgaataagtttgaaagttaaatactctgaaggttgaggggaggaactcttttgaggacacccagagtttcatgagttttacttccagaagtctcatcaagttctctatct

SEQ ID NO: 456920 - DNA, 576 bp, Homo sapiens
cattaatattgaaaatgacaaaagaaccatcactactgatcccatgaattttaaaagggtaatgaaaaatattattatcatcattattattattattattgagacagagtcttgttctgtcrcccaggctggagtgcagtggtactatctcggctcactgcaacttttgcctcccaggttcaagcgattctcccacctcagcctcctgagtaactgggatcacaggtgcccaccatcatgcctggctaatttttgcgtttttagtagagacaggtttcaccatgttggccaggctggtctcgaatccctaacctcaagtgatctgcccacctcagcctcccaaagtgctgggattacaggtgtgagccaccgcacccagccaaaaaatattattaacaatatataccatatatttgataatctagatgtaattgaccaattccttgaaaggcacatctactgaaatttacacaagaaaaaacagataatctgactacacctatatctattaaagaaattcaatcaattattaataacctttcaaaacaaaaccataatacaaaaccagacaaaaac

SEQ ID NO: 456921 - DNA, 576 bp, Homo sapiens
cattaatattgaaaatgacaaaagaaccatcactactgatcccatgaattttaaaagggtaatgaaaaatattattatcatcattattattattattattgagacagagtcttgttctgtcacccaggctggagtgcagtggtactatctcggctcactgcaacttttgcctcccaggttcaagcgattctcccacctcagcctcctgagtaactgggatcacaggtgcccaccatcatgcctggctaatttttgcrtttttagtagagacaggtttcaccatgttggccaggctggtctcgaatccctaacctcaagtgatctgcccacctcagcctcccaaagtgctgggattacaggtgtgagccaccgcacccagccaaaaaatattattaacaatatataccatatatttgataatctagatgtaattgaccaattccttgaaaggcacatctactgaaatttacacaagaaaaaacagataatctgactacacctatatctattaaagaaattcaatcaattattaataacctttcaaaacaaaaccataatacaaaaccagacaaaaac

SEQ ID NO: 456922 - DNA, 563 bp, Homo sapiens
aattgagaaagaaataaaactgttcatagatgacatgattgtctctgtagaaaatcaaccaataatcaaccaaaaaacttcctggaagtgagaagcaattagagaaaagttgcaggatgcaagaataatatgcaaatttagttattttttatatagcaggaatgaacaattgraattcaaaatttaaaacaataaaatttatattagcaccaaaaaagaaatatatatttataaatctaacaaaaaagtacatgatatctatgaagaacactacaaaactgatgaaaaatctcaaatatagataaatagatgttatttcatgaggaagactcaatattttcaagatgtaagttcttcccaacttaatttatagattcaatcaatcatagtcaaagtcctagcaagttattttgaggatactgagaggctcacttggaagtttaaaaggaaagtcaaagactccgaataaccaacacaaggttaaaggagaagaacaaagccagacaactgacactaccagactttagacatcatataaggctatagtaatcaagacaatgtag

SEQ ID NO: 456923 - DNA, 522 bp, Homo sapiens
gttatttcatgaggaagactcaatattttcaagatgtaagttcttcccaacttaatttatagattcaatcaatcatagtcaaagtcctagcaagttattttgaggatactgagaggctcacttggaagtttaaaaggaaagtcaaagactccgaataaccaacacaaggttaaaggagaagaacaaagccagacaactgacactaccagactttagacatcatataaggctatagtaatcaagacaatgtagtatttgtgaaagaatagacacactgataatggaatagaatagagagcccagaaacagactcacacaaatagaagtaactgatatttgacaaggaatcaaaggcaatccaatgcagaaaggataatgcagaacaactacacccacaaacaagcaaacaaaaaaaaaagaatctagacacagagtatacatgtgttaccaaaattaactcaaaattrttcattgaattaaaagtcaactgcaaactataaaacttgtagaagataacatagg

SEQ ID NO: 456924 - DNA, 612 bp, Homo sapiens
gaattgctatcatccagagatgcatgttgtgtaaataaagatgatagagtaacttaatgtgactttgaagtgtggaaatacgacttgggattggaagtggtatgctccaaccagcactttcaatttcagaggaatggcatagggagtattcgagattattcatagtgatgtcagaggggtagatagctcagcttccaaagctattacttgaaggcagtggtattagccagtcttacccttgaatgttgtcaacctcacttgcttcctgctcatgtccttggtttgggttcttagccttacttctgaattttggagcaatccaatatcctttcagtaaacttactttttgcttaagttagcccaastgcaattctgttgcttgcaataacatattctttgggctattacggtaagataggggagtggtctatctttctggaaatgacaacataattggtactagaggactaatttgggagttgtatatgtgtgagtaaattagatatatcagttatgtggccgttacagagattctgatgaacaatcataaggtctcaaatgagaacttgggcagtaaaaagaaactgggagaagaaaaggttgcaacattta

SEQ ID NO: 456925 - DNA, 612 bp, Homo sapiens
gaattgctatcatccagagatgcatgttgtgtaaataaagatgatagagtaacttaatgtgactttgaagtgtggaaatacgacttgggattggaagtggtatgctccaaccagcactttcaatttcagaggaatggcatagggagtattcgagattattcatagtgatgtcagaggggtagatagctcagcttccaaagctattacttgaaggcagtggtattagccagtcttacccttgaatgttgtcaacctcacttgcttcctgctcatgtccttggtttgggttcttagccttacttctgaattttggagcaatccaatatcctttcagtaaacttactttttgcttaagttagcccaactgcaattctgttgcttgcaataacatattctttgggctattacggtaagataggggagtggtctatctttctggaaatgacaacataattggtactagaggactaatttgggagttgtatatgtgtgagtaaattagatatatcagttatgtggccgttacagagattctgatgaacaatcataaggtctcaaatgagaacttgggcagtaaaaagaaaytgggagaagaaaaggttgcaacattta

SEQ ID NO: 456926 - DNA, 557 bp, Homo sapiens
  misc_feature (1)...(557): n = A,T,C or G
nnnnnnnnnnnnnnnnnnnnnnnnnnnnnncaaaatttcacatttcttaaatgtgaaatttttcaacttaaattttgaggataaagtgaggttatgacgtataccctgctcctataacagtgcctggcatactacagacaacaagcaaataaataggtaattttwaaaaaagtatttaaaaattgtggtaaaatatatagaacataaaactaccatcttaatcattgttaggcctacagttcagtagccttaagtacatttacattgttcaaccatcaccatcatccatctccagaatttccatcttgcaaaactgaaattctgtacctgttgacaataacgcatcattttctccttccccagcccctgatgtctaccattttactttctgtctctgtgaatttttctactctgggtgccacacatgagtggaatcatacagtatttgcccatttgtgactggtttatttcatttagcataatgtcctcaaagcttattctgttgtagcctgtgtcaaaacttccatgaaaacttgtttttttcaggcagaataatg

SEQ ID NO: 456927 - DNA, 557 bp, Homo sapiens
  misc_feature (1)...(557): n = A,T,C or G
nnnnnnnnnnnnnnnnnnnnnnnnnnnnnncaaaatttcacatttcttaaatgtgaaatttttcaacttaaattttgaggataaagtgaggttatgacgtataccctgctcctataacagtgcctggcatactacagacaacaagcaaataaataggtaatttttaaaaaagtatttaaaaattgtggtaaaatatatagaacataaaactaccatcttaatcattgttaggcctacagttcagtagccttaagtacatttacattgttcaaccatcaccatcatccatctccagaatttccatcttgcaaaactgaaattctgtacctgttgacaataacgcatcattttctccttccccagcccctgatgtctaccattttactttctgtctctgtgaatttttcyactctgggtgccacacatgagtggaatcatacagtatttgcccatttgtgactggtttatttcatttagcataatgtcctcaaagcttattctgttgtagcctgtgtcaaaacttccatgaaaacttgtttttttcaggcagaataatg

SEQ ID NO: 456928 - DNA, 557 bp, Homo sapiens
  misc_feature (1)...(557): n = A,T,C or G
nnnnnnnnnnnnnnnnnnnnnnnnnnnnnncaaaatttcacatttcttaaatgtgaaatttttcaacttaaattttgaggataaagtgaggttatgacgtataccctgctcctataacagtgcctggcatactacagacaacaagcaaataaataggtaatttttaaaaaagtatttaaaaattgtggtaaaatatatagaacataaaactaccatcttaatcattgttaggcctacagttcagtagccttaagtacatttacattgttcaaccatcaccatcatccatctccagaatttccatcttgcaaaactgaaattctgtacctgttgacaataacgcatcattttctccttccccagcccctgatgtctaccattttactttctgtctctgtgaatttttctactctgggtgccacacatgagtggaatcatacartatttgcccatttgtgactggtttatttcatttagcataatgtcctcaaagcttattctgttgtagcctgtgtcaaaacttccatgaaaacttgtttttttcaggcagaataatg

SEQ ID NO: 456929 - DNA, 557 bp, Homo sapiens
  misc_feature (1)...(557): n = A,T,C or G
nnnnnnnnnnnnnnnnnnnnnnnnnnnnnncaaaatttcacatttcttaaatgtgaaatttttcaacttaaattttgaggataaagtgaggttatgacgtataccctgctcctataacagtgcctggcatactacagacaacaagcaaataaataggtaatttttaaaaaagtatttaaaaattgtggtaaaatatatagaacataaaactaccatcttaatcattgttaggcctacagttcagtagccttaagtacatttacattgttcaaccatcaccatcatccatctccagaatttccatcttgcaaaactgaaattctgtacctgttgacaataacgcatcattttctccttccccagcccctgatgtctaccattttactttctgtctctgtgaatttttctactctgggtgccacacatgagtggaatcatacagtatttgcccatttgtgactggtttatttcatttagcataatgtcctcaaagcttattctgttgtagcctrtgtcaaaacttccatgaaaacttgtttttttcaggcagaataatg

SEQ ID NO: 456930 - DNA, 620 bp, Homo sapiens
tgcttctgttgatttatgtcagtgtttttcctgtctttccagtggaacatttttggagagtataggtaagtgtgtgttttcagttagccatcagaaccagaaatgagttttctaaatatttacaacttttgaagaacctactaaaagaacagtaattcagcttagaaattcattttttttcctgtttgctgtcttgcagtataaattttctttcaatttgagggaaggtgttttgaaggcattctgaaggtggtctgtgcagtgatactgttcattgagagaaaagcctctaagtgtcgggctaactaacattaaatgctacatgggtcattttgctatgaagagacattttcttggtgctttatttctgattactcctatttctaattacttggtctctttcaaataatgtggggtyaacgttgaagagctaaatacaaatcagccatttcaatttccacatgcatagtagctatacgttttttcagttcttcctcctgtgagacattcagtgatgtttattacaaaccaagtgaggtggaagaacgactgcccgactggaacacaggaaacctatgtccaacacccagtcactagggattagaaactccgaaatttct

SEQ ID NO: 456931 - DNA, 620 bp, Homo sapiens
tgcttctgttgatttatgtcagtgtttttcctgtctttccagtggaacatttttggagagtataggtaagtgtgtgttttcagttagccatcagaaccagaaatgagttttctaaatatttacaacttttgaagaacctactaaaagaacagtaattcagcttagaaattcattttttttcctgtttgctgtcttgcagtataaattttctttcaatttgagggaaggtgttttgaaggcattctgaaggtggtctgtgcagtgatactgttcattgagagaaaagcctctaagtgtcgggctaactaacattaaatgctacatgggtcattttgctatgaagagacattttcttggtgctttatttctgattactcctatttctaattacttggtctctttcaaataatgtggggtcaacgttgaagagctaaatacaaatcagccatttcaatttccacatgcatagtagctatacgttttttcakttcttcctcctgtgagacattcagtgatgtttattacaaaccaagtgaggtggaagaacgactgcccgactggaacacaggaaacctatgtccaacacccagtcactagggattagaaactccgaaatttct

SEQ ID NO: 456932 - DNA, 548 bp, Homo sapiens
ccacactgtcttccacaatataagtgttcctttttctccacaaccttgccagcrtctgttattttttgcctttttaataatagcccttctgactggtgtgagatgatatctcattggggttttgatttgcatttctgtaaagatcactgattgagcttctttttcatatgattgttggctgcatgtaggtcttcttttaaaagtgtctgttcatatcctttgcacatttttaataaggttgtttttgttcctataaacttaagttctttacagatgctggatattagacctttataagatgcacagtatgcaaatatttcctcccatcgtctctgatatttttgtcatctcccatatttttcagcactgtcttgtaattttcattgtagagatctttcacctcccctgttcactgtattcctagatattttattcatttgttgctattgtgaatgggattttattccaggctcagctcttggcttggctgttgctggtatataggaacgctactgatttttgtatgctgattttgtatctttagactt

SEQ ID NO: 456933 - DNA, 627 bp, Homo sapiens
caccgtaatttctctaaaaagaatcttctaaatatgtatttatttacagactctatttccyggtaaaataatgaactacttaaccatttctatctttccataatcttgcttcctttaatttatttccttgagtgtccttaaactgtcactctgtcaccacatcatactttttgtcttcaagcatcacagttctctctgatcttaaccaaaaaaagacaaaatgaaataaacttagtctagattctcttctaatgattattgttttcgttataaatatatattaaataaccattcctcatgcactttgtgtcctccccctcactatccacaccttccttggtgcccttcaatctgtcttctgcaaaatattatttctgcaactagtaattattggtcactcattcttggccattgatctagatagtgtaaagataatattttagaagattcagtctctgtcctcttgaatatattctagttctcttccaggacttttatgatttttaaaattgtaacaacctgattcttgctattatatgtatttaatactactgatcaatcacttatttccacatttgagttccatactatcatttgcccactaggtaattgttagtatctccaagt

SEQ ID NO: 456934 - DNA, 627 bp, Homo sapiens
caccgtaatttctctaaaaagaatcttctaaatatgtatttatttacagactctatttcctggtaaaataatgaactacttaaccatttctatctttccataatcttgcttcctttaatttatttccttgagtgtccttaaactgtcactctgtcaccacatcatactttttgtcttcaagcatcacagttctctctgatcttaaccaaaaaaagacaaaatgaaataaacttagtctagattctcttctaatgattattgttttcrttataaatatatattaaataaccattcctcatgcactttgtgtcctccccctcactatccacaccttccttggtgcccttcaatctgtcttctgcaaaatattatttctgcaactagtaattattggtcactcattcttggccattgatctagatagtgtaaagataatattttagaagattcagtctctgtcctcttgaatatattctagttctcttccaggacttttatgatttttaaaattgtaacaacctgattcttgctattatatgtatttaatactactgatcaatcacttatttccacatttgagttccatactatcatttgcccactaggtaattgttagtatctccaagt

SEQ ID NO: 456935 - DNA, 627 bp, Homo sapiens
caccgtaatttctctaaaaagaatcttctaaatatgtatttatttacagactctatttcctggtaaaataatgaactacttaaccatttctatctttccataatcttgcttcctttaatttatttccttgagtgtccttaaactgtcactctgtcaccacatcatactttttgtcttcaagcatcacagttctctctgatcttaaccaaaaaaagacaaaatgaaataaacttagtctagattctcttctaatgattattgttttcgttataaatatatattaaataaccattcctcatgcactttgtgtcctccccctcactatccacaccttccttggtgcccttcaatctgtcttctgcaaaatattatttctgcaactagtaattattggtcactcattcttggccattgatctagatagtgtaaagataatattttasaagattcagtctctgtcctcttgaatatattctagttctcttccaggacttttatgatttttaaaattgtaacaacctgattcttgctattatatgtatttaatactactgatcaatcacttatttccacatttgagttccatactatcatttgcccactaggtaattgttagtatctccaagt

SEQ ID NO: 456936 - DNA, 627 bp, Homo sapiens
caccgtaatttctctaaaaagaatcttctaaatatgtatttatttacagactctatttcctggtaaaataatgaactacttaaccatttctatctttccataatcttgcttcctttaatttatttccttgagtgtccttaaactgtcactctgtcaccacatcatactttttgtcttcaagcatcacagttctctctgatcttaaccaaaaaaagacaaaatgaaataaacttagtctagattctcttctaatgattattgttttcgttataaatatatattaaataaccattcctcatgcactttgtgtcctccccctcactatccacaccttccttggtgcccttcaatctgtcttctgcaaaatattatttctgcaactagtaattattggtcactcattcttggccattgatctagatagtgtaaagataatattttagaagattcagtctctgtcctcttgaatatattctagttctcttccaggacttttatgatttttaaaattgtaacaacctgattcttgctattatatgtatttaatacyactgatcaatcacttatttccacatttgagttccatactatcatttgcccactaggtaattgttagtatctccaagt

SEQ ID NO: 456937 - DNA, 507 bp, Homo sapiens
acacctcctcctgggaacagctccattcattgactggtgagttggagataagatggcccaggccctatgcctcaatgtagggcatctacgaagagccatggcagctccagagctccccgtggtatcggctgagcctcttattgcacctgcatcacagctaaaccccacctgccaccaggcagatgtccagttctgtttcctcccctcctttgcagggatgttcctgagagaatttctaagaaatytctgatttggagtctgccttaaagtcagcttcccagggaacctgacttataacactccccaaacataaaaatgaatctagtttaaattaaatctcctctgaattgcccctcagattttctaatgaaatatttctgatgtagggtgaacatgactttgcttcctacagagagtctaggtagtctcttagccaagaggcagtccttcattcactccgtatttcttttatctcttgttttaacctaatgaaaattctgtattcta

SEQ ID NO: 456938 - DNA, 507 bp, Homo sapiens
acacctcctcctgggaacagctccattcattgactggtgagttggagataagatggcccaggccctatgcctcaatgtagggcatctacgaagagccatggcagctccagagctccccgtggtatcggctgagcctcttattgcacctgcatcacagctaaaccccacctgccaccaggcagatgtccagttctgtttcctcccctcctttgcagggatgttcctgagagaatttctaagaaatctctgatttggagtctgccttaaagtcagcttcccagggaacctgacttataacactccccaaacataaaaatgaatctagtttaaattaaatctcctctgaattgcccctcagattttctaatgaaatatttctgatgtagggwgaacatgactttgcttcctacagagagtctaggtagtctcttagccaagaggcagtccttcattcactccgtatttcttttatctcttgttttaacctaatgaaaattctgtattcta

SEQ ID NO: 456939 - DNA, 251 bp, Homo sapiens
ggcctcaggagaggggcaagaggagggctttttctcacatcccgtcaggaatcttggagaaaatggggctgggagcccaagtaacacatttgtcctgacacttccactccctcctrggaaccttccaagtcttcttgcctgcatctgtccaaaagaaaattgggcaggaggggaggagacaggagcaggggagtgactgaagcagggcccaaccccaatctatctcctttcctctcagaggatttgagatg

SEQ ID NO: 456940 - DNA, 619 bp, Homo sapiens
ttaaatatctgctcatattttaaaattatatacttagttttatatatgtttttaaacattgcttgaattaaagcttgaataaaaatacaatggagcccaaccagtcctctttctccagtgcaatgtaattgataaaattaattactaaactggtatttattaaaagtgatcattttcagctgcatatacaaaatcaacaattttttggaaaaaaaaatagaaaaaaaaaaacraccaataaagaaaggcagattgctactgcagttcctagaaactttaattctaaccctacacacagtgtgcctaattacagaatgggattattttttggtaaaatgattttctatagacttgttactgttctcagtatggggtaaagaatatgaaagtactgtcatttgtatttgtatttgatacttgtatacaaatttggggaaatatttgggctattctaaatctactttagtgcatgaaaataatattttcttctccatcatcaacaccaatatctaactctacttatgaaggaaaatatctgctgaactggctgccatacagcagatagataaacttaccacagtgagcttcatcagacctatcagagcagtctggcttatag

SEQ ID NO: 456941 - DNA, 564 bp, Homo sapiens
atgctctgtcaacctccttctccacctccatggtctccaggtcaaggtctctcaggggtccagccccaaggcaggtattaggtctgtggcctggcacaggttgtcccagcagtcagtgggctgggaatctgccctgtctggacactggggccctsgggctggcctggcctgctctgtggagctttctttcctcctaagagagaagatggggcttgtctgccagtagccggggttccctgccttgcacgggccccaccctgcgtggccctgcagttgtctaagtaggggggaccctgcctccctggcccttctccccctcacatctgccaagagatgatcctgctccctgtctcctggccctcttccatcctgggatccaaaagcaccttgcaataaggaagtctgcagggatgtttgataaagtttatatgaggactctttttgtctgggcagtagcttgagagaggagagccaagctttgctggacatcttccctgtgccagtggtgtgttgtgttggctcacccagcatgtttgctcagataccactgtacgttgaaaatgt

SEQ ID NO: 456942 - DNA, 607 bp, Homo sapiens
agatcaattgaggtcaggagtttgagaccagcctggccaacatggagaaaccctgcctctactgaaaaatacaataattagccgggtgtggtggtgcatgcctgtaatcccagctactctggaggctaaggcacgagaatcacttgaacccaggaggcggaggttgcagtgagccaagatagcaccactgcactccagcctgggtgatagagtgagactcagtctcaaataaataaatagataaataaataaaagctaggctcgagctggacagctggacagcctgggtttgaatcctacctcgaccytgtagtagttgggtggccctggacaaatgtcctcacctctctgagcctcagcttccgtatttgtaatgagacctccaccatggagctgtgcaactacatgacctaatgtacataaagtgcttacagcagtgcctgcgtgtgattagctctgttttatgaacaatgcccttgcttttactacattgcgttctgtgttacttgctctgctctcctgagtccttgtgggcagtaccctctagcttcctcattcatcttggtatccccagggcctggcacagtgcctggctcagagcaaggag

SEQ ID NO: 456943 - DNA, 611 bp, Homo sapiens
acaaacttgcaggtgaaagaaaagcatgctaatggaaagcctcaatccgaagagcacggagaatgggtttccacttcactggttcctccacatgtaaaattactgcatgcttaggaaggttttcatctgtgaataactcaagattttccacagcaatagttgagaaaataagrtttgccccagctgctatgatccatcagtgatgtaaggccacattatgaaaatagtttttgctgagtttctgtaatggcgagggctttttcagtagcaagtaacaaaaggagaattctactggtgcagaaaaactgggattgagggtttaaacagagcaggtacctttctgtttcttcccctttctttagctctgtgtccccatgtgttagcttctttgtcaaacaatctctctccctttgtggggaaagatggctaccaacagccccaagcctagtctatgttcctacaacttgtaatccaaaagaaaaagaaatacctctcttcctctgcattaaatgcttagaggaccctatgattggccctactgaggtcacccacggacgtggtaaaagcaagtcactgtggcagtcaactccgctgatacagtttggatattt

SEQ ID NO: 456944 - DNA, 539 bp, Homo sapiens
aggatttggaagtagtaattctggcaacggatccttccttggagccagatgagttgacgtacaggaagtgctgaccactaccttgaaatagattaacaaaatttttttcagtgtaatgataatatcgcatgagtcggaatgtgtttaaactattaacagatatctttttatccttatacatacacacaatcaaacagaactcattttsattttgggagtcatatatcaataacatttcattcttctgagcctaaaaagtgtcactatgatcatgtgattcacaaaattcccttgagccagtgactaataaagtaatcaaatattggttttgaatatgaaggtgtattcctattctcctaatttgcttaaacctgtcagattccagcaataaaatactttgtatgctgtgcatacagcaaatacagagtaggtactggggactgactggtattgtatcttattttcagttgctctgattcccacactggccagggtagtagtgaatggctataactgcaaagtgaaatgtgattctaaga

SEQ ID NO: 456945 - DNA, 539 bp, Homo sapiens
aggatttggaagtagtaattctggcaacggatccttccttggagccagatgagttgacgtacaggaagtgctgaccactaccttgaaatagattaacaaaatttttttcagtgtaatgataatatcgcatgagtcggaatgtgtttaaactattaacagatatctttttatccttatacatacacacaatcaaacagaactcattttgattttgggagtcatatatcaataacatttcattcttctgagcctaaaaagtgtcactatgatcatgtgattcacaaaattcccttgagccagtgactaataaagtaatcaaatattggttttgaatatgaaggtgtattcctattctcctaatttgcttaaacctgtcagattmcagcaataaaatactttgtatgctgtgcatacagcaaatacagagtaggtactggggactgactggtattgtatcttattttcagttgctctgattcccacactggccagggtagtagtgaatggctataactgcaaagtgaaatgtgattctaaga

SEQ ID NO: 456946 - DNA, 567 bp, Homo sapiens
gagatacatattcttaaaaacactattttttttacgtccaactttaaaatatattttaatgggccattttcagarttaattgtgtcaattacctatgataagtaaaataaattatttgttctaactcataattatacttgaagaaaaaaataatttatgaaagaactggcaatatctgtataagaaccatacatggggacatttattcttgggtcatttaaataatttactttgaaaaggttgtaacttcattgtctttattcatgtgcaaggaatttttcagactaatcctctttaaacttttagtagcaggtttggagtaaaatgttcaatgagaagttgtatatgataccgttaagtaaatcagaggaaaacaaagctgttcttgttgaacctgggttaagtgcaagacagttctgactatctactgctgcctttgacatatttctgctgaaccctggtactcagaggagcagggttagaaaacaagtatagatcaataccattattatttagtgcttttgaaatctatccagactttctgacaaaatggtgcagtaggttcat

SEQ ID NO: 456947 - DNA, 567 bp, Homo sapiens
gagatacatattcttaaaaacactattttttttacgtccaactttaaaatatattttaatgggccattttcagagttaattgtgtcaattacctatgataagtaaaataaattatttgttcyaactcataattatacttgaagaaaaaaataatttatgaaagaactggcaatatctgtataagaaccatacatggggacatttattcttgggtcatttaaataatttactttgaaaaggttgtaacttcattgtctttattcatgtgcaaggaatttttcagactaatcctctttaaacttttagtagcaggtttggagtaaaatgttcaatgagaagttgtatatgataccgttaagtaaatcagaggaaaacaaagctgttcttgttgaacctgggttaagtgcaagacagttctgactatctactgctgcctttgacatatttctgctgaaccctggtactcagaggagcagggttagaaaacaagtatagatcaataccattattatttagtgcttttgaaatctatccagactttctgacaaaatggtgcagtaggttcat

SEQ ID NO: 456948 - DNA, 510 bp, Homo sapiens
  misc_feature (1)...(510): n = A,T,C or G
tttatatgtaatcccgtttccaacgaaatcctcaaagctagacaaatatccacttgcagattccacaaaaagagtgtttcaaaactgctctatcaaaagaatgcttcaacactgttagttgagggcgcacatcacaaataagtttctgagaatgcttctgtctagttttcaggggaagatatttccttttaaaccataggcctgaaagcgctccaaatgtccacatccagatactacaaaaagagtgtttcaaacctgctctatgaaagggactgttcaacactgtgacttcaattgaaacatcccaatkaagcttctgagaatgcttctgtctagagtttatatgaagacaatcccgtttccaacgaaatcctcaaagctatccaaatatcctcttgcagattttacaaaaagagtgtttcaaaactgctgtatcaaaagaaagcttcaacactgttagttgagggcgcacatcacaaataagattctgannnnnnnnnnnnnnnnnnn

SEQ ID NO: 456949 - DNA, 510 bp, Homo sapiens
  misc_feature (1)...(510): n = A,T,C or G
tttatatgtaatcccgtttccaacgaaatcctcaaagctagacaaatatccacttgcagattccacaaaaagagtgtttcaaaactgctctatcaaaagaatgcttcaacactgttagttgagggcgcacatcacaaataagtttctgagaatgcttctgtctagttttcaggggaagatatttccttttaaaccataggcctgaaagcgctccaaatgtccacatccagatactacaaaaagagtgtttcaaacctgctctatgaaagggactgttcaacactgtgacttcaattgaaacatcccaatgawgcttctgagaatgcttctgtctagagtttatatgaagacaatcccgtttccaacgaaatcctcaaagctatccaaatatcctcttgcagattttacaaaaagagtgtttcaaaactgctgtatcaaaagaaagcttcaacactgttagttgagggcgcacatcacaaataagattctgannnnnnnnnnnnnnnnnnn

SEQ ID NO: 456950 - DNA, 374 bp, Homo sapiens
ccaagagaacatcctgtattcattttagttgtttattycttaatggttaattagaattcccttaattgtcccactctggtggaaactaaactatggaattaggtgattatcctgattatcacagactcacaggaattcatttgactgggtgatgcttttattttcttaattgctttaaatataagcatagtccataatattaaaaggttcttttaatctatactaagttaaaatttgttagttgaattaattttagaaagaaaacaaaaaagaaatgaacatacttagaaattaataattttatcactcattaatgttttactcttgttaatatatttctagatcttctttagtgtgagttattttttcctaga

SEQ ID NO: 456951 - DNA, 374 bp, Homo sapiens
ccaagagaacatcctgtattcattttagttgtttattccttaatggttaattagaattcccttaattgtcccactctggtggaaactaaactatggaatyaggtgattatcctgattatcacagactcacaggaattcatttgactgggtgatgcttttattttcttaattgctttaaatataagcatagtccataatattaaaaggttcttttaatctatactaagttaaaatttgttagttgaattaattttagaaagaaaacaaaaaagaaatgaacatacttagaaattaataattttatcactcattaatgttttactcttgttaatatatttctagatcttctttagtgtgagttattttttcctaga

SEQ ID NO: 456952 - DNA, 374 bp, Homo sapiens
ccaagagaacatcctgtattcattttagttgtttattccttaatggttaattagaattcccttaattgtcccactctggtggaaactaaactatggaattaggtgattatcctgattatcacagactcacaggaattcatttgactgggtgatgcttttattttcttaattgctttaaatataagcatagtccawaatattaaaaggttcttttaatctatactaagttaaaatttgttagttgaattaattttagaaagaaaacaaaaaagaaatgaacatacttagaaattaataattttatcactcattaatgttttactcttgttaatatatttctagatcttctttagtgtgagttattttttcctaga

SEQ ID NO: 456953 - DNA, 374 bp, Homo sapiens
ccaagagaacatcctgtattcattttagttgtttattccttaatggttaattagaattcccttaattgtcccactctggtggaaactaaactatggaattaggtgattatcctgattatcacagactcacaggaattcatttgactgggtgatgcttttattttcttaattgctttaaatataagcatagtccataatattaaaaggttcttttaatctatactaagwtaaaatttgttagttgaattaattttagaaagaaaacaaaaaagaaatgaacatacttagaaattaataattttatcactcattaatgttttactcttgttaatatatttctagatcttctttagtgtgagttattttttcctaga

SEQ ID NO: 456954 - DNA, 585 bp, Homo sapiens
cactccttgtttaattttttgccstttgttctttttggttctgatactaatgttacccacagccctccatgacaaatgtatttctatgaaaaggtaaaactttgttttcctttcagttttctttatgtctctctcttctctccctcctcttaatttttttaataaataatatttatttcctatcgtgaaatgcatcagtgattgtggttctcaaacttggctacatataaaaatcttttgaggaacataaaatactatttctgcctgggccccacagcagaccaattaaatcattctctctgggtatggggtcctggaagccatactttttaaagcttcaaattattctaaggtgaagacagtaatgtgaacccttattatacacataaaagagtatttttaatatacgctttcagcttaataataaaataagatgttccccttagttactccacacaaagtaagcatattacctgtctttgggaaattttttatgtgttcttgtcgaattacatacttttctcttctgctagaggaagtcactaccatgtcttttatgataatgatcttcttgacttttttagt

SEQ ID NO: 456955 - DNA, 585 bp, Homo sapiens
cactccttgtttaattttttgccctttgttctttttggttctgatactaatgttacccacagccctccatgacaaatgtatttctatgaaaaggtaaaactttgttttcctttcagttttctttatgtctctctcttctctccctcctctkaatttttttaataaataatatttatttcctatcgtgaaatgcatcagtgattgtggttctcaaacttggctacatataaaaatcttttgaggaacataaaatactatttctgcctgggccccacagcagaccaattaaatcattctctctgggtatggggtcctggaagccatactttttaaagcttcaaattattctaaggtgaagacagtaatgtgaacccttattatacacataaaagagtatttttaatatacgctttcagcttaataataaaataagatgttccccttagttactccacacaaagtaagcatattacctgtctttgggaaattttttatgtgttcttgtcgaattacatacttttctcttctgctagaggaagtcactaccatgtcttttatgataatgatcttcttgacttttttagt

SEQ ID NO: 456956 - DNA, 585 bp, Homo sapiens
cactccttgtttaattttttgccctttgttctttttggttctgatactaatgttacccacagccctccatgacaaatgtatttctatgaaaaggtaaaactttgttttcctttcagttttctttatgtctctctcttctctccctcctcttaatttttttaataaataatatttatttcctatcgtgaaatgcatcagtgattgtggttctcaaacttggctacatataaaaatcttttgaggaacataaaatactatttctgcctgggccccacagcagaccaattaaatcattctctctgggtatggggtcctggaagccatactttttaaagcttcaaattattctaaggtgaagacagtaatgtgaaccctyattatacacataaaagagtatttttaatatacgctttcagcttaataataaaataagatgttccccttagttactccacacaaagtaagcatattacctgtctttgggaaattttttatgtgttcttgtcgaattacatacttttctcttctgctagaggaagtcactaccatgtcttttatgataatgatcttcttgacttttttagt

SEQ ID NO: 456957 - DNA, 511 bp, Homo sapiens
ctcccaaattttagtcttggtctttctgttgacttgacacactgcagccagaattctaacacatgaaacatgacactttcctttttaaaatcttggccctgctgggccgatgtaacccagaagctgtgtgtctctgaattttttctgcactatctttgtattatgagcaattcaaccagtctgggctgtcttcagttcctcaaacatgcaacaccctcttctctggcctctggatctttatgytcacctttacacacacactaccactactgcccaaataaatggctgctgattctctctggaaagctttttcttactccccaaacgtgaccgaagtgctcttcttggtgttcccatcacccttagaacatccatcccaatagagtaatttcattctgcattttaatgccacactcacatttttttttcatctggaaggacagtaggagcaggaaccatggctgtatatcttttaaagtcaacatttattaaactcatactatgaactggt

SEQ ID NO: 456958 - DNA, 519 bp, Homo sapiens
catgttcaagtggaatcaatctgccatattcaagtcctatatatgtgatatgagcaaattatttggcactctgtacctctatttcctcatctgtaaaatgggggtaatatagcacccttctcatagggccatgatgagggttagatgggataggtatataaatttaacatagatcttggaacatactaagaggacaattaacactagctattgttctttttgagagaaaggaacttttgtgaaattctcaaaaggttccaagagccactggtccagtgagtgagcaacctgcgtgctgaacgtggcgtcccactgggacagtgctaaggggagttagtctgaggtgcacttgaggcaccttgaacttcccctctgcatctcccaacccccaagtagctcaggaccctgytctaaacagccactcaggaggaaagaccatttgaatggactgtccccagtgccactgaatagcatgtccaggttaaaacacatgttaggagagaaaccagaactccgctt

SEQ ID NO: 456959 - DNA, 519 bp, Homo sapiens
catgttcaagtggaatcaatctgccatattcaagtcctatatatgtgatatgagcaaattatttggcactctgtacctctatttcctcatctgtaaaatgggggtaatatagcacccttctcatagggccatgatgagggttagatgggataggtatataaatttaacatagatcttggaacatactaagaggacaattaacactagctattgttctttttgagagaaaggaacttttgtgaaattctcaaaaggttccaagagccactggtccagtgagtgagcaacctgcgtgctgaacgtggcgtcccactgggacagtgctaaggggagttagtctgaggtgcacttgaggcaccttgaacttcccctctgcatctcccaacccccaagtagctcaggaccctgttctaaacagccactcaggaggaaagaccatttgaatggacygtccccagtgccactgaatagcatgtccaggttaaaacacatgttaggagagaaaccagaactccgctt

SEQ ID NO: 456960 - DNA, 457 bp, Homo sapiens
gccagagaatgaatagctgactttttttcaaatgccaattcagcaattactaagtctgttggtggttaattaaaaactaccatcttgttaacgttcagagttaaattacaagtgtgaaagctgctactgtttgcaataactgaatgctctgtactctctgtcctgtcatcaaaaggagggcagggataaataacttttatttaactcactaaaaaaaaaaaaaaaacctctcagctctttcatatttaattaacttcttatcttctcagagcttgagttttgctcagagttcctgagcagtaatggaaatatctgtttattttgtccagaagatttttctcatattcattgaacagaacagttgtaactaattgagccctaaagacactggggaaaatgacacccatccaaagttttacattggasgcaactaatcccagcagggatttatggcaga

SEQ ID NO: 456961 - DNA, 596 bp, Homo sapiens
tttgcaaatatggtctggtatttaaactagttgctaagtttaaacaaatgaaaagaaatcttcaagtaaacattgccatgtatgctatagcttcagcttcccgtttaaacatagttcaaatttgatgaagtaattctgatatcataccaaaatttctaaaagtatattttaacttccaaatagctcattaaaggaatcctttccattcggtaaacctcagttctgcagaaaaccctttaatatagttcctgcaaagatgctgcagcagaaaaagcaacctgagtatggcaaatgcatcagctaggaccagtggccttcggtctccactttacataaacctgaaataaaaccayatcgatattttgaattggcaatagaattaaataggaagtttgcgatggcataaaatgttttgatttgaaggatttatataagccattttcattctcagaagggcctcaagacatctgttcatccttaaatctgaaaggaaatgtaaataagcattcacatttccatgtaaaaggtggtagaaggtgtatttattgagacacttgtctaacactgtagactttaattacttaagagcatttgtt

SEQ ID NO: 456962 - DNA, 636 bp, Homo sapiens
tcagttcatactcttgtgatcaacttcagttgctgtgttggttaaaatagtgtttggctacacgtattcgtagaacaatcacagttttttcagaaaatacagaattatttttcttatataataagtccagaggtgggtagtcaaggactgatatggttttacatattgcttgggaatccatatagttttccttgaaatcaaggatccaagccmtttgtagtttcctcttcttccatccataatagcacttttaattctcatgatctgaagatgactattattttcagatatcacatttgtgccccaggcagcgataagaaagaaaagggcaaaaggcatgaacatgtggagtctgtccatttttaccactaaaaaaaaaaatagctttcccagaagttcagcccaagaaactgcttcttagattgcattgcccagaactaagacacatgatcacacctaaatgcaaggaagctgggagattaagttagttctctgggtacattgctgttaaactacatcatgatttgtagggaagagtgtatgttaggggtatacaactagttgggcctgccagccacacattttccttttaaatgtagaaagtggaatgctttcttactggctacagtttctatt

SEQ ID NO: 456963 - DNA, 580 bp, Homo sapiens
gctttgtgccatgaaatcagagtagacaagactcaggcatgtcattggaatccagtaagttgtgaagtatacatttcagggcagaatcatgcttttttcaacttcaggaatgaattcaggaagacttagatttagtataatggggatttccacattaaaaagaccaaattggaaattactagcatagatgaaaaatgtataatttgtgtgtgtatgtgtgtgtgccatggtgaaataaaaatggactggagcatggaaagtaatttaaccatttaaagagacaattgtttcattaatatttacttatatctgattaaatattcatgatgctttgccttccctccgtgtctaacagtgttgcattcatggccatctgcaccagctcagcacacgggaggtctcmattagccattcaggctgacagtggactctcagccaaggggcccataccctgtgatgggctaaaaacagatgatgagtttgtctgcaggcataagcaacagtgagacagacttgccctgggctgggattatagtagacaggctacagcatcacagtcccctgaagaacacagaaagga

SEQ ID NO: 456964 - DNA, 407 bp, Homo sapiens
ctttttaactcatccttcagagactcctcatcaataaattggaaaacaaaatttaggccaaacaattatgaggtgggcaaagagtaaactttaagattaagttgatcattgtctatcaatgtaaatttaataagcatttatttcacagaaaaataaaataggagggatcagcrgactatactccctgtatagcaaactatacttgctgatggccaaatttatccctcacttatttttgtagataaagttttattggaacactgccatggacatttgtttacatattgtctatggctacttttgcactataatggtggagttgaataattttgacagagactgtaaggcctgtagagtctaaaatatttactatcaggccctttccagaaaaagttgtccaacccttg

SEQ ID NO: 456965 - DNA, 407 bp, Homo sapiens
ctttttaactcatccttcagagactcctcatcaataaattggaaaacaaaatttaggccaaacaattatgaggtgggcaaagagtaaactttaagattaagttgatcattgtctatcaatgtaaatttaataagcatttatttcacagaaaaataaaataggagggatcagcggactmtactccctgtatagcaaactatacttgctgatggccaaatttatccctcacttatttttgtagataaagttttattggaacactgccatggacatttgtttacatattgtctatggctacttttgcactataatggtggagttgaataattttgacagagactgtaaggcctgtagagtctaaaatatttactatcaggccctttccagaaaaagttgtccaacccttg

SEQ ID NO: 456966 - DNA, 571 bp, Homo sapiens
tttattcaatgtagcaaacaggaagtatcccagaaaaaaatgtaccaaacaggaagtatcccagaaaacctctctagatattattttttctctccaaagctccatagtcatgacagtcattgaaaatccctgtattagtttgttttcacactgctgataaagatatacctgagagtgggcaatttacaaaagaaagaggtttgattgaacttacagttccacgtggctggggaggcctcacaatcatagtggaaagcaaggaagagcaagtcacatcttacatgaacggcagcacgcaaagagagagagcttgtgcaggggaattcctctcactakcatgagatcagcatgggaaagacttaccccatgattcaattaccatatcaatccctcttgctattttttgtcattctatcttctctcccactaccctgctctcccacctacttcctcctgtgatactgtcctatgttgttcacgggaagtggctcctcagatttctctcccctgctgctcactgacatcacacagttttttttaatttttattttattttatttttttttgagac

SEQ ID NO: 456967 - DNA, 571 bp, Homo sapiens
tttattcaatgtagcaaacaggaagtatcccagaaaaaaatgtaccaaacaggaagtatcccagaaaacctctctagatattattttttctctccaaagctccatagtcatgacagtcattgaaaatccctgtattagtttgttttcacactgctgataaagatatacctgagagtgggcaatttacaaaagaaagaggtttgattgaacttacagttccacgtggctggggaggcctcacaatcatagtggaaagcaaggaagagcaagtcacatcttacatgaacggcagcacgcaaagagagagagcttgtgcaggggaattcctctcactagcatgagatcagcatgggaaagacttaccccatgattcaattaccatatcaatccctcttgctattttttgtcattctatcttctctcccactaccctgctctcccacctacttcctcctgtgatactgtcctatgttgttcacgggaagtggctcctcagatttctctcccctgctgctcactgacatcacacagttttttttwatttttattttattttatttttttttgagac

SEQ ID NO: 456968 - DNA, 528 bp, Homo sapiens
atatttttagtttgttgagtgtttttatcatgaaaggatactggatttgggaaatagctttttttcatgtctattgagatgatcatgtgggtttaaaaaaattctattgatgtggtrtattacatgaatagattttcagatgttaaaacaaacttacattcctaggataaatcccacttggttatggtatataatgctttttatttattgcagaatttggtcgtgcttgtacttcattgagaatttttgcatctattttcatgagatattggtctgtagttttctcttcctgtgatactttgtctggctttagtatcagccagtgttggtctcacataatgagttggttagtattccctctcttattttttgaaagaattgatatgaattcttttaaaaatatttggtataaatcacctatgaaatcttctgaatctaggcttttgtgaatagttttttggttactaattcaatgcctttatttgtcatagatttatttaggttgactctttttaaaatttttaattt

SEQ ID NO: 456969 - DNA, 528 bp, Homo sapiens
atatttttagtttgttgagtgtttttatcatgaaaggatactggatttgggaaatagctttttttcatgtctattgagatgatcatgtgggtttaaaaaaattctattgatgtggtgtattacatgaatagattttyagatgttaaaacaaacttacattcctaggataaatcccacttggttatggtatataatgctttttatttattgcagaatttggtcgtgcttgtacttcattgagaatttttgcatctattttcatgagatattggtctgtagttttctcttcctgtgatactttgtctggctttagtatcagccagtgttggtctcacataatgagttggttagtattccctctcttattttttgaaagaattgatatgaattcttttaaaaatatttggtataaatcacctatgaaatcttctgaatctaggcttttgtgaatagttttttggttactaattcaatgcctttatttgtcatagatttatttaggttgactctttttaaaatttttaattt

SEQ ID NO: 456970 - DNA, 464 bp, Homo sapiens
attctaatctctggaattattgaagtctgtatctgttttttgtaatttcttttcttttcatttttagttttttgagatgggggtctcactctgttgccaacttctgcctcttacaggcttgagccaccatgcccagccaaaatttaatttaatttaaattaataatttaagtagctacatgtggctagtggtaaccatattaaatagcagacatctacaggctagacttttccttctacaaaattttacacaatacttctccttcaccttccaagcctgccttcagaagtaactagtattttccattccwgagccttttctggttgcagcactaaaagtcaacttgccttttgttggcctgcgttgaccattttcttcaccaactaaacactttcaacagaatagataaacttgaatcctagatgagatagcattgattcaagcatttttcattttctgtaata

SEQ ID NO: 456971 - DNA, 464 bp, Homo sapiens
attctaatctctggaattattgaagtctgtatctgttttttgtaatttcttttcttttcatttttagttttttgagatgggggtctcactctgttgccaacttctgcctcttacaggcttgagccaccatgcccagccaaaatttaatttaatttaaattaataatttaagtagctacatgtggctagtggtaaccatattaaatagcagacatctacaggctagacttttccttctacaaaattttacacaatacttctccttcaccttccaagcctgccttcagaagtaactagtattttccattcctgagccttttctggttgcagcactaaaagtcaacttgccttttgttggcctgcrttgaccattttcttcaccaactaaacactttcaacagaatagataaacttgaatcctagatgagatagcattgattcaagcatttttcattttctgtaata

SEQ ID NO: 456972 - DNA, 556 bp, Homo sapiens
ttgacattttgggttgaataattttttgttgtgggaagttctcctatacgttgtaaaacattttgcactgttgctggactctacccactaaataccagtaggacccgcacatcccttctgcctttgacaatcaaaaatatctgtagaccttggtctagaagacaaaatcccctccgttgagaactactgctttaaaaggtttttaactttctaaactaggccatgctttatgaagaatccttaagttagcattttctcaaatccattaaaatcacctgaatattctgtttgagaagtagactaggaatctttttaacaaacaccctagtgattctaatttagctatttctaaagatcacacttagagaaacattgccctaagctgactacaacrttatgtgaaatatccctgggcaccattagaatgctctagacatataagatttcaagggacaggtcaatgtattgagaagataaatatttactgggtaagaaatcatgcaaactatccaagagcgctgcatggagcaaatctagtacaaacattggtgaaatc

SEQ ID NO: 456973 - DNA, 625 bp, Homo sapiens
cccttgccctcccccagggttctataccctccctgccaatgcctggggcctcaagggctgagggcatcttggggtggggctaggaaccttggtcctgacacatggtgtgacctgggaccctcrgttttcttctctgggcctcagtttccccatctctaatgcaaggggcttgaactagtgcagtggtcctcaactcccactgagcatcagaatacacacccagcaggcccacccagcagggatccgatctgggagctctgtagggtggagcctggtgaggggtctgctgtgactctgatggacagatggggctgagaaccacttctacagagggaggagcttcaagacctctaggccagttggctggtgagttcaggaggctgcaatgctgtctggggttccattcctttcctgaaacccacctgctgggaacagagtcacctgggcccaggtatggtggaaggcagggagacatgtccagcccccaggcctgaaggctgcagttgcacccaggatgctctccccattcccaccgccctccaggctcagcatgaactgtcagctgggagtgtgtggagcagcactggggaccagggaccccgctgtgtgcctccttttccacatt

SEQ ID NO: 456974 - DNA, 565 bp, Homo sapiens
ctgggcactcatttggggggttatatctccctgggagccaggaacagttgatcccgcagagcttggtccctcrtggcctctctgtaccctcaaagttgcccatgcccccagcttttccacctgcttcctgggctcccggcacctcctgctggacctgtgggcaggagcaggttgggatcagactcagaggccttggctcacttaggtgttgtgctgaggggctggggtccttgtttgccaacccccacactcccgctccaccaaaccagtttatgaaactgcagaaccacagtaaactccttcccctggcaagccaaggtggttgggcggggttggggtgacaatatgtttccaggggccccagggttctctcctcacaattaccctgctagagacagcctctgatgatccagtctggccatgtcaccaggctgagagggacggcccacccaacagaagccacaacaggtccccaaagaatttctgcaggctgggactcctgagtgaaatgaagaagtgggattcaacagagagaaatgtgaagtctgccagctaggtatgaagg

SEQ ID NO: 456975 - DNA, 591 bp, Homo sapiens
gccagctaggtatgaagggcccatggctcagcttgagggaagtttgtgcaaaatctgcttgggaacgtttgttaacttcacacgaactaacagtgtgagcagctgccaaagccctgtgcaggtttgcattgcattaactgttgacatcggtctggctgtgcacagacctcagyccgagtgagggaccctacccttggataaatgttggtgaactgccctgtgtcttttggagaggagtgggtggtgcctgggctgcagagccaggccagggcaggacttgggaggaacatgatggaattctcaaggtctgaatgtctgtctgggggaaggagaattccacttgctccaggtgattcctgaagggagagctagctccagagggtggggagggccaagaggtgattttcagctcaaatgaggagaagtttctaggttgccactctcccccagtggctgctggaggcacaggggcaggagtgagtgtctcagcactagcagcagtgtgagcaagggatggtgctttgtcacatgtcttgcacatccaaggtaaccaaaggacatttagtccaaaggattccaaagaaagggatg

SEQ ID NO: 456976 - DNA, 605 bp, Homo sapiens
gagcaagctctgagacactcttgttcatgtagtaggcactggcctagctcacagatggcctttgataagaattagtagaaggaaagatgtaatgattgatggctgcttgaccagtacaatgagtaccatggtaaggctgttggtgttcactcacatctgagagtttctttatacttctcagcctcccttgctcttaggttggtcacatgactcactccagcaaatgggatgtgagcagaaggtatatatgttacctggaatgaggtgaataattacctggtgtgcttttctacaatccttgttgcctgagtgatgccaagatcattttgaagctgcaagatggtggagccacaagatgaaaggaacctgtatcyctgagtcaccacacagaagagagacatctaggaaagctgcttgacatgggtcatatgagtaagaaatcaacctcactgcgcaaagccactgagaaatcaaccttcctgcacaaagccaccgagatgttggggctacttattagagtggctagtgggaattactctgactaatataaaggggttaaacttgatgggatgcaaataggaaatggcttcattttttccaatcac

SEQ ID NO: 456977 - DNA, 576 bp, Homo sapiens
gcagctcattctgccccacacttgagtcctgcctccctctttctttctctctgtctctctctctgtccctacaagtaggatggtgggtgagcaaacatcctccaaatgcaggggagcctgggtctgtctgtgtcccactccccatcccgctttgtagcccctccagaacactacctcccctcatctctggccagctgacatcttaccatccctccctgccaaggtaagtcggtgtcagatggtttaattcatagcaatgaacccacctacctgtacaaaaataatgcctgggaggtaccctcggcctttattcacctcarttctaattctatctttactactgtctggcttggtgaccttggcaagtcactttgtcactgggcctcagtttccccatctggcccatcatgagattgaactaagtcacttctaaagttctttctagaattgagccttccccacccagcaccccttaacaacaagcagcagcaacacttctctcccctctctacaatgtcagctccaccagaggacagggacttgtgtctgtcttgttcactccagcatcctaagaca

SEQ ID NO: 456978 - DNA, 620 bp, Homo sapiens
gctatttatataccccaaaatcttattacattcttcccaagaacgctgtgacaaagccaaaaggcaaataacaaactggaaaaaaaacatttttaccatatatgaaagacaaagggttaacagtcttaatacaaagagcacttcaaaccattgggaaaagataaactaggaattcacaaattcaaagagccaataaaccagaaggaaaattagaaaaattgtcaacttcactaataattcatgacatgcaaactcaaataatagtaagatgcaacttaacacgtagcaaattagcaaagattcgctcartccagtgttggtttgtgtgtcgggaaaagcgcatcatgatggtatactgtgggtatgagtgagaagtggcacatccttctccaggtgggggcgattgggctgtcaaacctgagactctttaacacaggcatactcttcaacccagtgatcctactcctaagtattaatctgaagaaatgcctcaaggatgtgtatctaaatgttaatcaagtgttcttaagaagtgcctggttgcccagtgattaagctttagtcaaatgattccaggtgccgccacacaatggaataccttgagccatgaagaatgatgc

SEQ ID NO: 456979 - DNA, 620 bp, Homo sapiens
gctatttatataccccaaaatcttattacattcttcccaagaacgctgtgacaaagccaaaaggcaaataacaaactggaaaaaaaacatttttaccatatatgaaagacaaagggttaacagtcttaatacaaagagcacttcaaaccattgggaaaagataaactaggaattcacaaattcaaagagccaataaaccagaaggaaaattagaaaaattgtcaacttcactaataattcatgacatgcaaactcaaataatagtaagatgcaacttaacacgtagcaaattagcaaagattcgctcaatccagtgttggtttgtgtgtcgggaaaagckcatcatgatggtatactgtgggtatgagtgagaagtggcacatccttctccaggtgggggcgattgggctgtcaaacctgagactctttaacacaggcatactcttcaacccagtgatcctactcctaagtattaatctgaagaaatgcctcaaggatgtgtatctaaatgttaatcaagtgttcttaagaagtgcctggttgcccagtgattaagctttagtcaaatgattccaggtgccgccacacaatggaataccttgagccatgaagaatgatgc

SEQ ID NO: 456980 - DNA, 339 bp, Homo sapiens
aaagaggcacttttgaaataatkataactagtgtgctctctaattctgctggtactttttctgaacaagaatattccatgcagccgggcactgtggctcacacctgtattccagcactttgggaggccgaggtgggtggatcacttgagccgcccgagtccaagaccggcttgacaaacatggcaaaaccttgtctctactaaaaaatacaaaaattagctgggcgtggtggcgcatgcctgtgatcacagctacttaggatttgcttgaacctgggaggcagaagctgcagtaagctgagatcgtgcctctgcactccagcctgggcaacagagtgag

SEQ ID NO: 456981 - DNA, 559 bp, Homo sapiens
cttctgatctataaacaatattttatatctctccatttatttagatcttctttgatttctctcatcaattttgtagtttttagcacacaaagcttacacatattttgttggattgatccccaagcatttcacattttcatgctattgtaaatggattttttaaaattacaatttctaattgttcattgctagtacacagaaatacaattaaattttgtatattacccttttttcctgaaaccttgctaaattcgtatgttctagtagttttttggtacattctgttgggattttatatgtagacaattatgtcatctgcaaataaagacagttctttacgttcctttccaatctgggtacttttagtyctttttcttgccatattgcactggcaagtcttccaatacaatgttaaataggaatcgtgtaagtggacattcttgtcttgtcctgatcttatggggaaagcatcagtttctcattattaattatattacatccttatcaggttgaagaaattctcttctattcctaggttgctaagaatatttgtcatgga

SEQ ID NO: 456982 - DNA, 562 bp, Homo sapiens
tctcccagggcactaactggggctgactggatcaaggggccatgwtatcccaccggagctggtgtctggagccaggcagggggtgaacagcctttgtctctccttttgttcctttgacctcagagcagaggcctgcatgaggttgccctggggaacctggaatctgagctaatgaggcgacttcctggcccaacccagacagctgaggctgcagcaccatcggtagtaagggacaggtagcctgggacctcttctgagcctaacagtctgggtccccttgtgggtaaaagcatccaacaagtgtctgtgtgtgctgtgaacaagtacactggacaataggtgtagacagggaccatccggaacactgaaagacatggtcatcccgcctgtaccatcagcatcctcatctccatctaaaagacaagccaaggatcacagagactgccacttgcccagggacacagctgggcagaggcaagcctcagatctgaatcagaccagaatccagcttttgctcctgtcccctgacagaccctccaccctccacttgccatggtaataa

SEQ ID NO: 456983 - DNA, 596 bp, Homo sapiens
tatctttaacctttggctgaaatccattcagatcgctgtgctaactctcccagagataggtatcttcaggttcatttcctgtaggagagtgggagcaataacaggtggtgaagggaaatgtgagcatataggcttctgtttgctctccaaattatattaatccctaaaagtaaatctagtccttacagagtataaggggtggggacagggaaggtattgtagaagatggactgtagcacaaaggagattaggatttccccttatctcctgaatttttttttcttcttttcgttcagttttcagactttgagacaaataaatgctagggttccagaacccactcttaaacttagaaagtaacagaattggaagatccttagcttgccaaggactatccaatcactctccatttttcagaaacagattctgaggcttagatacaaaaarttacatgtgtgtatgtgtgtgtgtgtgtgtgtgtgcgcgcgcacgcgtgtgtgtatacctctgtcatttattcacttaacacatgcttattgagccacctgctcagtgtcaagtacttttctgggtgctggggatatggtggtgaacaa

SEQ ID NO: 456984 - DNA, 596 bp, Homo sapiens
tatctttaacctttggctgaaatccattcagatcgctgtgctaactctcccagagataggtatcttcaggttcatttcctgtaggagagtgggagcaataacaggtggtgaagggaaatgtgagcatataggcttctgtttgctctccaaattatattaatccctaaaagtaaatctagtccttacagagtataaggggtggggacagggaaggtattgtagaagatggactgtagcacaaaggagattaggatttccccttatctcctgaatttttttttcttcttttcgttcagttttcagactttgagacaaataaatgctagggttccagaacccactcttaaacttagaaagtaacagaattggaagatccttagcttgccaaggactatccaatcactctccatttttcagaaacagattctgaggcttagatacaaaaaattacatgtgtgtatgtgtgtgtgtgtgtgtgtgtgcgcgcgcrcgcgtgtgtgtatacctctgtcatttattcacttaacacatgcttattgagccacctgctcagtgtcaagtacttttctgggtgctggggatatggtggtgaacaa

SEQ ID NO: 456985 - DNA, 465 bp, Homo sapiens
cagaaaataaagaagtaaacaaatatgtggaattttattttgaaataaatgctttgaagaaattaaaattgggtaacgtaatacaggctttgaggcaagaattgggggtaaggaagtacttgtgctttctaatatacctctctgtcactttttgtctgttttatggcaatagcatactctatgtatggaagctcagctttcatagcctgttctgttgcatgagtcgccatttatgtgaattaattttttaatttacaacttaaaaaatgtcttcacatscatagcatgcccaggcattgcccaggagtgtagcctctgctccctgccagtgtgggcctcttagactattgcagacatgctcgaaaggagtggctttccctgtggtttcactgagggccatatctaagaagatcttcttgtattctaattatccttggctagagatgagaaaatcttagtgtggag

SEQ ID NO: 456986 - DNA, 585 bp, Homo sapiens
ttgcctcctctggcgaggtgtggggagtggttaccgatttcccaagcctgcatctctgggacctcagcgcccctcacaaacagccccactcatcctccctcccccaagtccctctcctatcaaaaggccctcccagtcttgcctgctccgaaggcctgtggaccagaaatggtctgatgaagctcgcgagcttacagcagagcaagggccccgcccccgcccccgccccgggggtgggtgggggaagctcacgggaggagggctgctccagcgccaccaagcccccgtggcctggcacgggcctcaagccggcgcggggastggctctggggccagcataccggcgcagagcgtgagtcccaggcagaccccgtacccagagtgccagcgggaaggggcaggggacaggcacgcacacgagcgcgcaaactcagcctccctctcgctcccaccccagtataaagcagaatcgggccaccaaggggacgagatccgtggactcctccacgactgtcttccccggcccaggaaggtcgtaggccccgcccccggaagggtcccggaacaagcactggccggggtcag

SEQ ID NO: 456987 - DNA, 335 bp, Homo sapiens
cagcagtccaggctgtttttggcttgaaggtggggtttcactggggacccacccccatctgcctaggaaattgtctgcctcctgccgctttcaattgttttactctacattgttttctgatgactaatgattttgagaacctcttcatatgcttgttaccatttgggggttactatttgtgaaytgctttttaatatcctttgccaatttttgagaatttttagtgctctctttttttagttggtttgtgggtgtttatataaaatctagacattaattgcttgtcagttttgatattgcaaatatctcctctcattctgccatctgtatactga

SEQ ID NO: 456988 - DNA, 491 bp, Homo sapiens
ggtgaagaatgacacatctttgaatcccctggggcatctggaaatctgccctgcacttaataccttctcaacaaatgtttcccaaattcatgtttgtgtatttctgcggggagctgagatagctactcagcaccatgtaaactgtattcaagaaatattgttcaacagtgacaaccctgaaacgctaacatttatgtagtataatcttttgccaggtcccacgctaaggatctaaaaaggtttgtaaaagctttgtttcaaatcatagaaggagcatgtgctgatagtaaaaaaagaaagaaaaaaaagggtgggcccatatggttggtataaagagaaaggtaaaaatcccctctgccaccccgctctgtacccaccccaggtcgccaggcggaggtcaccacagcctctggaggcagcgtctgccctgaggtctggctcytctgcttgcttaattgtgggatcttgagcaagttacttaaccttttgca

SEQ ID NO: 456989 - DNA, 587 bp, Homo sapiens
gtctccactacgtgaagacacaccaagaaggaggctgtggcaaaccaaaaaaaggacccacctcagagagtgattctatggacaccttgatctttgacttctgagcctccagaactgtgaaaaatagayacatactggccataaccattccttattctcaaaatgctggaaatttgacttctcttattctttcactaaattattacaaaatgttgatttaagctctaatgatatctgtttttcaaaaataaatatatgattcagtgaaaagagcacagatcttatggttgtagatcttatagctgtagttgtaaaatttagaattcgaattatcaaacacctggttcaaagatgtcactcagaaggggcaaccaggaaaagcagaaaccacttattgcttgctacatctcattcaacaattagattgagcaagtaagcaattcagtcggggtttctgaaagagtggtacctaaagcaactatgtcagcattacctaaacatgtagaattgtaaatcctcaggccccactcaaacctaccatctcagaaactgtggaattgggacccagaagatggtgtttaaacaaa

SEQ ID NO: 456990 - DNA, 613 bp, Homo sapiens
aatccagtcatgtgaagtatagaattcagttttttaaagagtacattcacagaattgtggagtgattatcacaatttagtttcagaatattttcaatagccaagaagaaaccctaagsccataagtggtcactctccattcttcctctactctttctccatcaacaagcaacaactattctattttctatctatagatttggatgtgttagactttgtttaaatgaaatcatataatagttggtgttttctgtctggcttctttcagtaagtataatggattctaagtttatccaaatggtaatatgtcccagtacttcatttctttctttttgcaaaataatattccattgcataaatatactacttttgtttatccattcatcaggtggtacatatttgggtcatttccactttgtcagattatgaataatgttgtgaacattgtgtacaagtttgctatttaggcatattttatttctcctagctatgtatcatatgacttctgggtcatatgataattctcctctttagcattttgagagactaccatttttaaaaatacaaaatgattgctcattttccatttttaccagcaatgtatgagagttcca

SEQ ID NO: 456991 - DNA, 575 bp, Homo sapiens
tagtaatcatttagctgattagatcattgctaatgtctaattgaatttattcctgtgtgtaaaatataaatgtatggtatttcaatctcatgcataagaatagtagactactgaactagtctaacttcagagtytgaaacatttattaagaatttaccatttcatttttccaggtgaaatttaacattttaaaatatctcttaagaaacttcttaccagttttagtgtgtcacttgtggttttccttacaaatatgagttaggtaacctgttggaagggttagcttgtagagtaccttttgattctatccacagaatgcatctataacgaatattacaagcaaatctgatatatttgatattgttgcatatttttcaagggaatctcagccaaatgggctgataaactttttattcatctagccaaattaaatggaacatgtctactcctaaattctaaagttggtcactagatatgatcaccaagtaatttacattcctgacttttttttgccccttgatattccagacaacttatgtgacatggcatgaaagggggagttcatttaaagggac

SEQ ID NO: 456992 - DNA, 591 bp, Homo sapiens
tatggctaaaataataaatatccaacagccccttgcatatattaaaaacaagtgtgcctaggttgcatatccgtctgatacacactatactcaagaattgctgctagagttgcaaaactaacagtgatattccagttgactgaggaatagttatgtgcatttcttttcacaggaagataacattcatggccacctttggtagagcttgtgttttatttgttttgtcctcacattgaatgggtgggtatgcctgcatctcctccaggcatttgctttcaattagaggccatacagacctgtactttcctcatacttttaagtctcacagtgtgctgggaaatgcaaaacctcaatgttggcctttgctaagttgatctctggggcccrgcttaaacacttcccttctccatcttattaccaccaaaaggcttaaaaaaaaatcaggacagcaagtaatgcatcttatatggcatgttctttgatctccttccaagagtgagggcagaaaggaagctgctgaaatgacttacagtattctcaccttatccatagttttgctttctgtgatttcagttacctgcattcaaccgt

SEQ ID NO: 456993 - DNA, 591 bp, Homo sapiens
tatggctaaaataataaatatccaacagccccttgcatatattaaaaacaagtgtgcctaggttgcatatccgtctgatacacactatactcaagaattgctgctagagttgcaaaactaacagtgatattccagttgactgaggaatagttatgtgcatttcttttcacaggaagataacattcatggccacctttggtagagcttgtgttttatttgttttgtcctcacattgaatgggtgggtatgcctgcatctcctccaggcatttgctttcaattagaggccatacagacctgtactttcctcatacttttaagtctcacagtgtgctgggaaatgcaaaacctcaatgttggcctttgctaagttgatctctggggcccagcttaaacacttcccttctccatcttattaccaccaaaaggcttaaaaaaaaatcaggacagcaagtaatgcatcttatatggcatgttcyttgatctccttccaagagtgagggcagaaaggaagctgctgaaatgacttacagtattctcaccttatccatagttttgctttctgtgatttcagttacctgcattcaaccgt

SEQ ID NO: 456994 - DNA, 401 bp, Homo sapiens
agatgcatattttctatttcaaagaatttaaggccatgctttctgtttcaaattacctgctctacaatttcttccggagaaatcctgccacagtggaacaggaatcattttttaccgaggatatgaattttaaatcagaggtctctgatgcttaacgagagcacataaattgcrtttatttattttttatgtctcccaatctacataagcactgtcttatttgttctcctgcctgagatcttctaatataaaattacaatttctcagagtcagacaggatatctgattcttgaaaccctgaaactttttactctttcttagttgtgcataggacctttagtcagggtaatcagcatattaaaagtagatgtacatactggttttattttcagatgaaaagg

SEQ ID NO: 456995 - DNA, 405 bp, Homo sapiens
gtctttttctaatcttgaagagatgatctgagagtctagcaccttttaaaggtctgaatttgccagctattgcctctaagggtagccacctatgagacttcrtctacataataagaaccttgggctccagaactctttatctttacccagatattcctttctattgaatccaagtctttagataataatttaaatctttcaaccaattgccagtcagaaaatctttggatctgcctatgacctgtcagccctgctttgggttgtcctgcctttctgaaccaaaccaatgcatacctcacatgtattgactgcgtcttatatctccccagaacatataaaactaagctgtaacccaaccaccaggggcacatgttctcaggacctcctaagtctgtttcatgggtc

SEQ ID NO: 456996 - DNA, 582 bp, Homo sapiens
ttaaggtttatattatagtttatcattttttagtatttcatatgaccttgaaaagaatgtgtattttgctgtagttgagtggaattgtgtataattgtcagttaaataaatttaattgacagagttattcaggtattgcatatctttattttctgattattattgagagaagaatgttgaagtcttcaactatacttgtgcatttgtctgcttcacatttcagtactgtcagtttttgattcacgtattttggaacactcttgttgactgatgcatgtacattcaggattgtcatgtcatttttatttctgattttattatctacttaaactgggttcttacagacaatatgtagttggatttttttaatccaatttaacagtcttctaaccaatgtgttttagccatttagactttatttaatttgtgatatgattggattcagtrataccgtattacttactttttttttcccagtttgtccactctgttttaactttattttggtcattctttttgtggcttattttggagtatttagtttttttttttagtattacattttatttacccattggattt

SEQ ID NO: 456997 - DNA, 582 bp, Homo sapiens
ttaaggtttatattatagtttatcattttttagtatttcatatgaccttgaaaagaatgtgtattttgctgtagttgagtggaattgtgtataattgtcagttaaataaatttaattgacagagttattcaggtattgcatatctttattttctgattattattgagagaagaatgttgaagtcttcaactatacttgtgcatttgtctgcttcacatttcagtactgtcagtttttgattcacgtattttggaacactcttgttgactgatgcatgtacattcaggattgtcatgtcatttttatttctgattttattatctacttaaactgggttcttacagacaatatgtagttggatttttttaatccaatttaacagtcttctaaccaatgtgttttagccatttagactttatttaatttgtgatatgattggattcagtgataccgtattacttactttttttttcccastttgtccactctgttttaactttattttggtcattctttttgtggcttattttggagtatttagtttttttttttagtattacattttatttacccattggattt

SEQ ID NO: 456998 - DNA, 582 bp, Homo sapiens
ttaaggtttatattatagtttatcattttttagtatttcatatgaccttgaaaagaatgtgtattttgctgtagttgagtggaattgtgtataattgtcagttaaataaatttaattgacagagttattcaggtattgcatatctttattttctgattattattgagagaagaatgttgaagtcttcaactatacttgtgcatttgtctgcttcacatttcagtactgtcagtttttgattcacgtattttggaacactcttgttgactgatgcatgtacattcaggattgtcatgtcatttttatttctgattttattatctacttaaactgggttcttacagacaatatgtagttggatttttttaatccaatttaacagtcttctaaccaatgtgttttagccatttagactttatttaatttgtgatatgattggattcagtgataccgtattacttactttttttttcccagtttgtccactctgttttaacttyattttggtcattctttttgtggcttattttggagtatttagtttttttttttagtattacattttatttacccattggattt

SEQ ID NO: 456999 - DNA, 568 bp, Homo sapiens
ggttcattcctataacctttgatattttataacattaatttttaactctgaataaccaaaactgttttcaaagtcataatcatctaattattagaattgtataaaagttcaaataatatgccatccatggagaatacatttaattttgtaatacatttttatttttgtaaagcacttcctcttataatcttattttgcttttaaaagtattataagctaaatattatgtctgttataaatatgaagatactcagagtcagacaagttaamttcctggagaaaacttctatgctagttgtctaagctttgaaaactgtcttgtgaacagtaaaagataactacagagacagggataatttgaaaaaaagagatgggtaacggactctccaattgagtgaaaatattcaactgagggtaaatgtcaaattgaagataaatttaccatagcaataattgaatttctcattctgcttatcaaatacatagatcctctcccaagagggtgcacaatcagtcaagaagctaatctaaataaaaagaagtcaaattaagtagaaagatatatgaa

SEQ ID NO: 457000 - DNA, 568 bp, Homo sapiens
ggttcattcctataacctttgatattttataacattaatttttaactctgaataaccaaaactgttttcaaagtcataatcatctaattattagaattgtataaaagttcaaataatatgccatccatggagaatacatttaattttgtaatacatttttatttttgtaaagcacttcctcttataatcttattttgcttttaaaagtattataagctaaatattatgtctgttataaatatgaagatactcagagtcagacaagttaacttcctggagaaaacttctatgctagttgtctaagctttgaaaactgtcttgtgaacagtaaaagataactacagagacakggataatttgaaaaaaagagatgggtaacggactctccaattgagtgaaaatattcaactgagggtaaatgtcaaattgaagataaatttaccatagcaataattgaatttctcattctgcttatcaaatacatagatcctctcccaagagggtgcacaatcagtcaagaagctaatctaaataaaaagaagtcaaattaagtagaaagatatatgaa

SEQ ID NO: 457001 - DNA, 408 bp, Homo sapiens
aaatgaataaacacaattatttcaaaaattaaaaagttttaaaaaaataaatctcagtaatataaaagagaatgattgagagtgacagtaactcaatggaggccctctcttagaagatctaaatgargaaaatgatttgcctctgcaaagaacattggggataacaagtctttagccagaggaaacatttaagtaccaaagaccaaaagcagggacaagctgttcaaggaacagcaaaaaggccagtgtggctggagttgagagtagtaagataatggctgagaaggaaggtatttgcagattttaaaaggtcttataaagcaaactgtagcaaaaaaaaaagtgtaggttttctttcgaataaaacacattacaactataggaagatttttaaacaaagcagtgagg

SEQ ID NO: 457002 - DNA, 499 bp, Homo sapiens
ttgataaagaatatgtattttattggacttcttgaatgattcttagacatattaaagtctgagaaccactgttttaatctacaaacatttaattttctatttctttacctttacatgtttgcttaaatatttttctctcctatgtaaagaataagtccctttacctgtagaaggaatactgaaattgttgatcaccactgcttattgctttaactgtacatagtaagatttaagaaatccttactgaatgtatacaatgtactagttacctttgctggacaagattcatctttaaatgttctcattaaaatatttttttttccatttaattgtcccttaggagtayaaactcattcctctgaaatgctttcactggtctgtgactctatagaaactcaagcagattataaggacacttaatccaaaagtaatagtgattgcatttgtgatggcatgggctcaataacaagcaaagaggtcatttactgtagcactgtaa

SEQ ID NO: 457003 - DNA, 630 bp, Homo sapiens
ttgtgctgcttcttccttattctatgtctttttagtatttgagaacttgtaacagggttgagaaaacttctgtaaggagacagatagtaagtactgtaggtattgtggtccatacggtctctgttccaactactcagttctactacagatgagtcaggtttttgtttatttttatttttgtatacaatttttggatttatttgttacagcaggtagcaataagccaatcactataacgaaggcacttaacccagctttgcaggctgttttgagaaggcaaattccatartactgttaactaggcaaacatagggtaaagaacttttgtctgggctctggatggaagctgcagaccagaaccaggaccagcccagtggaggccaaactaaattacatctccttgatgggattctcctgctagcttggccttataaatcatatctttttctttataggccctgaggaaatcctcttgctagtttggccttaaaattcatatctttctctttacagttcctgaggaagagacagagtcaccttctaacatgggggtttagaagtgagcctgaacaggaagggagccacagacaaatgtaaactaatgagtgttgccacagacaaatgtaaact

SEQ ID NO: 457004 - DNA, 638 bp, Homo sapiens
aattcgaccttaagaatttttaaacattttttttagtgctagaaattttaagtaaatcataaaactagatgagtaactgagaattgaacagttaaacacttgctttgttctgagagaattttmcaggtttaggtaacttaaaatttgggtttgaggacctctcgggaagaaagaaatagatatcaaagcccagtgggttttaagttagggaatttatgaattacaacttactcgtctaacatttatttgggactttcaagttggacagagtaaagtaaaagatgtcttcaactcattttttttttcaggtatgctagtctgattcagtgttagaaagtcaatcagtgtagtatatctaatctacttttcagacagaaaaaagaaatataatgatgcagaaaagcttttgaaaaaattccaacacccttccatgataacaattcttagcaaattaagactaaaagggaatgtcctcaacttcataaagaaaatctacaaaaaaagtattgataatagcatacttaatcatgagaggctgaatatattccccctaagatcaggaacaaggcaaaaatattttgtctcaccattcctatacaaggaagtcctagcaagttcaaaaaacaaactgtatatca

SEQ ID NO: 457005 - DNA, 638 bp, Homo sapiens
aattcgaccttaagaatttttaaacattttttttagtgctagaaattttaagtaaatcataaaactagatgagtaactgagaattgaacagttaaacacttgctttgttctgagagaattttccaggtttaggtaacttaaaatttgggtttgaggacctctcgggaagaaagaaatagatatcaaagcccagtgggttttaagttagggaatttatgaattacaacttactcstctaacatttatttgggactttcaagttggacagagtaaagtaaaagatgtcttcaactcattttttttttcaggtatgctagtctgattcagtgttagaaagtcaatcagtgtagtatatctaatctacttttcagacagaaaaaagaaatataatgatgcagaaaagcttttgaaaaaattccaacacccttccatgataacaattcttagcaaattaagactaaaagggaatgtcctcaacttcataaagaaaatctacaaaaaaagtattgataatagcatacttaatcatgagaggctgaatatattccccctaagatcaggaacaaggcaaaaatattttgtctcaccattcctatacaaggaagtcctagcaagttcaaaaaacaaactgtatatca

SEQ ID NO: 457006 - DNA, 638 bp, Homo sapiens
aattcgaccttaagaatttttaaacattttttttagtgctagaaattttaagtaaatcataaaactagatgagtaactgagaattgaacagttaaacacttgctttgttctgagagaattttccaggtttaggtaacttaaaatttgggtttgaggacctctcgggaagaaagaaatagatatcaaagcccagtgggttttaagttagggaatttatgaattacaacttactcgtctaacatttatttgggactttcaagttggacagagtaaagtaaaagatgtcttcaactcattttttttttcaggtatgctagtctgattcagtgttagaaagtcaatcagtgtagtayatctaatctacttttcagacagaaaaaagaaatataatgatgcagaaaagcttttgaaaaaattccaacacccttccatgataacaattcttagcaaattaagactaaaagggaatgtcctcaacttcataaagaaaatctacaaaaaaagtattgataatagcatacttaatcatgagaggctgaatatattccccctaagatcaggaacaaggcaaaaatattttgtctcaccattcctatacaaggaagtcctagcaagttcaaaaaacaaactgtatatca

SEQ ID NO: 457007 - DNA, 528 bp, Homo sapiens
gaggctcattttagcacctagaataagattcatatgagtatatattccagatgcrttctcttataattagaagtagtattcccttagttactgttaggtcacattggataatagtgtggttaatattttctatacacttactaatttttttggctgtctattcagtactaaaagaagcagtttaaaaatttgggccgggcacagtggctcaagcctgtaatctcagcagtttgggaggcaggtggatcacctgaggtcaggagttagagaccagcctggctgacatgatgaaacacagtttctactaaaaatacaaaaaattagctgggcatggtggtgcgcacctgtaatcccagccactcgggaggctgaggcaggagaattgcttgaacccaggaggcagcggttgcaatgagctgagattgtgccattgcactccagcttgggcaacaagagcgcaactccatctcaaaaaaaaaaaaaaaaaattgccttagcatggatttgtctatttctctctgtgtttct

SEQ ID NO: 457008 - DNA, 628 bp, Homo sapiens
atttggtcattttgtgaagatacactaagctgtaactgtgtcagagtaatttatttggacatatctccaaatctagagaatgatctgtctaagaacatgcccaataaatctcttccttataaattaatatgatttgaaataacaaacatgtaagtgtagatgtataaagaacagaactcatgccacttttccactttttctatagacagaaattatattaaatggatgaatttctgtgttgactatacacttatgaggtaagataaatatgtcagaatctcattagagatggtgtcaagtagtgaagggtgaaggaatagaaggtgtagcattactcaacatgtttattatgggactcagaaattttcaagctatgccaccaacaggtatactttttcgagcacctaacctttgggagaaatggtgatgtgcgtatggagagtaacacgtgaagagtaggagggcacaatggtctagtctcttagaagagtagcayggaagaaacttctctgaataggaagcagtccaaactcatgtgacgcaggctgcgaaatcacttaagaatgagtgaagaatgtgtgagacagtactaagaggtaccccgcaaatatcttccaggtatcttgat

SEQ ID NO: 457009 - DNA, 574 bp, Homo sapiens
gaaggatctgtgaagatgttcaataggaagcaccaggaagcaatctctctactaagacaataattgcgctagcagaatctgtctgatgtaaccaacttggaactctggactctattgaaaacttccaactcctaggggaaggcttgagatgtaaattgtggttagtttactcaatttcaattcttagcactgtagtaactccccatccccgtctccctagctccatgacaaggagccatgctttcagctatwgtattttcagctatggaattttgatttggtttctttttaggttttctattttttaattaatataaacattgtagttatacatcattttcttcactttctccatgtcttcctctagttatctgaacatctttaagacagtagtttccaaagtctttccctagaaaatgtgtcatctgatctttgttggggaacttttccattgatttatattttttttcctttgattggtccgtgctttctagtttccttgtgtgttttgtaattttttgtttaaaactggacatttgtatccaataatgtggtaactctagaatcagattct

SEQ ID NO: 457010 - DNA, 612 bp, Homo sapiens
agctatttgggaaaaacactgtgttttgtgatattccatagagcattgtagctaagatcatagatgtcaggatcaattaaatccttcctatttaaaacaatttaattgctgtgtggatttcagcaaataatctaacatatttcatctttattgatgtcataagtataatgaaataagaatagtatctatatcagatcatgttttttaaatggaatgagataatgcttgcgaatgtacgtggcacataataactcctggataaatatcagcaatcattatcatggayattgttaatctatgccagtgaaagtgttattgaatcccagagagatacttcatatcagacaaacagacacacctcattttattaagctttgcttgtgcttcacttttttttaaacaaattgaacgtttctgcaacctgtgtcaattaagtctacagacaacatgtttccactaacatatatttactccgtgtctctgtgtcacatttggtatttcttacaaaatacttcaaactattactattattatatctgttatggtgatgtgagatcagtgatctttgatgttactattgcaactgttttgtggcatcacaaactgtaccca

SEQ ID NO: 457011 - DNA, 492 bp, Homo sapiens
acaaactgtacccatggaaggcggtgaacttaatccataaaattatgtggtctgattgctccrctatacagccattctctgtctcactccctttcctcaggctttcttattccccgagaaacaacgatactaaaattaggccaattaataaccctacaatgatctctaagagtttaaatgaaaggaagaatcacacatctcttactttaaatgaaaaactagaaatgattaagattagtgaagaaggtacgttgatatcctagataggcagaaatgcaggcttcttgtaccaaaaagcccagttgtgaatgcaaaggaaaagttcttaaaggaaattagaagttttacttcatgaacacataaatgataagaaacagtaatagctgtattgctgatagggagaaagtttcaatggcctgaacagaagatgaaaccagtcacaacatttccataagctaaagcctaatccacagcaaggtcatagctcttttc

SEQ ID NO: 457012 - DNA, 492 bp, Homo sapiens
acaaactgtacccatggaaggcggtgaacttaatccataaaattatgtggtctgattgctccactatacagccattctctgtctcactccctttcctcaggctttcttattccccgagaaacaacgatactaaaattaggccaattaataaccctacaatgatctctaagagtttaaatgaaaggaagaatcacacatctcttactttaaatgaaaaactagaaatgattaagattagtgaagaaggtacgttgatatcctagataggcagaaatgcaggcttcttgtaccaaaaagcccagttgtgaatgcaaaggaaaagttcttaaaggaaattagaagttttacttcatgaacacataaatgataagaaacagtaatagctgtattgctgatagggagaaagtttyaatggcctgaacagaagatgaaaccagtcacaacatttccataagctaaagcctaatccacagcaaggtcatagctcttttc

SEQ ID NO: 457013 - DNA, 576 bp, Homo sapiens
tgcaacaatttactaatttatctcttgttagacatttgagttgcttctaatttgggttattgtgattaataataaagacattcgtacttatacctctttgtatgtacatatggtttcttttctcttagctaaatacaaaagaatgagattgcagggcsatatggtaaattaatgtttaattttatgaggcactgccatactgttttccaaagttgcaccattttgcattcccataattcccatcatcaatgtatatgaattatatttgcttcgtatcattggtaacacatggtttcatcagcatttttagttttagccattatactgagtgtgatggttaataccgagtgtcaacttgattggattgacagatacaagtattaaccctgggtatgtctctgtgggtgttgccaaaagagattaacacttaagtcagtgggctggggaagtcaggtccacccttaatctggtgggtacaatctaatcagcttccagtgaatagaaagcaggcagaaaaacgtgaaaaggaaagatgtgcaaagatagacctctttctgggccagaaaataaatcgtt

SEQ ID NO: 457014 - DNA, 576 bp, Homo sapiens
tgcaacaatttactaatttatctcttgttagacatttgagttgcttctaatttgggttattgtgattaataataaagacattcgtacttatacctctttgtatgtacatatggtttcttttctcttagctaaatacaaaagaatgagattgcagggccatatggtaaattaatgtttaattttatgaggcactgccatactgttttccaaagttgcaccattttgcattcccataattcccatcatcaatgtatatgaattatatttgcttcgtatcattggtaacacatggtttcatcagcatttttagttttagccattatactgagtgtgatggttaataccgagtgtcaacttgattggattgacagatacaagtattaaccctgggtatgtctctgtgggtgttgccaaaagagattaacacttaagtcagtgggctggggaagtcaggtccacccttaatctggtgggtacaatctartcagcttccagtgaatagaaagcaggcagaaaaacgtgaaaaggaaagatgtgcaaagatagacctctttctgggccagaaaataaatcgtt

SEQ ID NO: 457015 - DNA, 551 bp, Homo sapiens
aaaaatatatatataccatttgcattagtactcccataaaagatacacttaggtataaatctaacaaaatatctagtagatctatatgagaaaaactacaaaactctaatataagaagtcaaaaaaggctaaataaatgaagagatattccattttcatggacaggagacattattgtcaagatatctctttttcccaagttgatatatagattcagcatgaactcaatcagaataccagaaagttattttgtaataatcaacwaactcatttttaagtttgtgtggaggggcaaaagacacaaaagagccaataaaatattgataaataagaataaagttggatgactgacactatccaactttaaggcttattatgatactacagtattcagaacagtatattgggaaagaatacatgaacagatcgaaggaatagaatagaaagctcagaaatagatctgtggaaatatggtcaattgactgttgcaaagaacaaagttaatacattggagaaaacataatctttcaacaaacggtgctgaaacttaa

SEQ ID NO: 457016 - DNA, 616 bp, Homo sapiens
tcctaatattcattctgcacaaagaagagtaagtacactcggctgggtcttgagaagatacacaaacaaaagagtaaaagccagacacagtccattaaaattaagaacttttctayagagtttgtgattatctttgaggattaatagtttttcactcaagacatgcagcatgtttaatttatccatttacatattgaatgaatatgaataagtattcattttaagtaaaaaacttttattgaatacctgtggttccagatgcaagaccaagtacctgagaggcaaaactttgttcttgacctccacaaataaagttgagaatatagacaaatatcaactgatacaatatataacaatgtagtttgctaaagtgtaacagaaagaatgagcagagtgttttaggagataagacaaatatataaaactataatagtatattaggaatacattaccctgcaaataagaaatcttgactaatgatgatttaaactaaatggctactaatggtgattctggcaataattttggatctcaataatgtcttatctgggaatacattattttgatttttttttcttttccttcttggttcatagtcataaattgaccactgctg

SEQ ID NO: 457017 - DNA, 595 bp, Homo sapiens
tttaggtgtttgtttgtaacagtaccatactactttggttaatgtaatcttataacatagtttgaatatgggcaatgtgatgcctctggctttactggttttgcttaatattgatttggctatttgggctcttttttggttccaaataaattttagaatagtttttttttattctgtaaatatatcattggtaatttttgatagaattgcattgaatctatgaatggctttgggcaatatagccattttaataatattgattcttactatccataagcatggaaagtttctccatttgtttgtgccatctctgatttctttcaacagtgtttttamttctgattttagacatctttcacctctcatgttacctgtattcccaggtgtgtgtgtgtgtgtgtgtgtgtctattgtgaatgaggttgtgttcttgatctggctctcagctttgccattattggtgtatagatgctgctgatttttgcaccttgattctttatcctaaagcatgctgaagtcgtttatcaaatgtaggattccgggtagaaattatatggttttctaagtatagaatcatatcatctacaaaaaaaag

SEQ ID NO: 457018 - DNA, 610 bp, Homo sapiens
agatgcatagagcaatggaacctataacccagaaataaagtcaaatatttacaacaaacttgttttcaacaaagaatacaagaacataaattggggaaaggacagcctattcaataaatggtgctgggaaagctggatagcgcatgtagaaaaaaatgaaacttgattcccgtctctcactgtgtgcaaaatcaactcaagatgaatcacatatttatttctaagacctgaaatcataaaaattctagcagaaaacctaggataaactcttctggacattagcctaggcaaagaatttttgactaagaccaaaaaagcaaatgcaacgaaaacaaaaataaatacatggaacctaattaaactgaaaagcttctccacagcaaaagaaataattatcagagtgagaagacaacccacagaatgggaaaagatatttgcaaactatgcatctgacaaaggactaatgcycagaattcataagggactcagatcagcaataaaacaaacaaacaaacaaataattccatcaaaaagtgggcaaattacataaataaacatttcccaaaagaagatataaaaatggccaacaaacatatgaaaaaatgctcaa

SEQ ID NO: 457019 - DNA, 647 bp, Homo sapiens
ttcagtgcattatattttccaagttcttactgtatttataatagatgttcctagttccctcaatgtctcatattattttcctaaccgcatttccaacaatactctgaggtatcattccaggttaatcagtcaaagcagttgaccaacctcatttttatcagtgtctgtatatcctgtatgagtagcaaactggtttaaatcttcccttatctctttcatttgtttcatcyttttgtttcagtaatatattgtaaaatgattatttatagtactgacattatttctggaaatttttattggtaggttacctaaaatgggatgagcattacatacttatgctgtaggatctagaattcattcaaaaattgtagaactggatcttatcttccaagtgactgcaaacatgttagttgaaatataaaaaaaaaattggtattctgtctgccaaggacgtactgcatcatggattctgtttttcattccatacatgagaactctatatgaatccaaaaaaaatcagccatttcggataatgacatgcctggcttctaaggatacccaactcttgaagtctcaaaggttgaagatctgaagcgcagcaataaaaaggagatagttttattgacaacatttttaaagatatatac

SEQ ID NO: 457020 - DNA, 582 bp, Homo sapiens
caatcaatcaaaataatatgcaaaacagagccgtgatgtgggcccatttgggatttaaactgacagccttgtctccagcacaagtttttgtaagattgttcttacatgaaccaagaagcatgacctcagtgtataatagaggaygggggggacagatggaaaaaactacagggaattgactttcttttttgtaggttgtttgaaaatcaattattatagaggtctccattctagtatggcatgagtgggatgttgtcagctatgcacaatacctataacatttttaaagtggttcagaaaataaaaacaatgtgtgtgtatgtgtgtgcacacacatatttagaggaatagagataataaagccaaagatggaaagaaaaccaagtagtacaaaatgaaaacaatgtgtaatataggtaaataatatattggagcttcttgtactagtcttgcaacatttttaggtgtttcaaaataatatgaaacattaatttctaaaaacaattttttaaatgttgaagaaaaagattaagcaagatggagaagagcccgagattagtttggagaaatagataggaatgg

SEQ ID NO: 457021 - DNA, 550 bp, Homo sapiens
ctatgaaaccaaattattctttattttgttattatccacctggctagaatttaaccttcataatagcaaaaaacttgccccatcttcacttctgtaatgctaaggacaatttattatatacagaaaatgctcagtacatatttttgagtaaatgttttgtwtggaaatcttaaaattaaaattaatatctgaaaagaatgctgttctttccattctttccctcaattattcactgtgcaggtgttctttaacctattcaacatctggtttctaacttcacctttttctctcaatctattagaccctatcatgtattgttattttcccatgtaagctattcttcttgtagatcaattcaactaagcctctatgtatactcacaactgcagtatgtaaaaccaccagtccagggtaactaaactacatgctattttcaccccttcaccaaggcaactgaacctgaccaaagaaaaatttcattgtgtatacaacggatttttaacaccagaaaatttgaggttcggcctccatggtcttttagtgttaccat

SEQ ID NO: 457022 - DNA, 524 bp, Homo sapiens
caaccacttcttcattgaaatagtcaactactatagcaaaagtaaaaatgacattatcatttttctgttttgaaaccagataacactttagctttctacttttaattgtgtcttgatattttccctttaatttattccagtaacaccattctggatttcctgctacttctctagccacttstaaatttaattaatatgtttctttttctctttaaacactctcagtgcttgttgtcctctggtaacaacctgtttttcctcttgttactttatttccttgggtgatatctatatcctcttttattatttaaatgatgataaattctaaatatatatgtttatcccagatctatttcatgaactccagacccatatatccagttgcctaatagacatcttaaacttgggttttccataagcatcttaattattaaaaactctaaaattacctcataattttcatatcccttaaattttattcatgaccctatgtcttaaatagttaagcaattaagaggacctcc

SEQ ID NO: 457023 - DNA, 431 bp, Homo sapiens
ttttagcaaataaaatagtcatttgtctgaatctaccacatattttcatctcttctcatgctgtataatgtcatatttatttggataaattacattcaaagacatattttgagttcagtgtaacattttactactaaagaatatcccagtaaacaccctgaaatcaatacagttaagttgtgtaaagcttctcttaaaagaatggtggtatataaactattcacaaagtaatagattattttattcttgaaacaaataaactcttgtacttaacactgtattctttaatgttatattttattcacagtgtgacttcatattaagaatttctctactcaaattaagagggaaatwaatttatgttattattaaaatgcatcaatattttattttgttaaagggaaattcactaacattaacagccaaagcag

SEQ ID NO: 457024 - DNA, 543 bp, Homo sapiens
gttaattacaagtttgttttagattccaatacagttgacccttgaacaacatgggggctagaattgccaacttgttgaaaatttctgtataacttttgacttcctgaaacttaactgctagtagccttactaataacataaactgtactggaagccttactaataacataaacagtcaattaacacacattttatatgttatatatattatatactatatccttacaatgaagtaagctagagaaaagaaaatgttattaattaagaaaatcataaggaaaagaaaatatatttactattcaataagtkggagtggatcattataagggtcttcatcctccttctcttcacattgagtaggctgaagagaagaaaagaaaggatgggttgattttgctgtccccagagtggcagaggcagaagaaatccatgtgtaaatgaacctgcacagttcaaaaccgtgttgttcaagggtcaatttatatgaaagacgctaattgtatcttattgttatttttgaatttctgaatattttagtaaatt

SEQ ID NO: 457025 - DNA, 584 bp, Homo sapiens
aaaagaaaagaaatcattatataaaaaagacacatgtacatacatgtttatagcagcacaattcacagttgaaaaaatatggaaccaacctacgtaagtgcccatcaaccagtgaatagataaagagtatgtggtatatatatcatggaatactacacagtcatgaaaaggaaaaaaaataatgtgttttgcagcaacttggatggagctggaggtcattattctaagtgaagtaactcaggaatagaaatccaaatattctgtcttcttacttatgaattttcaaatagcctgccttcaggctcactaattgtttcttctgcttggtcaattctgctattaaagggctctaatgcattcttcagtatgccaattgcatttttcatttccaaaatttttgcttttttaaattatttcaatctattttataaatttatctsatagaattctgaattccttctctgtgttattttgaatttctttgagtgtcctcaacacagctattttgaattctttgtctaaaagatcccatatctctatttctctgggattggtttctgatgccttatttagttcatttggtg

SEQ ID NO: 457026 - DNA, 584 bp, Homo sapiens
taaatacataagattaaaatctgaaaaaaaggggactttcttcacctagaaaaaaaatcatgttaatccattttagaacatggaccttacctgagaagaggctgctaaaatatcaaaatacataaagatcattgaatacagtatttagcaatttacaaaacaccagtgaaaatataatttctaggtagaaactaaacaaatgcctgacttgaaactcagcggaagtaactgatgttcaaacattaaatttgtgtagttaaatagtagaagagctctctagggaggaaatagttatgaaaacctttgtgaataagacatttccacattttaagayatacataaggcaaataatctgtttctttatggtgtgttcagcccaagacacatttatatgaatggcacattcagtgatcatagcaattgtaattttataaaatatatgagaaagctaaaatttaaattatatttattttattggtaccagtactaattttcataattcatagaatttagaactctatctaggcaataatagcttggtagcattaaattaaaattaattaaatagcattaaatagcttggt

SEQ ID NO: 457027 - DNA, 607 bp, Homo sapiens
ccaggctggagtgcagtggtgcaatcctggctcactgcaaccttgtcctcccatgttcaagcaattcttgtgcctcagcctccctagtagctgggattagaggtgtgtgccaccatgcctggctaaattttgtatttttagtagagatgggttttcaccatattggctaggctggtctcaaactcctaacctcaagtgatccacccgcttcagcctcccaaagtgctgcgattacaggcatgaaccaccccaccaagcctcwatagcttttattattactcataaagaatgctatgttttgcactgaaagatggagctgttggcccatctttcattggaatgtgtactttgagctgtttttctaggaatagtgatggataggactgagtaattcacagttgttcacctggttcactcctgaatgagtaagggtcattaggaagatgattagccagccttcaaagtgcaggctgtaactaaggggtggtttgtctttatgtgaagtgtttacttgtatgttacctgacctacatttgcaccaaacaatgacaaataaaagtaaacatagtctaccctctttaattgtattagtcaggattctctagag

SEQ ID NO: 457028 - DNA, 535 bp, Homo sapiens
agtcagggtcaggatcatcaatatcactatctcccacatccacaccttgttctactggaaggtctttaggggcaataacacccatggagctgtcmtctcctatgataaaagtgctttcttctggaatgctcctgaagaacctgcctgaggctgttttatagttaaatatgtttttataagtagaaagagtatactctctgtctgttttgcatgtatttttttttttttttgagacagagtctcactctgttgtccacgctagagtacagtggtgtgatcatggctcactgcagccttgacctccctgggctcagatgatccttccacttcatcctcccgagtagctgggactataggcatgtgccaccacactcagataattttgttcattttttgtaaagataaggtctcactgtgttgcccaggctggtagggtacactctcaaataataacaaaaaatatagcatagtaaatacataaaccagtaacatagtcattaattattgttatcatatattatgtattgtacacaac

SEQ ID NO: 457029 - DNA, 503 bp, Homo sapiens
accaacttatctaattatctcattttagaatraaggaaacagcccattatttaaaaaaaaaaaaaaaaacctgctaaagtgacttgctttaggtcacagctattagtgaagataaaatcagaaataaccaaccctgtacaagagaatcttctctttaccacacagctgcttcttctcaaaaactccagtcaaaagcagattctggacaattcttggctagcataggtggcagggttggggggctgcatgggtaaagaactcagtgagtggaagaagaaaagtatgtggccaaagaacatttttacatagaatgtgacccatacaagattccaggactgggatcccaggctcctgattctcagtctaggtttatcttgtgctaacaacaatttattttgcgtcctttgaattatgatgtccacaaatcatataacctgaaccatgggctttcctttcttggaatgctgcatttatgatgcagcttttgcaaaatctcaatagta

SEQ ID NO: 457030 - DNA, 610 bp, Homo sapiens
tggtagtcccaaatatcagggcagatgggttggagctggagagaagcaagggcagtggttttgaggcaggtgttgccgagggtccgtacttcaggtcctgactatgctgacactgagwcaatgtggtactccagaaccacatggattcaacttcactactacctaatccatggataagaggttagagtatgctagttctgacagttactcttgaaatgtgattgtgtgtgatgtgtcaattaccatttttttgtttttttgagacggagtgtcgctctatggctaggctggagtgcagtggctcactgcaacttccgcctcccgggtttaagcgattctcctgcatcaggctaccaagtagctgggactacaggcgcgtgccactatgcctggctagtttttatattttcagttgggacgggatttcaccatgttggccaggatggtctcgatctcctggcctcgtgatccaccgcccttggcctcccaaagtgctgggattacaggcgtgagtcaccatgcctggcctgtcacttaccttaaatgttgtttatacccaaggtgataatcaaaatatctaatgactgatatgggatgggcattagccact

SEQ ID NO: 457031 - DNA, 457 bp, Homo sapiens
gtaactttattttctctgtcttggacttcaaaatgtgtcttatcagctctgccaagaatacttctaattttatacttagaaattcaagaatggagcactaattcatgtaacagaaatttgatgtgcaatgaccttgactagagaaatatttattttcttaagtgatgagtttcagcaattattaagtaattaaacatctccctagtacaccagaaaaatttcagtggagaaaatcagtcagtgatttacaaattctaactggaaacaaagaaatgtattgaacttaacagcaaacaaaatgcatcaatatgtaacaacaataataaaattaatttagcagaaattattgttgagaacattaaataacaaaagcactaaacatattaaaaatgaatagggaagcagcaggtaagtgatcgccacttaaaactctcrcaagaagcctctacagcccatg

SEQ ID NO: 457032 - DNA, 549 bp, Homo sapiens
acagcaaacaaaatgcatcaatatgtaacaacaataataaaattaatttagcagaaattattgttgagaacattaaataacaaaagcactaaacatattaaaaatgaatagggaagcagcaggtaagtgatcgccacttaaaactctcgcaagaagcctctacagcccatgacttattttccttgtacatattatgtaggaaactrtttttcagttcatgcaataatacttacactccatttttccattaaaatgtgctcataagtattaatcaattcccataacagcaaagagatagcaaagaattatccagagttgacagactgagagcttgaaatgatgtttgactataatgccaaagactgctgggggaattaataagagctgacacgagagttccaaattctggctcctggctgctgccagggtgaaggaagctgtgagcaagttaacttatcctgtcctctgcccaccacattgacacaaaggagccaagagcacctgcttctaaattacccctgcatgatcagcaaagctactgcagacgct

SEQ ID NO: 457033 - DNA, 622 bp, Homo sapiens
ctattttccaacagtcaaaagtcacaatgaagagaatttagtaggtagtattatctcaatatagataaaaatctattaataggaactaagggaacactatgaatctcatgataaaatccataaacctaagttcctaaaataagtatttttctatgtgatgtactatttaaaaagtaagtgctgctgggtaagctcattctcagtttcctaaaatgttagcttargctgtctttatgctgtaattatttatatagtctgcccatcagttcttggtgtgggaaatggtctaccaaaggtcaaattaaaagtagtagctcatgcactgatactagtatttgacagaacgaaaaattaatggttgtcagaacatttcctgaaattggctccaagcaactgaaatctttattctaaatctgtgattaattgattactaaggacatgggattcagagtttcagtgaaatatgggtgcctatggcctctgaataaaagcttctttgcagccattgataacttcacaactgaaaagatgaaaatgaataaatgggaattcattcattcattcaatggatattatgtgccaggttgtgtgctaggcactgagacacaaaagtgaacaagac

SEQ ID NO: 457034 - DNA, 589 bp, Homo sapiens
tacaacgtccctgtgaggtagatattatcaccactgtttaatcacttaacagtgatttagtcactgttaagagagcatcaagcaacggggcacagaaggaaagtgtatccagggcaactaagcgaggtagtccggctgtggatttctgcttcttcccaccttgctgtctgtatggtgcccgaaaacacagaggaaaggcygggagctggcaggtgaggaggtggagaggagtgcttcacccagaggagttagagtaaaggtcagaacctcgaggtgagcaacagcaccgggaactgctgggtgcaagcaaaaggtggcaagttgcaggagaagatggtggagaagtcagtgggggctgcatcatggagagctgtgagtgcgtctcctttcagttttgtaggcatttaacaactgcacagagttgtgcaaacacagaactgagtgtgtccccctcacatgaggcctcaggaaaggcattctagaagagaggatgacacatggtttctcctctctaaggttgcagactcagaagtctgataccagtcagttaacgtagatgtgtgagtgggagagtggggtcccaaatatt

SEQ ID NO: 457035 - DNA, 589 bp, Homo sapiens
tacaacgtccctgtgaggtagatattatcaccactgtttaatcacttaacagtgatttagtcactgttaagagagcatcaagcaacggggcacagaaggaaagtgtatccagggcaactaagcgaggtagtccggctgtggatttctgcttcttcccaccttgctgtctgtatggtgcccgaaaacacagaggaaaggccgggagctggcaggtgaggaggtggagaggagtgcttcacccagaggagttagagtaaaggycagaacctcgaggtgagcaacagcaccgggaactgctgggtgcaagcaaaaggtggcaagttgcaggagaagatggtggagaagtcagtgggggctgcatcatggagagctgtgagtgcgtctcctttcagttttgtaggcatttaacaactgcacagagttgtgcaaacacagaactgagtgtgtccccctcacatgaggcctcaggaaaggcattctagaagagaggatgacacatggtttctcctctctaaggttgcagactcagaagtctgataccagtcagttaacgtagatgtgtgagtgggagagtggggtcccaaatatt

SEQ ID NO: 457036 - DNA, 580 bp, Homo sapiens
atgcagccataaaaaaggatgagttcatgtccttcacagggacatggataaagctggaaaccatcattctyaacaaactaacacaagaacaaaaaaccaaacacagcatgttctcactcataagtgggagctgaacaatgagaacatatggacacaaggaggggaacatcacatactggggcctgtcaggggatggagggctaggggaggaacagcactaggagaaatgcctaatgtagacgacgggttgatgggtgcagcaaaccaccatggcacttgtacacctatgtaacaaaactgcacattctgcacatgcaccccagaacttaaactataataaaaagtaaaaaataaaaaataaataaaactctgatctgtaggccaaagggtacttctttttctttattaattactcagaagtctaggccacagcaatcctactgttctcctctcattttcctaaactattttgatacctatttctcagactttatgggctattagacatttctcacatttccatagataataactcatccgttttgcaacctgattctcaatattaagagattaaaactaa

SEQ ID NO: 457037 - DNA, 515 bp, Homo sapiens
cttctgcaaaatgaaaaagacttcgttttctcaacagctgcatcatttttttatgcatagaaaaaaatgtgcaattactccaagtacaatcaagtcatttaacatggctttaccatcattgtagttacaggatattttaaaagagaaaaaaaaatctcaaagcacaggtcctgctgtgcagcaaagcaatcaaattccttcataataacagcctgatgggattcagcaayctgaggaataatgaataaccactctaatcagtaaacaggaaaatgctacaacagtcactgagtaaaaattggactatcatctgttgattctcttgatcgacatttcaaacaataaatggaaatgtaagtatctcttaaaaagaaaaataacttggtttagtgtgcttaattttaccaggcagtgaggaaattatatatcaccttgactgtcctgcagtgttgcccagtcaataaaatgcacaaataatctttttcataatacatggccaactttatcctatcact

SEQ ID NO: 457038 - DNA, 559 bp, Homo sapiens
tagctgccatactgttgacagatgtttttagatgtctggagaattaaaagaatctcacatcaactcaaactaatattactcttatatatccccgtctcaataagctgaatactacataaaktccattagactcatggtcaaaagcttagacacaagccctgacttgagaggcagctatatacattacaggggccaggaaacctggtttgaagctagagggccagactttaaatcaaggatatgcctgatatttctttgtgaccttgggcaagcagcttaacattcctatgcctcagtttcctcatctgtacaatgataatagtaactactttatggtattcgttgttaaaatgagaattaaaatgaattaattcatgtaaagcacttaaagcagtgcctggcacctagaaagaactcaataaatcctatctattattatcattgctcctatctaatcaagataaaacatggaacttgctaagctagagatacacatgaattacctatgtggaaatgactgaaggaagacaagctatgggtctggaactcaggggagaat

SEQ ID NO: 457039 - DNA, 512 bp, Homo sapiens
gaattccagatagaagcaaaggccctcaggcagaaacatgccytgtctgctgaaagaatagcagggtggaataaaggcagagaaggtgggagatctggttagatggtgcagggccttgcaggtaaaatggaagccatggaaggaatcatgtaggttatagccatgagctaaggagagggtaatacaatataacctacatgtaggttatagccgtgggctaaggagtaagtaatatgatataacctacagttttctaagaattactctagatgctattttgagaataaacttaagaggctaaaaatagaagcaagaagactgtgaggctactgcaatactgcaagagagtgatgatgactatatgacccagcaattctattccttggtatatatctaagagaagtgaaaacaaataaaacacacatctacacaaaatgtacatgtacatgaatgttcatatcagagcctaaaatcagatacaatccagattctgccaactgatcaatgaataa

SEQ ID NO: 457040 - DNA, 512 bp, Homo sapiens
gaattccagatagaagcaaaggccctcaggcagaaacatgccttgtctgctgaaagaatagcagggtggaataaaggcagagaaggtgggagatctggttagatggtgcagggccttgcaggtaaaatggaagccatggaaggaatcatgtaggttatagccatgagctaaggagagggtaatacaatataacctacatgtaggttatagccgtgggctaaggagtaagtaatatgatataacctacagttttctaagaattactctagatgctattttgagaataaacttaagaggctaaaaatagaagcaagaagactgtgaggctactgcaatactgcaagagagtgatgatgactatatgacccagcaattctattccttggtatatatctaagagaagtgaaaacaaataaaacayacatctacacaaaatgtacatgtacatgaatgttcatatcagagcctaaaatcagatacaatccagattctgccaactgatcaatgaataa

SEQ ID NO: 457041 - DNA, 505 bp, Homo sapiens
gggttaatggattaatggatgatcatgggagtggaactgatggctttatatgaggaagagagacctgagtaagtacactagtagctcacactcaggccccttagactaaggctccccttccttcctagggtatctaaagccccagcaccctcccagcttcatagctggatgtcmttcttgtctttaccctcatagcaaatccttcgccaagtgatgctgctgccccaagattcggcatgtgatagcctgtgccacctcagggcacgacacaagatccccaccagcaagaaagctctcacccagtgtgcccccttgaccttggacttccaagcctccataactgtaagaagataaatttctcttctctacaaattacctagtttcaggtattatgttaagagcaacatcctgataagaggaagaagggtatcttagtccattttctgttgcttttaacactatggactgatgagggagatcaaatatatgggtaactagtgtcccc

SEQ ID NO: 457042 - DNA, 486 bp, Homo sapiens
tcattgccccagtgtcttcatggtctaggcacactccggagctctgggcttgtccagatcttgtcatacacagtgtggactgctggagccagcgtggggctctgtgcatggcagcttctcttcttcatgtcattctgcaattctggtgggattgaggagctggcttggtcagcttctaagaattatgtagaggagccagccaggctacctgtcttcctgtgcttgttgtcctcaaccacctagttttggctatgaagcttgatatctccccataataaacttcaactgagacccctytcaagcttcgtacattctgtagagtctttgcacttgttctgtcctctgcccaggatgctattcttctcccaccacacaaacctccacattattcacgccctcatctcatccaagctttcttttctcagtgaggctttccctgacagacagccttagttaaagttacactcccatcatattccttatttc

SEQ ID NO: 457043 - DNA, 611 bp, Homo sapiens
tggctcttccaggtctccccctaggcagaattactccatgggggaccatagcaccaacttccaatgaagggccagcggccatatgagatgctctcccaggggcattttatcagtggggccaaagcctttatacctgcaggggcattcatggtaggctctggagtagggaagatgggagggactggaaaggggagggagaaagttggccttttctgatgcccatggattctagtatctgccctgcctccaggacctgccaggccctctacttttacttcctttgggtcctgcacagacagttcagtcctaccrgacacctgatcatttacactcacctctcctgtggcctgagtttcttcctgtggatggtgagcctctccagggttcttggccatattccccactgccaagaggtgggccctttggtgagtctttcacctcagggagcctcagtaccccatcctctcctctgctattgctcctcactgggtgtcagaaaggcactgatgagattacaaatgtattgtacgtgcaagtcacttatcttgcagctcttaacatgctttggctacctaggtgtgcaaccatattgtccaaggaaaggattggac

SEQ ID NO: 457044 - DNA, 512 bp, Homo sapiens
tctcactcagaatccctctgtggttaccaaaggatgaacccccaaaatttgagacaggtctcacttaatttataaagtttcttttgccaaggttaaggatgcatgcccatgatacagcctcaggaagtcctgaggacaygtgcccaatgtggtcagggcacagcttggttttatacatttcagggagacatgagatataaatcaatatatgtaagaagtacattgatttcatccagaaatacagggacaactcaaagcaagccccctccccccgagggctttcaggtcacaggcagctgagggacaaatggttgcattcttctgagtttctgataagactttccaaaggaggcaatcaggatatgtatctatcttggtgaacagagggatgactcaacagaatgggaggcaggttttccctgagcagttttcagcttaaattgcccttttagcttagtgatgttgggaacccaagatattttcctttcacagtacaatctagatgtttataa

SEQ ID NO: 457045 - DNA, 590 bp, Homo sapiens
cataataatatattaattgagaaacttcacaatttttctgtaaatctaaaactgtgctagcaagtccattaaattttttttattctttaaatttttaaaaaaagttctatyccattaccacctacaaaggtctgttaagattaatgaaagatttataacctaaagttgcaaaatgcttccacaaaatgaaagacaaagtaactggatccagagcagacactgtgggtggacactgggtttcatgccctttggcctcagcctggctcaggtgggcattgctagcaggagcgtgcctgtggggtggacctgctcaccgttctcaggtgtgttcagcctgggtgaggtttagagcaaatcaagagagacctgtgtggagagaagacaacttccttgaggcctctccatccacccatcctcatcctctacctctgttcctcccacacaccctgcatcccctaccatactctttcctataagcagcagccttcagtatatacatagagattttgattgtaaaaatattggcctgcctggatccagagaagctgcagtcgaccccaggtaccacagatatgaaggggaccagggct

SEQ ID NO: 457046 - DNA, 556 bp, Homo sapiens
agagcaataaaaggcaaaaaacactgagtgtttatctaataaggtagatgttatttttcccattttacatatgaggaaactgagatttagagaagttacgtaacttggttagggttaaacagctaatattaggcaaagctgggacctaaacgtgggatttcagaggccagtgtccaatctttctttataatagtgagtggcctctcagaaaacatggacttgattctcaccagaaacccaacacctcttccctaagtgctttcccggtttttctcaaatccggaaactgttggtcttttgggcaattctgagcacagccactaagtggcgacattgcccgactatggctcagccctgtttctccggggaagaataggggaggggaggggagggagtcggagttgccctgttgtgtgttgtgctgtgtgtggggctttcttctatctatttagtcctcccagcaaccctgcagaggaggtattatctcattttccagatgaggccattgaggatctgctggatgayagagcttagcggtagaagcaggaatggaatc

SEQ ID NO: 457047 - DNA, 590 bp, Homo sapiens
cataataatatattaattgagaaacttcacaatttttctgtaaatctaaaactgtgctagcaagtccattaaattttttttattctttaaatttttaaaaaaagttctatcccattaccacctacaaaggtctgttaagattaatgaaagatttataacctaaagttgcaaaatgcttccacaaaatgaaagacaaagtaactggatccagagcagacactgtgggtggacactgggtttcatgccctttggcctcagcctggctcaggtgggcattgctagcaggagcgtgcctgtggggtggacctgctcaccgttctcaggtgtgttcagcctgggtgaggtttagagcaaatcaagagagacctgtgtggagagaagacaacttccttgaggcctctccatccmcccatcctcatcctctacctctgttcctcccacacaccctgcatcccctaccatactctttcctataagcagcagccttcagtatatacatagagattttgattgtaaaaatattggcctgcctggatccagagaagctgcagtcgaccccaggtaccacagatatgaaggggaccagggct

SEQ ID NO: 457048 - DNA, 590 bp, Homo sapiens
cataataatatattaattgagaaacttcacaatttttctgtaaatctaaaactgtgctagcaagtccattaaattttttttattctttaaatttttaaaaaaagttctatcccattaccacctacaaaggtctgttaagattaatgaaagatttataacctaaagttgcaaaatgcttccacaaaatgaaagacaaagtaactggatccagagcagacactgtgggtggacactgggtttcatgccctttggcctcagcctggctcaggtgggcattgctagcaggagcgtgcctgtggggtggacctgctcaccgttctcaggtgtgttcagcctgggtgaggtttagagcaaatcaagagagacctgtgtggagagaagacaacttccttgaggcctctccatccacccatcctcatcctctacctctgttcctcccacacaccctgcatcccctaccatactctttcctataagcagcagccttcartatatacatagagattttgattgtaaaaatattggcctgcctggatccagagaagctgcagtcgaccccaggtaccacagatatgaaggggaccagggct

SEQ ID NO: 457049 - DNA, 590 bp, Homo sapiens
cataataatatattaattgagaaacttcacaatttttctgtaaatctaaaactgtgctagcaagtccattaaattttttttattctttaaatttttaaaaaaagttctatcccattaccacctacaaaggtctgttaagattaatgaaagatttataacctaaagttgcaaaatgcttccacaaaatgaaagacaaagtaactggatccagagcagacactgtgggtggacactgggtttcatgccctttggcctcagcctggctcaggtgggcattgctagcaggagcgtgcctgtggggtggacctgctcaccgttctcaggtgtgttcagcctgggtgaggtttagagcaaatcaagagagacctgtgtggagagaagacaacttccttgaggcctctccatccacccatcctcatcctctacctctgttcctcccacacaccctgcatcccctaccatactctttcctataagcagcagccttcagtatatacatagagattttgattgtaaaaatattkgcctgcctggatccagagaagctgcagtcgaccccaggtaccacagatatgaaggggaccagggct

SEQ ID NO: 457050 - DNA, 440 bp, Homo sapiens
actcatatcttctattaagttgattaatttttgtatgttgaaccattctgtatgcttgagataaatcccacttggttgtgttgtataatcctttttatatattggtggatttagtttgctagtattttgttgagaatttttgyatgtaagagatattggcttttgtttacttttgatatctttgtgtggttgtggtatcagtgtaattctagcttgatagaatgcgttgcaaatatcactttcttttctattttctgcaagaatttgtgaaggattggtcgtttttaattatacatttggtgtagtaccacagtaaagccattctgtttttactttgtgggagtattttgatgactaagtcattctcttaattgttacaggtttatctaaatttttatttcttcttgagtcagttttcatagttcatgtatttctagaaa

SEQ ID NO: 457051 - DNA, 440 bp, Homo sapiens
actcatatcttctattaagttgattaatttttgtatgttgaaccattctgtatgcttgagataaatcccacttggttgtgttgtataatcctttttatatattggtggatttagtttgctagtattttgttgagaatttttgcatgtaagagatattggcttttgtttacttttgatatctttgtgtggttgtggtatcagtgtaattctagcttgatagaatgcrttgcaaatatcactttcttttctattttctgcaagaatttgtgaaggattggtcgtttttaattatacatttggtgtagtaccacagtaaagccattctgtttttactttgtgggagtattttgatgactaagtcattctcttaattgttacaggtttatctaaatttttatttcttcttgagtcagttttcatagttcatgtatttctagaaa

SEQ ID NO: 457052 - DNA, 589 bp, Homo sapiens
ctgtttgactttggcttttgatcatctcattttgatatgtctaggtttggatgtttttgaattaatcttactttgggttcattgaactttttgattgggtagtttagtgtctctctgtaaaataaaatttgagagcagaatatagagtaggggatgtyccactcatatcctcccacagcaacaagaatttgagagccttccacagaccaaagtacagttgtgagcgtattggactccaggtcaaaggcagcaaaaccttaggagagcccaagactgaagagagctgttttgagagggtgttttcacaaccaggtagcaggctcactgtacatgttcctggatacagacctggaaacaacactttgccccagtaaatctggatatagctctctttggctttggtcctgccaccagaacaatctgccaagggacctgagaggagtcataaccacccctgccttgggcgacaggcctgttgactttgatcttgacagagaaccctgaagcaaggcacttggcatcagccccttctgtcctcatttccaccgtgactattgatttcattctgaaacacaacttattctcaccc

SEQ ID NO: 457053 - DNA, 608 bp, Homo sapiens
atacccaggaacctgactaccttgagatggtcttggggtcaggcctgcagctccagccttgggggtgttctgcctgggcagccatcaggggagactacttgaggagaaggaggcggtgcctgggggttaagaagatggtgctcctccctcaggctaatgggagggggagttcttaaatgtcctggagtatccaggtctggagagaagaggacatcacctgagcctcagcaggtagtggtgggtttcaggctgctgaggctgtggcagagggagtgtgaacttctctgccccacccctttgaaatactaggagcagagctgacacaggctgaaaggaaaatttagttgtgatgcagccaagagcctgtcagcttctgcagggggttcttcttaccctgcgtgtatrgagagttgatgacccctagtgggagctgagaaaccacacagccgcctgcaacaagtaaatgctgatatttgcattggagatgtggggagttaacactctccacaggagatctgttcttttgcttacagcttcttacttaggcaactgagaattgaagtttttgaaaaatcaaaacagaaatttaacttattatgtgaggtagg

SEQ ID NO: 457054 - DNA, 608 bp, Homo sapiens
atacccaggaacctgactaccttgagatggtcttggggtcaggcctgcagctccagccttgggggtgttctgcctgggcagccatcaggggagactacttgaggagaaggaggcggtgcctgggggttaagaagatggtgctcctccctcaggctaatgggagggggagttcttaaatgtcctggagtatccaggtctggagagaagaggacatcacctgagcctcagcaggtagtggtgggtttcaggctgctgaggctgtggcagagggagtgtgaacttctctgccccacccctttgaaatactaggagcagagctgacacaggctgaaaggaaaatttagttgtgatgcagccaagagcctgtcagcttctgcagggggttcttcttaccctgcgtgtatggagagktgatgacccctagtgggagctgagaaaccacacagccgcctgcaacaagtaaatgctgatatttgcattggagatgtggggagttaacactctccacaggagatctgttcttttgcttacagcttcttacttaggcaactgagaattgaagtttttgaaaaatcaaaacagaaatttaacttattatgtgaggtagg

SEQ ID NO: 457055 - DNA, 608 bp, Homo sapiens
atacccaggaacctgactaccttgagatggtcttggggtcaggcctgcagctccagccttgggggtgttctgcctgggcagccatcaggggagactacttgaggagaaggaggcggtgcctgggggttaagaagatggtgctcctccctcaggctaatgggagggggagttcttaaatgtcctggagtatccaggtctggagagaagaggacatcacctgagcctcagcaggtagtggtgggtttcaggctgctgaggctgtggcagagggagtgtgaacttctctgccccacccctttgaaatactaggagcagagctgacacaggctgaaaggaaaatttagttgtgatgcagccaagagcctgtcagcttctgcagggggttcttcttaccctgcgtgtatggagagttgatgaccmctagtgggagctgagaaaccacacagccgcctgcaacaagtaaatgctgatatttgcattggagatgtggggagttaacactctccacaggagatctgttcttttgcttacagcttcttacttaggcaactgagaattgaagtttttgaaaaatcaaaacagaaatttaacttattatgtgaggtagg

SEQ ID NO: 457056 - DNA, 608 bp, Homo sapiens
atacccaggaacctgactaccttgagatggtcttggggtcaggcctgcagctccagccttgggggtgttctgcctgggcagccatcaggggagactacttgaggagaaggaggcggtgcctgggggttaagaagatggtgctcctccctcaggctaatgggagggggagttcttaaatgtcctggagtatccaggtctggagagaagaggacatcacctgagcctcagcaggtagtggtgggtttcaggctgctgaggctgtggcagagggagtgtgaacttctctgccccacccctttgaaatactaggagcagagctgacacaggctgaaaggaaaatttagttgtgatgcagccaagagcctgtcagcttctgcagggggttcttcttaccctgcgtgtatggagagttgatgacccctagtgggagctgagaaaccacacagccgcctgcaacaagtaaatgctgatatttgcattggagatgtggggagttaacactctccacaggagatctgttcttttgcttacagcttcttacttaggcaactgagaattgaagtttttgaaaaatcaaaamagaaatttaacttattatgtgaggtagg

SEQ ID NO: 457057 - DNA, 513 bp, Homo sapiens
cttagggccttaacacaatatgggacatggtctcaccgtttatggaggtcagaacccaggacctggttcctgtggttcattgtctcacagtttatggaggtcagggtccaggtgtcgttcagctgggtcctgtggctcaaggtcacagagactggaatgaaggtattggtcgaggctgcccttagctccctgccatgtgggcctctccacagagcagctcacaatgtggtagcgggcttcatcagcctgaacaggagagagtgatggagacagaggatgtgagacagacagaagggacactccatcacttttgccgcgtttgcaagtaatcagtgcagcccatactccaggggagggcattacacaggggtgtgcayacagtggggaggcatccttgggagccatgttagaagctgcctcctgcagttatgcacttagcatatgccagaaaatgtgctaggtgcttttgatctagggtctcatttgatccttactctcattatggggcaggta

SEQ ID NO: 457058 - DNA, 599 bp, Homo sapiens
aactgacttttctgaacaccttggacactatgtacggtccctgccacagtttgtcctgggatggtcatgagtcttcctgcaggactaacctgggctctctcaggaggatgtggggctgtggggtaatagggctgaggagaccattggtgcaaatggtctgggccamcttgttcccaacccatggggtcagcagagggagatgcagcacaggggctactgacaaactctctggtgtggctctacctggaaacagggatggacacaatgacctcccttgactatgcgtggcctgaggtcctaattggagacttccttactccctcatccacctcttattgcgaacctggccattcttccatcatggtatgtgggtgtttctttcctcctgaggggtcctcagcttcttgcagcctctgcttcttatttgagtcccagcttttatgcagagatgacctaactctagtaccatgagctgctgtggcatgtctggtggcctagacccttgggcctcttagtttccctcatggctcaggtgagctcatttcctcattgccacccacagaaaacaaagatctgaacagagtccctgctaagagatg

SEQ ID NO: 457059 - DNA, 601 bp, Homo sapiens
ccagcgacacaaggacttttttccaattagrcttgtaccagaattctgacctccagtattgtaaaataataaatcgcttttgttctaagtgcctacattagtgctgatttattgtgacagaaacagaaaactaacaaagctgccatactgtctcatggttttaaaaacattggctactctgtcattttcagccagatccctcctatggatgccacattgtgaatatctaacttcttacttgacagctccactaggacgtataacaggaatctccagcttggctttcaaactccccaaacacgcttcccatacagtcttcccatcccaataaatgtcatctctattactccatttgttgcagccacaaaatcttggtgccatccttgactttgttctttttctcacaccccactctccattagcaaaaaatattttttattcaatgtatatatttatagtataactatttaccatatgaccttcgtctcttacctggactattgcatagccccacagtatccctgtgcctatttttggcctcctaatgtttactctcaaaatagtggcaagtgatattttcaaaacatcagttctatcatat

SEQ ID NO: 457060 - DNA, 601 bp, Homo sapiens
ccagcgacacaaggacttttttccaattagacttgtaccagaattctgacctccagtattgtaaaataataaatcgcttttgttctaagtgcctacattagtgctgatttattgtgacaraaacagaaaactaacaaagctgccatactgtctcatggttttaaaaacattggctactctgtcattttcagccagatccctcctatggatgccacattgtgaatatctaacttcttacttgacagctccactaggacgtataacaggaatctccagcttggctttcaaactccccaaacacgcttcccatacagtcttcccatcccaataaatgtcatctctattactccatttgttgcagccacaaaatcttggtgccatccttgactttgttctttttctcacaccccactctccattagcaaaaaatattttttattcaatgtatatatttatagtataactatttaccatatgaccttcgtctcttacctggactattgcatagccccacagtatccctgtgcctatttttggcctcctaatgtttactctcaaaatagtggcaagtgatattttcaaaacatcagttctatcatat

SEQ ID NO: 457061 - DNA, 601 bp, Homo sapiens
ccagcgacacaaggacttttttccaattagacttgtaccagaattctgacctccagtattgtaaaataataaatcgcttttgttctaagtgcctacattagtgctgatttattgtgacagaaacagaaaactaacaaagctgccatactgtctcatggttttaaaaacattggctactctgtcattttcagccagatccctcctatggatgccacattgtgaatatctaacttcttacttgacagctccactaggacgtataacaggaatctccagcttggctttcaaactccccaaacacgcttcccatacagtcttcccatcccaataaatgtcatctctattactccatttgttgcagccacaaaatcttggtgccatccttgactttgttctttttctcacaccccactctccattagcaaaaaatattttttattcaatgtatatatttatagtataactatttaccatatgaccttcgtctcttacctggactattgcatagccccacagtatccctgtgcctatttttrgcctcctaatgtttactctcaaaatagtggcaagtgatattttcaaaacatcagttctatcatat

SEQ ID NO: 457062 - DNA, 633 bp, Homo sapiens
aagtttctgctatcataaatgtcaccaggtgatatgtggcaaaattaaccagccataccaaaaaatgcatgcggccaaaccaaaaagctccctcaaaccccctccccaatataaacccctcattctgtaagcttggcactgcctcctctgagtgtggtggarcagcctggcaggttcagtaaacttactcgcctgactttggctctattcttcctttctctcagctgcccttacaacaggtgtaccatatttcatcttttataccatgtttttactgtaccttttccacatttagatatttttagatacaaaattcttgccattgtgttacaattgcatatagcattcagtacagtaacatgctgtacaagtttgtagcccaggtgcaataggctataccatacagcctgggtggatagtaggctgtaccatctaggtttgggtaaaaacactctatgatgctcgcacgacgatgaaattacttaatggcacatttctcagaacatattcatgtcactgagtgacacatgactatatttttatatatttaaatgggaagacatcagtgaaatgttaattgtggtatggaacagcatgtgtgcatgtctatgtgggcatggtcagggttgagca

SEQ ID NO: 457063 - DNA, 633 bp, Homo sapiens
aagtttctgctatcataaatgtcaccaggtgatatgtggcaaaattaaccagccataccaaaaaatgcatgcggccaaaccaaaaagctccctcaaaccccctccccaatataaacccctcattctgtaagcttggcactgcctcctctgagtgtggtggaacagcctggcaggttcagtaaacttactcgcctgactttggctctattcttcctttctctcagctgcccttacaacaggtgtaccatatttcatcttttataccatgtttttactgtaccttttccacatttagatatttttagatacaaaattcttgccatygtgttacaattgcatatagcattcagtacagtaacatgctgtacaagtttgtagcccaggtgcaataggctataccatacagcctgggtggatagtaggctgtaccatctaggtttgggtaaaaacactctatgatgctcgcacgacgatgaaattacttaatggcacatttctcagaacatattcatgtcactgagtgacacatgactatatttttatatatttaaatgggaagacatcagtgaaatgttaattgtggtatggaacagcatgtgtgcatgtctatgtgggcatggtcagggttgagca

SEQ ID NO: 457064 - DNA, 628 bp, Homo sapiens
tgagcaacacctcaccctaccctcaatcttctgggaaaggggtgcctccagaactagaacctgcccttgctggacaattttttgagttaaacacatttcccccaaggtctgaggtggcagttttctgttcctcgtggttgctgatcacacaggtcaggctggcattgcactggctcagtggcaggctcacrgccagggtcccggggttgtaggctggtcctggcatccctgtctggtccagctctctggggaggcctttgctctctctcaggtcacatttaggtcctctgtggctcttggagccctgccctcttgggtaaattttcagcagtctggtgtgatggacggtgacctggttgggacctggaaaaggggcacaggctctggggtagaatgggacagaagaattaatgcacttgtagagcacactcctcatccattatctcaatactttcagagcacctactgggcaggcagggcactttgcagccagagaaacaggcttggggaagtgaaacagtttacccaaagtgatacactgagaaagtgccacagagccccagatttagagaagagacggcaaccaaagtctctcagcttcctccaccacccatactcccttctcttg

SEQ ID NO: 457065 - DNA, 586 bp, Homo sapiens
ttacccagtctcaggtaacctgttgttgcagcaccaaacagactaagacaatataggatcctggatgtccagagagatcccaattgtccaagttcatgcctagggtaagtggcaaaggctttataacatcagcccagccacagacagatgccaggagggaaagaagactatagattctgagaaactcaagacatgatcgtgagactctgggttgagacagaatggctgttttttgatgtgrgagggaactgcagccctaggcagaagtctaggtgtctaggtagaggaaaggttggagtagaagctctgagttatggccttttcctgacctccttatctggattaaagagaagagtcatcagtctagcctgtggggtttgcagcacggtagtcccacagctgggttgggggagagaagcagacagcagtagatgtagactgacagttgacctttgatatccttcctttctttcttccctcctcctctgtaacccaactatgtgttggtagaattttttgaattaaaaaataattaaaatattagaaaacaataacaggatggtgtatcctttcaatggatccttag

SEQ ID NO: 457066 - DNA, 504 bp, Homo sapiens
acctgttgtttgtggggacagtgaggaatctggcctaactagggcaaagggtttgcackggtgactaatgggagatgcagttgaatagtataaacatactcttttttatctattcaatcaagagaagtaacagctacaaacccagacagaagcccataaaatgagacaattattttgagatggccacaggtagacggaagtaaaggttagatcctatccttgttcacaaagacacgggtaaattgtgtgaataccaagctctgtgaggaaaggcaaaagctttgtaagacttgctgcccacaccaaacacagccctgagcccagcgaacatagatggagctgtcatcacagggagttgcttcccactccagatatgccccgtcagtgctgctgcttggggcagagcggcaagccttgggctcagaaatgctgcttccagaagcccataaacaaaaggcagctgtctgctctccctcttccaagaattcttagcaagtaccagtt

SEQ ID NO: 457067 - DNA, 504 bp, Homo sapiens
acctgttgtttgtggggacagtgaggaatctggcctaactagggcaaagggtttgcactggtgactaatgggagatgcagttgaatagtataaacatactcttttttatctattcaatcaagagaagtaacagctacaaacccagacagaagcccataaaatgagacaattattttgagatggccacaggtagacrgaagtaaaggttagatcctatccttgttcacaaagacacgggtaaattgtgtgaataccaagctctgtgaggaaaggcaaaagctttgtaagacttgctgcccacaccaaacacagccctgagcccagcgaacatagatggagctgtcatcacagggagttgcttcccactccagatatgccccgtcagtgctgctgcttggggcagagcggcaagccttgggctcagaaatgctgcttccagaagcccataaacaaaaggcagctgtctgctctccctcttccaagaattcttagcaagtaccagtt

SEQ ID NO: 457068 - DNA, 504 bp, Homo sapiens
acctgttgtttgtggggacagtgaggaatctggcctaactagggcaaagggtttgcactggtgactaatgggagatgcagttgaatagtataaacatactcttttttatctattcaatcaagagaagtaacagctacaaacccagacagaagcccataaaatgagacaattattttgagatggccacaggtagacggaagtaaaggttagatcctatccttgttcacaaagacacgggtaaattgtgtgaatrccaagctctgtgaggaaaggcaaaagctttgtaagacttgctgcccacaccaaacacagccctgagcccagcgaacatagatggagctgtcatcacagggagttgcttcccactccagatatgccccgtcagtgctgctgcttggggcagagcggcaagccttgggctcagaaatgctgcttccagaagcccataaacaaaaggcagctgtctgctctccctcttccaagaattcttagcaagtaccagtt

SEQ ID NO: 457069 - DNA, 608 bp, Homo sapiens
aggccaccaaatactttgggacaccagcggtttcttacctccaagtaccaccttccttccataaacacggtctctctccctctccagcctcattggtccttgggcaattcctacaagagcaccccacaaaactggactgcttaggtttgcatctcagcttaacattttacctatgaccctacgcatggtccttgtcctctggcttggtttcctcaactgtaaaacagggaccacaacagtattcttcagggggttgaggattaaatagatcaatccacctggaatgcttagagagtgaaggactctattcattttagctcttaccttagcctttctttaccatgattctacctctgggtgggaaacaaaagtgaattttaaaatgcccatcacctgctttgagaaggtcttcttgaatctgcccaccagggttacctcctccatctgctcccccrtggctcagcacctgtacctccacatgcctggcacatgtgcagtactgaaaaagaccttatgattctgatcatcgattgacattgactgcaccaggttacaattggtggtgcactgttgccatctccctggggagactacaagcttcctgagtg

SEQ ID NO: 457070 - DNA, 508 bp, Homo sapiens
tcttttctttgttgtttggaattgcctttggagcgttttgtctgctctttaaagtgcctgtggtctaccaagagggcagatctccatctcgggagagcaggattgatttttggtgacaggagaaagaactgtggagccaagtgtagtgagtcaagtgcaatcttatacttcttactcataaagatttattttcctactattttttcttcccaaggaagtcatctaagatgaactctgcatttgtgatcattgcctgagcaaggaggtgaactcgtcaatgcttccctgaacaaaataagcaagataaaaccaaccccctatcccccaacaatgacacacacgycttttcttctgctgagtacacagctctcagcctggcacccactgactgccacatggatacaaacaacgtctcactagaccccagggcctttcctttgtggagctgctaaaaaactgcttcaaacatctcgctccaggctagcttccctgcaacccaactaactcc

SEQ ID NO: 457071 - DNA, 603 bp, Homo sapiens
aactctcctgggtctccagcttgccactgcagatcttgggactactccgcctccatcatcatgcgagccaactctgaataataactctctttctctctctctacatyctattggttctgtttccctgcagaaccctgactaatacaagtaccataaatatttattggtagggacctggcttggaggttggtaggttgggtttttgcatgtaaccggtggttctgagtcaaagtgtttacattcttgcctctcagcttccagggacgactcaaatggcccctgaaatacagccttgaccaggaaactcagcatgaaggcacttctctggccaaatatttctagatatggcctgtttttcaaagcttgaaattaaagtccatgctcagagctcttcattctttccaagctctgcatgtgctatggggctgaaaagagcagagagcagcttactggagtgtctagatgcaagagagtctggggaaaaacaatggctgaattcaagggggctgtctttgccagttttctgcctccaagaaggaggagcttccctcgtgacatgtagtctctgcagttcctcaaggtttccaaggagggtaccactat

SEQ ID NO: 457072 - DNA, 542 bp, Homo sapiens
acactgcacaacacaatcatgtcttcccaacagtcaccaagttttagctcatttcatcattaactcaaaagtccaagtccaaagtctcatctgagacaaggcaagtcccttccacctatgaacatgtaaaataaaaaacaaagttggttacctgcaagatactatgggggtgcaggcactgggtaaatgctcctattccaaaagggaggaattggccaagacaaagggggyaaaggccccctgcaagtccaaaatccagcagggcagtcattaaatcttaaagctccaaaataatatttgactccatgtctaacatccaagccacactgatacaagtggtgggctcccaaggccttggtcagctctgcccctgtggctctgcagggtatagccccggggctgctttcataggctgttgagttcctgtggcttttccaggagcatagtgcaagctgtcagtggatcaaccattctggcatctggaggacagtggctctcttctcacagttccactaggcagggccccagtggggactctgtgt

SEQ ID NO: 457073 - DNA, 542 bp, Homo sapiens
accggcgctgtgctcaatttctcaccgggccttagctgccttcccacggggcagggctcgggacctgcagcccgccatgcctgagcctcccaccccctccatgggctcctgtgtggcccgagcctcccggacgagtgccaccccctgctccagggcgcccagtcccatcgaccacccaagggctgaggagtgcgagcgcacggcgcgggactggcaggcagctccacctgcagctccagtgcgggatccactgggtgaagccagctgggcccctgggtctggtggggacgtggagagtctttatgtctagctcagggattgtaaatacaccaatcggcactctgtatctagctcaaggtttataaacacacmgatcagcaccctgtgtttagctcagggtttgtgagtgcaccaattgacactgtatctagctgctctggtggggccttggagaacctttgtgtccatactctgtatctaactaatctgatggggacgtggagaacctttgtatctagctcagggattgtaaaggcaccaat

SEQ ID NO: 457074 - DNA, 624 bp, Homo sapiens
tgttgaaatttgatcctgatattggaggtggggggtaatgggaggtgtttttgtcatgggggcagaaccctcaggaatggcttggtgtcatcctcatgctaatgagtgagttctcactctattgcttcccatgagggctggttgttaaaaagggagcctggcaactccctagctctctctcttgcttcttctctttccatatgatttctgcacatatcaactgtcctttgctttctgccatgtgtggaagcagcctgaagctttcaccaaatgcccagtctttcggccagcagaattgtaagccwaataaaccttttttctttattaattacccagcctcagttattcctttatagcaacactaaacagactaagacaggttggttatatgatctcagaataaatttgctttcagtgacatttagttcttaagaagataattatcttttaagtaagacatacaacaaagggctcaagtgagcatcaatagatgaaaatgtagtagacaaaaaagtctagtagaagaaacaaaaataaaagatagaaaaacatttctaaataaacatgtttatcactatatcaagtgaagatttcatttatgacttaatactataatctgacctt

SEQ ID NO: 457075 - DNA, 624 bp, Homo sapiens
tgttgaaatttgatcctgatattggaggtggggggtaatgggaggtgtttttgtcatgggggcagaaccctcaggaatggcttggtgtcatcctcatgctaatgagtgagttctcactctattgcttcccatgagggctggttgttaaaaagggagcctggcaactccctagctctctctcttgcttcttctctttccatatgatttctgcacatatcaactgtcctttgctttctgccatgtgtggaagcagcctgaagctttcaccaaatgcccagtctttcggccagcagaattgtaagcctaataaaccttttttctttattaattayccagcctcagttattcctttatagcaacactaaacagactaagacaggttggttatatgatctcagaataaatttgctttcagtgacatttagttcttaagaagataattatcttttaagtaagacatacaacaaagggctcaagtgagcatcaatagatgaaaatgtagtagacaaaaaagtctagtagaagaaacaaaaataaaagatagaaaaacatttctaaataaacatgtttatcactatatcaagtgaagatttcatttatgacttaatactataatctgacctt

SEQ ID NO: 457076 - DNA, 545 bp, Homo sapiens
ttgtaatatttaacaaatctatagtaatatgtagacagtaataaagcagtgttatactttaaaatatatttacaaaggtccatgttaatatattatcgtggagaactggaaagagtgaaaatagtaaaaaaaaagctgtgttaaatactctcatattgattctctactcattattaaatagttctgcttttaataatctgtttacatcgtgtcacttaaaacaaacataaatctccaatcctgctgagaaagttttgttcagcaatctacyttaacaagaaggacactttggattgggccaagtgaacaggacttttgttgtttaaatcagagaaatgtttatttttatcattttattttctgccacataaagtataatgggacataccataaatgttgatagttttgcctctaatttttagttgttaacacatttacactgattttaaaatttgattccaaccatagtttatttttgcagccattatgactatgtctacaaaattaggttcaagtttttaccaaattttgctggtttatgcttt

SEQ ID NO: 457077 - DNA, 470 bp, Homo sapiens
gggtgcactgaagtacttgaactgagcagtggtatggagaatatttctagttttcattttacttcattgaatgaacaactctgtgctcatgttacctaaaatgagagttaattaggttatatgttttgctatatgtaatgggctatctttgaaattcttggaaataacttattcactgaagtgtaaataattctgctacagtttcattgatttgatcaaatgatatatattaagtttctgtcctatacaaagctctgtgagggatacaaaaatgactaagtactttctgtgctttcaaagtgtgcatkctaatatgggagatgaaataaaaggaaacataaacattatgcaaggcgggaaatgttaactacggcatcataggaaccaataaaggattaccgatgttctgaagggagaaagatggaggaagacttcaggagaaggacttttaaggagagcatttgaagagt

SEQ ID NO: 457078 - DNA, 504 bp, Homo sapiens
agtgtccacctgtggacataaagaatttataagagaaaagtcaataatgtcttaccatgtaagcacatctgaaatactgatatgatttcagcattaagtaaacactaaagcaaatttggtgactagttgtatgtgtgatacacatatacatatgcatgtatgtataccatttaaaaagaaacaccaaaaaaktttaaaatacactgattttatgacagctgaagagctaattgttgctttccactattaaaacttggtaaataccaataggagaggaattgctcagctttaggaaggggtaattaggtttaatggaaccagttgagaagaggaacattaagcctgttgggaaaaatttcctcccaatgaaaactattagataatggaatcactttccaagagaaatgcctgaaatcctatcactgaggatatttaggattcagctggacattacaagacattccatgtctcagactttatgcccttttatgtccaaaatatgtt

SEQ ID NO: 457079 - DNA, 530 bp, Homo sapiens
acagagaacaagtgctaaaaatcaattcagggtggcagcattttaagtgatatttttcttctagatttagttagtaagttataaaaagttatccccattaaccctaagaagattgaatatgggacattgatgagcagacatgacttaattccaatccaatcttacttcttcttgtgaaggttaagcaccattcttagaaaagaatttcaactgtatcaacaattggggttcagccttgttttgtttatttgactacaaagaatctaacagaagccaaatgcytaatgtggaagatgaggaaaaagggaagggagtttctatgaggctccagggagcaagctcatgaaaaataaagaggtctagcacattgagtcagattctggaatggggtttgaagatggcaaggcagagagtacaaatagctgcccaccctgaattatataaggccctgtggggtgtaaaactgagtatgagtgaagtttaacaaaagtaataacactttgaggcccaagctacattgcagtggagac

SEQ ID NO: 457080 - DNA, 591 bp, Homo sapiens
tactttctcagaattataacaaatgctttccttactcgttgctggagctttgagagaaaaaaaaagtcaagtgaaaattagaaagaaaaaaaatccaaagtactttattgtttagtgtacttaatttcatcaataaaatctgaaaataggagctgtcagatatgcaaatatgcaagaattggctagtatttcacttagctctcataaaatttttgcatgttctggcaaagattgtcaaatcattctagctgaaagaaaactaatttccacaaactgctatttgctatattcttccaaaagtctgtcattaccacctgtacacagtagctaattatctcctgtctgttgtttaaataaatgtattttgtttacattcatctgtaccactaagaggtctttaaaaataattgatcacgaaaaacttgaatttgaaaaaaaaaacttgtagaaartaagtataatttaaaggaaggatggtagcttaaaggactgtgagagaaaagacgcaggaggagaggaaaggaacagataaagatacattcatatattattcatatcatatgtgcagccattttgtaaaaggtgaaatga

SEQ ID NO: 457081 - DNA, 449 bp, Homo sapiens
tacaaatctacttaggaacttaccagttaacaactacacatatatatctaccatggatagccatttcatgaggactttctcatatatatatatatctctctctatatatatatagatatatatatacagatatatatacacacatatctatatatakagagagagatatatatatggacttccatatatatataaatatatatgaggactttcatatatatagatttaaatatatatgaggactttcatatatatagatataaatatatatgaggactttcatatatataggaatagtaccatgtaagatgcaccatgtaatatataattcatatatatgaatatatatgggaatagccccatgtaatatataatagcaccatgtaatatgtaatcaatatatatgcgtgtatatatatgggtgtaaaattttaaatgaactctgctga

SEQ ID NO: 457082 - DNA, 511 bp, Homo sapiens
cccgtggctctgccaaagacaagcctgttgggttgaaagaagaagaagaagaagaagaagaaaaaaaactcaagcaaagtcacagcctcaaaattgttcactgaaagaagcgtgagtggagaagtgtgagaagatgaatggaccggtggatggcttgtgtgaccactctctaagtgaaggagtcttcatgttcacatcggagtctgtgggagaaggacaccccggtaagtaggctggcttggactgactggaaaacgatcattccaagcctatactgagggagtcacttacaaatgggtttaatttgacacataataattgtgcatatttatggrgtaccgtgtgttgttttgatccatgagtataacatttaatgatcaaattaggataatgggcatacccattgccacagacattgactacttctttgtggtgaaaacattcaaaattccctcttctagcccttcagtcaccctactgcgcaatggaatgccagagctcattcctccta

SEQ ID NO: 457083 - DNA, 578 bp, Homo sapiens
cattagtgatcatttttagaccccttgctcactaaatagcaggagggataagatgtgtgtgtgtaaggggggaggattgatttaatccaatccagcagtcttagtatgctaaagatagcgtatttctctgattatataaataattcaggctcatggtaggaaatccaaatgatacataagagtaaagaagaaagtaaaaatcacttgaaattctgccattcttcagcagccaccaagcacatgttgctgaccatccttttgctgattcagtaatttgracagtctctctgggttgaatgcttgaattcagatcttgttgcccctgtttctcttcaaagcgatgctatctgggtgcacaaagagacttcctgggacttcctcccagcagagggaagggggcctcagatctgcctcctctagtctctgcagcatggtttcttacccctagttcctgctaccattcatagctgaagttggaggcttgtgtaattcatggttacatcttccctgccttggccagagtccttgtttaattgggctcccctgagctcctgacccttctgagtctctggcacatt

SEQ ID NO: 457084 - DNA, 578 bp, Homo sapiens
cattagtgatcatttttagaccccttgctcactaaatagcaggagggataagatgtgtgtgtgtaaggggggaggattgatttaatccaatccagcagtcttagtatgctaaagatagcgtatttctctgattatataaataattcaggctcatggtaggaaatccaaatgatacataagagtaaagaagaaagtaaaaatcacttgaaattctgccattcttcagcagccaccaagcacatgttgctgaccatccttttgctgattcagtaatttggacagtctctctgggttgaatgcttgaattcagatcttgttgcccctgtttctcttcaaagcgatgctrtctgggtgcacaaagagacttcctgggacttcctcccagcagagggaagggggcctcagatctgcctcctctagtctctgcagcatggtttcttacccctagttcctgctaccattcatagctgaagttggaggcttgtgtaattcatggttacatcttccctgccttggccagagtccttgtttaattgggctcccctgagctcctgacccttctgagtctctggcacatt

SEQ ID NO: 457085 - DNA, 568 bp, Homo sapiens
aagtaaatgtgatgcctaatggtaaactcttagaatgtatttccattaaatttaggaataaaacaagaggtctgcttttcctattattaaagtataggtcctagtcctttcaataagaaaaggaaataaaatgaaatgtatgaagattggaaagaaagaggtaaaactgtcattgcttgaaaattttgtcatctcttaagcaacaaactaagagaataaatgggaaaattctttgggctaaaagagagctcaacaatatacaaacttcaataacgtttctttataccataaataagtaaaaaatataatgaaaaaacaatactataaaaaatacatgagtcattttcaggagctaaactgcggcaaagctgagggtttaaaaagattaacttcaccacaaggggaaaagtgaaaccagaagagagagtcaaacactggaatgttttcwattacttattctatgattggtttgcatttagactccttttcttgaagcaggagcttagtcatgttaattctaataactcacaccagcagatccttctgattggaatgccctccctagtat

SEQ ID NO: 457086 - DNA, 591 bp, Homo sapiens
cgcaggttaacatgtgtgtatggtagagtgtgggaaggaaattatgtctcagtggactaagggctctgccacttctagctgcatayatcaaacttcaaagccactgacatatacttttaccactacacttcaaactacatagggcaggcatttttaattcaagtttttcagacaactgaatttaagcaatttgtttaaactcttacacgtgataagtaccagagccaagatgggggctgacacctcatcaaacaaactcaatactctttcacatacacgatagataattatagcctggacagaactgaatctcacatatgacatgagtaacatatatacagtttagttaaagttattatactcataaatatttttcttcaattaaaaatttgtccaactttttaagtaaattgtgtatgtatgtacatacatttaatgggcagttttgtaatcattaaatagaattaagcactctctctatactgatataaaataatttcaaagacatactattcagttttaaaaagcaaatcagaatagtgctattatttgtgtaaaatgtatgtatgtgtgtatgcatgaatgcatatg

SEQ ID NO: 457087 - DNA, 578 bp, Homo sapiens
aagaaaagggcatcccatgcagaagggacggcacaagattgtcttcatctactgaggctgctttaacaaagtaccatgaactgggtcacaacagaaatttatttctcacagttctggaggctgggaagttcaagatcaaggtgatgatagactgggagtctgggaaggtcctcttgctagttcaaagatggccatcttctcaccgcgtcctcacatggtggaargagtgaataagctcccttggacttcttttataaagggactaataccattcatgagggctctaccgtcccgacctcatcacctccctaaggcccccagctcctaattcataggattttaacatatgaatggggggcaggcacaaacattcagaccatagcaatgacccgtataaagaaccaagtattgtctttcaatgaccacagattggtatctctgaatttccaggtgctcctgaggaattcgcaggagacaagactgggaggcaagcaagcaagaaccaagccattgaactttttgtgccatgctaaagtcatcagatttcattctgaacacaataggaagccattaagaaa

SEQ ID NO: 457088 - DNA, 578 bp, Homo sapiens
aagaaaagggcatcccatgcagaagggacggcacaagattgtcttcatctactgaggctgctttaacaaagtaccatgaactgggtcacaacagaaatttatttctcacagttctggaggctgggaagttcaagatcaaggtgatgatagactgggagtctgggaaggtcctcttgctagttcaaagatggccatcttctcaccgcgtcctcacatggtggaaagagtgaataagctcccttggacttcttttataaagggactaataccattcatgagggctctaccgtcccgacctcatcacctccctaaggcccccagctcctaattcataggattttaacatatgaatggggggcaggcacaaacattcagaccatagcaatgacccgtataaagaaccaagtattgtctttcaatgaccacagattggtatctctgaatttccaggtgctcctgaggaattcgcaggagacaagactgggaggcaagcaagcaagaaccaagccattgaactttttgtgcyatgctaaagtcatcagatttcattctgaacacaataggaagccattaagaaa

SEQ ID NO: 457089 - DNA, 613 bp, Homo sapiens
tgaccagttgttgtattaaaccagtatgcagcaggcctatttatcccagaggttaatccaaacaaccttgtatrtaaccaagcccacatcagtacctactttcctagtctttcagttccttaaaaaaaaaagtgaaattttattcaaaagccactcaataaaatatcagcagagaaccgcttgtagaaaagacaattaattttgatattgttacaactgtagaaactgggcatcctttgcacatttttctcaatacatagttcatagttcactttgttttttgtttgttttgttttgtgttttgttttgttttgagatggcgtctcgcactgtcaggctggaatgcagtggcgtgatcttgggtcactgcaacctctgcctcccacccagctactttttgtctttttagtagaggtggggtttcaccatgttggccaggttggtctcaaattcctgacctcaagtgatctgcccaccttggcatcccaaagtgctgggattaccggtatgagctactgtgcccagcctacatagttcactttggtcagatcatcctggaagcctgaaaatagaaaccccctacccgcagaatgattttcaaccacagttgctc

SEQ ID NO: 457090 - DNA, 613 bp, Homo sapiens
tgaccagttgttgtattaaaccagtatgcagcaggcctatttatcccagaggttaatccaaacaaccttgtatgtaaccaagcccacatcagtacctactttcctagtctttcagttccttaaaaaaaaaagtgaaattttattcaaaagccactcaataaaatatcagcagagaaccgcttgtagaaaagacaattaaytttgatattgttacaactgtagaaactgggcatcctttgcacatttttctcaatacatagttcatagttcactttgttttttgtttgttttgttttgtgttttgttttgttttgagatggcgtctcgcactgtcaggctggaatgcagtggcgtgatcttgggtcactgcaacctctgcctcccacccagctactttttgtctttttagtagaggtggggtttcaccatgttggccaggttggtctcaaattcctgacctcaagtgatctgcccaccttggcatcccaaagtgctgggattaccggtatgagctactgtgcccagcctacatagttcactttggtcagatcatcctggaagcctgaaaatagaaaccccctacccgcagaatgattttcaaccacagttgctc

SEQ ID NO: 457091 - DNA, 599 bp, Homo sapiens
attcccaaagctcacaattgccttagagtcttagagtcctgagttgcgggatgtaacttctcaatgtcctttcttctccgcccaacttccactccctacatacacataacacagagtgtggcacatgagaagagacgctggcctgrcatcttatcctcctaacagccctcatcaagagctaccactcccctgccaccattcccctcaaaaaaaagggcccatgtatggtagagatgctttctcagtgattcacaccacgggcacctgggaaccagatcagaacttactctgctgatacagtctcctattcaaacagcaacacatcagagtccacacttagcaaggacaagtaatgaacaagatgatccctcagagccatgccggctcgaatttcctgtgatgacaacatttttaatactcatgagctatggccagtggtgcaccggagcccacttgcactggtttacaagcgccagttattaacttttcaggattttcgtgagtcagtcattaaataaagccagtatcgaaagttaaattatatatacttataatcaaatgaattattaaaaataactataacaatgtacaactattgt

SEQ ID NO: 457092 - DNA, 585 bp, Homo sapiens
atcttgtaatgtctttgtttcaccttcaattttaaaaaaggagaatgaacagggagaaaaaacatcattgaatacatcattgggtataggatccttggtgaatagttttgctacattcagcactttgaatacatcattccactgccttctggaccccattgttttgaaggagaagtcaatcattcattgtttgtcattcccttgtatataatgagtcacttttttcttttttttttttttttttttttttgctgktttcagtattttctctttgtttttaacattcatcaatttcactatgatgtctagaagtgggtcttttttgtttattttacttggtatttgttcagcttcttggatttgtaaattgttttcattaaatttgagaagtttcaaggcatttactttttcttttacttttcttttttttttttttttttttttgagacagggtctgactttgtctcccaggcttcagtgcacaatcttggctcagtacaacctccatctgtggggctcaagcaatcctcctacctcagcttcctgagtagctgggactataggcacatgacactatgcctggct

SEQ ID NO: 457093 - DNA, 585 bp, Homo sapiens
atcttgtaatgtctttgtttcaccttcaattttaaaaaaggagaatgaacagggagaaaaaacatcattgaatacatcattgggtataggatccttggtgaatagttttgctacattcagcactttgaatacatcattccactgccttctggaccccattgttttgaaggagaagtcaatcattcattgtttgtcattcccttgtatataatgagtcacttttttcttttttttttttttttttttttttgctgttttcagtattttctctttgtttttaacattcatcaatttcactatgatgtctaraagtgggtcttttttgtttattttacttggtatttgttcagcttcttggatttgtaaattgttttcattaaatttgagaagtttcaaggcatttactttttcttttacttttcttttttttttttttttttttttgagacagggtctgactttgtctcccaggcttcagtgcacaatcttggctcagtacaacctccatctgtggggctcaagcaatcctcctacctcagcttcctgagtagctgggactataggcacatgacactatgcctggct

SEQ ID NO: 457094 - DNA, 572 bp, Homo sapiens
tgatttcattggtaggtagactggtcactcatttatatgaagagatttggggaagtagagtagacagaagttcccttgcatcattaacaatggaagtgtttttcgtgggtctagtattttctctacagtttatatgcaatcactcctaggaaattaactcatcacactaaaatgtcattgaataatatcaataaacacgtttttattgygatattcactttataaaatgcttttatactcatttttttctcatgcatagttgttatttcataataagcctgtaaggtaaatatctttattcatatttcaggtgaagaagttgatgccagtgaggttaagtgaatcagttgctcaagactccccggctatacagatagtaagggttagagatgggacctgaacccagagtacttaacactaagtccaaagaggtttttttgattgtttgtttgtttgtttttgagacggagtctcgctctgttgcccaggctgctgtacagtggcgcgatccacatacaataaaaatgtatgtgtttattgatattattcagtgacattttagtgtagtgagt

SEQ ID NO: 457095 - DNA, 572 bp, Homo sapiens
tgatttcattggtaggtagactggtcactcatttatatgaagagatttggggaagtagagtagacagaagttcccttgcatcattaacaatggaagtgtttttcgtgggtctagtattttctctacagtttatatgcaatcactcctaggaaattaactcatcacactaaaatgtcattgaataatatcaataaacacgtttttattgcgatattcactttataaaatgcttttatactcatttttttctcatgcatagttgttatttcataataagcctgtaaggtaaatatctttattcatatttcaggtgaagaagttgatgccagtgargttaagtgaatcagttgctcaagactccccggctatacagatagtaagggttagagatgggacctgaacccagagtacttaacactaagtccaaagaggtttttttgattgtttgtttgtttgtttttgagacggagtctcgctctgttgcccaggctgctgtacagtggcgcgatccacatacaataaaaatgtatgtgtttattgatattattcagtgacattttagtgtagtgagt

SEQ ID NO: 457096 - DNA, 608 bp, Homo sapiens
gaattatgcaaagtatttttcctggatgtgtctgtragggtgtggccaaagaagattaacatttgagtcagtggactgggagaggcagacccaccctcatcctaggtgggcaccatttaatcagctgccagcataaaagcaggaatggaaagagtagactggctaagtcttctggcctccatctttctcctgtgctggatgctttctgcccttgaaccacagactccaagttcttcaccttttggattcttggacttacaccagtgatttgccaggggctcttgggcccttgaccacagaccgaaggctgcattatcgaattccctacctttgaggttttgggacttggactggctccccggctccccagcttgcagatggcctaatgtgggacttcactttgtgatcatgtgagtcaattctcctaacaaactccctttcatatatacatctatcctattagttctgtcactctagagaaccctgactaatacaaatgtgataagggttttagatttccagtgatcagtccttttgtgatatttgcatttaaaaagttatctcattgttgaatccaagtacctaagaagtcaactaactcattacaa

SEQ ID NO: 457097 - DNA, 545 bp, Homo sapiens
atttgaatattgatttaccaatgtctgtgtatctcaatgaagcccacattgcagatctgaaggaggtatcagcgtttaaccaacaaatgttctagcatttgtagacagcattattggggctgagcccatcaaggttaaggctgtgccatttaaacctcaactcaaacttgtacaatatcctcttaaccagaggttaaagaasgattataaccaatagtcaaaagcctgagaaaggactcatcgtacattgcagcattccttataatattcttatcatccctgttaaaaacccagaagacacacacagcccccaccgccacacacacacacatgcacacaaacacacctatgtgtatatacacatccgagggtgacatttatggactggaacacaaggaatgtctgacaattgttagagacacccaccacctgagtagtttgttcacatcaaaagtgaggttgcataacagagacagagtttcagtttaatagcagcatctctatcaatacaacaaattgcaaggtttccctttaatgtttagaga

SEQ ID NO: 457098 - DNA, 545 bp, Homo sapiens
atttgaatattgatttaccaatgtctgtgtatctcaatgaagcccacattgcagatctgaaggaggtatcagcgtttaaccaacaaatgttctagcatttgtagacagcattattggggctgagcccatcaaggttaaggctgtgccatttaaacctcaactcaaacttgtacaatatcctcttaaccagaggttaaagaacgattataaccaatagtcaaaagcctgagaaaggactcatcgtacattgyagcattccttataatattcttatcatccctgttaaaaacccagaagacacacacagcccccaccgccacacacacacacatgcacacaaacacacctatgtgtatatacacatccgagggtgacatttatggactggaacacaaggaatgtctgacaattgttagagacacccaccacctgagtagtttgttcacatcaaaagtgaggttgcataacagagacagagtttcagtttaatagcagcatctctatcaatacaacaaattgcaaggtttccctttaatgtttagaga

SEQ ID NO: 457099 - DNA, 552 bp, Homo sapiens
ttggtctaaggatacaaatttcagtgagatagcaggaataacttaaagagatgtattttacaacatggtgattatagttaataataatgtattgtctttgtgaaaattgtgaaggatgtttttgcaccatcaaaaatgataaggatgtgaggtaattcatgtgttaattaccttgatttagctactccacaatgtatatatattttaaaacatgttgtacacaataaatatacaaaattttaactagtcaattaaaaaataattagttaattttttaaaaggtgaattatgctatgcctgtgattatattcctggatgcctgtgagaaacctctcttgatttctgcccwgtctatagttatctgttaaacattttaattacttgaggcaaggaagaatttcctctctatgttgcaagcagagaacaggtctagaaaaactctaaattagttatacttcttcacatgagggacctttaatcaatgttttccctctggaggtccctggccttcaatggaggctgatcttgaactacacccacacacaggtcccc

SEQ ID NO: 457100 - DNA, 592 bp, Homo sapiens
tattgtattatattctttctttaaaaaacaatgttggaggaagttctaatacaggtattgtggcataagccccttatagctcatctttcctactgataacaactatgaacaataaacaaaatgcagaaaaaaaaaaaaactacctgaggactctgaactgtaaacaaaagctagcaaattgtgaaggggagataaaccttgaagaagtgacctacagggaggtgacttcctccttgactttctcctttctygagtggatttgactaggccttatcagggagtgaagcagcctgcaggatgcagctaaaaatataatagaaatcctgctgtctcatcagcagacagagttaccttcgaaaggagctcaggaaggtctgacagtgaagtagaaatcacagaagaaagaaagctgaagaatccctatttaagtgtgagaacccatacaaacctcagcctaatccttaatccatatgtgtaggaccaactcaaaccagcaaagtaaagacttgggaaattgaattgagaattgaaatacttgcataaatcttaacctaacccctcaaccatgcctggatgaaacagatccaaacca

SEQ ID NO: 457101 - DNA, 592 bp, Homo sapiens
tattgtattatattctttctttaaaaaacaatgttggaggaagttctaatacaggtattgtggcataagccccttatagctcatctttcctactgataacaactatgaacaataaacaaaatgcagaaaaaaaaaaaaactacctgaggactctgaactgtaaacaaaagctagcaaattgtgaaggggagataaaccttgaagaagtgacctacagggaggtgacttcctccttgactttctcctttcttgagtggatttgactaggccttatcagggagtgaagcagcctgcaggatgcagctaaaaatataatagaaatcctgctgtctcatcagcagacagagttaccttcgaaaggagctcaggaaggtcwgacagtgaagtagaaatcacagaagaaagaaagctgaagaatccctatttaagtgtgagaacccatacaaacctcagcctaatccttaatccatatgtgtaggaccaactcaaaccagcaaagtaaagacttgggaaattgaattgagaattgaaatacttgcataaatcttaacctaacccctcaaccatgcctggatgaaacagatccaaacca

SEQ ID NO: 457102 - DNA, 505 bp, Homo sapiens
actcctggtctcaagtgatcttcctgccccagcaggtatgagccactgtgcccagcataactaacttttaaaaacattattaaatcaaatccaaaaacacactaaaaaggaaagtacaatatgagtaagtagaatttatcctaaaaatgtaaaactttatcatttaaaaatcaatttgtatacttcaccatattaatggaataaaggagaaaaattatatactcttcttaatagttgcagaaaaatatttrttaagtttcaatacttacattcatgacttttaaaacagttaggaatctaggagtaatagagaacaacttcaatttgaaggacatctatacaaacctccagttgccattatactgaatagatataaacagatttccctcagaaaaaatcaatccctgctaaaaattagaaattagaaaagtttttacagcagcacacacaaatttaaacatcccctcccaccaccaccacacacatacacactgctaacataatg

SEQ ID NO: 457103 - DNA, 538 bp, Homo sapiens
ttctgtgtctcatagggtctttgtcacttccttgctgaattcctttgttcacttttagatgctttatttaatatgtagttatctatttgttgttttggtcctttatggaagaggcaagtgctggatgcctctagtcagccatcttgctctgttttgttttycatttaacatttacaaaagtaaaaatcattcttccctcctgggctatacagatacagaacacaggttcaatttggtccatgggtcatggttttctaacctctggttttgttgatggtctctgtttttctttgttttctatttaactaatttttgttctctttattatttctattttctaatatatactcatttgttcatttcctttttcatttttgtttgaaatctgattttaccctcattattgaatggtaatttcactagataattatatgttgaaaattgttttacctcagtcctttaaagaaattattccattttcctctgacctctgctgttaccagccttctgtttctctgagtatttcttcttgttaagt

SEQ ID NO: 457104 - DNA, 503 bp, Homo sapiens
ttccttggttttgatgatgttgacattattgaggagttttgcagagtgtccgtcagttaggatttgtctaatttcttatacttagaccaagttatggattttggggatggaggcaacataacattgaggatatttcagaggaacagaggagccaactgaaacagctcccaatgctcaaagctagaacaatttgggcaacaaaatgcataacatarcattaaattgtaacccaaaatataaaataaatatccacaagtccacagtaatacaaagaaatgattgactgaattagtaagcaaatgggaagaagggagaatagacaaatcttccatatggaagaattcaaataattcatgcagatactctctcttcaaggaggtgaagcataattccttactccctaactgtaggctgcacatagtgacttccttctaaagagtaaagtatgaaaagggaaaatgaaaaagtaactgatatatttgttgctacctgtctcagtcctt

SEQ ID NO: 457105 - DNA, 621 bp, Homo sapiens
aagccacatccttattcaaaattatttttgattgatagacaattaataaataaatcttagatgtgaatagatgagctgtcatgctgtcataggttttcaaaagactgatgtggaatctgaaacagtttctattagtgaaagataacaggtgaggatytcacaaaaaaaaatttttttttaattttatttaaaaacctggttcaggggtaaaaatgcaggtttgttacttaggtaaacttctgtcatggggttttgttgtacagattatgtcatcacccaggtattaagcctagaacccatatttttgctgatcctcttcttctcccacccttcacccttttgaaaggccccagggtgtgttgttcccctatatgagtccatatgttctcatcatttagctcccacttataaatgaaaacatgcagtgtttggtttcctgtttctgtgttagtttgctaaagataatggcctctggctccatcgatatcgctgtaaacaatatgatcttgttcttttttatgactgcatcatagtattctatgctgtatatataccacactttctttatccagtctatcattgatgggcagttaggttgtttccctgtctttgctattgtga

SEQ ID NO: 457106 - DNA, 619 bp, Homo sapiens
tttcaaaattgttttagctattctagttccttagccctcctgcacacattttagaatcatccaaattattctagaaaaatccaaaaattctagttggtattttgattgttattatgttaaatctagatatcaccttggaaaaaactgatgtttttaatagattgagtcttccagtcatgaacatgatatatctcttcgcttatttagttckttaattctgtcatcagagttctacactttgtagcttacaaattctagtcctgtacttgttttgttagatctatacctaagtatttcatccttggaggaatggttgcaaattgtatttgaggtttttaaaattttgatttccatttgtttattgcttatatagagaaatacaaccttttgtgtatattgtctttgtatcgtgcagctctgataagctcacttattacttttagaagatttttttttttggtagattctttggaattttctatataaaccatcatgttatctctcaatgggataaattttatttcttcctatataatcttcattccttttctttcttcttctttttttgctttcttccttattgcactagccaagacttccagtaccatgttgaatagga

SEQ ID NO: 457107 - DNA, 596 bp, Homo sapiens
taatttttatttttttaaatgttttaagacttgttttgtggccttgacatgacacatgttatacccttatgaataatccatgtgctgagaaaaaggatatgtattctccagccattgattgaaatgttctgtaaatatctgttaggtccatttagcctatagtgcatattaagttcattgtttctttattgaatttctgtctggatgatatgtacaacactgaaagtagagtgttgaagtctccagttaatactgaattggagtctctctctctctctctcttttggtataataatatttgctttatatatttgggtgctctagtgttgggtgcacagatatttataatagtcatatcttcttgctgaattgattcctttatcattatataatgaccttctttgtgtctttttaatagctcttgtcttaaaatctattttgtttgatataagcatagctcctcctgcttttttttttctttctatttgcatggaatatctttttccatccctttattttcagtctatatgtgtcttgacaggtaaagggtttcttgtctkcaacagatcattgggtcatgttttttcttcattcaa

SEQ ID NO: 457108 - DNA, 596 bp, Homo sapiens
tatagaggtcaaatacttgttaacaactatgctatgtttgcaaacattacttcttttaatctttattaccaatcctatgagaaagcattgcatctactttttttttttttttgagactgagtctcgctctgtcacccaggttggagagtgcactggtatgatcttggcttactgcaacctctgcctcctgggttcaagcgattttcctggctcagcctcctgagtagctgggattacaggcacctgccaccatgcatggccaatttttgtatttttagtagagacagggttttgccaggttggccaggctggtctcgaactcccagcctcaggtgatctgcccacctyggccttccaaagggctgggattatagatgtgagctactgcgcccaacctgcatctactttttaaaatgaagacactgaaactaaaggagattacattgccaaggtaacccaagtccacctgactccatattcatgaatatctataatcctctcatgagtgaacaccacccagaaaggttatttattcaaatatgctatagactcagaattttggaacttgaggggaccttagagatggccccatccaa

SEQ ID NO: 457109 - DNA, 509 bp, Homo sapiens
taaactttgggaccttgaaccttgggttcataactcagaagggcttctccaaattgcccattggagatgttaaggtaaagctaaccaaggaagtttctcctgagaagcagacagcatcttagatgtggacagctttttttccccaagatcatagatcaagacatttctgcaatatgagactcttatctctcaattatttcccttgcttatgcctctatgaacaactgagaaggaggtttcttttgtgcactcatgggtatacgtttatttgtgaaggattttgcagccattctcactcatggacaagcttatgccttgatagatgaaagatgaagggtaatgtgggtaagaaattttaatgctacctttgctgctttatartcagtcagaaacagaacactgatccactcctcttaacccacatcataagttacagagaaaattgccaggaggccttcactcttccagatgagtatcatttattaggtctctttcttcatgatttggag

SEQ ID NO: 457110 - DNA, 509 bp, Homo sapiens
taaactttgggaccttgaaccttgggttcataactcagaagggcttctccaaattgcccattggagatgttaaggtaaagctaaccaaggaagtttctcctgagaagcagacagcatcttagatgtggacagctttttttccccaagatcatagatcaagacatttctgcaatatgagactcttatctctcaattatttcccttgcttatgcctctatgaacaactgagaaggaggtttcttttgtgcactcatgggtatacgtttatttgtgaaggattttgcagccattctcactcatggacaagcttatgccttgatagatgaaagatgaagggtaatgtgggtaagaaattttaatgctacctttgctgctttataatcagtcagaaacagaacactgatccacwcctcttaacccacatcataagttacagagaaaattgccaggaggccttcactcttccagatgagtatcatttattaggtctctttcttcatgatttggag

SEQ ID NO: 457111 - DNA, 592 bp, Homo sapiens
tcttgtcaactttaaatgacaaaaactgaaagaaatgtgtgaccatgagaacaccataatctatgaatgatgtgctgaaacaagaarcccaaaatgatggtaactgagggtagcactaaagccctaagttattgtcatattctcacctaagtgagaacctggctaaaagtggggaattttgaaacaaaattatgggagttcattgttttgcactgagctcatgcacaaggctcctatatatgagaacaaaccaaagcagtgtcattcatgctaaatataacataattgaactgaaactttaaggaaacagatcctaaaacagaccaatgtttttcttctgtaaaaaggaaattcttatatgggagagggggagattctctctactctaacccttttaaaaaataataaccttaagtccttgtttccacttcacaaaatccatcattctgctatttcccagtgagacttaagaccaaataagaacatttatggtggtaatagagtgatatcaatgcctaaaattttggtctatctctcacatttgaaaggatgaacaaaaggggagaattattaaataagtttagtctaaagc

SEQ ID NO: 457112 - DNA, 640 bp, Homo sapiens
ttggtttcagtttgtggggacactggcaggagcattctccaaacttctggtattatccacctgagaatcatatgggtagtctccctggtgtgctgtatcctctcaaaagttttcaatgtttgcatgcagtcatctctagaattttagatggtgtcttgtcaactttaaatgacaaaaactgaaagaaatgtgtgaccatgagaacaccataatctatgaatgatgtgctgaaacaagaaacccaaaatgatggtaactgagggtagcactaaagccctaagttattgtcatattctcacctaagtgagaacctggctaaaagtggggaattttgaaacaaaattatgggagttcattgttttscactgagctcatgcacaaggctcctatatatgagaacaaaccaaagcagtgtcattcatgctaaatataacataattgaactgaaactttaaggaaacagatcctaaaacagaccaatgtttttcttctgtaaaaaggaaattcttatatgggagagggggagattctctctactctaacccttttaaaaaataataaccttaagtccttgtttccacttcacaaaatccatcattctgctatttcccagtgagacttaagaccaaataagaacatt

SEQ ID NO: 457113 - DNA, 589 bp, Homo sapiens
aaatgtagtaagttctattgagtattgattgttkttaattttaagtttgtgcaacttaatttttagtaatgactgtgtttaacaaatggcttacaaaatggggctaacaatatctatctcacatgcacattttttctgacatcagtaagagtgtacaaagatctcatttatatatcgttcaccttaataaattctggctataattctatagataccttagccagagtgccttatgacgtttttagaatagttttttcaattcctacctgatcaaaacaatattaattccatctagctctctctctctatatatatgtatatatataatatatgtatatatataattgattgaataaatttaaaaatacatattaatttattatagcatatttttctgtttggacaatgaatgttgtcaaatatgtattatgcctatgctatcaacaggagagcaacaaaaagtttttataaacctcatggggaagggaacctgatgtgggtttattatggtctctccaaaacccacccatatggtcaactattggcactaaaatgataaatgaatcttagttcttctactgagtggagg

SEQ ID NO: 457114 - DNA, 589 bp, Homo sapiens
aaatgtagtaagttctattgagtattgattgtttttaattttaagtttgtgcaacttaatttttagtaatgactgtgtttaacaaatggcttacaaaatggggctaacaatatctatctcacatgcacattttttctgacatcagtaagagtgtacaaagatctcatttatatatcgttcaccttaataaattctggctataattctatagataccttagccagagtgccttatgacgtttttagaatagttttttcaattcctacctgatcaaaacaatattaattccatctagctctctctctctatatatatgtatatatataatatatgtatatatataattgatwgaataaatttaaaaatacatattaatttattatagcatatttttctgtttggacaatgaatgttgtcaaatatgtattatgcctatgctatcaacaggagagcaacaaaaagtttttataaacctcatggggaagggaacctgatgtgggtttattatggtctctccaaaacccacccatatggtcaactattggcactaaaatgataaatgaatcttagttcttctactgagtggagg

SEQ ID NO: 457115 - DNA, 589 bp, Homo sapiens
aaatgtagtaagttctattgagtattgattgtttttaattttaagtttgtgcaacttaatttttagtaatgactgtgtttaacaaatggcttacaaaatggggctaacaatatctatctcacatgcacattttttctgacatcagtaagagtgtacaaagatctcatttatatatcgttcaccttaataaattctggctataattctatagataccttagccagagtgccttatgacgtttttagaatagttttttcaattcctacctgatcaaaacaatattaattccatctagctctctctctctatatatatgtatatatataatatatgtatatatataattgattgaataaatttaaaaatacatattaatttattatagcatatttttctgtttggacaatgaatgttgtcaaatatgtattatgcctatgctatcaacaggagagcaacaaaaagtttttataaacctcatggggaagggaacctgatgtgggtttattatrgtctctccaaaacccacccatatggtcaactattggcactaaaatgataaatgaatcttagttcttctactgagtggagg

SEQ ID NO: 457116 - DNA, 516 bp, Homo sapiens
attttgaaatagccaccaaattcctaagagataattgattttaaaaatacaatttctgtgagattttttatcattaaattccaaaagatcagtcttttctgtcttttcacactgtattctcagtgcttaacatagtacatgaaacatagcaggcactcaataaatattgcttgaataaataaattgattatttaaacttttgtgtttttctctttaggaaacctagcctaattaaaaagtgtgtctaaaatgccataatmctgtgaccctctgtatgatcctatgattatatgtttataatcaggactcagttgattttatttcaaacatctgaggcaaatataactcaggaggaaaaatttagcttctcatgtcaacaaatgatagaggatctctgcagaaatatgttagtaccaaaaattacccattaggtaattacatagcttaatttctaaatcaatgaagggctctctgtacatgaagataaattcaactacacacatatttttaaaagct

SEQ ID NO: 457117 - DNA, 516 bp, Homo sapiens
attttgaaatagccaccaaattcctaagagataattgattttaaaaatacaatttctgtgagattttttatcattaaattccaaaagatcagtcttttctgtcttttcacactgtattctcagtgcttaacatagtacatgaaacatagcaggcactcaataaatattgcttgaataaataaattgattatttaaacttttgtgtttttctctttaggaaacctagcctaattaaaaagtgtgtctaaaatgccataatcctgtgaccctctgtatgatcctatgattatatgtttataatcaggactcagttgattttatttcaaacatctgaggcaaatataactcaggaggaaaaatttagcttctcatgtcaacaaatgatagaggatctctgcagaaatmtgttagtaccaaaaattacccattaggtaattacatagcttaatttctaaatcaatgaagggctctctgtacatgaagataaattcaactacacacatatttttaaaagct

SEQ ID NO: 457118 - DNA, 616 bp, Homo sapiens
ggcactcaataaatattgcttgaataaataaattgattatttaaacttttgtgtttttctctttaggaaacctagcctaattaaaaagtgtgtctaaaatgccataatcctgtgaccctctgtatgatcctatgattatatgtttataatcaggactcagttgattttatttcaaacatctgaggcaaatataactcaggaggaaaaatttagcttctcatgtcaacaaatgatagaggatctctgcagaaatatgttagtaccaaaaattacccattaggtaattacatagcttaatttctaaatcaatgaagggctctctgtacatgaagataaattcaactacacacatatttttaaaagctaataggagggctatagcgtgacttagatttatatagtatagcaaaagcaggcttcatcagctatcatgatgaaatgtgtggtaattttgtccacatagatactttctgaatatcaatgacaagaacttgaacccttaccccygatttaaaactaaaaaatataagaacaaccttccaatgggtggaggttgttattcaggttcaaaatgttaaacagtactccaaggagtgaagtcaagtgtaggttacca

SEQ ID NO: 457119 - DNA, 502 bp, Homo sapiens
tctggatagattgtggggctatttattgagacaccaaagaccagaggaggaatgactttcaggcataaaatcaataaaatcctctttacacactctgttaggtcattcttgcattgctacaaagaaatacctgagactgggtaatttataaagaaaagagatttgtctgggctcagtggctcatgcttgtagtcccagcactttaggaggtcaaggctggtagattgcttgagcccaagagcttgaggaccagcctgggcaaatggccaaaccccacctctacaaaaaatggaaaaaaaaaaaaatgccaggcatggtgactcaagcctgtagtctcagctactcaggaggctgagatgggagaatcacctgagcaaggtaggtctaggctgcagtgagttatgatggyaccactgcattccagcctgggtgacaaaataagaccctgttaaaaaaaaaaaaaaggaaagaagaacgaaagaaagaaagaaagaaaagaaaa

SEQ ID NO: 457120 - DNA, 502 bp, Homo sapiens
atgagaaatagaagcctgaccctcagcttggtctgagaacaccttcacatacaattcagaaatagtattttacctgctatctgagtatcccttaacctagtcaagttaacatataagattaaccatcacaattacaaagaaaaaaatggaarcaaaattaatgttcaataagatgggattgattatgtaatttatgataaacatgaataattatgcattataaaatatgataatatgataggagattatagttacacaatatatataagtgattaaaaatagaatgtatatcatgatcccttctttgtaaaagtaaattatgtatgtgcttatgtttatacatttttcaaaagcatggaagaaaatttaaaaatctgaagcaatgactttttcaaaagtgttcttacagatgattttctttttcttcttgttaatgaactatattttctaaattttctgttcaaaaaactatgtaactctgtattaagacaaaacaaaattt

SEQ ID NO: 457121 - DNA, 536 bp, Homo sapiens
tatattttaaaaaaatcattataaaagaaatataagaatattatataaaacgtagacaatagagaaaagaacaacatcattactagcagtttatttttttctcttctgaatattttttytcctgcaggtttggatcttgatttttttcacaagtatttgttatgtgctacagttttcagaattagcattttccatgagctgcttcattcagttgctgtatcacaattttctcaagcattttctctactttcactcttcatatttgcaattctgaataatgttgcagttgataactttgagcttgtagctacttcaacatttaaatgaggtcacacagaagtttcagatagattaagacaggaagttactcacaagtttctgaatatttgattgtgacttatacctgcctggaaggggttgcccatatatacacggcattgaaagtggccttttccctgggtccaaagaccctgccaagccctgctctctgatcttcaagattatttatgttgcctgctcacttggatctgccttct

SEQ ID NO: 457122 - DNA, 594 bp, Homo sapiens
gtggccctcacctgtgttctgtagtttcctgtgcttactgaaccactgcattgctcattctatattgtatttcccattttcctgtctttctcttcaactcatctatgagaaatttaagcaatgattgaacattgtgcaccactgtaacacagggatctggcataatatttgctatgatggaggtactcaacacatacgcactggattaataatgcattttaataattttatcttacaccttttcctgagttccaaagaagacttttgtgaaagaagaaactgaactaggagaccccaaatgtcagaaatctctactttctttatagcgtgtcaaatcacagtgcctaattctctcaatgacttcttggaaattactcatactatacaaattcttttgtctcagaagttaattttgaaaatatggctttatttagagttgtcaawtcagataagcatctctgtgtggaagctttggaaaggcagggaccatgtttatttggtttgtcaattattcatgagacctggtgcaaagaagaggctcaatacattttcaatgaataaatgacttctgcaagccacatgattgcttgtagg

SEQ ID NO: 457123 - DNA, 523 bp, Homo sapiens
tgagacctggtgcaaagaagaggctcaatacattttcaatgaataaatgacttctgcaagccacatgattgcttgtagggcatgagaatgccagacagaaaattgtaaggaatgccagaggaaagtggtattggttgctcagtttccaaagtccgtaacttatggaagaatcataagaagttacgtggctgattgctgaagatggtgatataaatagggaagataatatggccatagcagttcatactttccarccctgaatagcacagtggagacagaactggactgtgactaagaagacaggaatcctaatcctggctctggcaccttcccactgtatagcccttgggcaattcacggaacctcctagtttcttcctcacttgagaagagcaggcagcaactaacatttactggtgatttacaacgtactgagtcctgtgtgaggagttttacctatgttgcttcacttcatctgaggaaatttggctaggttcattccagctctgaacgctaaacgtttt

SEQ ID NO: 457124 - DNA, 480 bp, Homo sapiens
ataataacaatctactgtgaagttcatgacatatgtagaagtaaactatatgacaagagtacaaaggcaaagaagggggaaatagaagggtattctgaagattcttacagctagataaagcggtaaaatattgcttgaaggtagactgtgataaactaaaaatttatactctaaatcctaaagtaactatyaaaattttaaaaatgaagagatatatataataagctaacaaaggaaatggaagcataaaacaactatccaaaaaagagaagaaaaagaggaaaaagcatataatgaaccgctaaatttagcctgaaacttcctctgtactttttacgatataaattaactgaaagcttaacttaggcttatacttatgtaacaaatagctgagctcagccaatcacagcagccaagcttcaattttggatggccaagtaatcatgctaatcaagctgtttctgtacattactgttttct

SEQ ID NO: 457125 - DNA, 479 bp, Homo sapiens
ccaggaataaaaaggatgatttcataatgataaaagagtcagttcttgagaatataacaattctaaatatttctgtacctattaatagagtttcaaactacataaggcaaaaattgataaaactgaaaaaagaaatagaaaactacacaattatagcctcaataattgatggaacaaatagacagaaacccagtaaggatatagaagacttgaacaacatcatcaatttaactaattgacaaagrtagacattttttcaagtgcacgtgaaacgtcaccaaaatagctgacgttctagtctataaaacaagtctcaaaacatcaaaaaaatttgaagtcatacaaagtttgtcttctgatcagagcggaattaaactagaaatcaaaaccagaaagatttttggtaaagccccaggcatttgtaaactaaatacagtctaaacaactcatgagctaaagatacaatgaaaagagaaaag

SEQ ID NO: 457126 - DNA, 620 bp, Homo sapiens
tgctcatttgaaaggggaatgcctcacaggaaaaagagccaattgcaagttggggctgttgccatggtgctttgctattccttcaacttgctatagatgaaataaatcctgggagtacaggggtagggtaacagaggggaaagatgaggagggaaatggggtgaacctggggcggggaatcccactgcagtaaagctctagtgtttccccttgcctgtgctttaacgctgacaaggagaagggaggggctgggaagaagggagagagaaacctgcagggaaggaatgactttctcaacatgccctggattgctaaaataaaataaaaattaatttaaatcctcagatttctaatgtgagttagaagatgtaacactaaatctcaaacaattcaccattctttcagtaaatgaatgttcatatttcctaacacactctggatcctagatggaaaggttaaaagagtttaatacatttgtcraatgcaatctaatatgcatattaatgagctgatggagggcagaaacttacatgctgcataggaagtacttttcaaataaaataaattaattccattcccattcattttactatgaaaagaggctaaatgcactggcacac

SEQ ID NO: 457127 - DNA, 544 bp, Homo sapiens
tttttccagttgcatttgttagacaaaactataaggcagatgttatatttatcaccatgttttccaatcctgtgccctatcttttgaaatcacttcaacttagcagagacgtgttgaccatttattacatgtggtaaattatttaaggtaaaagatacataagatatagttgtcagtcttagtgagcttagagaactgaggacaaaacaagcatccacacgtaccttaaatyacaaggcagaataacataggtgcataagacaaagtgttggcacctgacagtgggtcttgaatgaagggggcatttcagagcaatattcaaagactgataatgtttcaataggtaaagatgatggatgtggccttcgggagtcaagggacctgcgtgaacagagtcaaataggcaagatgatctgagggatgatgggaatgacacaaacaatgtttggaaactgaaggcagggatctggtgaaaggtaggtcaggctattagtggctgaccctaaatgccagggtgagaagtttgtaataataatgagacatt

SEQ ID NO: 457128 - DNA, 544 bp, Homo sapiens
tttttccagttgcatttgttagacaaaactataaggcagatgttatatttatcaccatgttttccaatcctgtgccctatcttttgaaatcacttcaacttagcagagacgtgttgaccatttattacatgtggtaaattatttaaggtaaaagatacataagatatagttgtcagtcttagtgagcttagagaactgaggacaaaacaagcatccacacgtaccttaaatcacaaggcagaataacataggtgcataagacaaagtgttggcacctgacagtgggtcttgaatgaagggggcatttcagagcaatattcaaagactgataatgtttcaataggtaaagatgatggatgtggccttcgggagtcaagggacctgcrtgaacagagtcaaataggcaagatgatctgagggatgatgggaatgacacaaacaatgtttggaaactgaaggcagggatctggtgaaaggtaggtcaggctattagtggctgaccctaaatgccagggtgagaagtttgtaataataatgagacatt

SEQ ID NO: 457129 - DNA, 598 bp, Homo sapiens
tcacttcaaaaacgcaggaattcttagaaatattatcgactgagaagagtaaaatgaggattgatattgtgccatgagttttggcaaaagtgagaatattgagaatgtagtttccatttgggcgtagcagacccaagcctggctgaagtgagttgaggtgagaacggggggtgagaaaataaaaacaacttttaaaagagcttgactgtgaagcagaggccagacatgacacagtaactggaggaggttgcagagcccatgtaggcttctttaatgtcatgtttttatgtttgagagagagagagaaattgatgatcaaggtgagggaggagacagatgcaggtgcaaagtcctcgaggagccaaggtgaagtggtgtccagagtacagtggaaatgctggayatggttcatgaattgtgtccaaagaaaaggcagaacacattggtagattcggtgacagataaattagctctcttgtgatttcttctattttctcagtaagaatgcgacagacgggcatagttttggaggtttaagtagagatgagatgacataaaatagttgttctggagactaagagagtgacttgaccagaat

SEQ ID NO: 457130 - DNA, 426 bp, Homo sapiens
gatatatagaaatactttaataatgtacagtaatcattataacatacagcaatcacaaactagaaagatacatgtttttccagttactatggtttcagaacatatttctataatacttagtgatgtaaaacaaccatytatcatgctcttggttttaatgtgtcagaatttaaacaaagcatgggggatatggttgatctcttctctacttcgtctgatgccttagttggaagactagagggctggggaccattatcatccacaggcatgctcacttacaaggccaccaaggctggctgtcagctgatacctcggttactctccattaggcctcttcatgtagtcttgtcacaccacctactttggtttcctcatttcgcagtggctggtttcccttaagcaaccatcccaatattgagggcagaa

SEQ ID NO: 457131 - DNA, 567 bp, Homo sapiens
ttgtctggcatttgaaccctgttgattatgacaggaattatacccattttgtttctggtgaatcacatctggtctttgccactctaggatgctaccagttcaactgaaaacaggaagcctgtgttaattccgtcaactctaacattatccasagcatgtagaggaaaatcaccaaagactttctcaaagatgctagtgatctcttcactaagttatgtatcaatttattggtactttagtcaagagtgtcctcctgaccctcaacaagggatgcagggcaaacaagattagtccactccaagatttgtatccccccctaaaactatgtattctatcttttacatcagggaagatgtttgcttctaaacatcattaagtacaaaacatttaaagtattaaaaattaaaaataaattacatgcagttgaatccaggtttcaggcaatcaactatggaaactcttcagataagtcctgactccttgaatcaacacattagattcatggtaaatgccttgacaacttttgcataatctaatattaaaatccatctatttttgcctaacact

SEQ ID NO: 457132 - DNA, 637 bp, Homo sapiens
gggaaaataagtcatgctcatatgtgctacaatgctcttataggtaaggtaggtatgattgaagcatagaaatagccatgatagttgaaatctcaaacatttattttggcttctggtttcaactactttggtcattgtcatttacattatttctcaagttgctgtgaaataacgtaacagcaccagaccaatctgggtcagcttttatgtaacaaagttgtgcattgttttttagttgtcatggacccccaggtcagataacctgagtatgctcaaatgaactgggtgtataatcacaaggggaacttcagtgccctaccaaggagcagggactaaattaagaagggagatcatatggtagaatccaatatccaatcagattgagctctggcatcactgccatggcagagtccagytggatacttcctcccaacatcaggtcattgcaagatccaatccaatcacacctaattaccctatgcttataaagcttgacccagctcccagcagagggagacatgggtttgggaactatctgtggtgttctccttacctgtcacaataaaatcccctgctaaatcctcctaagttatgattattgggttgatactcgccaagcaacagaacccacccattg

SEQ ID NO: 457133 - DNA, 611 bp, Homo sapiens
tccaagcagaggctggagatcacttgtcaggacaattgtaaatggaattcaagcaacagctgaccattggctagaatagatgaccttgcagatccctatgatattgagagtccatgaattcatrattttatatcttctctaaatattaaatcacttatttattggtgtccctttaattacaggcaggtataaattgttggactaataggttggatctcatgtcatgttgttgcttcacctgcagttccatgtgatcagctctctctggcaaggttcctcttgatggagttctttcaggtcatttttatgcctctgagacatttcagcccttttactattttaggaacacatttctaaattatacaagtctttcctgacacaagggctgtaacaccttgccaagaggaattctccatgaatggaataaatgaagagagatagcctgagaaatacgtgtcagtgcagctgttctgagttccctgaatttatctcagtttgaagctaaggattcctgacgctcaggccacatgatgctttttgtttttggagttagttatatcggaagaacactggcacttcaaacagcatggggttggagaggagctggcatg

SEQ ID NO: 457134 - DNA, 560 bp, Homo sapiens
aaataacctgtgtttgtagatggatgaatagatamagaatatgtagtatatatatatatacacatacacacacacacaataaaatattttatattcagctttaaataagaaggagattttgccatttgccacgacatggatagatctggaggacattatgctaagtgaaacaagccaggcacagaaagaaaaagattgcaaggttttacttttatgtggactcttaaaaacgaaaagatcaaacatacagagacagagaatcaaacagtggttatcaggggtgtgggtgagggtaggtgggtgggagaaaaatggggagatgtaggtcaaaggatagaaagaagaagatatgtaggatcaacaagtctagagatctaatgtacagcatgaggacaatagttaataaaattatattgtattaaggattattgttgaataagtagattttagatgatcttatcacaaataagtaactgtgagataagagacatgttaatctgtttcactacagcaaccattttactatctatatatatataccctataacatcatgttgtga

SEQ ID NO: 457135 - DNA, 611 bp, Homo sapiens
tccaagcagaggctggagatcacttgtcaggacaattgtaaatggaattcaagcaacagctgaccattggctagaatagatgaccttgcagatccctatgatattgagagtccatgaattcataattttatatcttctctaaatattaaatcacttatttattggtgtccctttaattacaggcaggtataaattgttggactaataggttggatctcatgtcatgttgttgcttcacctgcagttccatgtgatcagctctctctggcaaggttcctcttgatggagtyctttcaggtcatttttatgcctctgagacatttcagcccttttactattttaggaacacatttctaaattatacaagtctttcctgacacaagggctgtaacaccttgccaagaggaattctccatgaatggaataaatgaagagagatagcctgagaaatacgtgtcagtgcagctgttctgagttccctgaatttatctcagtttgaagctaaggattcctgacgctcaggccacatgatgctttttgtttttggagttagttatatcggaagaacactggcacttcaaacagcatggggttggagaggagctggcatg

SEQ ID NO: 457136 - DNA, 584 bp, Homo sapiens
ggctggcaggtgttcctctccaggagctgcctcagtcaaatggggccttctctcccaaggttatccctccacaggggtagcgcatgtctaataaagggtcaaggtggagttacaaggattgccccttgccttaatttcagacaaccctaaagggccattctttctccagagttccctgtgggatcagcaaggcctctgttgtaactgcatcacatatcatagatcaactttgccctctgcccaattctcacagttgtcattcatgaaatcaccccccaaggggtgattcatgcaaatctctactctagagtatgtttccagggagccaaacctatgacagttggtaccagaaatggttttagggagccgaatctatagtgcagttttggagcaggaaaacctcatcaccaactgtagatagagtacatggcccctggcatgctrtaattctgcaattgctaaaattttcattgggattgcataatattggaagggaatgccttggttgctgcaatatctcaggcacttgagagttgtgtgggaaacagaaattatgagaattatggaatcgatcatgcttcata

SEQ ID NO: 457137 - DNA, 631 bp, Homo sapiens
ggtctcttagctgtggataccagctcctgtccagtggaggtggcagcacaggggcggtgcaatgggctccatgagggtccttaattttggtggtttaatgctctgtttcatgctggttggcctcctgccaggcagtggcactttccagaaagcatcagctgtggtagtgtggagagggactgatggtgagcggggacctagaactccaaagattaaatgccccttgtcttccattaccagggtgtatagggaaagaccatcaggtgggggcagggctaggcatgtctgaactcagaccctccttgggtgggtcttgctgcggttgctgtggaggataggggtgagattcctaagtcactggagttgtgtacctataaggattaaggctacctctgctgagtcatgcaggttgttagggaagtaggggaaagccagtagtcacagggctcacccagctcccatgcaaactgaagggctggtctsactcccatcatgccccgcccctcaaaccgcccggagtctgtttccaggtggagggtgagacagacttgaaaacttgccccgggcttcctgcctcccagctgtgaaagaaaagggcttggttcttaccccacctgtggagtctgcacac

SEQ ID NO: 457138 - DNA, 580 bp, Homo sapiens
ttatttctgggttatctattctgtttcatttgtctatgtgtctgtttctatgctgttatcatgctgttttggttattatagctctgtagtataatttgaagtcaggtagtgtgattcctctagttttgttatttttgcttgggatgactttgactattctgggtcttttgtggttccatatacattttagcattattttttctatttctgtggacagcatcattagtattttgataggaattgcattgaatctgtagattgctttgggtagtatggacattttaacaatacggttgytccaatccatgaacactttgggttgttttcaatttctcacatcaatgttttaaagtttttattgtagacatgtttcacttctttggtaaagtttattcctaggtatttcattttatgtgtagctattgtataagggagtactttcttgatttttatgttagattgttcacagttggcatatagaaatgctactgatttttgtatgttggttttgcatcctgaaactttattgaatttgcttattagttctgatagtttcttggtgaagactttaggtttttcc

SEQ ID NO: 457139 - DNA, 580 bp, Homo sapiens
ttatttctgggttatctattctgtttcatttgtctatgtgtctgtttctatgctgttatcatgctgttttggttattatagctctgtagtataatttgaagtcaggtagtgtgattcctctagttttgttatttttgcttgggatgactttgactattctgggtcttttgtggttccatatacattttagcattattttttctatttctgtggacagcatcattagtattttgataggaattgcattgaatctgtagattgctttgggtagtatggacattttaacaatacggttgttccaatccatgaacactttgggttgttttcaatttctcacatcaatgttttaaagtttttattgtagacatgtttcacttctttggtaaagtttattcctaggtatttcattttatgtgtagctattgtataagggagtactttcttgatttttatgttagattrttcacagttggcatatagaaatgctactgatttttgtatgttggttttgcatcctgaaactttattgaatttgcttattagttctgatagtttcttggtgaagactttaggtttttcc

SEQ ID NO: 457140 - DNA, 611 bp, Homo sapiens
tccaagcagaggctggagatcacttgtcaggacaattgtaaatggaattcaagcaacagctgaccattggctagaatagatgaccttgcagatccctatgatattgagagtccatgaattcataattttatatcttctctaaatattaaatcacttatttattggtgtccctttaattacaggcaggtataaattgttggactaataggttggatctcatgtcatgttgttgcttcacctgcagttccatgtgatcagctctctctggcaaggttcctcttgatggagttctttcaggtcatttttatgcctctgagacatttcagcccttttactattttaggaacacatttctaaattatacaagtctttcctgacacaagggctgtaacaccttgccaagaggaattctccatgaatggaataaatgaagagagatagcctgagaaatrcgtgtcagtgcagctgttctgagttccctgaatttatctcagtttgaagctaaggattcctgacgctcaggccacatgatgctttttgtttttggagttagttatatcggaagaacactggcacttcaaacagcatggggttggagaggagctggcatg

SEQ ID NO: 457141 - DNA, 579 bp, Homo sapiens
ggcagtcaaatctaaaactccaaaatgatctcctttgactccatgtctcacatacagatcatgctgatgcaagaggtgggttcccatgatcttgggaagctctgtccctgtrgctttgcagggtacagactccctcccagctgctttcacaggctggtgttgagtgtctgcagcttttccaggggcaccatgcaagctgttggtggatttatcattctggggtctataggacagtggccctcttcccacagctccactaggcaatgccccagtgaggatactgtgtgggacctccaacctacacttgccttccccactgccctagcagaggttctccatgagagccccacccctgcagcaaacttctgcctggacatccaggcatttttttacatcctcttaaatctaggtggaagttcccaaacgtcaattcttctgtgcacctgcaggctcgacaccatgtggaagctgccaaggcttggggcttgcaccctctaaagcaatggcccaagcagcatcttggccccttttagccatggctacagtggctgggatgcagggcaccaagtccctaggctg

SEQ ID NO: 457142 - DNA, 579 bp, Homo sapiens
ggcagtcaaatctaaaactccaaaatgatctcctttgactccatgtctcacatacagatcatgctgatgcaagaggtgggttcccatgatcttgggaagctctgtccctgtagctttgcagggwacagactccctcccagctgctttcacaggctggtgttgagtgtctgcagcttttccaggggcaccatgcaagctgttggtggatttatcattctggggtctataggacagtggccctcttcccacagctccactaggcaatgccccagtgaggatactgtgtgggacctccaacctacacttgccttccccactgccctagcagaggttctccatgagagccccacccctgcagcaaacttctgcctggacatccaggcatttttttacatcctcttaaatctaggtggaagttcccaaacgtcaattcttctgtgcacctgcaggctcgacaccatgtggaagctgccaaggcttggggcttgcaccctctaaagcaatggcccaagcagcatcttggccccttttagccatggctacagtggctgggatgcagggcaccaagtccctaggctg

SEQ ID NO: 457143 - DNA, 579 bp, Homo sapiens
ggcagtcaaatctaaaactccaaaatgatctcctttgactccatgtctcacatacagatcatgctgatgcaagaggtgggttcccatgatcttgggaagctctgtccctgtagctttgcagggtacagactccctcccagctgctttcacaggctggtgttgagtgtctgcagcttttccaggggcaccatgcaagctgttggtggatttatcattctggggtctataggacagtggccctcttcycacagctccactaggcaatgccccagtgaggatactgtgtgggacctccaacctacacttgccttccccactgccctagcagaggttctccatgagagccccacccctgcagcaaacttctgcctggacatccaggcatttttttacatcctcttaaatctaggtggaagttcccaaacgtcaattcttctgtgcacctgcaggctcgacaccatgtggaagctgccaaggcttggggcttgcaccctctaaagcaatggcccaagcagcatcttggccccttttagccatggctacagtggctgggatgcagggcaccaagtccctaggctg

SEQ ID NO: 457144 - DNA, 526 bp, Homo sapiens
ggctctgggcccagcccatgaaactattttttcctcctaggcctctggacctgtgatgggaggggctgctgtgaatgtctttgacaagccctagagacattttcctcattgtcttggcaattaacatttggctcctcattatttaygcaaatttctgccacaggctggaatttctcctgagaaaatggttttttatttttctatcacattttcaggctgtaaattttctggactttcatgctctgtttctttattaaaacaatgtttttaatagcacccaagtcacctcttgaatgctttgctgcatagaaatttcttctgccaggctgggtgtggtggatcatgcctatgatccgagcactttgggaggccaaggtgggtggatcacttgaggtcaggagtttgagactactagtctagccaacatggtgaaaccctgtctatgctaaaaatacaaaaattagctgggcattgtggcatgtgcctgtaattccaactactcaggagcctgaggcaggagaattgc

SEQ ID NO: 457145 - DNA, 374 bp, Homo sapiens
ctcctctacccttcctggcctctagtaaccaccgttctactctatacctccgtgagatccactattttagctttcacatatgagtgagaacatgcgatgtttgtcttatttcacttaacgtaatgtcctccagttccatccatgctatcgcaaatgacatttcattattttttttatgatggaatagaattccattgtgtatatagaccatgttttctttatctatttgtctgctgatggacacaggttgatcccayatcttggctattgtgaataatgctgcagttaatgtggaagtgcgaatacctcaagtctcttttttaatcccggaaatcaaagtcaccttcatttaataggtgactttgatttccagc

SEQ ID NO: 457146 - DNA, 521 bp, Homo sapiens
tcaccttcatttaataggtgactttgatttccagccaaaaataatagaaatgcgggcagagctccagtcctgaagggggttgtgccagggtaataagtcagatggatgagacaaaagtggtggtgggggggataagctgctcaaagctctttcataatccactggtttctgtttctgctcagtaaaatgaaggaatcagaaaatacttgaacataaaaagacaatttgtattagttactgatgccaaatgtgcacagaagctggtcttaataaatatgacaatagtaaaaaaatgcctgagtcgttctttgatgttatgcttctgagccccagaatgacaagaarcatcatttttttaatactccaaaaataatgttgccttgtcttttttttttcctgaggaatgctaaagcaatgtttttcctgcctgatgctattttattattaaaaaaccttgatgtcccattaacttctatatgaatgatgaaactgtgtaaatctctctagtggccagactaaac

SEQ ID NO: 457147 - DNA, 563 bp, Homo sapiens
tgtgccaacccaaactcatcatttaacatgttattaaagcctcagatgttttattcttgccaacttctgtggtggctacctcctacctccacttctttgctgaagatgaaacagctgtgggattcatttcttctcagagggtgttgccatctttttggattttagtgcagtaggttaccttgcagcctcaattctctgtggagactagatgttttttataggctatcagacttgctcttattgttagggtaggagtgactttctctgctgactttttgcatcctaggtgcaagayagaatatacttttagtatctggaagaattatatggttcttttcccaatctgtttggctattcctaaatcacttggttttctgctgacattttaaagatttttaaacatttctttaaacacgtaagatatagctattttgtgttgtgtctaagaataccattgtctagaatctttgctggtccgactttgcttattattgttttggatgctttcagtggttgttctttgggttcttgtgtgttttgggatttttgactgtgaactcatg

SEQ ID NO: 457148 - DNA, 549 bp, Homo sapiens
ctggtttgtaaaactgctaactcaaacagaacaaaaattaattgaataccaagaaaatactttgccagattttcatgctaaatcagccaatactgaaattgtttaggtacacartttgaatgaactccatggtctaagtgaaattacctatggtaacccatcagttgtcagtgctatgcacctaaagtggagaaacaacttcaagaggacataagtccaatgttaagcatggagaaccaggatggccactgtgtccttcctgagtccttaaggcttttggcttttttttttaaattacaagttctgcatcatgactcatcatgaaaaagataaaatgatccaaattaaatattatattggtatggtgacttctaaattgctaaaatagtttatgaccgacatgtggttttgtcaaacccatattcctgaaaagacaatcaaaacttcaggtacatttcactacccgatggaccttttaaatatttatagacagatttcatccaattgtcattttcaatgcatgttttctggttgtatgaaagctttccc

SEQ ID NO: 457149 - DNA, 569 bp, Homo sapiens
ttcatgctaaatcagccaatactgaaattgtttaggtacacaatttgaatgaactccatggtctaagtgaaattacctatggtaacccatcagttgtcagtgctatgcacctaaagtggagaaacaacttcaagaggacataagtccaatgttaagcatggagaaccaggatggccactgtgtccttcctgagtccttaaggcttttggcttttttttttwaattacaagttctgcatcatgactcatcatgaaaaagataaaatgatccaaattaaatattatattggtatggtgacttctaaattgctaaaatagtttatgaccgacatgtggttttgtcaaacccatattcctgaaaagacaatcaaaacttcaggtacatttcactacccgatggaccttttaaatatttatagacagatttcatccaattgtcattttcaatgcatgttttctggttgtatgaaagctttcccatgcaagagggctgatgttataacagtagttcattatgccacagtgtattttcaccagctaaagaaagcttttcatggttcactgactgac

SEQ ID NO: 457150 - DNA, 569 bp, Homo sapiens
ttcatgctaaatcagccaatactgaaattgtttaggtacacaatttgaatgaactccatggtctaagtgaaattacctatggtaacccatcagttgtcagtgctatgcacctaaagtggagaaacaacttcaagaggacataagtccaatgttaagcatggagaaccaggatggccactgtgtccttcctgagtccttaaggcttttggcttttttttttaaattacaagttctgcatcatgactcatcatgaaaaagataaaatgatccaaattaaatattatattggtatggtgacttctaaattgctaaaatagtttatgaccgacatgtggttttgtcaaacccatattcctgaaaagacaatcaaaacttcaggtacatttcactacccgatggaccttttaaatatttatagacagatttcatccrattgtcattttcaatgcatgttttctggttgtatgaaagctttcccatgcaagagggctgatgttataacagtagttcattatgccacagtgtattttcaccagctaaagaaagcttttcatggttcactgactgac

SEQ ID NO: 457151 - DNA, 628 bp, Homo sapiens
ttaactaatctccctacctgggctcttccctgttaactgtatcatacatgagtttttcaccttctctgtgctattaaaggcattgtgaaaactgttcttatggaactcacagttctttatttccaagtttgacttgattttcaactatgagctctttgaggggcaaagtctgtatcttatgtcacttgcacaactggcttttagcagtttctaggaacatagtrcgctcaacttgcaggaagggaaaaaaaggaaagaaggatgaaagaaagaaatttggagaggattagatagtatttctgagcctaattaaaaatataattgaaagaagtctctaaaaaattatattttaagaaatgacatagaacagagggaagatgtgaatatgaagaaaatctaaggcaacataaattcataaatcattgcgaagcggtcacagactgtactggaagtgttttaaagattcaacattgatactttaatcatttctcaagctcttcaatagagttttctaattatctgcctatgccttcttcttccctaccccttccacgttgctatcaatctaagctacttttatgacatgtcttaagattggaacaccataattaggtgaatttcttacatg

SEQ ID NO: 457152 - DNA, 608 bp, Homo sapiens
ggggttaagtttgctaatctcatctcagaaacagcagcatcagagcaggaaggagagagagacacaaaagtgaagcccataggaaaaaagaggcaaacctagagaaatagatcccagaaagatgactgagtctgaggcggggtttacaccttttatcttgttgtatttgacattaactgtaaaagagaacacaggagacaaagggtcactcttctttttcactgtaaagattaaggtgcatgcatacaaacacagcttatctatacagtgtctttatttcagaaggcaaattttcatttttctgactctgaasgaaatcagaggatttgggcactcaagagtgatacatacttcaaatcagcatcatgtacaggatcatgtacaggtgtgtgcaccactgggggtgctgatatcaatacccttgtaactcttaggcaaacaatggcctattttatgctttgtataaatctctcgtctagcagactagaaaccccataagaaagtcccattttacatccaaggaagaggcagttcatataatttaaatcatttgttcaaacctacataatgaaggagctcagacttaaattcagatctattgactgaag

SEQ ID NO: 457153 - DNA, 608 bp, Homo sapiens
ggggttaagtttgctaatctcatctcagaaacagcagcatcagagcaggaaggagagagagacacaaaagtgaagcccataggaaaaaagaggcaaacctagagaaatagatcccagaaagatgactgagtctgaggcggggtttacaccttttatcttgttgtatttgacattaactgtaaaagagaacacaggagacaaagggtcactcttctttttcactgtaaagattaaggtgcatgcatacaaacacagcttatctatacagtgtctttatttcagaaggcaaattttcatttttctgactctgaaggaaatcagaggatttgggcactcaagagtgatacatacttcaartcagcatcatgtacaggatcatgtacaggtgtgtgcaccactgggggtgctgatatcaatacccttgtaactcttaggcaaacaatggcctattttatgctttgtataaatctctcgtctagcagactagaaaccccataagaaagtcccattttacatccaaggaagaggcagttcatataatttaaatcatttgttcaaacctacataatgaaggagctcagacttaaattcagatctattgactgaag

SEQ ID NO: 457154 - DNA, 608 bp, Homo sapiens
ggggttaagtttgctaatctcatctcagaaacagcagcatcagagcaggaaggagagagagacacaaaagtgaagcccataggaaaaaagaggcaaacctagagaaatagatcccagaaagatgactgagtctgaggcggggtttacaccttttatcttgttgtatttgacattaactgtaaaagagaacacaggagacaaagggtcactcttctttttcactgtaaagattaaggtgcatgcatacaaacacagcttatctatacagtgtctttatttcagaaggcaaattttcatttttctgactctgaaggaaatcagaggatttgggcactcaagagtgatacatacttcaaatcagcatcatgtacaggatcatgtacaggtgtgtgcaccactgggggtgctgayatcaatacccttgtaactcttaggcaaacaatggcctattttatgctttgtataaatctctcgtctagcagactagaaaccccataagaaagtcccattttacatccaaggaagaggcagttcatataatttaaatcatttgttcaaacctacataatgaaggagctcagacttaaattcagatctattgactgaag

SEQ ID NO: 457155 - DNA, 550 bp, Homo sapiens
tccattattaataaagatccagttgaattgctgatatctctgtgctctcatggtacctggcacctctactgttactaaagcacacgacatgctattttgtatatatgtagtggtgggcaaacctcgtctgacaggctgtaacctccttgaagacaggaaaattgtcatttactcctatattgttagcatttagaatggtgcttgtcctgatatagtgctctctaaaatggtttaaggaatgaataggaccaaacagatttatgtgctttctttggtttatcttgagcataatggtctaatgctaaggtattttatcattatttatcactggaaatgtgttatattattatctttatgtgtgaaataaagggagctcctttgacctggaaccaagaggagaaagtcatttgaatgactgtaatatcagaacstctgacatgatcacttcttcttactgatatatgtatgacacatgcttctacaacacacattttaatctgtctttttttggacaaattggcaaatgattggtacatctctagatggtgtt

SEQ ID NO: 457156 - DNA, 522 bp, Homo sapiens
tggaaatgtgttatattattatctttatgtgtgaaataaagggagctcctttgacctggaaccaagaggagaaagtcatttgaatgactgtaatatcagaacgtctgacatgatcacttcttcttactgatatatgtatgacacatgcttctacaacacacattttaatctgtctttttttggacaaattggcaaatgattggtacatctctagatggtgttactctaaaattatttgtgatatgtacarttttctagaatgacttactaattgtgattccacagctaacctggggacaacacatagtcaaatgggcttatgtaatgggtccaaaggatagaaatttaggaaggcctcaaaggggattgaggtagtattttgtattacctagataagcattatgaatttggaattatagcagctctaggattagatatttagcctaccatcttgaatttctccaatacagtgtccccaaatgataccttctctttctttacctttcctcaggttgatatgta

SEQ ID NO: 457157 - DNA, 610 bp, Homo sapiens
tgtattaaataatttaattctttacaaaacttgtgaggtactattattgcccctattttacagatgaggaaacaggcacagaaaccttagataacttgctcagggtcactaggcaaaacagtgattcaattgggaaaaacttggctccaaagtctgagctgttaaccacaactaccactgcttagacagactaaaaagacaacctctgaagctgaatgtgatttcctatatgtattgtttactataaattatatatacatatgtacacatatattatccacatatatgatacatatatgtaaatattgattatagaaatgtgattatatatgtgttgttaagattacaggtaatattttttcctttgagcatttataaacaggataaccacacttacaaaataacattacacaaaatacagaatcttggaaccacaagtagtggctctcaaatttggctaactaatttgtctgtrcaaacaacattaatttaactagaaaaataaatacaacatagttttgctgtgtggatccatcactatttgatattcatgacttagctttgagcccatcagccctctgctccacagagagagcaggagagcagaacc

SEQ ID NO: 457158 - DNA, 604 bp, Homo sapiens
tcttaagttttttatattttatgattctattgcaagtagtactgtttttacttcaatttccaattttcattgttcgtatgtaaaagaacagcagattttctagtatattgagcttgtaatctgcaaccttgccaaacttgtgtagttcatagttctaatagccttttttttagattttggggagaatgcctacattgacaatcaggttgtckaatgaagataattttattttctcttttctaatctgattgtcttttatatttatcttgtcttcttgagctaactgaaacccagagtacaaggctgaatagaggtataagaataaacaaccttttttgttttcattcttaaagaaactgcattccatctttcatcattaagtttgacacctgcgttagatcatcattgatgtcctttatcaggatgaagaatttcccttcaagttatagtttggtaagagtttttatcaagaactgatgttgaaatgtgtcaaatagtttttctgcatctggtcatataatttttctcttttaatctgttgatataatgttatgctgatttttaatgttaaaccaactttgcattcctagtacaaataccactt

SEQ ID NO: 457159 - DNA, 576 bp, Homo sapiens
tgtattttaccacattttttaaactgagaaaaaaaagagaatgtaaggacctgcggggtcattcatgggacatgggacactagccttgaagacattattggaagtaaaatactgcaaggtacctatagaatatctctcrctgctggctaaggaaaaaagtctcacattccaggtatccagagcaggctacaaaaggctgcaagagttcagtagccctccttagaagcaaggcaccacaatccacccacagcccccagcaaaatcctcctaaaggtgaccaggttaatatgagagtaagagaaaggggatatcaagattgccaggtggtggagtagagatcagacaccagcaggtataagacaaaactttaaaaacagtgctatgtagaaatagaaagaactattccaaaattcatatggaaccaaggaagagtccaaatagccaaagcaatcctaagcaaaaagaacgaagccaaaggcatcacactatccaacctcaaactatattacaaggctacagtaaccaaaacagcatgacacttatacaaaaacagacactagatgaatggaacaggtt

SEQ ID NO: 457160 - DNA, 576 bp, Homo sapiens
tgtattttaccacattttttaaactgagaaaaaaaagagaatgtaaggacctgcggggtcattcatgggacatgggacactagccttgaagacattattggaagtaaaatactgcaaggtacctatagaatatctctcactgctggctaaggaaaaaagtctcacattccaggtatccagagcaggctacaaaaggctgcragagttcagtagccctccttagaagcaaggcaccacaatccacccacagcccccagcaaaatcctcctaaaggtgaccaggttaatatgagagtaagagaaaggggatatcaagattgccaggtggtggagtagagatcagacaccagcaggtataagacaaaactttaaaaacagtgctatgtagaaatagaaagaactattccaaaattcatatggaaccaaggaagagtccaaatagccaaagcaatcctaagcaaaaagaacgaagccaaaggcatcacactatccaacctcaaactatattacaaggctacagtaaccaaaacagcatgacacttatacaaaaacagacactagatgaatggaacaggtt

SEQ ID NO: 457161 - DNA, 594 bp, Homo sapiens
ggataaattgtaaatgctttacatgacaagcatgctttatttattagagtctcaaaaggaaacatgatacactcaaattgagaacttgagatcataatgaaaaaaaaatttgcaaaggagcagcaggatttagagcctagttaacagtagggtggccaacttttttggccaaaacctaaaagttttctgaatttaggacttccagtgttaaaacccagaaattcccagacaaactcaagatgaaacgttcacagtcagttacaaccagaaaccatcaccattctatgcctgaaggcacgtgagaagggagtggttggtgagatccagagagaaaagctgtacagcgctggccacctcccaggagttgtggcattttgaaractggtagatacctaacctgtagagacccagaaggaaggagactagaataataaagctcaaactcatcatgctctttgatctcctgctggtgtctctcagtggcctaacctggaggaaagggcgagagagattacttgatgtcatcatatgggtcatcttgggggaagcagaatagggaaaaccagaggtgacaacatgaaaaagatgcaatct

SEQ ID NO: 457162 - DNA, 620 bp, Homo sapiens
cccttcttgaacaaaggttggttggcattggttcaccaacttcaagagctggtccaaggtaaatgtgtcaagtctcagcagcaacccagcaagcataaataagatcccttttctcaacaccatattccctcctaagagagagtcaactaaagcaggggctttcttcatattaattcaactattttctattgcttagtgaaggcaaaatccagaacacaaaaacaaaaagatgcatttgctgaggaatagaatattttctctactttctttacctaaaccttaatctcattgcaatcctaaacatctttagctttttatgacctcttccctttatactctgtcccaaggctgggataattrtaacaatatccttttaaaaatatctttgtgtaatacagatttgctaccccaatattgcagcagccatggcttgggctttagtggcctctgtatatgtgcacgctgtgttacaccaccctgagctcagccttcctgtcccctctgttaatgccatgagctctccaccctctaaaaaggcagctgtttgcttttgtatataaggtattaacctgataataccttatctcatttgttacttaccttctcaactgcagcagcaa

SEQ ID NO: 457163 - DNA, 620 bp, Homo sapiens
cccttcttgaacaaaggttggttggcattggttcaccaacttcaagagctggtccaaggtaaatgtgtcaagtctcagcagcaacccagcaagcataaataagatcccttttctcaacaccatattccctcctaagagagagtcaactaaagcaggggctttcttcatattaattcaactattttctattgcttagtgaaggcaaaatccagaacacaaaaacaaaaagatgcatttgctgaggaatagaatattttctctactttctttacctaaaccttaatctcattgcaatcctaaacatctttagctttttatgacctcttccctttatactctgtcccaaggctgggataattataacaatatccttttaaaaatatctttgtgtaatacagatttgctaccccaatattgcagcagccatggcttgggctttagtggcctctgtatatgtgcacgctgtgttacaccaccctgagctcagccttcctgtcccctctgttaatgccatgagctctccacccyctaaaaaggcagctgtttgcttttgtatataaggtattaacctgataataccttatctcatttgttacttaccttctcaactgcagcagcaa

SEQ ID NO: 457164 - DNA, 564 bp, Homo sapiens
taagtctctttttttctaccagcatgttgctgaaacctcccccatccccactgactctttctttgaccacaactaaactactagattttttttttttaatttctaactgattaccmaccgtggggaaaacaattgacagtctaacatgacttcttagcctccgaggccttaacttttaataacctgtattacttttaattgccatcattttatttccactggtagggttgataattttaagatgtccaatatatttttaatacctacctgtcttgctttcagtttgtaacacttattaaaaagaattcaaagtgctgaaaccattaagcatgctgtgtgttcaatcaaaatgaaaggttttgaaatgtgcttttgagttgtgttttgagtataaagtgatttctgatgtgttaccatttgaaagggtaaagtttcattttcctttattatttcactgtacaaataatattccatcttcgccacctactatgctgatacactgttggtagctatgattaaagctacataaggcactttaattggtaatgtgtacattgtggtttt

SEQ ID NO: 457165 - DNA, 564 bp, Homo sapiens
taagtctctttttttctaccagcatgttgctgaaacctcccccatccccactgactctttctttgaccacaactaaactactagattttttttttttaatttctaactgattaccaaccrtggggaaaacaattgacagtctaacatgacttcttagcctccgaggccttaacttttaataacctgtattacttttaattgccatcattttatttccactggtagggttgataattttaagatgtccaatatatttttaatacctacctgtcttgctttcagtttgtaacacttattaaaaagaattcaaagtgctgaaaccattaagcatgctgtgtgttcaatcaaaatgaaaggttttgaaatgtgcttttgagttgtgttttgagtataaagtgatttctgatgtgttaccatttgaaagggtaaagtttcattttcctttattatttcactgtacaaataatattccatcttcgccacctactatgctgatacactgttggtagctatgattaaagctacataaggcactttaattggtaatgtgtacattgtggtttt

SEQ ID NO: 457166 - DNA, 554 bp, Homo sapiens
acatatttttttaagattctatgttttctaccattgtgctctgcaaactcatacccatttcatattgactgaaaccctttcatttttgtatttattgaccattgtgtagatgagcttatcttctagctcatttacaaaaacaaaaaaacaaaaactaaacaaacaaacaaaaaaacaatgtgaatcacacagaattcaggaattttacccttattgttttgcctggtagatgatttacccaaayatctccatgggaatatagaagccctgatagcaaactctgcttggtcatggcttaatccagagtctttcatccaaaatgcccacttgtctcatcagaatgttcaactcatgcctaccaaatatgtgacgctcaaaaatattttctacaaatgaaaagtggtgttttctctgtgcctgtccttgactgaatggtggtattaggtttgttaggcttttgggggtttcattttgttttgccctttcatccctgtaagttttaaatgcatgcggtttcacacttaaaacccattctcaaaatagaattaaaatga

SEQ ID NO: 457167 - DNA, 577 bp, Homo sapiens
tatttttttaagattctatgttttctaccattgtgctctgcaaactcatacccatttcatattgactgaaaccctttcatttttgtatttattgaccattgtgtagatgagcttatcttctagctcatttacaaaaacaaaaaaacaaaaactaaacaaacaaacaaaaaaacaatgtgaatcacacagaattcaggaattttacccttattgttttgcctggtagatgatttacccaaacatctccatgggaatatagaagccctgatagcaaactctgcttggtcatggcttaatccagagtctttcatccaaaatgcccacttgtctcatcagaatgttcaactcatgcctaccaaatatgtgacgctcaaaaatattttctacaaatgaaaagtggtgttttctctgtgcctgtccttgactgaatggtggtattaggtttgttaggcttttgggggtttcattttgttttgccctttcatccctgtaagttttaaatgcatgcggtttcacacttaaaacccattctcaaaatagaaktaaaatgatggttgcactatttacctgttatctc

SEQ ID NO: 457168 - DNA, 616 bp, Homo sapiens
ccagctaaaaaggctcaactattggaaggtctcctcttgattatgagaatattaactgagggtgtggctatcttgtatgcaagaaatgagtaaaatgagtcaagctctcctctccctatcgtcaccttatactttgtctttcaactcttggtcatccttcaggtctgtctgcaactccttcctcaacaagggttggaagatcctcctttctattatattagcaactagtgcttcccttarcacacaattgctgtctgtattaaaattgcctctccacttgtttgattatcccactaagctaaaaagtatttgaggttccttactctatccaactgattcatcattctgccactagcaaccagccactgtgcctagcctatagttggcacagaatagacacttgttggatgaatgaagcagcaacagtgcctagcctataattggcacagaatagacacttgctggataacatatgaatggataagtgcatagagcagtccctgagtgggtagcagtattttaattctcaaataaaagaaataagacaaagttctccttgcttatggattgatttcattgatgaaggatgagcgtttgaaaagtaagtaaaggaata

SEQ ID NO: 457169 - DNA, 616 bp, Homo sapiens
ccagctaaaaaggctcaactattggaaggtctcctcttgattatgagaatattaactgagggtgtggctatcttgtatgcaagaaatgagtaaaatgagtcaagctctcctctccctatcgtcaccttatactttgtctttcaactcttggtcatccttcaggtctgtctgcaactccttcctcaacaagggttggaagatcctcctttctattatattagcaactagtgcttcccttaacacacaattgctgtctgtattaaaattgcctctccacttgtttgattatcccactaagctaaaaagtatttgaggttccttactctatccaactgattcatcattctgccactagcaaccagccactgtgcctagcctatagttggcacagaatagacacttgttggatgaatgaascagcaacagtgcctagcctataattggcacagaatagacacttgctggataacatatgaatggataagtgcatagagcagtccctgagtgggtagcagtattttaattctcaaataaaagaaataagacaaagttctccttgcttatggattgatttcattgatgaaggatgagcgtttgaaaagtaagtaaaggaata

SEQ ID NO: 457170 - DNA, 597 bp, Homo sapiens
aggtaggataaatcttatttcaaccacatggccaggaatgtcacaggggaaattacctgaaggattttgaggaagtgttaacttagaaggaaggtaaaaggcagcatgcatgagatatccaccacactatatttacttttgccttcattcattttttctccacagtctaggtagcgtagtcttttaaaaaagaaaattgtgttgtgccacgtctttatttaaaactgctctttggcttcactttcctctttggataaagataaaatttaaaaagtccttatcatgccttacaagtcccactgtgatcaggccttgcctatccctccagcctcatctgttgccaccatctgcccttggtaaccatccactcacagcagctggctcttgttcattgtcttggattttcacagcttttacctgtctcagcaccttcaaatatactgtgtcagctacctggaatggtcttacctatactcttyacctggacaacttctatttacccaagcttctctgttttagtcctttttactatttaaaataagttctaatgaggttgtctacttaatgtttgtctttccaactagactgtaagcacca

SEQ ID NO: 457171 - DNA, 625 bp, Homo sapiens
ctcctttgacccactaatgtgatgaattatagatttcctaatattgagccacaattgcatttattcctggaatgaagcctattttatcatggcgtattagtcctttaatatcctggcagacttgattttcttatattttattaatgatatatttatagttatgattgcctaggagactgagagttgacctcacagctggtatgccatggccatctctttcttctgaccactgaagctcagggctgggctggggaggctgtttgtcaatttttccttggattctggccactttcttcygacagattgtgttccatttttgctttattttattctcatctactgtcaatgtagcagaattttcttgaaacttcactcccggtttcttctaattcagattgctcttttgtttcctttcttttctattttcctttagattttactcatcagaaattgggaaagggtggggtaggtaaaacccattttattaatctaaaagcccctgatcttattcatcaagtccaggagtgacaagccaaaaaaaaacatagtattttcattaaattcacatttaagactgtagcatttctaaaatcaggtattagctttcaaaattttcttgatggta

SEQ ID NO: 457172 - DNA, 597 bp, Homo sapiens
aggtaggataaatcttatttcaaccacatggccaggaatgtcacaggggaaattacctgaaggattttgaggaagtgttaacttagaaggaaggtaaaaggcagcatgcatgagatatccaccacactatatttacttttgccttcattcattttttctccacagtctaggtagcgtagtcttttaaaaaagaaaattgtgttgtgccacgtctttatttaaaactgctctttggcttcactttcctctttggataaagataaaatttaaaaagtccttatcatgccttacaagtcccactgtgatcaggccttgcctatccctccagcctcatctgttgccaccatctgcccttggtaaccatccactcacagcagctggctcttgttcattgtcttggattttcacagcttttacctgtctcagcaccttcaaatatactgtgtcagctacctggaatggtcttacctatactcttcaccyggacaacttctatttacccaagcttctctgttttagtcctttttactatttaaaataagttctaatgaggttgtctacttaatgtttgtctttccaactagactgtaagcacca

SEQ ID NO: 457173 - DNA, 625 bp, Homo sapiens
ctcctttgacccactaatgtgatgaattatagatttcctaatattgagccacaattgcatttattcctggaatgaagcctattttatcatggcgtattagtcctttaatatcctggcagacttgattttcttatattttattaatgatatatttatagttatgattgcctaggagactgagagttgacctcacagctggtatgccatggccatctctttcttctgaccactgaagctcagggctgggctggggaggctgtttgtcaatttttccttggattctggccactttcttccgacagattgtgttccatttttgctttattttattctcatctactgtcaatgtagcagaattttcttgaaacttcactcccggtttcttctaattcagattgctcttttgtttcctttcttttctattttcctttagattttactcatcagaaattgggaaagggtggggtaggtaaaacccattttattaatctaaaagcccctgatcttattcatcaagtccaggagtgacaagccaaaaaaaamcatagtattttcattaaattcacatttaagactgtagcatttctaaaatcaggtattagctttcaaaattttcttgatggta

SEQ ID NO: 457174 - DNA, 610 bp, Homo sapiens
ctcatctactgtcaatgtagcagaattttcttgaaacttcactcccggtttcttctaattcagattgctcttttgtttcctttcttttctattttcctttagattttactcatcagaaattgggaaagggtggggtaggtaaaacccattttattaatctaaaagcccctgatcttattcatcaagtccaggagtgacaagccaaaaaaaaacatagtattttcattaaattcacatttaagactgtagcatttctaaaatcaggtattagctttcaaaattttcttgatggtatcctctgccagggagaaacaagtatcactgaactttttccctaggaggtgagaatagctcaatggttggcctaacattgcagctgaggaagctggcatggctcttgagtgctaagtcttgtgcctggagtagtgttttctttggagatggggtgttgctgtgttgctcaggctggtcttgaattactgggctcaagcaattctcctgccacrgcctcccaagtagctgggattataggtacatgccattgtgcccagctttggagtagtatttttaattttaagacttgtttgtgggctgggggcaatggcttatg

SEQ ID NO: 457175 - DNA, 543 bp, Homo sapiens
ccaaatgatggatattaataaattattatgagtattcccaatccagtgttcttgaagttaattaaaacacaaaactccacattcatttccctgtgccttgctgcctctcttcctctttgtcgtttcctcctcttctttctcttcattctctttcattctgtctcctccttctcttttctctcccctccatcctctctcccctactgccctccctctccgttaataaaattgataatgatatcttttaaaaaaaaaaaaaaagaaaacattttcaaataaatacataaaaatgttgataatcatcatctctaatggtaatttcctcctattttcccwattttttacattgttatatagcaaacatgtttaatacctaggattaggaaaccctaacataatctatatgtaaacattaatgttaagcctcacttaaattgtctttattgctgggttcttcagcaactagctgaggaaagcagcttcatgattataaaaaagaagccagctgtcctttcttttagactgaactctgacaccttggtc

SEQ ID NO: 457176 - DNA, 570 bp, Homo sapiens
tgccttactatctgtggtatatctggacattaagacagaactgttcaggaccatagattacagattcaagtgctgggaacttgaaattatcacatataaatgacctgatgaagcaggccattcattggaatctgatcacaatactttaatctttgaacaaaattcagaataagtccatcttttatcccttcaaaaagccaggtgaagaatcattagaagccacatataaagcagtttcaagtgataattaaataactttgcactaatattcagatataaackgaatttgcactgaatttaagataatattcagctgtatatactgagcagaacacaagacttgagtcagaagcacgaagttatgttcctagtttcactaactacaaggccatttttgattacccactcagcaaatggctcctctccataactggtgccacttcattccactctactctttacttccccaaatgactgagccccacctggccatcctttcccattgccaatccctcccaactcattgccaattctatgaccagatcttttggcctcttaattcttacaact

SEQ ID NO: 457177 - DNA, 611 bp, Homo sapiens
tccaagcagaggctggagatcacttgtcaggacaattgtaaatggaattcaagcaacagctgaccattggctagaatagatgascttgcagatccctatgatattgagagtccatgaattcataattttatatcttctctaaatattaaatcacttatttattggtgtccctttaattacaggcaggtataaattgttggactaataggttggatctcatgtcatgttgttgcttcacctgcagttccatgtgatcagctctctctggcaaggttcctcttgatggagttctttcaggtcatttttatgcctctgagacatttcagcccttttactattttaggaacacatttctaaattatacaagtctttcctgacacaagggctgtaacaccttgccaagaggaattctccatgaatggaataaatgaagagagatagcctgagaaatacgtgtcagtgcagctgttctgagttccctgaatttatctcagtttgaagctaaggattcctgacgctcaggccacatgatgctttttgtttttggagttagttatatcggaagaacactggcacttcaaacagcatggggttggagaggagctggcatg

SEQ ID NO: 457178 - DNA, 503 bp, Homo sapiens
caggtggtgttctgagatgtttaaatctcatgtgcaaaagacagagtaataaccatcaggatgcatatgttagagaaagtagaaatggaatactttaaaccagtgtgtttagcttaagtgcttcctgcctttcttctgaatgaaaattagatacccatagcttacaaaacaggcatttaatgaggtttagcaatcttaacaagatatgcacctaatgcatggttgttatacttcaatcaatatgttttaataacctactgacgtttaattatcatacaataactagcactgtaaattgaaatctaatgcacaggtaatcacacttagtgatgagagcactctcctttaaattttagtcagaggtgtccacattatattccaaatgccatttyttagcttcagaccctctatagatcctcagtgggattctgatattttgagcggaggaggaagggaagaaatttgcataagaaactccatagcaattgatcttggaggtatgt

SEQ ID NO: 457179 - DNA, 629 bp, Homo sapiens
aacagctttgccattaaagataatgcaagatttttaaaaactactgctattatttatttgagactatacgcacatggaaagctacactgaatccagcgtaattattttgcctcccgttgacactagccgtaagccaagtagataggcttgcatgctagttttaaccttgtgtttctggggtactgcrtttctcctgggaataagtggtggtagtcatttcaaggatgaaacttaaggcaaggtggacagttgaacaacatgtaactgcccattttgaaataaaacagttaactgctgagctttctggattgaggcttgtcaagcagctcattttcttttttaatgctcatgacttgcagtcttgtcagaaaaggtcacctgcggatccagttaatgcttcagtgtgaggagagtcaccacccaaagcctagtagtcgctgcagtacttaactgaaattctgatgaaagggtcactttctgcctggattcaagcagattccagtgattaaaatgtgcaaatgcatgtcccatgtctatatgagggaaattatgagacccttattaggaaatatctgcttcctaggggaagaacaaagtaggatttaatgtttcaagcataggctctgaat

SEQ ID NO: 457180 - DNA, 629 bp, Homo sapiens
aacagctttgccattaaagataatgcaagatttttaaaaactactgctattatttatttgagactatacgcacatggaaagctacactgaatccagcgtaattattttgcctcccgttgacactagccgtaagccaagtagataggcttgcatgctagttttaaccttgtgtttctggggtactgcgtttctcctgggaataagtggtggtagtcatttcaaggatgaaacttaaggcaaggtggacagttgaacaacatgtaactgcccattttgaaataaaacagttaactgctgagctttctggattgaggcttgtcaagcagctcattttcttttttaatgctcatgacttgcagtcttgtcagaaaaggtcacctgcggatccagttaatgcttcagtgtgaggagagtcaccacccaaagcctagtagtygctgcagtacttaactgaaattctgatgaaagggtcactttctgcctggattcaagcagattccagtgattaaaatgtgcaaatgcatgtcccatgtctatatgagggaaattatgagacccttattaggaaatatctgcttcctaggggaagaacaaagtaggatttaatgtttcaagcataggctctgaat

SEQ ID NO: 457181 - DNA, 629 bp, Homo sapiens
aacagctttgccattaaagataatgcaagatttttaaaaactactgctattatttatttgagactatacgcacatggaaagctacactgaatccagcgtaattattttgcctcccgttgacactagccgtaagccaagtagataggcttgcatgctagttttaaccttgtgtttctggggtactgcgtttctcctgggaataagtggtggtagtcatttcaaggatgaaacttaaggcaaggtggacagttgaacaacatgtaactgcccattttgaaataaaacagttaactgctgagctttctggattgaggcttgtcaagcagctcattttcttttttaatgctcatgacttgcagtcttgtcagaaaaggtcacctgcggatccagttaatgcttcagtgtgaggagagtcaccacccaaagcctagtagtcgctgcagtacktaactgaaattctgatgaaagggtcactttctgcctggattcaagcagattccagtgattaaaatgtgcaaatgcatgtcccatgtctatatgagggaaattatgagacccttattaggaaatatctgcttcctaggggaagaacaaagtaggatttaatgtttcaagcataggctctgaat

SEQ ID NO: 457182 - DNA, 563 bp, Homo sapiens
tggccacagagcaaaaatactagaaatgaattttgttgatatcattaatatcattaattgatatcattaataatggctaatattttgggccactttatgccaggcatggtgtaaagaaccttccataactctcccattcagtacatacattatgaggtagggactgttgtcactttcacttcaaatataagtaaatggaggcagagggaatacagcaacttttgcaagaccgcaaagatggtaagtggcagagttaggacctaaaccctagagtgtgcaaactctcaactatagactgtcacatttttcctgaaggatcagcatctgggcttgtatttggttgtggaagagtgacagcattaagactgaagaacrtagaagggcagggtaaatagggttagactttgcataccagtgaaaacagaagactggaagaagaaaatgatctggggaaaagtcaatgtaaagagaatcagaagtttgattgcccgagacctatctatgcagcacctttagtaccaagtccttagttacagctaagttcaggctatatttacacatgg

SEQ ID NO: 457183 - DNA, 584 bp, Homo sapiens
ggctatgaatactatagtaggcaaaacgcatgttctcaacgtatctctccaaaatcttgatcaattttctggttatattaacatatgttcacacactttttgatacttatcctgccaggagttagagcttaattctccttcctttgagtgtgggctgaacttagttacttgcttccaacaaacagagtatgggacaagaaaaagagtaacttttcaatggagaaatctgggagcttccaacaaatagagtacgggacaagaaaaaaagtaactttgcaatggagaaacctgggagacgcccccttcmccaagtgatcaaagttaacatcatcagtaataagacatattgatatcttgtactccttgatatgaggtgatgagaagggtacatcatttctttgatattcttcccaacaatctataaccctgtaatcatgagaaaatatcagactaactaacccaatttgaggggcactctacaaaatacctgactagtactcttcaaaactgtccaggtcatcagagacaaggaaagacggaggaactcctatggatttgaagagactaaaaagacatgaaaaata

SEQ ID NO: 457184 - DNA, 373 bp, Homo sapiens
agcaccctaatcactgccgtttgtgcctaccagtccttggctcttctgaacacaaaggcagaaggtcctgcactttaccagcttacagccaaacaaagcaggtcamccctataacccaaactccccagaaaccacacatttttcattactatgcatgtaccatgagatttctcatctctaaaggtttgtttcccttttgggggagtgaatatattttttgacagagtcagttggggcacaggttagggatcaaggctgaccatcatcctctgtaacccaggcaaagctgccacatgtaacatgcccagcactgtgcctgacacagaatgagctcaacaggtcagagcagctttcccacctcctcagggggctc

SEQ ID NO: 457185 - DNA, 618 bp, Homo sapiens
ataccattgtggtgtgcctatgtcatatagatatatcgatatttagtaacatacaaaaattaatgcaaatgtaaaagtatcaggacagttcaaaataataatatgtctgggtaacaggctgaactcatatacatgctgcaagaataatatataaactctgtgtgctcctatggctataccaaaggattgctattcctgctcccacagagaattcatctctgtgaggaattgttgggcgccagcgtttgtggttctttttttctcttgttaaatgtatcccctaagcttgaatctggagcctgtggaccactcaggtatgtcccatgacatttgtttatatcttcaaagagcaactttgttatttgtgagcatatagaggcccctcaagtggtgggtatacaaaacaatccactaaaccaagcctctcttattcagcttactgagattctttcaatttactctctccaaaggtaactttcggtcctggtgggctggccctgtcaccttctcacacaygccctgctacgccttcactgaggctgcccactctggcagaagtggcttcaagactttccttcttcaacaccagtcttgttttcagagccagatgaaaggcca

SEQ ID NO: 457186 - DNA, 465 bp, Homo sapiens
aatacggaagatttccaaataatatttataaatattccacatatgtctacatagaaccataacttcccaatccttaaatgtgggctgcacatggtgacttccttccaaagcatacagtatggaaaggaggaataaaagaactttacagtgtagaaatctgataaacactacctcagccaggrgatcaaggttaacatcaacagtgataaattgtattgattgtatgtaccccgataggatgtgatgaaatgatatttgacatatgtgctcttcctcctaaagacatataaccccattctaatcatgagaaaaacatcagagaagttccagttgaggaacattctacaaaatacctaatgagtacttctcaaaactgtcaaagtcatcaaaaacaagggtggtgtgagaaaatgtcatagccaagaggagtctaaggagacgtaacgactgaatataatgtgatgt

SEQ ID NO: 457187 - DNA, 465 bp, Homo sapiens
aatacggaagatttccaaataatatttataaatattccacatatgtctacatagaaccataacttcccaatccttaaatgtgggctgcacatggtgacttccttccaaagcatacagtatggaaaggaggaataaaagaactttacagtgtagaaatctgataaacactacctcagccaggggatcaaggttaacatcaacagtgataaattgtattgattgtatgtacccmgataggatgtgatgaaatgatatttgacatatgtgctcttcctcctaaagacatataaccccattctaatcatgagaaaaacatcagagaagttccagttgaggaacattctacaaaatacctaatgagtacttctcaaaactgtcaaagtcatcaaaaacaagggtggtgtgagaaaatgtcatagccaagaggagtctaaggagacgtaacgactgaatataatgtgatgt

SEQ ID NO: 457188 - DNA, 566 bp, Homo sapiens
ggatatgaaattcttgtttggaacttcttttctttgagaatgctgaaaataggtccccaatctcttctgcttgtaaggtttctgctgagatgtccacagtttacctgatggagtttcctttgtatgtgatctgacctttttgtctagctgcatttaagattttttctttagcgttgaccttagacagsctggtgaatgtataccttggcgatatttgctttgcaccgtgtcttgcaggtgttctctggatttcttgtgtctggatgtctacctctctaacaagattagggaaattttcttgaattattccctcaaatatgttttcccatttgtttactttttctcctcctctctaaggaatgccaataattcataggtttggtcactttacataatcctgtatttctggtagactttgttcattgtttaaaattctttttgcttcatttttgtctgactggaatagttcaaaaaccaagttttcagatctgaaattctttcttctgcttggttcagtctattggtaaaactttcaactgtattttgaaattccttaaatgagtatt

SEQ ID NO: 457189 - DNA, 566 bp, Homo sapiens
ggatatgaaattcttgtttggaacttcttttctttgagaatgctgaaaataggtccccaatctcttctgcttgtaaggtttctgctgagatgtccacagtttacctgatggagtttcctttgtatgtgatctgacctttttgtctagctgcatttaagattttttctttagcgttgaccttagacaggctggtgaatgtataccttggcgatatttgctttgcaccgtgtcttgcaggtgttctctggatttcttgtgtctggatgtctacctctctaacaagattagggaaattttcttgaattattccctcaaatatgttttcccatttgtttactttttctcctcctctctaaggaatrccaataattcataggtttggtcactttacataatcctgtatttctggtagactttgttcattgtttaaaattctttttgcttcatttttgtctgactggaatagttcaaaaaccaagttttcagatctgaaattctttcttctgcttggttcagtctattggtaaaactttcaactgtattttgaaattccttaaatgagtatt

SEQ ID NO: 457190 - DNA, 594 bp, Homo sapiens
gtatgcttattaatcagcagtagttatctttttcactcatttgttcacttatacaacaaaaatagaacccctactacatgccatatactttggatccaaaatataaataagacaaaatcagtctaataatgagaacagacaagcatagtacaatgactagagtgcagtatatcagagaacaatgtaggcctcccaaagaacagggacgtatttccctattagccattcagaatttcaccccaaacacttaatgcaacacctgacatataataggtgctcattaaataagtgctaaatgatgtgtctatgtgtccaatgcacagtgtgctatatagcatggaagcaggacacataatcagacagggttggtgggtgaggaaggttcagctgagctttgtgttcatacatagagtgacagcatctgcctgataatgtgattttctgcagcagtgctcatctgcttgattataagtggaatcattggatgatttggatgataaaaaataagttycagaaggcaaaatatacaggcgtagggaggcaagagcctttctggagagtgactgaaataaataaccataaaatctaggaagg

SEQ ID NO: 457191 - DNA, 563 bp, Homo sapiens
ttaaaatacaattcatatttcaaggagtgcatagcttagtggagaatacagacccctaaatagattattagaaaataatttagtgactgcactgactgagatatgcaaagaatagcatagraattccaaaaggagggtagttattgaacactttttggtgaaaaatctggaaaacttcttgcttacatatgtttcacactgaattaattagtttttaggtcatgcaaatagacttttaattgcaattattttgctgccataccaagcagtcattcacctggtttttgtggctggagttttcttataattaattatagcaccaagtgccaaacaaaggtggtaagagggctagtcactttctgaatggtggagtgaggacattggcaaatcctaccttagaaagcactgataaaactagcaaaattatcaaaagcagtcatttcagaactctgaaaataaccaaacacatagataaattgaaatacatttatttaagaaaaactactgaatcttggtaggaacaatgggatctgtgacatttcagtttggagctgttctcatcc

SEQ ID NO: 457192 - DNA, 480 bp, Homo sapiens
ccaataattatttgagtgaagaaacaaaacaaaaaagtattgtgaaaaattatctatggccaggcacggcagctcatgcctgtaattccagcactttgggaagctgaggtgggaggattgcttgagcctaggagtttgagaccagcctggacaacatagtgagaccccatatctacaaaaaaatttttttagttagttgggcatggtgatgcacacctgtagtcccagctacttgggaggctgggatgggaggattgcttaagctcaagtgtttggggctacagtgagctatgactgcaccactgcacaccagcctgggcgacagagtgagaccctgtctcaaagaaaacaaaaaacctatttgataagtgaatttttatattttaattcaaatatgttaaagccacacagaccggtggtctgggctgcatctgtgttccgtgttcctacctcccrgaagcatgttgaagagatgaagag

SEQ ID NO: 457193 - DNA, 533 bp, Homo sapiens
cgctggccgaagggctcctcaagtgccgccaaagtgggaacccaggcagaggaggcaccgagagcaagcgagggctctgaggactgccagcacgctgtcagtcacctctcaatatgaaatctgggcactttgaaaaaagaacaagataacagcaatgtttaggaaacaagagagataaccttaaactctgaccrccagtgagctgggtggaacagagccatatttctcttctttcaaaagcaaatgggagaaatatcactgaattctttttctcagcatggaacatccctgagaaagagaatgtgtgcctgcaggtaggtctctaagctggctcccctgggcgtagctgtctcttatgatcgaggctgcagagatgaaatagactccagtctcccatagcgctcccaggcttattaggaagaggaaattcccacctaataaattttggtcagaccagttgatttcaaaaccctgtctcctgataagatgttatcaatgacagtggtgcccgaaacttcattcgcaattttaat

SEQ ID NO: 457194 - DNA, 378 bp, Homo sapiens
aaaaccaaccacatggaacccccaacccctcccctccctgaagttttctaagaaattcacaatgcacaaaccaagggagcgtctttcctagggtgagtttttctctctcaatctgtggacgaaaatattactgcagcatttatgcttctgagccttagcttttccctccctcttgcacagaagacaattgcattcgtcctcctgagcttggaggagaagaaaatgttcrccctagttatgtttggaaattctctccttgagtccttgagctggatttggttctgatcatggacagatttgcaatgtgagtttgagtggtcttcagggctgtcagcaaaataatatcactcctttgtgaaacagtgacaggctatacaa

SEQ ID NO: 457195 - DNA, 378 bp, Homo sapiens
aaaaccaaccacatggaacccccaacccctcccctccctgaagttttctaagaaattcacaatgcacaaaccaagggagcgtctttcctagggtgagtttttctctctcaatctgtggacgaaaatattactgcagcatttatgcttctgagccttagcttttccctccctcttgcacagaagacaattgcattcgtcctcctgagcttggaggagaagaaaatgttcgccctagttatgtttggaaattctctccttgagtccttgagctggatttggttctgatcatggacagatttgcaatgtgagwttgagtggtcttcagggctgtcagcaaaataatatcactcctttgtgaaacagtgacaggctatacaa

SEQ ID NO: 457196 - DNA, 554 bp, Homo sapiens
actcttcctttcccttgaacacattgaggccattgtaggattattaattggcctaatttcaatattgttgggtcttagggaamaaggaggcccaaggaacgggaaagaggtaaagaaacagccagttggtggagaagtcagaacacacacatttatggattaaatttgccatcttatgtaaatgtggtttgtggcacaccaaaaagattacaacgcaacatcaaaaatcactgatcacagattaccataacagagacaataataaaatttgaaatattgctagaattaccaaaatgtggcacagaggctgggtgtggtggctcattcctataatcccagtgctttgggaggccaaggtgggaggattgcttgaggccaggagttcaagaccagcctgggcaacatagcaagaccccatctctacaaaaataaaaattaaaattaattagctgggcatggtggtgcacacttgtagtcctagctacttgggaggctgagataagaggatcacttgagcctagcaattcgaggcttcagtgagctatggtagtgcc

SEQ ID NO: 457197 - DNA, 528 bp, Homo sapiens
tgttcagctcattggaacactttctattttatggaatgaggtgtcacctgatgctagaattgcaaataaagccagttgagatctttcaactaaatttgttgtaattttatcttttgccatatgctactataattcatgataaccctgtatggtaaatactattgttaccaccacttcacagagcagagcactggagyacaaggactaaggggttgtgtccatggtcatggccaacaagaggttgaacctgtgttcaaacccacgtctgattaactccagtggtttatctgtgactctgactatagctgacatttcctaaggatggttgattgattttcaaaagaacttttagatccttgatattgaaaatacaaggtgtagttatgtgctctggttagtgtttgagcaactatagcggtatatctggtttatctgttactctgactatagttggcatttcctaaggatggtcaattgactgattttcaaaagaacttttagatccttgatattgaaaatacaaggtgt

SEQ ID NO: 457198 - DNA, 528 bp, Homo sapiens
tgttcagctcattggaacactttctattttatggaatgaggtgtcacctgatgctagaattgcaaataaagccagttgagatctttcaactaaatttgttgtaattttatcttttgccatatgctactataattcatgataaccctgtatggtaaatactattgttaccaccacttcacagagcagagcactggagcacaaggactaaggggttgtgtccatggtcatggccaacaagaggttgaamctgtgttcaaacccacgtctgattaactccagtggtttatctgtgactctgactatagctgacatttcctaaggatggttgattgattttcaaaagaacttttagatccttgatattgaaaatacaaggtgtagttatgtgctctggttagtgtttgagcaactatagcggtatatctggtttatctgttactctgactatagttggcatttcctaaggatggtcaattgactgattttcaaaagaacttttagatccttgatattgaaaatacaaggtgt

SEQ ID NO: 457199 - DNA, 604 bp, Homo sapiens
catgactcagttgctggagaggctgaaggaagattcagcaggagctagagtggctacaggcctggctgccacactgtgccatcaaggtgagtcatcagatcagctgtcacaaagttcatgagctacaacagcacctggtgtcttgcaccaaatctgagcctgagataaatatggcttctgcttcacttctgccttgcaaattgtgcacagaatgtctcttatggccaagctaacctagaactgtgcagagaaagaaattctgggaaacatagctctaatttagctaaattgacacgatacaaatccaccacggcattatttcatttaataggtatargcttagaatctgaaggttaaaatgatttttttttaaatgccacacagttggctggtagaagaactaaaatggaaaaccagggctatcaactcttatcattacatctatttgaatccttctaaattcactaactaatgggcaaaatagcctttcatgggtagacctagggaaacaaaccattgtcttccaaatacataacaaattaatggtccaggtcccaggctctttgtacatagcaatggtggtgtgcctgttctctcatgccct

SEQ ID NO: 457200 - DNA, 604 bp, Homo sapiens
catgactcagttgctggagaggctgaaggaagattcagcaggagctagagtggctacaggcctggctgccacactgtgccatcaaggtgagtcatcagatcagctgtcacaaagttcatgagctacaacagcacctggtgtcttgcaccaaatctgagcctgagataaatatggcttctgcttcacttctgccttgcaaattgtgcacagaatgtctcttatggccaagctaacctagaactgtgcagagaaagaaattctgggaaacatagctctaatttagctaaattgacacgatacaaatccaccacggcattatttcatttaataggtataagcttagaatctgaaggttaaaatgatttttttttaaatgccacrcagttggctggtagaagaactaaaatggaaaaccagggctatcaactcttatcattacatctatttgaatccttctaaattcactaactaatgggcaaaatagcctttcatgggtagacctagggaaacaaaccattgtcttccaaatacataacaaattaatggtccaggtcccaggctctttgtacatagcaatggtggtgtgcctgttctctcatgccct

SEQ ID NO: 457201 - DNA, 551 bp, Homo sapiens
ctattattagctctccttgacaaggtactacccgaagaagaaaaaagaaaaaaggtaagctaaacaaactggccagtttacgagccacagtggaagagtgtagaaggagtccagaaattttggacatcaggtgtgaaagaattaactgcttcttgatcctaaaaggtaaaatgtatacagaccttgagtgacaaagatctagtaacattcctcaactgaacagagtgacttagccctttragaaaaaagtcactttaggtgtgtgtccttccttcatcttgttttggacaacttcaaggtggccactgttaaggagagatagagagaataaatcatggagatgaagaaggaaaggaagaaaccaggcttgaggagtacatctaggaaagaactttgggtgttgttactggcccgtgggactgactggtagaaagtacactggaagcctaggaagtgtttgaaagcattctattgccaaggaaatcacgagcctggactttccaaggtacaaaacaacacctggacttccagatttgcctcactcctataaa

SEQ ID NO: 457202 - DNA, 560 bp, Homo sapiens
tgtattgttgcccaatttccatgatgtaaatactcccactgtggccaatttcaagctaccaaagttgggaagagttgagaattagaatctgaaagaggcattccgaagagatatgctctctcaagccagtaacagctgtttgagcacattgtaggcattttacaagtgccatctttttcagttcccattacgttctcatgaagtggctactattgtagcaggacaagctgcagacagaaccacttagacaccgagttaaagaaggaagggctgtattcggccgggagcttcggcaagactcacgtctccaacaaccgagctccctrggtgagaaattcctgtcccttttaagggctcacaactctaaggcgctccaggtgagagggtcgtgatcgattgagcaagcagggggtacatgactgggggctgcatacaccgtaattaaaacagaacagaacagaacagaacaggacagggatcttcatagtgcttttttatgcaaataaccgattagatcaggggttgatctttaactaccaggcccagggtgtggcgccagg

SEQ ID NO: 457203 - DNA, 560 bp, Homo sapiens
tgtattgttgcccaatttccatgatgtaaatactcccactgtggccaatttcaagctaccaaagttgggaagagttgagaattagaatctgaaagaggcattccgaagagatatgctctctcaagccagtaacagctgtttgagcacattgtaggcattttacaagtgccatctttttcagttcccattacgttctcatgaagtggctactattgtagcaggacaagctgcagacagaaccacttagacaccgagttaaagaaggaagggctgtattcggccgggagcttcggcaagactcacgtctccaacaaccgagctccctgggtgagaaattcctgtcccttttaagggctcacaactctaaggcgctccaggtgagagggtcgtgatcgattgagcaagcagggggtacatgactgggggctgcatacaccgtaattaaaacagaacagaacagaacagaacaggacagggatcttcayagtgcttttttatgcaaataaccgattagatcaggggttgatctttaactaccaggcccagggtgtggcgccagg

SEQ ID NO: 457204 - DNA, 547 bp, Homo sapiens
acacacacatacacacacacatatatacacacacacacatttatccactaattagagctttgtaaagagtgagtatgttaaaataagctaaaccattttcttgaccattatagtgatcaaaccaatcatgtgtgcagagaatgtttctgtcattagatcaaagtttaatgttttttctttggggtaagtgtggagagggaccaaaatttgacttttataaaaatcygatggccttagattttgtaaaagtcaaatttgttgtgcatgaacagcccggaacaggatacataagtatggaaaataaattcacaaaaggacaaaaaagacaagtggattcactcctgctaatgcctccagatggtgctgagcacagagcacagccctgtccttgacatatcttgcatatgtatgtctcatgtttcagagcgcttatgaatagccctcctgtgttcttgaaaacttctgtgtagtaaagtaattcctaagacctttacatcaaaaagggagttggagccatttcctttaagctgggcctctcttcgctatt

SEQ ID NO: 457205 - DNA, 582 bp, Homo sapiens
  misc_feature (1)...(582): n = A,T,C or G
actaaagaagaacaaactaaccccaaagctagcagaataaaataaataactaaaatcagagcagaaatgaacaaaattgaaaccccaaaatccatacaaagaatcaatgaaatcaaaagttagttttctgaaaggaaaaaaaagattgataaactactagctagattaaaaaagaaaaaaagagagaagatccaaataagcacaatcagaaatgacaaaggtgacattacagctgatcccacagaaatacaaagatcctcagagactactagaaatacctactatacacacatgctagatncaaggaaaaatatataatttcctggaaatacacaatctctcaaggttgaatcaggaagaaattaaaaccrtgaacagacaaatattgagttctgaaattgaatcagtaatttaaaacctaccaacaagaaaaaccccagaccagatggactcacagctcaattatatcagacgtacaaagaaaagctggtaccaatcctactaaaactatttcaaaaaattgaggctgagggactcctccataactcattctgtgaagccagcatcaccctgataccaaaa

SEQ ID NO: 457206 - DNA, 582 bp, Homo sapiens
  misc_feature (1)...(582): n = A,T,C or G
actaaagaagaacaaactaaccccaaagctagcagaataaaataaataactaaaatcagagcagaaatgaacaaaattgaaaccccaaaatccatacaaagaatcaatgaaatcaaaagttagttttctgaaaggaaaaaaaagattgataaactactagctagattaaaaaagaaaaaaagagagaagatccaaataagcacaatcagaaatgacaaaggtgacattacagctgatcccacagaaatacaaagatcctcagagactactagaaatacctactatacacacatgctagatncaaggaaaaatatataatttcctggaaatacacaatctctcaaggttgaatcaggaagaaattaaaaccgtgaacagacaaatattgagttctgaaattgaatcagtaatttaaaacctaccaacaagaaaaaccccagaccagatggactcacagctcaattatatcagacgtacaaagaaaagctggtaccaatcctactaaaactatttcaaaaaawtgaggctgagggactcctccataactcattctgtgaagccagcatcaccctgataccaaaa

SEQ ID NO: 457207 - DNA, 593 bp, Homo sapiens
cgagctctgccccgaccaagcttccccatcggtggccactttttctcaccaatttcatttgtataacccctggctctccggagcatggtattgtgcatggggctagtgatgcttgtagaccaaggctgagctgcttttgttatttacattcaactgaacaaccacttaacaataattcatctctgggtttagtgaaacgattaaaatggggtcattgtcctcatggagctcatgacctgacccctgttgatagcatctgtggctctggccacaggaaggtgcataatggtgctatccctgggctgccactggatgtgttctgtgacctcctttgctggcactcctggagtcagaggtaccatgtgtaactttctgtcaacacagcctcacccatgagaacactaacaccacctgaccttgcrgttactttgttccaggctttctcctccttcttctagggttcgagctttctcaatctttatccagggcctcagctcttgaatagcccctgtgggaagctcctttctgtgttagcaggcagctcactttctcttggaatatgttggcagaagaagggtttagcaagtaggagg

SEQ ID NO: 457208 - DNA, 593 bp, Homo sapiens
cgagctctgccccgaccaagcttccccatcggtggccactttttctcaccaatttcatttgtataacccctggctctccggagcatggtattgtgcatggggctagtgatgcttgtagaccaaggctgagctgcttttgttatttacattcaactgaacaaccacttaacaataattcatctctgggtttagtgaaacgattaaaatggggtcattgtcctcatggagctcatgacctgacccctgttgatagcatctgtggctctggccacaggaaggtgcataatggtgctatccctgggctgccactggatgtgttctgtgacctcctttgctggcactcctggagtcagaggtaccatgtgtaactttctgtcaacacagcctcacccatgagaacactaacaccacctgaccttgcggttactttgttccaggctttctcctccttcttctagggttygagctttctcaatctttatccagggcctcagctcttgaatagcccctgtgggaagctcctttctgtgttagcaggcagctcactttctcttggaatatgttggcagaagaagggtttagcaagtaggagg

SEQ ID NO: 457209 - DNA, 579 bp, Homo sapiens
taatctgttccttgctcccaggattcaaggaaatattcctgatgatatctctattttctcttcctccagatgggcagtcctcttcaaaaagctcataagcagttctggctcacaggtgtcttaaaattgtagcattgccgagttagcaaagagttagaaacatytatatgcctatctataggaacatccttgtcttagtccattttgtactgctattacagaatgccacagacagggtaatttattatgaacagaaatatattggcttatggttctggaggctggaaagttcaagatcaaggggccagtatctggagagggcttctcttgctacatcatcccatggtgaaagggcaagagagggcaagagaaagattgagaagagggccaaatttattttttataaggaaactactccagcaatagcaacattaaattcattcataagagcaaagccctcatgaactaatcatgttttaaaggttccacccctttatacttttacaatggtgattgagttttcaacacaagctttttggggtacagattcaaaccattgcaatggttaaattcaaaaca

SEQ ID NO: 457210 - DNA, 579 bp, Homo sapiens
taatctgttccttgctcccaggattcaaggaaatattcctgatgatatctctattttctcttcctccagatgggcagtcctcttcaaaaagctcataagcagttctggctcacaggtgtcttaaaattgtagcattgccgagttagcaaagagttagaaacatttatatgcctatctataggaacatccttgtcttagtccattttgtactgctattacagaatgccasagacagggtaatttattatgaacagaaatatattggcttatggttctggaggctggaaagttcaagatcaaggggccagtatctggagagggcttctcttgctacatcatcccatggtgaaagggcaagagagggcaagagaaagattgagaagagggccaaatttattttttataaggaaactactccagcaatagcaacattaaattcattcataagagcaaagccctcatgaactaatcatgttttaaaggttccacccctttatacttttacaatggtgattgagttttcaacacaagctttttggggtacagattcaaaccattgcaatggttaaattcaaaaca

SEQ ID NO: 457211 - DNA, 525 bp, Homo sapiens
ctcagtttgttttcctggaaacttgtcctacaataaaacagtgctacccatactcaaatgatccacctgaatctagagtttgcttcaaatcttagccaacgtggctgatgataatctctgtgaagaccatccctgtcctctcccacaaatagttcactctgttacaggaggtagctagtcagacatgagcagggcaggaaagccttccccacctacccccaaccaccactaggaatgtcaggcaacaatcacatgatggtcaggcagttgtaaaactgtctctctaaaatagtaattgaatgcaggcagcgccagggaaaggcagtctcccattagatagaaaaaaaccctgaaactgttgatcagcaactttccaataagatctcaggagctgggtgggtgggcttaagtacgtgtactaagaggcaaaatggtggagtttaactggtgcatgaccttataggaacactygactgggaagggaaaaacgcattaagtgagcatgtgtacaacttcagtaaacac

SEQ ID NO: 457212 - DNA, 605 bp, Homo sapiens
ccagtctggacatggaggtcccgtggtggcaaggacccaggctatttccatctttgttgctcttcctcctcaacatacagcttctatctcatggtcaaaggtgrctgctctagttccctgccctgaattcacattcaaccttcaggaacatgagaaggaaaagagagtgtatgcctctctctctctcttttctttttttttcttttcttttctttttcttccttccttctttctttcttttgaaggagaatgtgtattattttaactatttttatgtgcagaaaactcaacagtgtatattttacccagtttggtagcaagttcttcagcctttgccttttcaagcttggcaatgcaagccacagacttgggacccaggacattgcctccccagtgacagcggatctcatcatatcagtcattgtaattggtcttgatagcttccaccagtttaaccaaagctcctttgtctcctgagttaacctgtgtgaaggcgacagtggtgcaggtcttcctgtggactacatgtctcagtcttgccttccccttgataatgcgttaagggatccccgttttgtgacacagggcaggcagaaagacaacca

SEQ ID NO: 457213 - DNA, 605 bp, Homo sapiens
ccagtctggacatggaggtcccgtggtggcaaggacccaggctatttccatctttgttgctcttcctcctcaacatacagcttctatctcatggtcaaaggtggctgctctagttccctgccctgaattcacattcaaccttcaggaacatgagaaggaaaagagagtgtatgcctctctctctctcttttctttttttttcttttcttttctttttcttccttccttctttctttcttttgaaggagartgtgtattattttaactatttttatgtgcagaaaactcaacagtgtatattttacccagtttggtagcaagttcttcagcctttgccttttcaagcttggcaatgcaagccacagacttgggacccaggacattgcctccccagtgacagcggatctcatcatatcagtcattgtaattggtcttgatagcttccaccagtttaaccaaagctcctttgtctcctgagttaacctgtgtgaaggcgacagtggtgcaggtcttcctgtggactacatgtctcagtcttgccttccccttgataatgcgttaagggatccccgttttgtgacacagggcaggcagaaagacaacca

SEQ ID NO: 457214 - DNA, 483 bp, Homo sapiens
gagccaccatgctcagcctgctcttgatttgcctaaaagctatttgaagagagaccaagctctgcatatattagaaggagtcaacaattccatgtcgcaacctgtagctaaatagcaacatgtaactaaatggatgataacaaactctcagtttataagttgagtccattagctatggaatcaagctgattttcagtatgccacttctaagctatgtgaccttgagggaaaactgctcaactattgagtctgtttcttcctctgaatggtgaaggataccactacctacctgatagggttgtaatggagattaagtacaaatccacgtaaagccctcagcacagtacctgttgggytaagctgcctctaattgattcttgctgttgatatcctccatgaagaattcaataataggaagtttctgtgaggaagagaaatcctagctcgatctctgatctttattgtctttaaagatatgacacg

SEQ ID NO: 457215 - DNA, 483 bp, Homo sapiens
gagccaccatgctcagcctgctcttgatttgcctaaaagctatttgaagagagaccaagctctgcatatattagaaggagtcaacaattccatgtcgcaacctgtagctaaatagcaacatgtaactaaatggatgataacaaactctcagtttataagttgagtccattagctatggaatcaagctgattttcagtatgccacttctaagctatgtgaccttgagggaaaactgctcaactattgagtctgtttcttcctctgaatggtgaaggataccactacctacctgatagggttgtaatggagattaagtacaaatccacgtaaagccctcagcacagtacctgttgggttaagctgcctctaattgattcttgctgttgatatcctccatgaagaattmaataataggaagtttctgtgaggaagagaaatcctagctcgatctctgatctttattgtctttaaagatatgacacg

SEQ ID NO: 457216 - DNA, 594 bp, Homo sapiens
ttcttcaaattcactgtctatatgtttaaaactttcttgaaattccaaacagttttcctctgtggaagatgctggtttctctgaaaaggtctgatcattttcttcactctctactttaagacgtttcaccacattgtaagaggaattaaatgaaaatcttgttttccttaatctttctctaagtgttgcactcataggctataaagagcacaaaacattaaaaatgtgaatcaagaaaaacattcttaatgtcaataaatcaccagaaataaagkccttccatttctatgctagacaccactagatggctttctgtctccacatctaaagaaggcatcacaaaatgactttaatttctggaagctccatttgttttatttcctttttacttgagcaagatcaacacctttccaaaagtgttgagaagtttatcccagtaatcaaggaacatttgttcagtaacaagcacatgcctgatagtactccaggtgcttcagaattacagagtaaggaaaagacctagactctgccactaaagaccttcataataatattgcacagatgcaaactttctccatctggagtattgtaata

SEQ ID NO: 457217 - DNA, 470 bp, Homo sapiens
ttgtgctcatgttcccttaaatgttgttaccaaaggggctcagcgtctagcccagctggaatctctgggaagaggcagagatagtttggtgaaaaaaacatagggggtagatgggacagcatttttgatagaggtattttatgtacattgtaggactgagcaaatcagtaagtatatgtgtattttgggaactagagttttcactgaaaaagggagacctaaatattaaatgaaggaaagagaaaagaaccctgtgctgtcgaattggaattgagttggaattggagctaactggatgtgtgtgtgtgtgtgtgtgtgtgtgtgtgtgtgtgtgtgwgagagagagagagagagagagagagagagagaatgactcctaacccctatagcaaagaacacatctggtatccagatcttggtctctaaataccaattgccagcaaaaggaatccaggattctctaaaaagaa

SEQ ID NO: 457218 - DNA, 550 bp, Homo sapiens
tcatactaactatattacacaaatcatgatcaaagttaatttatatatacttcatcaaatgaactaaaatgccaatctgtatatatcactttaaatgtgttacttattagtatatgcttaatgttatgtcatatatgtatatttgtatacatacatatacttctaattattgttatgtgtatatgtactgaatgacarctgtgtgcttaggtttatgttagatgtcctgagaatacaaaaaccaacagggttgtgatcagtcaactttgtgatctgcacaatttttatggaaagcggtcttgttacataaaagttaaataacttgaagagcaaggtaaatgagtagtaatgagaaagagagatgaatactttttgcagaagttctgaagacaaattatgagaaattattaatggatttaatcctttatgctgttctttttgcttgaaaatatttatgttcatgtatatatttttcatttagtaacacattagtgtaagtgcagggataagggatggaggattatctgtaatatttcttctcctttcgtcc

SEQ ID NO: 457219 - DNA, 526 bp, Homo sapiens
aaactgtgaataagttcttagtgagaggctcagtcttggtgtcaacttagaaaaatgtgtagcaagaaataacaaattagagtaaaactgcgtaaaatattctatccttcatcaaaactatttaattattctaccataggggttacacttttagtgcatgttttcaaagcaaacttagaacgtgtgtgtgtgtgtgtgtgtgtgtgtgtgtgtgtgtgtgtgtgtcttctttaggacaaataaatataaacaagggatatagcagcatagttaaatcactccctgtcattacaccataagcactatgaaagtaaaatatgagactgatttccactgagttcctactacctgagataatggcatatacttgaygcataaggaatacatattggtatttttaaattgtatttatttatttttttaatgtgcaatgatcggtactctgaagtctgaacatgtattgttgaaagaatgaaattaaattatatatttgggaaaaaagtgtttcttttttgcttttcttaca

SEQ ID NO: 457220 - DNA, 548 bp, Homo sapiens
aaactcaacgacaagtagtgcaacatttgatcaaatattgatagaagtatctagatatgcaagtttctacagaaggatcaatgtacatttattatctgcactcacaatcttctacgaaacttcaggaatttkaccattttcttttttagctacaatgtataaacgtgtatttgtcacacacataatcaatatccaaacttttatacaagtcaaagtgaacatattgttattttcttattgactgatgaagttattaacatgaaaagtcaatgtgacagaaaagttattgatatctgagacatttgatgattaactgatttctacccaaactaattctgtgattcattttacattttggaaaatacttcactattaattttcctatagtaaactttctatggcatcgaagacatactttaactttgctctattttaaatataatttttttcaaacaaaataattacatgatatatttacaaatttgtttggaaggacttcttatgatttttttgttaggaaattgagatgtaaccagacccatttactg

SEQ ID NO: 457221 - DNA, 548 bp, Homo sapiens
aaactcaacgacaagtagtgcaacatttgatcaaatattgatagaagtatctagatatgcaagtttctacagaaggatcaatgtacatttattatctgcactcacaatcttctacgaaacttcaggaatttgaccattttcttttttagctacaatgtataaacgtgtatttgtcacacacataatcaatatccaaacttttatacaagtcaaagtgaacatattgttattttcttattgactgatgaagttattaacatgaaaagtcaatgtgacagaaaagttattgatatctgagacatttgatgattaactgatttctacccaaactaattctgtgaytcattttacattttggaaaatacttcactattaattttcctatagtaaactttctatggcatcgaagacatactttaactttgctctattttaaatataatttttttcaaacaaaataattacatgatatatttacaaatttgtttggaaggacttcttatgatttttttgttaggaaattgagatgtaaccagacccatttactg

SEQ ID NO: 457222 - DNA, 538 bp, Homo sapiens
ataggcaatgggtaaatactgccatacaaaaagggggaaatcagccaaaagaaaggggctccagacctcatgcaagtccaaagcccagcagggcagtcattacatcttaatgctccaaaataatttacyttgactctatgtctacatccagggcacactggtgcgaagagtgagctctcaaagccatgggcaggtccgtctccctagctttgcaagattcagccctcatggctgctctcaaggcttcctttttagtgcctgttgtttgtacagatgcaaggtgcaagctgctagtgtatctacattctagggtctggaggacagtggccctttcttgcagctccaccagaggacagtggtcctcttctcacagcagtatcccagtggggactctgtgtgagggctccaaccccacatttctcctccacactggcctagtatagtttctctgtgagggctccaataatgcagtaggcttattcctggatatctaggcttttccatacatcctctgaaatctaggtggaagctcccaagc

SEQ ID NO: 457223 - DNA, 538 bp, Homo sapiens
ataggcaatgggtaaatactgccatacaaaaagggggaaatcagccaaaagaaaggggctccagacctcatgcaagtccaaagcccagcagggcagtcattacatcttaatgctccaaaataatttaccttgactctatgtctacatccagggcacactggtgcgaagagtgagctctcaaagccatgggcaggtccgtctccctagctttgcaagattcagccctcatggctgctctcaaggcttcctttttagtgcctgttgtttgtacagatgcaaggtgcaagctgctagtgtatctacattctagggtctggaggacagtggccctttcttgcagctccaccagaggacagtggtcctcttctcacagcagtatcccagtggggactctgtgtgagggctccaaccccacatttctcctccacactggcctagtatagkttctctgtgagggctccaataatgcagtaggcttattcctggatatctaggcttttccatacatcctctgaaatctaggtggaagctcccaagc

SEQ ID NO: 457224 - DNA, 583 bp, Homo sapiens
ctcacctaatctaaagtctgatccttagtatatgccaaagaaatgtaattttgcttcctctttctatgtccctacttgatttttgtagcctccagatttagaggaatatcaggcttgtgtctcccacctccacagtctcactacctgtttgaaacaatgaagtaaatctaagaccaagtttcaccatataaacagaccttttccagcaattgaagaaaacagtcattgtttttgttgtatcatttagctatctcgctagtcaaattaggatgtaaatgcttaacttagtgctgggacataggattgaatgaggttgtcagcccctcaggcaccgctagagtgtgttaaactattggggttattactttcttatataatattcatgtaacttcatggatgcctatacaatatttttattcaatctatatatgttaataattayattcataatgacttacttatggcattctgttaatgtccaaaaccataaactactccttagtttctcaaatattaacaaaactatgtctgggtgtgtattgctaattagagtacacacatggtcaaaggtattaagtataga

SEQ ID NO: 457225 - DNA, 483 bp, Homo sapiens
taaatcagacctgagcaaacactccattaattacctgacttccataaacccctactttaactggaggaccacaatgatgtttggggttccctggagtcaatatcacctctgagccagtgtccattcattccccaaaagtctgattattcctctttttgcaatgcacagttactctggtaaaagtttggaggtcttgttgaggaargatatttgtttgttcagctcttgcttacaataagcaaaaatattaaaagatccccctctttatatgtagaatctcaaactgcagttcagaaactctaagcattttttaaaatatttacttcttaaaatattttaattaatccccacaaccaaactctaagggattcaaaattatctcttatattatatagatgagaaaaaaataaggccaggtaacggttaaataactttttcacagtgaaatagcttataaaaagtagagccaggtaaaactactgg

SEQ ID NO: 457226 - DNA, 483 bp, Homo sapiens
taaatcagacctgagcaaacactccattaattacctgacttccataaacccctactttaactggaggaccacaatgatgtttggggttccctggagtcaatatcacctctgagccagtgtccattcattccccaaaagtctgattattcctctttttgcaatgcacagttactctggtaaaagtttggaggtcttgttgaggaaggatatttgtttgttcagctcttgcttacaataagcaaaaatattaaaagatccccctctttatatgtagaatctcaaactgcagttcagaaactctaagcattttttaaaatatttacttcttaaaatattttaattaatccccacaaccaaactctaarggattcaaaattatctcttatattatatagatgagaaaaaaataaggccaggtaacggttaaataactttttcacagtgaaatagcttataaaaagtagagccaggtaaaactactgg

SEQ ID NO: 457227 - DNA, 588 bp, Homo sapiens
tttgtgtgttaagacatgattatgataccatcacttcttaaagcctacgtagaatacatatcccatcttataagctatctsttgttgttattgttgttgttgttttccatagtcaacatttcatgtatatgaatccgtaatgtgattcatttgtagacagattaagcctcacaaagatataatactacaaggatttaccacctgtgatttttcttttaaaacatctaagaaccacagttgtcaaaaataagcaggtgtcatccatccagtagaagcatttttgcataacaaatataaactggttttaaattggatgatataactatgacaaaggtttttcctggataatgcaacccatatatacctttttaatctaaatgataatacatcctgaagcaggggtcagtaaaatataccctgtatgctatacatggcttatctcttgtttttgcagagcccaggagataaaaatggtcttacatttttacattcatgaaaagaaattaaaacaataattatcttgtaacatgtgaaaattatatgaagttcaaatttcagcattcacaaagttttattgaaatatagcca

SEQ ID NO: 457228 - DNA, 588 bp, Homo sapiens
tttgtgtgttaagacatgattatgataccatcacttcttaaagcctacgtagaatacatatcccatcttataagctatctcttgttrttattgttgttgttgttttccatagtcaacatttcatgtatatgaatccgtaatgtgattcatttgtagacagattaagcctcacaaagatataatactacaaggatttaccacctgtgatttttcttttaaaacatctaagaaccacagttgtcaaaaataagcaggtgtcatccatccagtagaagcatttttgcataacaaatataaactggttttaaattggatgatataactatgacaaaggtttttcctggataatgcaacccatatatacctttttaatctaaatgataatacatcctgaagcaggggtcagtaaaatataccctgtatgctatacatggcttatctcttgtttttgcagagcccaggagataaaaatggtcttacatttttacattcatgaaaagaaattaaaacaataattatcttgtaacatgtgaaaattatatgaagttcaaatttcagcattcacaaagttttattgaaatatagcca

SEQ ID NO: 457229 - DNA, 588 bp, Homo sapiens
tttgtgtgttaagacatgattatgataccatcacttcttaaagcctacgtagaatacatatcccatcttataagctatctcttgttgttattgttgttgttgttttccatagtcaacatttcatgtatatgaatccgtaatgtgattcatttgtagacagattaagcctcacaaagatrtaatactacaaggatttaccacctgtgatttttcttttaaaacatctaagaaccacagttgtcaaaaataagcaggtgtcatccatccagtagaagcatttttgcataacaaatataaactggttttaaattggatgatataactatgacaaaggtttttcctggataatgcaacccatatatacctttttaatctaaatgataatacatcctgaagcaggggtcagtaaaatataccctgtatgctatacatggcttatctcttgtttttgcagagcccaggagataaaaatggtcttacatttttacattcatgaaaagaaattaaaacaataattatcttgtaacatgtgaaaattatatgaagttcaaatttcagcattcacaaagttttattgaaatatagcca

SEQ ID NO: 457230 - DNA, 642 bp, Homo sapiens
agcctattctatgaggaataatctagaatatggcagatgtattatgcattttctttaggctattatattcaatgtctaatgattaataaagaatacattcttaactttattacagtttaatatcaccaatatttaccttttagaatttatcctattgactacttatacatgaattttgttaagcaggtccaacatcataatgtataatagttttttcactaaaatgagcatatttgaattcttttatttattataatcatcaaaagtacataactagagttcaaaagcaaacacatttctaatgatctattagctattaaagaaattattattgaaacaagaaaatggatgtataattttataattcagtttgctcttaatattatattgaaaataatctgttttcattatgtctatgaattatacatatatataaatccctttttatatttaaacccaatgtatttaataatttcaacatatggcattccaaggttgtgcataattaaatgatggcaaatgggttctgaattattgtttagtaacaactaaaaaagtgaaaacataaagttggaataaacatgaartaaatgctggatccaaaagttggagaatgggcctggcgaggtggctcacgcctgt

SEQ ID NO: 457231 - DNA, 553 bp, Homo sapiens
tttaaacccaatgtatttaataatttcaacatatggcattccaaggttgtgcataattaaatgatggcaaatgggttctgaattattgtttagtaacaactaaaaaagtgaaaacataaagttggaataaacatgaaataaatgctggatccaaaagttggagaatgggcctggcgaggtggctcacgcctgtaatctcagcacgtcgggaggccgaggcgggcagcacgaggtcaggagtttgagaccagcctgrccaatatggtgaaaccccgtctctattaaaaatacaaaaattaacttggcgtggtggcacgcagctgtactcccagctactcaggaggctgaggcagaagaatcgctggatcccaggaggtggaggttgcagtgagctgagattgtgccactgcacaacagcctgggggacagagtgagattctgtctcaaaaaaaaaagttggagaacgaatatatgtacatatatgcttatatacatgttttgtatttgtgtatatgtgttcatacacatatattcatagtgacttatattagag

SEQ ID NO: 457232 - DNA, 588 bp, Homo sapiens
ccagtcagtcatttcatagattttccccaacctccaacttctatgtgctcaatacaatgaaaaatgtatagtcatggccttgtctcccatttaggcatggctacaagtctggagtttcagagaaacttttaataatataacaaaccaatgaaaagctgtggagtaatttctgatcattccaaaatggaagawcttttacatttctatatcaacattttaggagacatgcaattgagtgtaaacaagctagtcttatgcttacttgtcttagtttttctatgattaaaccatgcaactcatacttaatattgctatttgggggtacaatggtcattgtatagccttaaaggcacattgtagaaagaagctgcttttcaaggcaattttctaaggtatgaagctatcttcaaggtgaagcagagtaattttccatttaatttgacattttctggatgattggctcctaaattcaaggcttttccaattaaattcagttgcatttatatccagaaaattttcacaggggattggtttcctgctgtggaggtgggttttgaagctacttgaactaaattacagccaacatac

SEQ ID NO: 457233 - DNA, 588 bp, Homo sapiens
ccagtcagtcatttcatagattttccccaacctccaacttctatgtgctcaatacaatgaaaaatgtatagtcatggccttgtctcccatttaggcatggctacaagtctggagtttcagagaaacttttaataatataacaaaccaatgaaaagctgtggagtaatttctgatcattccaaaatggaagaacttttacatttctatatcaacattttaggagacatgcaattgagtgtaaacaagctagtcttatgcttacttgtcttagtttttctatgattaaaccatgcaactcatacttaatattgctatttgggggtacaatggtcattgtatagccttaaaggcacattgtagaaagaagctgcttttcaaggcaattttctaaggtatgaagctatctkcaaggtgaagcagagtaattttccatttaatttgacattttctggatgattggctcctaaattcaaggcttttccaattaaattcagttgcatttatatccagaaaattttcacaggggattggtttcctgctgtggaggtgggttttgaagctacttgaactaaattacagccaacatac

SEQ ID NO: 457234 - DNA, 622 bp, Homo sapiens
tgaaaacattatttataatagagatatattgaaaacaacctgtatacagttaaagggagtattttgcatttatttaaataaatagtatacaatagataagaataacctttaaaaaatgataaaatattttaaaatgtgaaaagtatgacattctgctaactgaaagtgaaagtgaagaagtatttttacttcaattaactttatgtaactctagtaacctaagaacagctatttttatacccatgaaaaataatagcaattaatcaattaaaatgacagaattagtattttattttagaaaaatacaataagagaaagaacaattatactaatttgagcctcgcacatagtttgccttttatttggatttgttcaagtgaatagcagctctttgaaagcagttgatttttttamgataaatcttgataaaccaccatctttgatctaaatcctcataggtgttgagtgtaattgtcttataaaaacagactgaatgtaacaaagcgtcaaacattgaagtataagtcagtgttgtatgagtttctccaagagatttgatttgaaattaaatgttgttatagagactatatatatatataatattttatttatgagtgcctga

SEQ ID NO: 457235 - DNA, 588 bp, Homo sapiens
acccattaggctaacaacagatgtctcagtagaaactttacaagtcagaagacatcagggcctattttcagcattaaaaaaaataagaaaaaagaaaaagaaattccagccaagaatttcataacctgccaaactaagcttgaaataaaattctttccagacaagctatcactaagggaattcactaccactacaccagccttacaacaaattatcaagggagttctaaagatgggaacaaaagaataatacctgctaccrcaaaaccatattcaagtgcatagtctacagatcctataaagcaactacacaatagaaactacaaagtaaccagttaacaacttcacaatagtattaaaacttcacataacaatattagtctagaatgttttcttattaaaaaaaagtttagataaaaatttgaagaaaaaatctatattctgtccagggatcctcaatttaattaactaatatactgagtgaaattcagtttatttgagaaaatgaagcacaaaaagtagattatatgattgtacttaaactacatgatttttctaatgattttaatataattccagaatagcagga

SEQ ID NO: 457236 - DNA, 588 bp, Homo sapiens
acccattaggctaacaacagatgtctcagtagaaactttacaagtcagaagacatcagggcctattttcagcattaaaaaaaataagaaaaaagaaaaagaaattccagccaagaatttcataacctgccaaactaagcttgaaataaaattctttccagacaagctatcactaagggaattcactaccactacaccagccttacaacaaattatcaagggagttctaaagatgggaacaaaagaataatacctgctaccacaaaaccatattcaagtgcatagtctacagatcctataaagcaactacacaatagaaactacaaagtaaccagttaacaacttcacaatagtattaaaacttcacataacaatattagtctagaatgttttcttattaaaaaaaagtttagataaaaatttgaagaaaaaatctatattctgtccagggatcctcaatttaattaactaatatactgagtgaaattcagtttatttgagaaaatgaagcacaaaaagtagattatatgatkgtacttaaactacatgatttttctaatgattttaatataattccagaatagcagga

SEQ ID NO: 457237 - DNA, 543 bp, Homo sapiens
ttctaaaactttatgtgtgagccacattcccactttagcaaattaaacaagatattaatttacagtgggagacttcactattgaatgaaaaccatattttagtcctttgatgaaataatagctaacatctatatagatactgtgactcaatagctaagtgtttttacacgttcaattattaactgaacttaggacatattaattcatcatagttatataaataaaacttaaatataatatactaatatatgacagacatggtatagctagatacttataaatatgctcaatagttaaggagactatgtctaagaagaaggctctttaggaagcactggaagagtgcttgctcagtactttcaggtttctgaaatctttaaatgactaatctagtaaattttttttgaacaaaatccatgaaatataaatactaaaagtagcactctaaaatgattactaggctatatttctaaaatttatactattatcactsaacacaaatcaaatggttaagaataacgtgtgaattttacaataaagcat

SEQ ID NO: 457238 - DNA, 633 bp, Homo sapiens
aaagctttcctgcaaagaagtctccatggaactcagatgacttcagtggtgaacttcaccaaattatacataaagaaataatagcaattttggaaaaatctttaataacatgatgagaaacgacaatttttcatgtcattttatggatcctgtgtttcctatgtaccaaattaaccaaatcggggctcccctcttccccagcctgctgttgtcctcactgcctcttcctatcaggaagatggtgaagccagcatggttttcccmaggccagtcttaaggtatctaataaagtctgaactcttccctacaaaaatataaataaaataaaatctaacattaatattcccgtaagcataaactcaaaatcccttaagatgttttagccaaaggaaatccagcaattcatgaaaaaaggtatacaccatgaccaagttgtatttatctcagaaattaaagaaaaatctatagataattataataatacaattctaagttattcctctctatgattaaaatcttcctgaaaaggtccatcctctccattctattcatcattgtgctgggatcttaactattgctataaggcaagaaaaggaactaaaaggctaacaaattggaaaaataaacgaaata

SEQ ID NO: 457239 - DNA, 376 bp, Homo sapiens
tggtggtgcctttgcccgagtttgcttgggcctactgggtctgctcagctcccactactagcctggattccatgcttccaaagagactggagtggagtggcgaggggtgtgtgagccagtgagtatgggatctgctaactgcacacggttaggcacaccagctgctgtagctgggacaggcagctccaggtgccagcatgggtactaggtcactataaggctttggctggaccagacacaccacaaatagcttccacggctggtacaagggaacacagttgtgcctggaagcgtgcagactccaggaaccatagggtcccatagygggagtcacagctctgatctggggagctcccaggtctgggttcccatagaa

SEQ ID NO: 457240 - DNA, 376 bp, Homo sapiens
tggtggtgcctttgcccgagtttgcttgggcctactgggtctgctcagctcccactactagcctggattccatgcttccaaagagactggagtggagtggcgaggggtgtgtgagccagtgagtatgggatctgctaactgcacacggttaggcacaccagctgctgtagctgggacaggcagctccaggtgccagcatgggtactaggtcactataaggctttggctggaccagacacaccacaaatagcttccacggctggtacaagggaacacagttgtgcctggaagcgtgcagactccaggaaccatagggtcccatagcgggagtcacagctctgayctggggagctcccaggtctgggttcccatagaa

SEQ ID NO: 457241 - DNA, 504 bp, Homo sapiens
tgtttttcattctgctcttcctttacatatatatatatatttttttaagccaagtataggctgaattaaatatacttcctgttggcagtgacagttctggcttagcattacagatgtcttgatttctcctatagaagtaacacactttcctacttttgaagacagattgttacatygattctatgattgttgttaagagaaaaattccaactgaattaaatttaaagtagtttgagtaatgaatgattggaaaatcaggcagcccccagaattacaacaaattcagagactctagctcagtcaagtggtggaagaagatttatggacagcaaaaggaaagggaggtacagaaacaactggattggttacaactaggcctttgccttatttgaacatggttggaacagttagctacatttggccaaaactcagtaattggcacaggtgcgggctgcagttgatttacacctccactttttatagttcacgatgtacagaagaacc

SEQ ID NO: 457242 - DNA, 594 bp, Homo sapiens
atatattaactattttagatatagkcacatatttataattatccatgaggtaattttagtaataacaatgcataaaattaactctcatccacaaatgcgggtgataaagcactgctagaaatttgactatgaatatttcagtatcactttcccttgctaattttctcttccttgtatttgatataaatgatacattaactgtggagtctctagtagattagagtttcttataaaagacacttcatttatctcgatgatcatactttcttttctaatctatttgcccttgcctagatcctctcctgaccctcactttcaatgacaaactctattccccaatgcacttgatgtcattgtcttcactatttacagccctgactgagtaatctcgctctttgtactgctgatgcaaagtattacatgtaatggatatcataaattacatcttagcatagacagatagaaccaatgctttttgaattttctagaataattacagaaattgacattcgtctgccactgctgcagataaatagtgcttcagctgttgtctccatagtcaaattatttctgcctgcacaagatctgacaaga

SEQ ID NO: 457243 - DNA, 646 bp, Homo sapiens
tttgtttcatttttaattatmaaactttaattaatagactaatcttactaaataaacaataagacagctaatctaattacactttaaaaaatccagctgggccaggtgcagtggctcacccctgtaatcccagcactttgggaggctgagtggggcggatcatgagatcaggagatcaagaccatcctggctaacacagtgaaaccctgtctctactaaaaatacaaaaaaattagccagacgtggtggtgggcacctgtagtcccagctactcaggaggttgaggcaggataatggcgtgaacccgggaggtggagcttgtaatgagccgaggttgtgccactgcactccagcctgggcaacagagcaagactttgtctcaaaaaaaaaaaaaaatccagcggagcaaatctaatagactaaatatctttatctcctcccaaacagacacttgatttaaaaagataaaccaaaacagagtgtacaccacaaggaaacatggtccatacatatattgtcaaataattctgcagaattctttaggaaagaaaaagaaagatgttcttagaaatttagaaagcagtataaccacccagactggcaggttaatctaccagatgttctgcacatgagagggctcccgact

SEQ ID NO: 457244 - DNA, 614 bp, Homo sapiens
tgaacaatcctccaaactttttgaacacatatgtgtaatagtagtggtaatagataattttagaaagcagaaaagaatgagaaactcccttaaaactaccaaaatttttagtaaaaatttttaagtctatgtttgatatatcacattcagccccattttccatctaggtgttttgttatcttggaaaatagattcaattttgaataatcaacacaattcagaaaggattttaatggacaaagatgtaatttggtctactgtacactaatttttggcttctccagcttrtgattcttttctgaggctgaacctctctataatcaatttgttagactaaactactcagacttcagtccagagaagattctgatccctgagatgttttgctacatatcagaacctagttgtttaattttctctttcagcacagactcatgagatacatctttgactcttgacacaaataaccaaggcaccaaccctagtctcaaaagcttctgtgacccatgcaatgtgtattacaaaaaaggaatgtaataatatagagaatattagaacatcgtaatggggttcagaggataggcacctcagtttgaggtgagagagggaggatt

SEQ ID NO: 457245 - DNA, 429 bp, Homo sapiens
tgtcagtgtatctaccattatggggtgcagagaatggtgaccctcttctcacagctccattaggcagtgccctagtaaggactctgtgtggggtctcccaccccacatttcccttctgcattgccctagcagaggttctccctgaggcccctgcccctgcagcaaacttttgcatccaggcatttccatacatcttmtaaaatctaggtggaggttccaagactcaattcttgacttctgtgcacttgcaggctcaacagcacatggacgctgccaaggcatggggcttccaccctgaagccacagcctgagctgtatgttgacccctctcagccatggctggagcagctgggacacagggcaccaagtccctaggctgcacacagcatggggaccccggacctggcccatgaaatgacattttccccc

SEQ ID NO: 457246 - DNA, 591 bp, Homo sapiens
aaaaataatattttctattgatggtttgtttatcccactttatgtacaaaatagtttgtcagtgagatgattttaagttaccacacaagaaataagagtaattctttaccaggcagcaaatacctgtgaaataatcaggaatatttgtttaatttttattttttaattgacacataataattgtacatatttatggggtacgtcatgatgtttcaatacatagaatgtatagtgascagaccagggtaattagcatatctatcatctaaaacacatcatttctttcttgtgggaacatttattttcctttcttctagctatttgaaaatatataacatattattattcactgtagtaatcttacagtgctttccatttagatataaataagttctagagttctatagcaatattttttaataaacaggaagattttataacctctgtcaaatatctattaattagtaaatactagttttaagaaataattaacaggcatggccccagcagttacaatccctttaatatcatatatctggcaaagatgtagtctgtatatggtctgatatgaacaaaattactactaactgc

SEQ ID NO: 457247 - DNA, 591 bp, Homo sapiens
aaaaataatattttctattgatggtttgtttatcccactttatgtacaaaatagtttgtcagtgagatgattttaagttaccacacaagaaataagagtaattctttaccaggcagcaaatacctgtgaaataatcaggaatatttgtttaatttttattttttaattgacacataataattgtacatatttatggggtacgtcatgatgtttcaatacatagaatgtatagtgagcagaccagggtaattagcatatctatcatctaaaacacatcatttctttcttgtgggaacatttattttcctttcttctagctatttgaaaatatataacatattattattcactgtagtaatcttacagtgctttccatttagatakaaataagttctagagttctatagcaatattttttaataaacaggaagattttataacctctgtcaaatatctattaattagtaaatactagttttaagaaataattaacaggcatggccccagcagttacaatccctttaatatcatatatctggcaaagatgtagtctgtatatggtctgatatgaacaaaattactactaactgc

SEQ ID NO: 457248 - DNA, 579 bp, Homo sapiens
cagggtaattagcatatctatcatctaaaacacatcatttctttcttgtgggaacatttattttcctttcttctagctatttgaaaatatataacatattattattcactgtagtaatcttacagtgctttccatttagatataaataagttctagagttctatagcaatattttttaataaacaggaagattttataacctctgtcaaatatctattaattagtaaatactagttttaagaaataattaacaggcatggccccagcagttacaatccctttaatatcatatatctggcaaagatgtagtctgtatatggtctgatatgaacaaaattactactaactgcctattcagccttaggattcctgataaagctgaataaactccaaaaatataaagtctttggaggacaggattttattaatacatgctgtccctagatacctgctgcwgtcactttaaatttgcacctacccagtgtcatgagactaatccagatgacagcctaagaagcctttcagttctctgatattttgtttcagtgctgccagtgatgcatctccagctctgagcac

SEQ ID NO: 457249 - DNA, 631 bp, Homo sapiens
atattgtgatccaataataattttgtgtccaataataattataataaacatttactgagaaattatgaggcaagtacagtgctcaacacatattatgcagtcttattgaataataataattatgataatcatagaatggaatgtggttatcatagaatgtatatactagtatatccttaatttacaatttggggaattgatactcaaagagaacacgtaactttgccaatgtcacatcattgaagagtttagatagaagcattcagcrgttactaacataagaaactgctcagaagttaagagatggaggaaaatattctttgatgttaatttcacaactgaataggtatgtatggaataggatcaagactttctatgcaaagcatgccatgcgagtgacagtatagagaaaggaaatgccatagtacactggaagaactgcatattttggtagcactatgcaaaaattttacctgggaagaagtaggcactggcaaggctttggaaatgagatataataaaacagaataatccagttttaaataaagttagttttccaaatgaaacaaaaatttcaataaatggttaatgggggaaagatttgacctttctatggtgcatttcttgagat

SEQ ID NO: 457250 - DNA, 581 bp, Homo sapiens
ttggcaatggattcttaaatatgacaccataaacaccaccacaacaaaaaacaaatagataagttgaactttattaaaattaaaaacattggttcatcaaaggacattatgaagaaagtgaaagcctatggaatggaagaaaatatttgtgaatcatatatctcataaggatttaatatccaaaatatataaagaaactttataactcagcaacagaagacaaagagactattttttaatttccaaagtttattggggagcaggtggtatttggttacatgagtaagttctttagtggtgatgtgtgaaattttggtgcacccatcacccagacagtgtacactgcatgctatttatagtcttttattcctcacccrcccccaaccctttccttgaatccccaacgtccactgtgttgttcttatgcctttgtatcctcatagtttagcttctacttatgaatgaaaacatatgatctttggttttccattcctgagttacttcactcagaataatagtcaccaatctcatccaggttgctgtgaataccatgaattcattcctttttttggctgagaagt

SEQ ID NO: 457251 - DNA, 524 bp, Homo sapiens
gtcattcaagaaatacaaatcaaaaccacagtgagatactatttcactactacacaattttttttttgttttgtttttgagatagagtctcactctgtcacccaggctggagtgcaatggcatgatatcggcttactgcagcctcctcctcctgggttcaaacaattctcctgcctcagcctcccaagcagctgggactacaggcacacaacactgcacctggctttttttttttttttttttttttgtatttttagtagagatggggtttcatcctgttggcctggctggtctcgaacttytgacctcaggtgatccagcatcccagcctcccaaagtgctggtagcacgggtatgagccatcaagcccagccttctttgcaactattaggatgactgtaatgaaaaaaaaaaaaaaaaaacagagagaaagaggacagggggaggagcaagggttggccaggatgtggataaagttaaagacacttacattggtgatgggaatatcaaattgtgcacttact

SEQ ID NO: 457252 - DNA, 524 bp, Homo sapiens
gtcattcaagaaatacaaatcaaaaccacagtgagatactatttcactactacacaattttttttttgttttgtttttgagatagagtctcactctgtcacccaggctggagtgcaatggcatgatatcggcttactgcagcctcctcctcctgggttcaaacaattctcctgcctcagcctcccaagcagctgggactacaggcacacaacactgcacctggctttttttttttttttttttttttgtatttttagtagagatggggtttcatcctgttggcctggctggtctcgaacttctgacctcaggtgatccagcatcccagcctcccaaagtgctggtagcacgggtatgagccatcaagcccagccttytttgcaactattaggatgactgtaatgaaaaaaaaaaaaaaaaaacagagagaaagaggacagggggaggagcaagggttggccaggatgtggataaagttaaagacacttacattggtgatgggaatatcaaattgtgcacttact

SEQ ID NO: 457253 - DNA, 291 bp, Homo sapiens
aaactataatatgttatattagaaaaaagttattacacacacaaaaaagcagcaagaggctttagagagaagaatgctatgagacagaaaacaaaagttagaatggcagacataatttaattgtataawtacaatctaaatgtgaatagatcaaacaatctaatcattgaaaaattgttggactgaatgcaaaacaaaaataaaaaacagaatcaaactatattctgctggcaggagaaactttagatttaaaaatacaaatggattgagaataaaggaataaaaaaggat

SEQ ID NO: 457254 - DNA, 612 bp, Homo sapiens
tttaaggtttttaaaaggaagaacttgagtttgttagtggaagaataaaaatgaatgataagataaaacaaaattataggaatttaacataggactttatatggagatccatttcatttgtataggtagcttctaatttagtcttcgttttgcaaactggactaatgagctcagagtatagtgcatcaatgaatagcacacaccaaaaaacattttgtacttattaaggcctaatgtttgtatatgggaaaaacaggcattgctggaagggagaacatctaaattcttcaaactcaaggattccatttttttacactgagtcccaggtctccaaaagtgggaaacaccgtaggactgaaccatgcaatgtttctacagtgtacatcactrcaataatgttttcctgaggctggtaagtgaccagtgccaattgtcccattctgtgatcagcccgttcatcacaagagtcttatcccacagtggtgagtgttttcacagccttcaagtgttcaagctgacctttgttatctaaacatacaaaaacaaagaatgagtagtgctccacaataatagccattcactgccaacaactgctgttagccaccttcaaaa

SEQ ID NO: 457255 - DNA, 522 bp, Homo sapiens
atcttgtccaaaaccatcaaggttgtacctctatgagtatgcaagaaccacagcattactgggattggaatgacccctaaagtagatacagttwaaattacagcactcaagtcctttcaaatatctggaaagcatttccaagaagaataaccacaaacaagcccatgcagtgaatactacaataaacacctaactctacaatgcccagacaccgaagaacatttactagcatcaatgccattcagaaaaacatgacgtcacccaatgcactaagtaaggcaccagggatcaatcctggatataagaaaaaaatatgtacagagaattgaaaatagtagtgttgaggaaactaaggaaattcaaagtaacacaaagaagctattcagaatcccatcagataaatttaacaaataaataataataattagaaagaatcaagcagcaatacttgagctataagatgcaatggcatacagaagaatgcctgagtcctttaatagcagaattgctcaagcagaagaa

SEQ ID NO: 457256 - DNA, 598 bp, Homo sapiens
gccaacagtgaacaccataaaaatgaagttaaaaaaaagtaaccccacttacaatagccacattatattaactatttagggattacccaaaaaaatgaaaaaaatctctataatgaaaactgtcatgtaaaaataataataaaaaaaactgtcaaacactagtaaaaaaaaattgaagaggacaccaaaaggcagaaaaatatttcatgtccattcattagaaaaattaatattgttaaaatgttagtatgrcccatggctatctacgattcaattcaattcctgttaaaatacctattatatgcttcacagaaatagaaaaaaaaaatctaaaattcataaagaaccacaaaacactgagaacagacaatgttatcctaaggaaaaataacacaactggaggaattatattgccttacttaaaattatactgtggaaccatactaagcaaaacagcatgctattgtcataaaaaaaaccagaaacatagaccaatgtaactgaatagagaacccacaaataaatccatacacctacagtgcacttgtttttgacaaaagtgccaagaacatacactgggaaaagacagtctctttaa

SEQ ID NO: 457257 - DNA, 357 bp, Homo sapiens
attagtggattattgcagccaaaaaatgatttacaattcaatatgctctcaaaaaataaaaataagggctaaagtctagtaataagttgatatggtttggctgtgtccccacccaaatctgaacttgagttgtatgtcccagaattcccatgtgttgtgggagggacccagggggaggtaattgaatcatggagascattcttttccattctattttcatcatagtgaataagtctcatgatatttgatgggtttatcaggggtttccacttttgcttcttcctcatcctctcttgccaccaccatgtaagaagtgcttttgaccccctgccatgattctgaggcctccccagccat

SEQ ID NO: 457258 - DNA, 587 bp, Homo sapiens
aaataaactttatatctcaaccaaattttgggagatcagggattctctggagtagtgagggggagcacccaggtgtctgcaaattgtcctattggtttgagccaaaaaagtagctaaasctaatacgaagcaccgataggagatttgtctaaagtcaggggcacctccactcagaatcccttcatggtttccaatttgtgaacctaaaatatctgagaaaggtcaggcatgatggctcacatctgtaatcccagcactttggaaggtcaagcaggtaaattgcttgagcttaggagtttgagaccagcctgggcaacatactgagaccccatctctacaaaaaaatgcaaaaattagccaggcatggtggcatgtgcctatagtcccagctacttgggaggctgaggcagaaggatcacttgagcctgaaggcagatgttgcagtgagccgtgatcacgccactgccctcaagactgggtgatcgatcaagagatcaagactccctctaaatatatatatataaaatatttgaggttgttcttaatttagaaagtttattttaccaaggttaaagacatgcctgtga

SEQ ID NO: 457259 - DNA, 552 bp, Homo sapiens
tgctgttgaagtaactttaaatatgtaaagaaaactgatgaatcctaactcgtaataactatgtgatttttttcatatttcaaattattcacagacataaaaaggtaaattagaggactagatattctggcatttatttagtaacatatggcacttagtagcacagagtatcagcactttaataatcaacatatattctaaatattaaaartgtcattttaagaaatactattcatatttttatgtaatactaggtatcacttatgaggacacccagacacagggaagttgaatgacatgtatggagccacaaaggtcataagtggcagatcagggatttgaaaaaagaccactctgataacaaagagcatgttcacaaagggtacattacactgtttagctctaccaatggattaaaaatggcacagtctattaaagataatgatagctaatatttactgagtacattgtattttaacttgtgctaaacacttttcacactttatctcatttaattcttagcttttgtaaatgaggatcccaaagaggtca

SEQ ID NO: 457260 - DNA, 555 bp, Homo sapiens
atccagtggggctaggtccgtgtctagggccattgaggtgacaccaccagaggaggaagcatccagccacaaaagataattcttgagggtttggatcataatccaaaacaacacaatccccaatgttaaaattctaaaaaatcaarattgccaaagtataattcctaaagtctaaaattcctaacatctaaaatcccccaaatcacaataacaagatggttacctcatgttaagcgaaactattaccctgttattgtttttatttggaaattatgtatggcttaaatatatgcatatgaatgaatgtggacttaattttaggtgtcaacttgactagattaagtgatatctagatacctggtaaagcattatgttgggtgtgtctgtgagggtgtttgcagagaagatccccttgagagtctgagtgaattagatgcagaagatctactaaccatattgtcaggcaccatccaattggctggatgcttggtgagagcaaatacagaaggcagattgtacttcaaaatttacacaggcgattcctccatgtcctga

SEQ ID NO: 457261 - DNA, 555 bp, Homo sapiens
atccagtggggctaggtccgtgtctagggccattgaggtgacaccaccagaggaggaagcatccagccacaaaagataattcttgagggtttggatcataatccaaaacaacacaatccccaatgttaaaattctaaaaaatcaagattgccaaagtataattcctaaagtctaaaattcctaacatctaaaatcccccaaatcacaayaacaagatggttacctcatgttaagcgaaactattaccctgttattgtttttatttggaaattatgtatggcttaaatatatgcatatgaatgaatgtggacttaattttaggtgtcaacttgactagattaagtgatatctagatacctggtaaagcattatgttgggtgtgtctgtgagggtgtttgcagagaagatccccttgagagtctgagtgaattagatgcagaagatctactaaccatattgtcaggcaccatccaattggctggatgcttggtgagagcaaatacagaaggcagattgtacttcaaaatttacacaggcgattcctccatgtcctga

SEQ ID NO: 457262 - DNA, 558 bp, Homo sapiens
ttggtggtagtctggcagtactgctcctggccaggtgtggcaattgctattgggtaagggttctctgcctttggaaaggaaaggaaagagtgggaaagactgcatctggtgcatcgagtgcaaactaagctgcaatacaatagaacaccagttagatttctaaggttttagactgtagtctctaaatcctggatgtcacttctaaacccaccgagcgactgggggacctcatgtccctgaagaaaaagacataggccaccctggctttgccacctggtgattgtagagctccagagccttgagtgaacataggcagtagcaaaagaatggttaaagcaggtgttaggtgagacccagcactgtgctggcttcaggtctaatgcagcacagtcatagctgtggtggatacaggagtacttgtgtcactaaacccccagctataagtggctcagaacagacagaaactmtatattttggaagaaagtaaaggaagagaacaagagtttctgcctggtaattcagagttttttgtgatcttgttcaagaacatcaaggcag

SEQ ID NO: 457263 - DNA, 533 bp, Homo sapiens
tgatcaaccccagagaaacacagatatctgacattttagataattcaaaatagttgtattgataaaattcaaagcaattcgagataacacacagaaggaatacagaattctatcagataaattgaacaaaaatattgaaataaattttaaaaatcaaccagaatttctggaattcataaatgcaattggcatactgaagatttcatcagaatctttaatartagaatggatcatgcaggagaaaaaattattgatcttgaagacaggctatttgaaaatacaaagtcagaaaagatgaagtgaaaaagaatacaaaactataaagtgcatttccaggatctagaaaatagcctcaaaacggcaaatctaagacgtattgaacttaaagaggaggtagagcaaaaggtaggggtagaaagtttattcaaagggataataacagaaaacattccaaatctagagaaagatatcaacatccaagtacaagaagattatagaacactaagcagatttagcccaaaaaaagactaccc

SEQ ID NO: 457264 - DNA, 628 bp, Homo sapiens
aaactgtgctttcaacactttgcttagaaattttttagtcaaatgtcctatttggtcacttgtaaattcttttttccacaacacttatcaacatgattcagccaagtcctttgccactttatgagaagaattgcgagcctattagttttcaactagcatgttcattatttccaagtagacttcattgcaatggcctttgccattcatatttttagtatttccagtgaaattcagatcatgaccatttaagtacactctaagaagtttaactctttgtctacaaattttgtcttttccttattcctcaccagaagcacccttagtagtctgtttttggaaatacagactttttctagcatgcagttcaaaattgttctaatctctactcattacccagttccaaaaattattctaccattttaggcatttgttacagtggcacccccacttctgggtaccaattttatcttagtttgtttggacttctataacaaaatactgtaaatggggtgatacatccacaacaaatattatttttcacaattcttgaggctgggacatctaagacccagaagagggcctatttctttggtcatagatggcacyttttaactgtgtcctcacagat

SEQ ID NO: 457265 - DNA, 607 bp, Homo sapiens
gtgttgaattgtcacttctagctatcacacataaaaagaaaatttgtcattttctctaaattaaatcaaattcactaaaaaactagaaatatgcatctagctattaaataaaatttaaacatttttccttttaaatgtgctagtcttcgagtttaaatttactagcataagccttcactttataaacatttagttttcagaggaaattctgcattaactagttttttggtgttcacatctactcacaagctacattcttgtatgctttgaggaagaagagctatctgactaaataatcagaagtataatgttctaaatgtatattgtattaaggawtatataatacagaagagaaaaaattgcaaaacaggagaaattatcaaaagataaaaatgagcgtaatatgtgagaagttataatatagacaatgccgtgaaaaattggtgaaagaaaattaaaaatgggaaaaacattatgaaaaaagcacatattcattttgaaatttagactataattgatgttagatatagaatcactttttaaagaaagaaaatcaccctatatctattcaacacttatttcatgtaagtgttaaacaatttttaat

SEQ ID NO: 457266 - DNA, 607 bp, Homo sapiens
gtgttgaattgtcacttctagctatcacacataaaaagaaaatttgtcattttctctaaattaaatcaaattcactaaaaaactagaaatatgcatctagctattaaataaaatttaaacatttttccttttaaatgtgctagtcttcgagtttaaatttactagcataagccttcactttataaacatttagttttcagaggaaattctgcattaactagttttttggtgttcacatctactcacaagctacattcttgtatgctttgaggaagaagagctatctgactaaataatcagaagtataatgttctaaatgtatattgtattaaggaatatataatacagaagagaaaaaattgcaaaacakgagaaattatcaaaagataaaaatgagcgtaatatgtgagaagttataatatagacaatgccgtgaaaaattggtgaaagaaaattaaaaatgggaaaaacattatgaaaaaagcacatattcattttgaaatttagactataattgatgttagatatagaatcactttttaaagaaagaaaatcaccctatatctattcaacacttatttcatgtaagtgttaaacaatttttaat

SEQ ID NO: 457267 - DNA, 500 bp, Homo sapiens
aagtccaaaatctcatctaaaacaaggcaagtcccatccacctattagcctttaacatgaaaaggaagttagttacttcctacatacagtgggggtacaggcattgggtaaatacacccattccaaacagtagtaattagcaaaaacagaaggggctacaagccccatgcaagtcctaaatccagtagggcaattattaaaacttcaagttccaaaatgatctccttcaacttcatgtctcacatctgatgcaggaggtgggctcccaaggccttggacaacttcaccctgtggctttgcagggtacaggcmcctcctggaagctttcacaggctggcattgagtgtctgtggcttttccaggtgcaaggtacaagcttttggtgtatctaccattctggggtctggaggagagtggcccagttgggactctgtgtggggactccaaccccacattccccttccacactgccttaccagaggttctccatgagggctcca

SEQ ID NO: 457268 - DNA, 534 bp, Homo sapiens
aaataacactcatagtggtcagtttacttactaagattacaaaactaagaggttctataggtgaggtttacctgaggatatttgactctagatcctgaactctttattgctatcctattatgcttcccatgacccttgaataaattgtgatgatatataatttccaaaggtaatgataataatagtagtagctcatcatttatcaaaatcttagtttggaacaaattctcacgaacagtgagattgtaatcactgtatcacatttattctcatactctcttatgatcagataaaggttcagtgcatttatcaagattcccccaactaattgtgagagagcaagaactggaattcaaatgaatgtggtgacraagattatttcactgactaatctttaatcaggctcttctgaatcaatcttttctttgtcccatccttgccagacctctgtaactcagttttaggaagtatcctggtaactcagtttagtgatgttaaaagataaactcaggcacattaaaattttaaagagtt

SEQ ID NO: 457269 - DNA, 534 bp, Homo sapiens
aaataacactcatagtggtcagtttacttactaagattacaaaactaagaggttctataggtgaggtttacctgaggatatttgactctagatcctgaactctttattgctatcctattatgcttcccatgacccttgaataaattgtgatgatatataatttccaaaggtaatgataataatagtagtagctcatcatttatcaaaatcttagtttggaacaaattctcacgaacagtgagattgtaatcactgtatcacatttattctcatactctcttatgatcagataaaggttcagtgcatttatcaagattcccccaactaattgtgagagagcaagaactggaattcaaatgaatgtggtgacaaagattatttcactgactaatctttaatcaggctcttctgaatcaatcttttcttkgtcccatccttgccagacctctgtaactcagttttaggaagtatcctggtaactcagtttagtgatgttaaaagataaactcaggcacattaaaattttaaagagtt

SEQ ID NO: 457270 - DNA, 609 bp, Homo sapiens
agaattctgctcagttattttgtggaatgtcttcatggtcatttttaggtatcatcttgactggattaacgaatacctagagaattggtaaaacactacttctgtgtgtgtctttaagggtgtttccagaggcgactggcctgctaatcagaggactgaatggggacgctttgccctcaatgtgagtgggcatcatctactcatctgaggttccaaatagaaaaaataaaagtagggaaaaaagattttctccttctctctttgatgtgagacattcctccttctgcttttgacataagaactcaaccttgggactttaggacttacaccagtagcacccccrcctgcaccgcccggtttctcaggccttcaggcttggactgagaattacccttttggctgttttggttctgaggctttcatacttggactgagccatgctagcctcatcccagggtctctagtttgcagagagaatgtccaaggacttagcctccataatcatacaaaccaattctccaataaattcccaattatatatctatgtatatttatatatgtatctatattacatgtatctctgtattattggtttgatctcgctggaga

SEQ ID NO: 457271 - DNA, 574 bp, Homo sapiens
tgcttgaaaccaggaggcggaggttgcagtgagctgagatcacgccactgcactccagcctgggcggcagagctagactccatctcaaaaaaataaatgaaataaaataaaaaataatataagtagaaaaaaatgtatttgctctgacaamtaaaatcttgaaggagtatccagcatttgttctggctggagacagagatgctcaaaaagtgtcatcggggttctttctttctctgctcttctactctttgcaggttcatcacattctcccctacttccattgggtcagcacaaacagctacaggcacctccagtttatatcattcttatagttcacgaccaatggaagacagcatctttcaaaaaagttcctttgaaaaagttccaagaaggctttacttggcctaccttgggcctagcttgtctcctactgtgatagaggagtcagaactaggactgaaaaggggtggtgtgaggtcatcctttgctaaatctcctgggatggggaaggatggttcccgagagaaatgaatgctgagcgaacatcagtatatgtcaatctcataaggattag

SEQ ID NO: 457272 - DNA, 503 bp, Homo sapiens
ttctgggtctctaatccatttttgttgaaataaaggggactggacaggatgctttctcaagccactgcctgctgctgcaagttaggatcctccaggctctcctggctgccactgcagagttagaaccacgtgcttgttttcagtaccatggagaggtgccgcattgctgagagctgcagacccgagggtcagccaatgyagagaaaaccaggagatccacaaatcttcctttaaacaagacaccaacaaagacagaagggcataaaggagagggaatatcatgagaggagagagaaagagaaattgtccatcaccactgctctcttgaacagaagctgagtgatatgctgagtgagacaaagtgaactaaataaaaggaataaattgaagtagcaacatgtcctcgacatcgtaatacagatgctgtaatcatacaaggctaatagtctgagtcactccacagccatcaaaaacaaagaattgatgggacaagccttgcggct

SEQ ID NO: 457273 - DNA, 513 bp, Homo sapiens
aaggttgattattagaaccctgattctttccagcaagacacaggttaactcactgtgagtttagcagaaaaggcatgcatatccccattgctcagctgaggacactaagrttcagggtaccaaggtcagttgtccatgaacacagctggtgaagttagagttaaggagagaaggcaagtctccatgctccactatatttcaatctgtttagagaattcccttctatctactagagacaaattccctagtcctgaaggaggaaataaaagaagataccttttttttttcttaaagagttcttccaaagagaaaaaggcatttcaaatacaaatgaacaaaagtaagctatattgccacctgcagcctctgtgagacctaatggcaggtaggaacaagagggtctgtggtttgaggtagaatcagggtcactgttcccactaccctaggcaggtgcagttgcaggtaggccagggggtaaggaggggtggtaagagctgtcacccagtctgtctg

SEQ ID NO: 457274 - DNA, 344 bp, Homo sapiens
aacacgcagtgcatcagagactccttttagattgtgggtggtttttaaaaaggtatttaagacagggttatacacactctccmtgtggttttctaaggagtaatcccccataattctggccattctctctctctctctctctctctctctctctctctctgtgtgtgtgtgtgtgtgtttcaatttaaaatacagatacattttttcttaaaagcataagaacatagtgatatgagcgctagaagaaagagaaaagggctctgcacccacagcccagcttcccaaggctcctcctctgtctacgggtttccatctatgttcctcctctcctcccctcctcacac

SEQ ID NO: 457275 - DNA, 600 bp, Homo sapiens
ttcatgagggatctgcactcatgatccaatcacctccaaccaggccccacctccaacattggggattacatttcaacaygagatttgcatggggacaaatacccaaactacgtcatttcccaaaggaagtgacagctgctttgagttttgaagtaaaaacaggagttggttttatggagttggtaatggaagggcattctgggtagagggaacagcttggacaaagggcacagatgtgatacaacatggcatgttcagagaattacaagtaattcttttgacctagacaaagtaccttccaccgcctttccctgaccaactttcttgcttgattccacacaactccagttagacacaactttactcagttctcaaaacacagcaggccctggtcagtcaccgtgtctttgtgtatgttggttctcctgcccctctctgcctgcctaaattttaaccaacgttcatgagccgatgctgcttcccttgcttcagggaccttctctgtgggctccatccctgaataagaggcatggacactccttcacactactggctcctccacagagggcagggcatgctctccctgcctcagtctctccg

SEQ ID NO: 457276 - DNA, 553 bp, Homo sapiens
cgcaatctatttcataggtaggcaataaatactgcagtagggttaagcaaaattaggctgaggaaagagcacttattttgacaatgaagacggtaatcatcagagaaaatcctgtaccctgatggcccaggggaagggggagggggccatctatactgccatggattaaggtgaggaaggaagaggttaataaagagagaagagaaaatcagccttgggaaagagagttgaagattacaatatgattaatctgtgttatttgaggaaagtggraaaaaaaggcaaagaaagaaatgaaagatttgacacctcataataggaagaataaataataaaagagattaaaagagaagaaaacaaagcacaggtgattttcctagaggaaatagtaaacacagaagtaaggaaatgcaaagagcttaaatttacagcctgtacaattttttagaacacaatggtttttagtgttcagcattttccaaagtcaggcataagatgattctaaaaaagcaataaaacactctgttttatgtactctccatctttatacttg

SEQ ID NO: 457277 - DNA, 610 bp, Homo sapiens
tgctatgttgagggcatacatgtgcacgcttgttacatgggcaaattgtatgttgctggggtttggtgtacaaatgactttgtcacccaggtaataatcatacaaaccaataggaagattttcattcttcacaccctcttcccattctcaaccttcaagtaggccctgtgcttattgttctttttgtttccargtgtactcattgtttagctctcacttataagtgagaacatgttgtatttggttttctgttcttactttaatttgcttgggattatggcctccagctgcatctatgttactgaaaaggatgtgatttcattcccttttatggctgcatagtattccatggtgtatatgcaccacactttctttatccagtccactattaatgggcatctaggttgattccatatcttttctattgtaaaaagtactgcaatgcacatatgactgcatgtgtttttatagcagaacaatttatattccgttaggtatatacccagcaatgggattgttgggttgaatggtagttctgttttaagttctttgagaagtcaccaggcatgccagactccaaaagcaattgtgacaaaaacaaaaattgaca

SEQ ID NO: 457278 - DNA, 610 bp, Homo sapiens
tgctatgttgagggcatacatgtgcacgcttgttacatgggcaaattgtatgttgctggggtttggtgtacaaatgactttgtcacccaggtaataatcatacaaaccaataggaagattttcattcttcacaccctcttcccattctcaaccttcaagtaggccctgtgcttattgttctttttgtttccaagtgtactcattgtttagctctcacttataagtgagaacatgttgtatttggttttctgttcttactttaatttgcttgggattatggcctccagctgcatctatgttactgaaaaggatgtgatttcattcccttttatggctgcatagtattccatsgtgtatatgcaccacactttctttatccagtccactattaatgggcatctaggttgattccatatcttttctattgtaaaaagtactgcaatgcacatatgactgcatgtgtttttatagcagaacaatttatattccgttaggtatatacccagcaatgggattgttgggttgaatggtagttctgttttaagttctttgagaagtcaccaggcatgccagactccaaaagcaattgtgacaaaaacaaaaattgaca

SEQ ID NO: 457279 - DNA, 634 bp, Homo sapiens
gagtaaggtgcccaccaaagttaggctcctactttcccttagagacggggagatcagggcattatctctatggtgattatatttcaaaagggtggctcccggatcctggagaaacttagtcctaggttgtaaagcttataagagtttttaaaagatttacatgtcaaaggctagaaagttaaaagttctctatgttaattrctctaagaaaaggaaggtgaggaacttaaacaacctatctaacgttaagctgagaagaatgttaaggccttttttggtcaatatgcaaaattaagtaccacaaggttaagaacattttgtgaatttgaccatgtcagtataattatcacttttttcctactactgtcaaattctgattctaaagttgcctttcattcccactctcaacattctgaaaataactaaaatcaagaaaatgtcattttaagaacaaataaaaaacacatagcttttataaatcctgaggcccaagcaaccaaggctctgcagagatttgcacttattaaagcacagtccattgcacaaataaaaataaatgcaatcacttaattgtgtcttaaggaacattacagaaaattcatttcattattcatgtaatcacttctcaaagccc

SEQ ID NO: 457280 - DNA, 634 bp, Homo sapiens
gagtaaggtgcccaccaaagttaggctcctactttcccttagagacggggagatcagggcattatctctatggtgattatatttcaaaagggtggctcccggatcctggagaaacttagtcctaggttgtaaagcttataagagtttttaaaagatttacatgtcaaaggctagaaagttaaaagttctctatgttaattgctctaagaaaaggaaggtgaggaacttaaacaacctatctaacgttaagctgagaagaatgttaaggccttttttggtcaatatgcaaaattaagtaccacaaggttaagaacattttgtgaatttgaccatgtcagtataattatcacttttttcctactactgtcaaattctgattctaaagttgcctttcattcccactctcaacattctgaaaataactaaaatcaagaaaatgtcattttaagaacaaataaaaaacacatagcttttataaatcctgaggcccaagcaaccaaggctctgcagagatttgcacttattaaagcacagtccattgcacaaataaaaataaatgcaatcacttaattgtgwcttaaggaacattacagaaaattcatttcattattcatgtaatcacttctcaaagccc

SEQ ID NO: 457281 - DNA, 526 bp, Homo sapiens
catattgttggtggtgaattagattgcattgaataatgacaagtttctgacaattataaagcagtgacattcaggaagaattttttttatttagttgcatactagttattatttcaggaataatattttaaaaatctagtttttcaactctagcaaataatgcatattcttacctgtaagggttggctttttttttttttttttttgacagcgtctcactgtgttgcccaggctgaagcgcagtggcacaatcttggctcactgcaacctcggcctcctgggttcaagmgattcttctgcctcagcctcccaagtagctggcactacaggtgcacaccaccaagcctggctaattgttttgtatctttagtggagatgggtttcaccatataggccaggctagtcttgaactccagacctcaagggatccacctgcattggcctcccaaaatgctgggattacaggcacgagccactgcgcctggcctacggtcttgctattaatattattcaaattaaaatattt

SEQ ID NO: 457282 - DNA, 522 bp, Homo sapiens
atccacttcctaaatgctaaacacaatcagtatgctagttactcttctaaaaaatcaaaatgcacagattaagagcttgctctttttctctttctcaaaactaggatacaaaaataaaaataatcaccaatcttttgtaataacttggaaactgctgattagtgttttcaaatatttcagggagggagcgaagaagagagagagagcgagagagagagagcgcatttttttgtttggggkgtgtgtgtgtgtgtgtgtgtgtgtgtgtgtgtgtgtgtgtagatcagtggttctcaaacagggattgtgatttttgccctctccatcctccccatcaagaaacatttcacaacaactggaacgattttggctcctcccaagtgagggaaggggtagaatccagagttgcagctaaacatcctacaatacaaaggacagcaccttacaacaaataattatctagccccagtatcaatagtgctgagctagatgattgacagatagatagatcgatagattgat

SEQ ID NO: 457283 - DNA, 522 bp, Homo sapiens
atccacttcctaaatgctaaacacaatcagtatgctagttactcttctaaaaaatcaaaatgcacagattaagagcttgctctttttctctttctcaaaactaggatacaaaaataaaaataatcaccaatcttttgtaataacttggaaactgctgattagtgttttcaaatatttcagggagggagcgaagaagagagagagagcgagagagagagagcgcatttttttgtttgggggrtgtgtgtgtgtgtgtgtgtgtgtgtgtgtgtgtgtgtgtagatcagtggttctcaaacagggattgtgatttttgccctctccatcctccccatcaagaaacatttcacaacaactggaacgattttggctcctcccaagtgagggaaggggtagaatccagagttgcagctaaacatcctacaatacaaaggacagcaccttacaacaaataattatctagccccagtatcaatagtgctgagctagatgattgacagatagatagatcgatagattgat

SEQ ID NO: 457284 - DNA, 522 bp, Homo sapiens
atccacttcctaaatgctaaacacaatcagtatgctagttactcttctaaaaaatcaaaatgcacagattaagagcttgctctttttctctttctcaaaactaggatacaaaaataaaaataatcaccaatcttttgtaataacttggaaactgctgattagtgttttcaaatatttcagggagggagcgaagaagagagagagagcgagagagagagagcgcatttttttgtttggggggtgtgtgtgtgtgtgtgtgtgtgtgtgtgtgtgtgtgtgtagatcagtggttctcaaacagggattgtgatttttgccctctccatcctccccatcaagaaacatttcacaacaactggaacrattttggctcctcccaagtgagggaaggggtagaatccagagttgcagctaaacatcctacaatacaaaggacagcaccttacaacaaataattatctagccccagtatcaatagtgctgagctagatgattgacagatagatagatcgatagattgat

SEQ ID NO: 457285 - DNA, 522 bp, Homo sapiens
atccacttcctaaatgctaaacacaatcagtatgctagttactcttctaaaaaatcaaaatgcacagattaagagcttgctctttttctctttctcaaaactaggatacaaaaataaaaataatcaccaatcttttgtaataacttggaaactgctgattagtgttttcaaatatttcagggagggagcgaagaagagagagagagcgagagagagagagcgcatttttttgtttggggggtgtgtgtgtgtgtgtgtgtgtgtgtgtgtgtgtgtgtgtagatcagtggttctcaaacagggattgtgatttttgccctctccatcctccccatcaagaaacatttcacaacaactggaacgattttggctcctcccaagtgagggaaggggtagaatccagagttgcagctaaacatcctacaatacaaaggacagcaccttacaacaaataattatctagccccagtrtcaatagtgctgagctagatgattgacagatagatagatcgatagattgat

SEQ ID NO: 457286 - DNA, 609 bp, Homo sapiens
acactaaatgctcagacttcattactgcacaatatattcatgtaacacaacagcactggtacccctaaatctataaaaataaaaataacctgtataattagtaaaagatgactatttttaatggaatttttattgttcttataagtttttgttttttttactcttcgagtatcattcaatttacttgtgttcagacataaattcaaccattcagaagaatatcaaggaaaagtaaacatgatggtgaagttaggaagtgattaaaatgatcaaagaaagaaataaaaaataatgacacacaaaagattcttttcaactggaaatagttacaataacctaaggaacatgggcaatggcaatagaagaatgagctactggctagcaaatgagagaaaaaagcaggaatacagaagaaatagagaaaaaggagggaagtgagtgctaggctacatatagagcagaaataatcagaattggcaacacatgggtgacatacatctctatagtttgaagctgtktcagcagagactcaagagagctcttagagaggagagaggggaactatcaactagaacatcaccatagggcaagctatgtctcagcccctcc

SEQ ID NO: 457287 - DNA, 600 bp, Homo sapiens
tattcatgggtgatatggtgaactgagaataatattgaaccttaaacagtatataactttttgcatacatatatacctatgataaagtttaatttataaattagacacaataaaatattaataacaatagtcaagtataaactagaacaattataacaatatactatattaagaattacatgaatgtcatctctctctcttcctctcagaatactgtaatatatttggactgtggttgtacacaggtaactgaagccatggaatttgaaactgyagaaaaggaaggactactgtaatctgcagaagcactaactagaacagagttcagagaattatattgtttgtaatttgaaaatatgttagtataaatagcatgatggatgtatgtgcctgaattacttttcatctataccttaggaatatttggttaatattttaaggttttgtagatcacataactaagtctgcaaccttatctttatcctacattaattttttcaggttgaatttgctcttctgccattaggaagtgaagtgaagttttctttcccgttaatattggttgactcagtgacagcattatgaaagtaacagaggtaa

SEQ ID NO: 457288 - DNA, 555 bp, Homo sapiens
actggattgattgttcttggctaatgattcctgaaacaatggatttgaatatcgcctttcttccagttcctttcttcttttgttattttcatgacgtccccaacacaagctttctttctcttttaaaactttcgaattatgtattatttataactactagaaaatattatttataaaaccatgtgagttttagtttgctgtctatcacaggataatattcattttcgaatctgtactttaaaacttcaagaaattttatatcctatgtgtgctgtctttatttggaatttttaatgatgytttagaattactcattttgctacattttcaaacttgcaacaatttctaaataaataaccagcaagcctcaaattaatttttttcactggaaataaggttcaaaatagtgccaggaagcatttgcactttatagacataaaagcatgagtatatgtgtgtgtgtttgtgtgtgtgtttaatcaaggactgacttcattagtgaaggacaagttaatgactgaaaaaataacaatgtcctttcaattttgacattct

SEQ ID NO: 457289 - DNA, 576 bp, Homo sapiens
ttggactgtggacttttgagttaatgctcaaatgagttgagactttggggaactattgggaaggcacarttggttttgaaatgtgaagatatgagttttgggaagggccaggtgtgaaatgataagatttggctctgtgtcctcacccaaatctcatcttgtagcccataattctcacatgttgtaggaggaacctggtgagagatgattgaatcatggggacaggtctttcctgtgctgttcttgtgattatgaatggttcttccaagatctgatagttttaaaaacaagagtttctctctttgcctgctgccatctctctttttctcagcacaatctctctctttgcctgctgccatctatgtaatatgtgacttgctcctcgtctttggccatgattgtgaggcctccccagccatgtggaactgtaagtccaataaaactctttcttttgtaaactgcccagtctcagttatgacctcatcagcagcatgaaaatggactaatagagtcattaaaaaagatttctgggggatgctcaagacatttttctttttgactttctggagggccaaa

SEQ ID NO: 457290 - DNA, 576 bp, Homo sapiens
ttggactgtggacttttgagttaatgctcaaatgagttgagactttggggaactattgggaaggcacaattggttttgaaatgtgaagatatgagttttgggaagggccaggtgtgaaatgataagatttggctctgtgtcctcacccaaatctcatcttgtagcccataattctcacatgttgtaggaggaacctggtgagagatgattgaatcatggggacaggtctttcctgtgctgttcttgtgattatgaatggttcttccaagatctgatagttttaaaaacaagagtttctctctttgcctgctgccatctctctttttctcagcacaatctctctctttgcctgctgccatctatgtaatatgtgacttgctcctcgtctttggccatgattgtgagscctccccagccatgtggaactgtaagtccaataaaactctttcttttgtaaactgcccagtctcagttatgacctcatcagcagcatgaaaatggactaatagagtcattaaaaaagatttctgggggatgctcaagacatttttctttttgactttctggagggccaaa

SEQ ID NO: 457291 - DNA, 602 bp, Homo sapiens
tcccatcagaccttctggaaatttccctgatttcttcagtcacagctccatatacttgaatgcaatctgtaaagaacacagccttgcttgaataactaatggaaartactcttccttggctaggtttacttaatcagtcttggcattagactacatcagtggtgaaaaaaacactgctcttgggcaaaatctgacctgccacctgtttacaagttaaagttttgttgcaacacagccaccacacttttaatgtattgtcttgtgctacttcacactacaggggcatatctgagtagttgagacagagaccaagtggccctcaaatcccaaaacttgctctctgtccctttatggaaaaagtttcctggccccagtattacataactagaatcagaacacttaggcctgaaccactttgcttcctttcccaacaggctttcaaaatttcgttcacacacatccctttatgtaatgcttcaaaagtagaaaaagggtaagttagccagatatgtctgaaagttgagaaacatcctccacatttttgccagagccttgaaaaaaatattttgaattagtggcaaagaaggataggtaatttcttt

SEQ ID NO: 457292 - DNA, 602 bp, Homo sapiens
tcccatcagaccttctggaaatttccctgatttcttcagtcacagctccatatacttgaatgcaatctgtaaagaacacagccttgcttgaataactaatggaaagtactcttccttggctaggtttacttaatcagtcttggcattagactacatcagtggtgaaaaaaacactgctcttgggcaaaatctgacctgccacctgtttacaagttaaagttttgttgcaacacagccaccacacttttaatgtattgtcttgtgctacttcacactacaggggcatatctgagtagttgagacagagaccaagtggccctcaaatcccaaaacttgytctctgtccctttatggaaaaagtttcctggccccagtattacataactagaatcagaacacttaggcctgaaccactttgcttcctttcccaacaggctttcaaaatttcgttcacacacatccctttatgtaatgcttcaaaagtagaaaaagggtaagttagccagatatgtctgaaagttgagaaacatcctccacatttttgccagagccttgaaaaaaatattttgaattagtggcaaagaaggataggtaatttcttt

SEQ ID NO: 457293 - DNA, 593 bp, Homo sapiens
gatgaaacaatttttcattcctaggcattatgcgccagtacgccgggtgaatcctggagtagtttaatggaaagtagaaagaagcaattatttaaaacatgtaatctgacatgctaagcattttgatgaagttataattatttaacagataaatagcgtatatatcagtacatattttgtaagcaatgcaataaaccactaaaaaccaagattaaaagaaatatgagcactttggttcaaattcaactactaagtgttataaattgtgtwtactgattttttgcttttatcctaaaggtagacaggtatattttcccttatagaaataattctcatcttgtttattccactttgttttagctgatgtactcttcctcgtgggtgcaaagctagaaaaccttttccagcttcccttgtcatgaagtgtcttcatgtgactaatctctagccaacagaatgcagaaaggggtgggatttgccacttctagtcctgccccattaaacctttcaccagtccttcaccatgctgactggtggagaattcatgctctcagcagaatatacatggaacacttcaacaatataatttgagt

SEQ ID NO: 457294 - DNA, 593 bp, Homo sapiens
gatgaaacaatttttcattcctaggcattatgcgccagtacgccgggtgaatcctggagtagtttaatggaaagtagaaagaagcaattatttaaaacatgtaatctgacatgctaagcattttgatgaagttataattatttaacagataaatagcgtatatatcagtacatattttgtaagcaatgcaataaaccactaaaaaccaagattaaaagaaatatgagcactttggttcaaattcaactactaagtgttataaattgtgtttactgattttttgcttttatcctaaaggtagacaggtatattttcccttatagaaataattctcatcttgtttattccactttgttttagctgatgtactcttcctcgtgggtgcaaagctagaaaaccttttccagcttcccttgtcatgaagtgtctycatgtgactaatctctagccaacagaatgcagaaaggggtgggatttgccacttctagtcctgccccattaaacctttcaccagtccttcaccatgctgactggtggagaattcatgctctcagcagaatatacatggaacacttcaacaatataatttgagt

SEQ ID NO: 457295 - DNA, 617 bp, Homo sapiens
ctggttctgcatcacttgagaaaatatctgccagtgtgtggatttcattggtacatgtcagtcttctaaagtgtcatgtcatttactgtttatataaatcatatgccctttttcaaaatgctttgtaatttattgcatgtctaatgcaatgatttattgtatccaatgcatgtrgatgactgtacataaacatagctggtaaattattatctcaaggataattaaagatgttctcatttgttctaggttatttggctttgcagagtttgtagaataggaaccacctgctgccaaagggccaaaccaataaattctccaggagacagttttagaactgacagagtgtttgtgaattacttacaaattaagatattgactcaaattaggatattgttgtcttaaatctaagacaagaaataaagtaattttttaaaattaatggcagtatttttaattggtagatacttagaaaaatctaaaatcccatagattaggaggtcagaaaagcctaacttaactctcttttaatcccaaattctacccttcttcaaggacaaggtagaatttaagcggtgactttaaatggaaaaaggcccataatacacttgttattaaag

SEQ ID NO: 457296 - DNA, 617 bp, Homo sapiens
ctggttctgcatcacttgagaaaatatctgccagtgtgtggatttcattggtacatgtcagtcttctaaagtgtcatgtcatttactgtttatataaatcatatgccctttttcaaaatgctttgtaatttattgcatgtctaatgcaatgatttattgtatccaatgcatgtggatgactgtacataaacatagctggtaaattattatctcaaggataattaaagatgttctcatttgttctaggttatttggctttgcagagtttgtagaataggaaccacctgctgccaaagggccaaaccaataaattytccaggagacagttttagaactgacagagtgtttgtgaattacttacaaattaagatattgactcaaattaggatattgttgtcttaaatctaagacaagaaataaagtaattttttaaaattaatggcagtatttttaattggtagatacttagaaaaatctaaaatcccatagattaggaggtcagaaaagcctaacttaactctcttttaatcccaaattctacccttcttcaaggacaaggtagaatttaagcggtgactttaaatggaaaaaggcccataatacacttgttattaaag

SEQ ID NO: 457297 - DNA, 626 bp, Homo sapiens
caaaattgaggttatactgattagtattaacatgtgcatgtgtatgaattaatgtttgtcaagcttttctatatattctaaaaaatgtactgagaaaagaatattatagggattacattatcaatgaactcacataaggagatttacaaaagatccataaaagcctcatatttttctcatatggctgttgtaacaaatcaactaaactggtaatttcttttgatgaacaaagtaaattatattcagtgtagaaaatgtggcacttccagaaaagcataaagaaggaaattaaaatggcccaccacaatccagatkgagtaattaaggtatattattaatattttcaaaagctatgttttaaggtgaccctatccccaaatgctcatgaacatctgaaataaatcagtttgccaatctgataagtaaacttttcctttttctcatttgatttttagtaaattttaatttttaatatagatgtaatgcttttttgttatgtgccttacctccctccaccttttttatttctttgagtgatgctgaaaacacataccacagccataagctggtatgtagattaaattattttctggcaatagattatttagtaaaaggaaacatctgtt

SEQ ID NO: 457298 - DNA, 553 bp, Homo sapiens
aacatgaacattttaagaactctgagatgctatttaataaatcatcttttttcttttttttcttaatgcttagtgtcactatacttaaaagtgccatgacacagacacacatttaatayctttctcatcattttaatctcctaaataacaaatgctgggggcagtacactttggaaaatgccatctcagtcgaggtaataatttccctgggcagggatgaccatcatctgtagggaagcaagtgcatgagccttgggtggcagtaagaatcaaatcatgaaggacatagatgggctcctgaataaagcagaatgacagattggtatcatgaagagacagagggaaaacccacagaagctgttctggcctcaggcatggctgaaaaagagtaaaaaaatacatttttaaaaaatcataattatagtttcttcaacaggaatttatatcaagtactaattgtattacatatatgaatgtattcctataaacaattataattatctatacttttcagatgcaaaactgagagacagggagattaagtacagataat

SEQ ID NO: 457299 - DNA, 544 bp, Homo sapiens
agggaacaaaaataatttgtgtgtttctgaaattaaattcagatgaatcaacagcatatatggtttcaaatgagtatgcctcattgtctattttatccctcatgtgttaaagcaaagtaacctaaaagctccagtgacattgttgaaggctaatagattttatgagttgttgtggatatgcaactagattgagctaaaaatgcccaactataatattgagctttatcaaacttaattatgtgactaatctgactagggatttactccccaattttacataattaaatagccatcactcttgaaactgtaataggctaaccacccccagcacagaatataagaaatacactttcaaggtaagccctacacaagctcccaacatctcagccacccagygggctgatttttggattcacgaacaaaaaactggattttcctctgaaaaaatccagtttctcagaggaaaattgcattacacatgtcattttgaaggtgtcttttgatcttccctttatttctctacataagcagtcttgctttatca

SEQ ID NO: 457300 - DNA, 622 bp, Homo sapiens
tatttaatttaaaattctaaaaaaatctgttaatctgaagacattaaagtataaaaaggaaagaaaagtcagaaacagcgagaagacatttgtataacttataactgacagaagataggtatccaaagttcactacaaacagacaaactaaaacttcaatagtctaataagaataaaagcaattaatccagtcaaataaatgtgtaaaagtcttacaaaaactcttctcaaaagagaaaatgcaaacttctaataacatgggacaaaatgctgatatttattagtattcagggaatgctgatatttattagtattcagagaatgtaattactctgattaagattttttttaaataactatcttattggcaaaaattttgcagtctgaaaattccaggtgtttccaagattttaaaatagctagaacagttatataatgtcagtagggctagaaatagrtgatagcatttgaaaaactgatttgacataattaagaaaaatttaatttttttaccctctatgatctagcaagtccaattgtatgcttacatcctgaagaaactcttgcttatatgtactaggaagtatgcaatattcatcaacatggtaaattctaatgagtt

SEQ ID NO: 457301 - DNA, 588 bp, Homo sapiens
accatatttttaaatatttttacacaattttgccaaataatataaaatataaatgtatgctaaattaacctagttctcttggtgttttctttttataaagtctatattttatctcaagggaatattactagatgtggcttaattgcttataatgataacgataattggatatattgttcttgattaaattttcaatgatcttwgtatttaataatctaatgtcaattattttattattgagtattgttttacagctcctgaaatataatataattagaatcacaatgattaatgtggagtattaaccatatcactgataattaatctcaatcacaaatgcaaaaacatattttaaaatctattcagtggaaagatctgaagttctagcagtcctttcagaagaatcataacacgatatggaaatattttttgtcccacatacaaacacaaaaggaaaaagaaggtctatttacacggttcttaagagtatgtaccctaaaagaaaaaaatcaaccagaataatctttactttagaatttgccagagaacaattgaattgcatggtatttttaatattgaattcaaaat

SEQ ID NO: 457302 - DNA, 588 bp, Homo sapiens
accatatttttaaatatttttacacaattttgccaaataatataaaatataaatgtatgctaaattaacctagttctcttggtgttttctttttataaagtctatattttatctcaagggaatattactagatgtggcttaattgcttataatgataacgataattggatatattgttcttgattaaattttcaatgatcttagtatttaataatctaatgtcaattattttattattgagtattgttttacagctcctgaaatataatataattagaatcacaatgattaatgtggagtattaaccatatcactgataattaatctcaatcacaaatgcaaaaacatattttaaaatctattcagtggaaagatctgaagttctagcagtcctttcagaagaatcataacacgatatggaaatattttttrtcccacatacaaacacaaaaggaaaaagaaggtctatttacacggttcttaagagtatgtaccctaaaagaaaaaaatcaaccagaataatctttactttagaatttgccagagaacaattgaattgcatggtatttttaatattgaattcaaaat

SEQ ID NO: 457303 - DNA, 412 bp, Homo sapiens
accttttgtgtctttgttttacatagacaatgaacaacaggaaaatgttggcaatggtgaaagatgttatgtgtggtggatggtggtggtggtgtgtaacatgagactttttgggggtggggcggggaatatagcattttccaattaaggaatcatgggaagcattcatagaacactgctattggtaaaaggcaaaatgtatttggggtattttaatcaccctgaagaaatatgtattttragttgttacttttttttttcaatctttacattttaatttttctcttaaatttttttttcttttttttaaattattattatactttaagttttagggtacatgtgcacaatgtgcaggttagttacatatgtatacatgtgccatgctggtgtgctgcacccactaactcat

SEQ ID NO: 457304 - DNA, 618 bp, Homo sapiens
actccacaaatgttttaagttaaaatccttaagtaaaggacaaaattattcttacaaccttatttttacaacctttttgttttattttagttgatactgtatttttgtmattgtcagattttagagataaataaaatttctctccatctctaaactaacccataaacttacccatcttgtatatttcatctccacttctccctcaaggaggagcagggctggtataactgattaaattctcaagccttacattcatcatagtcctattgggtagagttttttaaaaggataatatgtagggcttccttaaatgtggcccttttgaatgtatcttcttctctcacgcaattttgtccaacaggcttagtgacaggcacactggtctgaaaatcaatgcaaggtgttactccttgtcctctatgggttggcctttccacacaaaggagtggcaagaccaagatgtttaggttgagcctggagaatggaggtaactactaagcagtattttagttacaaaactaaaacatgtgaagagagacagggagtaggtcctatgaaaaatgagaaagtaattagaataaagtgattagaggatttttaggaagttctgctgtgtgt

SEQ ID NO: 457305 - DNA, 618 bp, Homo sapiens
actccacaaatgttttaagttaaaatccttaagtaaaggacaaaattattcttacaaccttatttttacaacctttttgttttattttagttgatactgtatttttgtcattgtcrgattttagagataaataaaatttctctccatctctaaactaacccataaacttacccatcttgtatatttcatctccacttctccctcaaggaggagcagggctggtataactgattaaattctcaagccttacattcatcatagtcctattgggtagagttttttaaaaggataatatgtagggcttccttaaatgtggcccttttgaatgtatcttcttctctcacgcaattttgtccaacaggcttagtgacaggcacactggtctgaaaatcaatgcaaggtgttactccttgtcctctatgggttggcctttccacacaaaggagtggcaagaccaagatgtttaggttgagcctggagaatggaggtaactactaagcagtattttagttacaaaactaaaacatgtgaagagagacagggagtaggtcctatgaaaaatgagaaagtaattagaataaagtgattagaggatttttaggaagttctgctgtgtgt

SEQ ID NO: 457306 - DNA, 618 bp, Homo sapiens
actccacaaatgttttaagttaaaatccttaagtaaaggacaaaattattcttacaaccttatttttacaacctttttgttttattttagttgatactgtatttttgtcattgtcagattttagagataaataaaatttctctccatctctaaactaacccataaacttacccatcttgtatatttcatctccacttctccctcaaggaggagcagggctggtataactgattaaatyctcaagccttacattcatcatagtcctattgggtagagttttttaaaaggataatatgtagggcttccttaaatgtggcccttttgaatgtatcttcttctctcacgcaattttgtccaacaggcttagtgacaggcacactggtctgaaaatcaatgcaaggtgttactccttgtcctctatgggttggcctttccacacaaaggagtggcaagaccaagatgtttaggttgagcctggagaatggaggtaactactaagcagtattttagttacaaaactaaaacatgtgaagagagacagggagtaggtcctatgaaaaatgagaaagtaattagaataaagtgattagaggatttttaggaagttctgctgtgtgt

SEQ ID NO: 457307 - DNA, 618 bp, Homo sapiens
actccacaaatgttttaagttaaaatccttaagtaaaggacaaaattattcttacaaccttatttttacaacctttttgttttattttagttgatactgtatttttgtcattgtcagattttagagataaataaaatttctctccatctctaaactaacccataaacttacccatcttgtatatttcatctccacttctccctcaaggaggagcagggctggtataactgattaaattctcaagccttacattcatcatagtcctattgggtagagttttttaaaaggataatatgtagggcttccttaaatgtggcccttttgaatgtatcttcttctctcacgcaattttgtccaacaggcttagtgacaggcacactggtctgaaaatcaatgcaaggtgttactccttgtcctctatgggktggcctttccacacaaaggagtggcaagaccaagatgtttaggttgagcctggagaatggaggtaactactaagcagtattttagttacaaaactaaaacatgtgaagagagacagggagtaggtcctatgaaaaatgagaaagtaattagaataaagtgattagaggatttttaggaagttctgctgtgtgt

SEQ ID NO: 457308 - DNA, 608 bp, Homo sapiens
aggtcttactttgtcatttacttagaaggaagaccaccaaagaaaatccaaggtgtgactacatgcagtgattctataaataggccctttttgggaatcagctttaatattggcttcaaaatcgtgttcaaagctgtctcaaccacacacatcgtctacatagattgctttggttctctgatttctgatttagacactgactccttggagattgcagagaagtcaagggataaaagtgaaaatgccataagactgattcaactgtaagagtgctgggaaggtagcaggtttgagtatactctctgtactcagatcctttctggatggaatcctggctcccttcactttgtactttyagcattaggcaattcacttttctgagccttggtttcctcatctgtaaaacagagataagtctaacctcatagagtttctgtgtggagtaaatgaaatactttgtataaagtgtcctgcacacagtaaattaaatgccaattcccttccctaacatccccattcctgggaacatatttttacccaatactagttcaaagtttccagcaagagttaggtaatgacaaaaaggaggtagaaaggaaggtatgtag

SEQ ID NO: 457309 - DNA, 608 bp, Homo sapiens
aggtcttactttgtcatttacttagaaggaagaccaccaaagaaaatccaaggtgtgactacatgcagtgattctataaataggccctttttgggaatcagctttaatattggcttcaaaatcgtgttcaaagctgtctcaaccacacacatcgtctacatagattgctttggttctctgatttctgatttagacactgactccttggagattgcagagaagtcaagggataaaagtgaaaatgccataagactgattcaactgtaagagtgctgggaaggtagcaggtttgagtatactctctgtactcagatcctttctggatggaatcctggctcccttcactttgtacttttagcattaggcaattcacttttctgagccttggtttcctcatctgtaaaayagagataagtctaacctcatagagtttctgtgtggagtaaatgaaatactttgtataaagtgtcctgcacacagtaaattaaatgccaattcccttccctaacatccccattcctgggaacatatttttacccaatactagttcaaagtttccagcaagagttaggtaatgacaaaaaggaggtagaaaggaaggtatgtag

SEQ ID NO: 457310 - DNA, 580 bp, Homo sapiens
tcaggaagaatagctaatggatgatgggcttaatacctaggtgatgggggttgatctgtacagcaagccacaatggcaaacatttacctatgtaacaaccctgtacatcctgcacatgtaccctggaacttaaaataaaagttgaaaaaaagtctcccagcaaaggaaagcccaggactgaatggtttcattgctgaattctatcaaacttttttttttttttccaggatggagtcttgctctgtcaccaaggctggagtgcagtggtgcaatcttggctcactgcaacctccgcctcccgggttcaagcaattatcctgcctcagcctcycaagtagctgggattacaggtgcccaccaccacacctgtctaatttttgtatttttagtagagacggggtttcaccatattggccaggctggtcttgaactcctgaccttgtgatatgcccacctcagcctcccaaagtgatgggattacaggcatgagccactgtgcctggcctatcaaacttttaaaagagaactaacaccaattcttttccaactatttttgaaaattgaagtggaggaaattttt

SEQ ID NO: 457311 - DNA, 633 bp, Homo sapiens
ctccaggtaattggaatgggcaaaggcttttgagtaatattccacaagcccagttaaccaaagcaaaaatgaacaaatgtgatcacaatgagttaaaaagcttctgcacagcaaaggaaacaatcagtgaagtcaaaaaggcaacccacagaactggagaaaatctttgtcaactacctatctgaaaaggcgttaataaccagaatatataaggagctcaaacaattcagtaggaaaaaaatctaataatctgattagaaaatgaggaaaagatctgaatacatattttcaaaagacatacaaatgacaaacaggtatatgaaaaggtgctcaacatcactgatcatcagagaaatgcatttgaaaactacaaagggatataatctcatgtcaattaaaatggcttatatccaaaagacaggcaatgacaaatgctagcaaggatatggagaaaagggaacscttgtacactgttggtgggaatgtatgttagtacagcctctatggagaacagtttggaggtttccacaaagtagcaatacagctataatattgtccagcaattctcctgctaggtatatacccccaaagaaaggaaatcagtatattgaagagatatcttcactcctatgt

SEQ ID NO: 457312 - DNA, 724 bp, Homo sapiens
aaattgactaatgcaactgatgaccattaaattccaagcaaggagactgatatagttaaatagtactgggcatgtttaatagtgcactttactatatgagttatagatcagtcactgctagtttggtgmgaggatggaacatggcagcagattgacaacatttccctcacagagatattctccctccatttatacacatggggagtttgtgttataactgaaagacagtaaatagtctgactgaggtagatgttacaagtgggaaagaaagtagcctttgtttcctacctgaccatatgggttagatttgagctcttactgtcaaatgacagaaggccaagtgaaaattaattagatcgtctgcatatctaaaaagataaaattgtacagaatggtttgaaataactcctactaatcttgaaactcactccgaaggataattccttttacctgttataatattctatatttcaaaagaatacatttatactctcttggtttatgaattttaggcattaccaactgaattctagttatctgaaagtttagcttacctattgaactaatctcttctcctccttcttttcaatatgaatgtattcatctgttttcatattgctataaagaactgctcaagactcagtaatttataaagacaaaaggtttagctgactcatagttcagcaaggctggggaaacctcagtcttacaataatggcagaaa

SEQ ID NO: 457313 - DNA, 604 bp, Homo sapiens
actgtaataaataaatctccgttctttatcaattatccaatctcaggtattctgcaatagccacacaaaagagactaagatatactctcaaatagttagatggtaacatgaagtacagggatagtgtctctctttcactctacttgattgctgagcacatagcaagaattaagtaaacaaacatgcctaacragattgagtatatgatatatattttaaaattcagaaactattcataaaatggcactcataaaggtattattcaatctcaaaggtacgtatacaagtatggttcattaatacttagtccaagatccaattaaaatctaaactgacaaaaatgtacatagattactgaaaatttgttgcaatcatacattgaaatattagatgacaattttaaaaacagaaacttcaatggtttaacttacaacaaattttctaaaattcctaaaatttgtatagtcttgaaaactgcctctatttcactaaacagtttagcaaaaaagctaataaaatatatgtattctatttatgagtaaggtaatttttttaaaattacagagtaaaattttggaaaagaaaaaaaatattttgaaggctc

SEQ ID NO: 457314 - DNA, 601 bp, Homo sapiens
agcaatatttctagcactgtatattcagaaaaaacacatctgcatgtattttaagaatccatcagggtgctagcctccctgtagtataattgctgtaagtataacttaggttggaaatctttcagggatagcatcataacacatcccatgatttcatgcattgcatggctggcatcgttcccggtggagcaggagagacacacacactaacatggctgtcaaaacaggttaagatgaatcatctgaaaatattttaagactagtattagtgaggacagtcttccaattttcatttaagtgttttgttatatcacttgatgttgaatgctgcctgttcaggaacatactacctgtaaattctatttttcattttatcaaaaaagcttaactttggagtagacratggtaagctgaaaaggatactgggaaaactagaaacttctaaagactatattttaaatgagatgactgaaattatccagagaatattttttatcatcagtaaatatacttttcaccctttcctcttgattcacataaatttaataaaaagggtttaaaaaatgtgtgctggcctgcattttattatgtaataacattt

SEQ ID NO: 457315 - DNA, 574 bp, Homo sapiens
ttctgttgtcaaataagtgtagataaccttgcatactaaacttccttgattagtcacrgtattattgtagaacttgtttctgtaagaatatgtaagaaactggcaaccacagttgactggggatgatagaggagggaaacttatttttgacagtctacctctttgtagacgtttttgttttagatttattttgaaataaggtacaaaagatagtttagagttcccatgtaccctgtatccagtttctcataatcctaatgtcttaaataactatagtcatgtaaagttatgaaaggctatgagagaaatatagcaataaggaaacttgttgaactccatttagtattttgtaagtttgagtacataatatactcagcgttttgtaaattcatttgagtattcaaactttcttttgaagtacccatgataattatcttgtaggacagagaagtactagtctagatacagatttatttgatggtcttgtggaagcctagaaatgtgcatgtcttggcattttctagggcctttaaattatcttgcaattataaacattccaacaaatttctacact

SEQ ID NO: 457316 - DNA, 582 bp, Homo sapiens
tgaatttaatcaggcacaagaagagtgtgttcaaagttataattatagcaggggaatacataactcttagtaacagtgtgagaagtttcctgaktacatttaaaaattacatatatcaagaaaagtcaaaaatacagaatcaagttatactagaggaaaacattgctcttctagacttttaagataaaacctttcagcatcaggccacaacaatagttagaactagaggaaaaaaattacaggagttggtaaaaaagttgaaggagagagttaccatcttgggcacctctagggagaaaaagttgaaagcagtgagacacagcaaaaattgatcttctgagatatgaatctgagaagtttaaaaaaaaacagtttacagaattataaattaaaacttcttatagtttcattaacaataaatcaatgccttaagaaaaccttgttttaacatagtgaccaatcttagaaagactataatagtctttctagaattataaataattctctttttgttatagccaagtttatcacatacaaatatttttttaaaaaactatctttccacaaaccttatcctgactt

SEQ ID NO: 457317 - DNA, 559 bp, Homo sapiens
ttcagaaaatctggtgtgcctttgaacttttccagggcccacaaagacaattgacagacaaatgcaaatgaaccaactctcaaatgacataaaagtccaacaactattttgctttctaacagggcaccccaaccaaacacaaaaacacaatggtttattccgatgaaaagcctaaacagagggaaaaaaagttmccagttgtacatggcaaaattacttactccatcttgaagcccatcaactccccagatactgctttttcttgtatcaactaagtgttggaggcagctgatgctacaaagtggagaggagggaaaatccctgagacagttcttggcagctggtggaacatccttggaatcccagccatgaggtcagctagtcatgagcagctggcactcacaagcaattattgctctgtctatagtgtgaatgggtaagccctggtgcaatgctgcagtcaattgctctgactgttggaaagcaggcaggctagaccacatagggctcacagccccatgttgggtaccataaattataaccaaacccaggctcagct

SEQ ID NO: 457318 - DNA, 554 bp, Homo sapiens
tctactccagtttttccccacccaacgctggtgctatctcgcctcctccagatatagtccagagggtgtctaagaggagagaggaaggagaggtgggaagaaaagatcgccattgagggcatttgttgcaacaaattgagagagtgagggatgatggkttcagagaagccctattgattatgctcttgaaaattttggtagtttggggtcaaagttatgctatgtatgctagaaaaccttgtggaaatttgatgtttgataaaaatatccaggcaatggtaatgattatgatcttaaaatggagtttagaggcaaaggcaagatcaaaaggtaatcaatctaaattccataatgaccatgtcagaaaggcttaaagagtggatagaaattagaatagggaccagtagtagcgttatgagaatgggttaataggaccaagtctgaagtcagcagatattccaaactactttggccttcatactcaaccgctttgtctctgtggacggcccttgaatagcccacagtctgttctctatggattgtgacacttagtg

SEQ ID NO: 457319 - DNA, 554 bp, Homo sapiens
tctactccagtttttccccacccaacgctggtgctatctcgcctcctccagatatagtccagagggtgtctaagaggagagaggaaggagaggtgggaagaaaagatcgccattgagggcatttgttgcaacaaattgagagagtgagggatgatggtytcagagaagccctattgattatgctcttgaaaattttggtagtttggggtcaaagttatgctatgtatgctagaaaaccttgtggaaatttgatgtttgataaaaatatccaggcaatggtaatgattatgatcttaaaatggagtttagaggcaaaggcaagatcaaaaggtaatcaatctaaattccataatgaccatgtcagaaaggcttaaagagtggatagaaattagaatagggaccagtagtagcgttatgagaatgggttaataggaccaagtctgaagtcagcagatattccaaactactttggccttcatactcaaccgctttgtctctgtggacggcccttgaatagcccacagtctgttctctatggattgtgacacttagtg

SEQ ID NO: 457320 - DNA, 525 bp, Homo sapiens
ttgggccctttgtgtcactgtaaagaaataactgagactgagaaatttattttaaagttatttaaaataaattaagtttatcttaattggctcatgcttctgcagtctgtacaggaagcaagttgctggcatttgcttctggtaargcctcaggaagcttatgatcatggcagaaggtgaagggggagctggtgtgtcacatggcaggagctggagcaagagagagtgtgggaaggtgccaggatctattttgttttctttttgtcagttttattttttaacaatattgttttttgttttattaacttttattttaggttcaggggtgcatgtgcaggtttgttatataggtaaattgtgggtcatgggggttcagtgtacagattattttgtcaccaaggtaataagcatagtacccaatgggcaattttttgatcctcactctcctcccaccctccaccttcaagtaagccctggtgtctcttcctttttgtgtgtccacatgtactcaaagtttagctccca

SEQ ID NO: 457321 - DNA, 525 bp, Homo sapiens
ttgggccctttgtgtcactgtaaagaaataactgagactgagaaatttattttaaagttatttaaaataaattaagtttatcttaattggctcatgcttctgcagtctgtacaggaagcaagttgctggcatttgcttctggtaaggcctcaggaagcttatgatcatggcagaaggtgaagggggagctggtgtgtcacatggcaggagctggagcaagagagagtgtgggaaggtgccaggatctattttgttttctttttgtcagttttattttttaacaatattgttttttgttttattaacttttattttargttcaggggtgcatgtgcaggtttgttatataggtaaattgtgggtcatgggggttcagtgtacagattattttgtcaccaaggtaataagcatagtacccaatgggcaattttttgatcctcactctcctcccaccctccaccttcaagtaagccctggtgtctcttcctttttgtgtgtccacatgtactcaaagtttagctccca

SEQ ID NO: 457322 - DNA, 629 bp, Homo sapiens
aaattacatacaagaaagtgcccatcacagggtttgacacataatacagaatcagaaaatatgtctccctttttgccccttcttttctgcatttctttctttttgcttcttctttctttgattattttgatggccgagggagatataaactagctacgactttttacaagtgagctgttgaatttttgtctaccaaaatccatccattgaaataacagtggcaggttctttcaaattgttcagctcattttcacccttgtgattgttgacagtaaattcttgaaactgaaatgggtttcctgaccacacttcccctccttgtcacacatggaggcccttgtttgctgtgagaacttattcctaagtctattactgagagggctgatgctaatgtagaaaaacaaccataggctattttctttggaaataraagaaggtgtgtggtagtgaagcttccaaagacctggggacttagtatgtattcatagagtcttgacttgagctcttatacttcacagggggcggggtggggggctctgtgtaaccccgtggtgtaggactgagtgattctctcagaccgagaaatgggcaaccaatagaactgaatgctgcagagagaactgaaattg

SEQ ID NO: 457323 - DNA, 632 bp, Homo sapiens
tatggaatatgagatcataataaaatatttactgttttatgccgctaaactgtagggtggcttgtgttcagcagtagattattagaatggtgggtaaagctggaatttgcacaacatcggtagctacacattgtacacttcttgttctacatttgtagaatttgtcaaagaaaggtatttctagttactagggatgggagttgtaaaagaaagtaaaaaactttaggatgctttaaatttattatgccaagggggaagttaagccctagagacttggtcacgtagcatgtttgcaattctgcttcttagattatagcttaacttttttcctcatttttctcattctgtaaatgactaggagagaccagagaccagacctcttccccttccaatcactgatctttgytatagattacctgccccctttattgtcctgaacctaagtcagaccagacggcaaaaaagacctcatgactgctacgtcttcagtgtggaatattaaatatacctttcttctaaaaaagaccccttaactatgaaatcattttagctgtacattaaaccttgcagagaaagatgtcaaaattctgtcaaggttctctaaactttgtctataaaaataattacaaact

SEQ ID NO: 457324 - DNA, 632 bp, Homo sapiens
tatggaatatgagatcataataaaatatttactgttttatgccgctaaactgtagggtggcttgtgttcagcagtagattattagaatggtgggtaaagctggaatttgcacaacatcggtagctacacattgtacacttcttgttctacatttgtagaatttgtcaaagaaaggtatttctagttactagggatgggagttgtaaaagaaagtaaaaaactttaggatgctttaaatttattatgccaagggggaagttaagccctagagacttggtcacgtagcatgtttgcaattctgcttcttagattatagcttaacttttttcctcatttttctcattctgtaaatgactaggagagaccagagaccagacctcttccccttccaatcactgatctttgttatagattacctgccccctttattgtcctgaacctaagtcagaccagacggcaaaaaagacctcatgactrctacgtcttcagtgtggaatattaaatatacctttcttctaaaaaagaccccttaactatgaaatcattttagctgtacattaaaccttgcagagaaagatgtcaaaattctgtcaaggttctctaaactttgtctataaaaataattacaaact

SEQ ID NO: 457325 - DNA, 569 bp, Homo sapiens
ttactgttttatgccgctaaactgtagggtggcttgtgttcagcagtagattattagaatggtgggtaaagctggaatttgcacaacatcggtagctacacattgtacacttcttgttctacatttgtagaatttgtcaaagaaaggtatttctagttactagggatgggagttgtaaaagaaagtaaaaaactttaggatgctttaaatttattatgccaagggggaagttaagccctagagacttggtcacgtagcatgtttgcaattctgcttcttagattatagcttaacttttttcctcatttttctcattctgtaaatgactaggagagaccagagaccagacctcttccccttccaatcactgatctttgttatagattacctgccccctttattgtcctgaacctaagtcagaccagacggcaaaaaagacctcatgactgctacgtcttcagtgtggaatattaaatatacctttcttctaaaaaagaccccttaactatgaaatcattttarctgtacattaaaccttgcagagaaagatgtcaaaattctgtcaaggt

SEQ ID NO: 457326 - DNA, 592 bp, Homo sapiens
ataggtttatatttaaaggacaaattctgaacaaagttcttatcgtgagtactctatgagtcacagtttcataaggtgagtcaaatgccaaagccctggtctccatactgcacttcaatgctttttaggatcccaatgaagctcagaggaaattattcactgttaatatttttattcttcttggtgttctctaaagtgctattttaatctccaattcacagaggaaacctcaacataaagaaaaacaaagcctgtggcataagagaagctgtggacatttcccttatgatcacgctgagatccaaagctgggaagtcagtcccagcagccaaaggtgggcagagtcttaagacagtatgaatgagatggggctacagctgtacttctaakacttcagttgagagacagaagagaaaggccttgggcccttttacagatattactcctgtgcagaaaaagcaagtggcagtacatgacaaatggaactaatctaaagctcagaggatgaaatcattttaggcctgaaatggcagagattaaactaagagcattccgggactccgtacatctctactcatatatagatttatgg

SEQ ID NO: 457327 - DNA, 592 bp, Homo sapiens
ataggtttatatttaaaggacaaattctgaacaaagttcttatcgtgagtactctatgagtcacagtttcataaggtgagtcaaatgccaaagccctggtctccatactgcacttcaatgctttttaggatcccaatgaagctcagaggaaattattcactgttaatatttttattcttcttggtgttctctaaagtgctattttaatctccaattcacagaggaaacctcaacataaagaaaaacaaagcctgtggcataagagaagctgtggacatttcccttatgatcacgctgagatccaaagctgggaagtcagtcccagcagccaaaggtgggcagagtcttaagacagtatgaatgagatggggctacagctgtacttctaatacttcagttgagagacagaagagaaaggccttgggcccttttacagatattactcctgtgcagaaaaagcaagtggcagtacatgacaaatggractaatctaaagctcagaggatgaaatcattttaggcctgaaatggcagagattaaactaagagcattccgggactccgtacatctctactcatatatagatttatgg

SEQ ID NO: 457328 - DNA, 636 bp, Homo sapiens
tctaatacaaaactgctagtacaaaagttaaaagatgaatgtattatatttataatatttttaatggatacacaatattaaaggatataaattgtgatataaataacatgaaatgtgaggaggggagtaaaagtgtagagtttttgtatgtgattaaaagtaagtttatatcagcttaaaagagaccgttataactataatatgttttaattaagccttatggtaatcacaaagaaaaacctgtagtaggtacacaaaagataggaagaaatgaatgaaagcawaccattatagaaaatcgtcaaataacaaaaacaacaaaagaagagaaaagaacaaaaggaactacaaatcagtcagaaaacaattaacaaaatgataagtccttatttatcaacaatatctttaaatggaaatagattaaattctccaattaatgacaaagattggaagaatgatttaacaaaagaagatccaattatatgctacctacaagagacttactttagctcagctttccagtaacagaacactatgcataaacggcataagcaaaccacttatgtctctagtgttccattattggaatgctgagcacatgggagttatttatatataactactcaattcattgcc

SEQ ID NO: 457329 - DNA, 512 bp, Homo sapiens
ttgttttgcacgctctgtaagattttattgagtctactgaaaatatgtttgctgcttgaatgtattgtacttatgttaagtaaaccctcttttatttatctacaaggtgcttgaattttactgtattataatgctagtactgtaactcttggactcraaggtatcccatgaaaagggccacatctgattttttttttgcagatatctaaggtcaaaatctgctgcatcggtgcctggagaatgcttggtggtgacgacttgatcaatatctccaagacactggctcctagcaacattttgaattaacttggctttaaatgttccagctccctttgctcaggaaagctcatgaaaaagaaacactaaaattaaggctaatgattatagagaaaaaacatgtagtacacctcacagataatacatgagactagcttcatcttccttctgtaacacctttatgatgaacagaacacaacctttttctggatggcattttcagctgatgtgtcaca

SEQ ID NO: 457330 - DNA, 515 bp, Homo sapiens
ggatgcctagaaattttactgaagtagaaggtccctgaattttagttggatttatttcccatcctctggcatgcaaatgtctctccaataagtccaatgtatttgctcttgctcactggatccaatcagcataatgtcatcaatgtaatggaccagtgtaatatcctgtggaagtaaaatgcaatcaagttctctccaaataagattatgacacaaagccggagagtggatatatctttgaggtaggaaagtaaaagtatattgctggccttgccagctgaaggcaaattcctgctagtgggctttatggacaggaatggaaaaaaaggcatttgcaagtcaatggctgcataccaggtaccaggaaatgtgtttaaaaagmaatgaaaccatatctggtacatctgtcttctgcacagaccaaatgggagagttgaacagtattgtggtgggaatcaccacccctgcacctttcaagtccttgatagtggcactaatctctgcaatccctccag

SEQ ID NO: 457331 - DNA, 558 bp, Homo sapiens
agagtattgactaggaatgataattgtccaagaaaagtcttcagtgataaaatacacaattacttgtatatttcagctttgttctgttggtaattatttgaatgataagtaagatatttgatgatatttcttttgtgtttggctcatcatagatggtgtccttcaattatttgcatgtcagctcattcaggtgagacgtcctccttctagagaaggaaaatttttcaaaagtcgattcatcctgaacaaaatataaccatcaaagcctaaatatgacaattctgttgttcttaaccatcccagccagtgaggaagactgtaacacaaaagtcaaacaacattttcttcaatgaaataactcagcctttgaaggtaatcttwgccccttcttaacattcctggaaaaagcctgacttatcatctcctgtccagagacaagactcatcttggtgctgaggcaaacacagttatgacttctacctaatagctgaaatgtaacagctgtaacttgtcaaacattgggctggacactgaatctcctgcattatctctctctac

SEQ ID NO: 457332 - DNA, 617 bp, Homo sapiens
ttttttttagtggctctgagtttagttgctctcccaagaaaattgaggcacaacagaaagaacagctgttttttttttttcattcatgctgtgctttttggctgaattcatcaaggcacagaaagatgaagtatactgtattaaactacagtaataacatgaagcaataatgtgggacagtaccacggtattataagcgagagaataatatgggcctataggttaaataactcttagcattcaaactccagaaattactctcatgggcattttgttaggtgaaagtgactctaacaaaaactgggatggtgtagactaggagaccatgtgaggcagactgggagagggtaatactaggtaagggttcctccatgccagctgcacagtaggaccacctagggagctttatgaaagtacgatgcctggatcccaacctcagagactctgatttaattgatctgaataatttttaaatagctcctcaggtaattctaatacgcagtcaggattgagaatcactgcatcaaattagcctccattatactagcgrcagttctgaaaatccctgtgatgaggcatcaaaacagagggttttaaggggcagggatagatcagaa

SEQ ID NO: 457333 - DNA, 609 bp, Homo sapiens
attcaggccctgagttaaggtaccctgacttctcaattaagacatgtcttcaacattagctaaatcagcatcccagatagcactatgggaggctgtgggagaaatggttgtaatgatatttgagatggactttactgtgtaaaaagctcagaatgggctgggtgcagtggctcacacttgtaataccagcactttgggaggccgaggcaggcggatcaggaggtgaggagctcragaccaccttggccaacatggtgaaaccccgtctctactaaaaaaaaaaaaaaatacaaaacttatctgggcgtggtggcacgtgcctgtaatcccagttatttgggaggctgaggcaggagaatcacttgaaccagggagttggaggttgcagtgagccgagatcccaccacagcactccagcctggcaacagagcaagaccccgtctcggaaaaaaaaaaaaaaaaaaagaaaaaagggctcagaatgatctgaaggtccatggttggtaaacaaaataataataataataacaaaataataataataaaaacacttcatattataatgagctttgtctggtggctctttggtgatctatcccctatgggaac

SEQ ID NO: 457334 - DNA, 609 bp, Homo sapiens
attcaggccctgagttaaggtaccctgacttctcaattaagacatgtcttcaacattagctaaatcagcatcccagatagcactatgggaggctgtgggagaaatggttgtaatgatatttgagatggactttactgtgtaaaaagctcagaatgggctgggtgcagtggctcacacttgtaataccagcactttgggaggccgaggcaggcggatcaggaggtgaggagctcaagaccaccttggccaacatggtgaaaccccgtctctactaaaaaaaaaaaaaaatacaaaacttatctgggcgtggtggcacgtgcctgtaatcccagttatttgggaggctgaggcagragaatcacttgaaccagggagttggaggttgcagtgagccgagatcccaccacagcactccagcctggcaacagagcaagaccccgtctcggaaaaaaaaaaaaaaaaaaagaaaaaagggctcagaatgatctgaaggtccatggttggtaaacaaaataataataataataacaaaataataataataaaaacacttcatattataatgagctttgtctggtggctctttggtgatctatcccctatgggaac

SEQ ID NO: 457335 - DNA, 560 bp, Homo sapiens
actgcttaactctgtgaggatcccagcttctgatctatataatggcagctattatataatagatctatattataataatctatataatagatatctgtgtaatgtactctagataataatcatccatgtctcaacttattgatagaaaattatggagcctgttgttgtaataggaagcatttagaaaaacctgaaactgcatatatacatatatatgagattatatatggcatatatatgtttttatattacatttatatgacacacatacatatgtgtgtgtatgtatatatattagaagcatttagaaaaagagaaaaacctatatatgattatatatgtggcttatacatatgtttttatattatattcatatagtacacatagatgtgttaratgtgtgtgtgtgtgtgtgtctgtgtgtgagtatttagagaaactgtgtgtattaaggggctcttgggtagaacattctcctacataatttatccactgtagcgaacaggcagaaaggtagattctcatagcatccagctaacaggtgtaatctccacattgcc

SEQ ID NO: 457336 - DNA, 533 bp, Homo sapiens
gggctcttgggtagaacattctcctacataatttatccactgtagcgaacaggcagaaaggtagattctcatagcatccagctaacaggtgtaatctccacattgccacctacctgtgaatcaaacacaaagcttgactggacactaggagtacccagttctgaagagcattaagttctgcatcatgttcagtmgatactgaaacatcaagaaaatgcctgaagcatagactccaggagaagtcactgccaatcaacagaagtttctgggatcattccatttgtttctctttatttatagtatctgtgaaaatttggacacattaacagggacacaagttctctaatgctagtgctgttgctgaagtgacattcccctatctgcattggcttccaatctattatcacagctgctttgaggtgtctaactcagtttacatgaaaactacaggaaccaactcagaaacattagttaaaataaacataggatttatttagcatactccatacatgtttctcaacacctctttccag

SEQ ID NO: 457337 - DNA, 603 bp, Homo sapiens
aacatgttctcaaggatgtttgcatctatattcatgagagatcttagtctttagttttcttcatttgtactgtctttacctggtttttgtatcagagtaataatagcttcattaaagcgagaactgttccctcttcctggaaaacatttgcatctyaattcaatgtactttttacttttactgagactttctctttgcctcattgattatttagaagtgtgttatttagtttccaagtatttaaatatattcttgttgactttctgttattgatttctagtttgattttgttgtgcttaaagaacatactctgtatgatttcaactttttctaatttgttgaaatttattttattgcctatcttatgatctaccttggtatgtgctctgtggacacttaaaaatgtacattctgttgttgggtggaatattctatgaacactcctatttctaatggtgtttttgagttctatgatgttcttgattttctatctagttatactaattgttgagagacaactactaaaatcccagctccctattttgtcgtctgtaacggtgttgtggtgcttcactatcatgagagtgaaagtctagacttccc

SEQ ID NO: 457338 - DNA, 535 bp, Homo sapiens
agtgtccacagcttgaaacattttgctttcaagtggtttccaaaggtttcagctagtttttttttctttctttcaaatggtgagaacatcccaacattagaatcagaatttccctctacttttcagacagtcaaatcctcacccttcaaaaaggcaaccagctcttaaactgaaaattaaattaagctttgtaagggcagaaacccttttttttttttttttttttttttaracaaagtctactcttctaccaggttgaagtgcaatggcacaatctcagcttactgccattctgcctcccgggttcaagcgattctcctgcctcagccacccgagtagctgggattacaggcacgagccaccaggcctggttaatttaatttttgtatttttagtccagatgaggttttgccatgttgcccaggctggccttgaacttttgagctcaagtgatccgcccgccttagcctcccaaaatgttgggattgcaggtgtgaaccactgtgcccagctaaggaagttttatttcttgttt

SEQ ID NO: 457339 - DNA, 591 bp, Homo sapiens
ctttcagccaaaactgccattgctcctatgactaacaaggggkttcatgttgacattttactagtattgcaagatttatcagctaggaccactttgggtaagaaagagaaaagccaaatcaggcttctgaagagggtgtattgaccttcagttcccaagagctcggaggtgggactcgtatcagacacagattgattggaaagtttgagaaatccaccaggacttggtttctcccaccctctgtctccacttggttctgttcctcatggccttcatgcttagactagctggagaacctcctgctcacagagagcctgaagcagctttggcatgcacattctctcttggtctcagccagtggagtagaaaacagcaagagtccctttccaaggacttcttgcaaaatcttttgaaccggttactgtaacctggtgactagctttgacagaggtcacatccttccccgaggtccatgccaagaatgtgtgttgtgaatggaggagggagagtctttcagagggaaatgaagctattaacaaagagggagcatggaatgggaggtcattaaacacagacatggcaaaaatgaat

SEQ ID NO: 457340 - DNA, 600 bp, Homo sapiens
tggttaattttatgtgtcaacttgactgagccacacatgcccagatttttggttaaatattattctgggtgtttctgtgagggttttcttggatgaaattaacatttaactagacagactgaataaagcagaagatcctctctaatatgggtgggcctcatcaaatcagctgatggtctgaatagaacaaaaatgttaactccaggggaagggaggacttttcctgcccaacagtctctgatccaggacatcattcttatacatgaagtgaaataccagctcttcttgggtcttaagtctgctggctttcatactgaaacttacactatcagctcctctgatgctccagrttgtcaactacatattttgagacttgtcagcctctgcaattatttgagccaatttcttataagacacacacacacacacacacacacacacacacacacacacctcttggttctgtttcttggtagaaccctgagtaatacaagggtgtttccattcagagctcaaaactcaaatctcaaagtgaatatggggctctcttagaccttgaagaaaatcatacttactttaaaggctattacccttttaaaa

SEQ ID NO: 457341 - DNA, 504 bp, Homo sapiens
ggaagcttggctttgacaatttgcactctggctctgattttttacttaaggaaacaaaactttgcagcattttctattttgaagggaatcaacatcctatttaaaacaaagataaaaatttcaaccatggaatctagatctttgtatttgatctcatgggtgtcttcttttctatggggcctttttcttccattcatacttcttttctgccttgctggctgtgaggaaatgtcacttcccatatgctgyttttaacctcgggcccaactactgagcaaatgagcatatttgtgtaaacctaacccctacgcatatgaggcaacactgaatttacaaaaaaacttggtaaaaattaagggtgataaaatgaaaataaacacagaaaatatacaaagcaaagaagtctttcaactttcattcttcattcaatcctttatttatcaacaagcatattttgagtgcccactaagtgccaggacctggagaaacaataatgaacagtac

SEQ ID NO: 457342 - DNA, 572 bp, Homo sapiens
atcttgctttgtgccggtcctggtgtgcagtgctgcacaagcattttctcatcgatcctttaacagcctgttagaaagaaattattatccctattttaaaggtgaggaaattgtgatttggtgacatcaatcaaatgattcagaaccatacagctagagaactgtagagtaagggtttacatctggtgtttctgacgccacagtccatgcccttaaccatggcactatcctctcaattatgagtcctgggggtagaggactatccgcacctaagtaactaaacagtgtgtggcttgagggcaggtaccaattgctttcttctgtgtgttattagcatctgacacagaaccttgcaggtgcttggtgaaaatgcacctaaaatgcactaatctcattttatctttcaaataatcaaacacacatgagtgtaatttcagcttccactactttaagaatgggcactagaagtgggtccctccagttttatcagttaacttttacttgatkgaacctcagcttccactattatcctgtatcttatgctttatagacctaaaaccatgaacccctta

SEQ ID NO: 457343 - DNA, 607 bp, Homo sapiens
tatttacttaatacttattaaaattgtatgtgcaaggtatcatgctagttactttgaataacctggggaactaaatagatgtggctcctccctttccactgtaaagtgggagacaaaaactaaatagccaaacaaataaattgttgtatttttggaaaaatgcaatgaaaaaatttaaaaggttctgtgatagaaaattaggacaggaaaagatctacttcagacaagatagtcttgctgagaagatagcattgaaggtgagggtaggaagacaagtaaagacgtggagggacagtttttcaaatattaggtagatcaagggcaaaarcccaaattttggtatgagcatggaagctttgatgtacatgtagaccaccatatctggtgaaaagtgagccaggaaaggccagtaggggatgaagaagcagagatgagaccacatgattcattgtagactaggacaaaataaaaagagttgacttgtaaaaatggtggaataagaacctctgaaaattctctcctttgtaaaaaatcaataacaaaaaaagccgacaaaattagctagaataattttttaaaactctggaaagtttttaaatcaatctgg

SEQ ID NO: 457344 - DNA, 607 bp, Homo sapiens
tatttacttaatacttattaaaattgtatgtgcaaggtatcatgctagttactttgaataacctggggaactaaatagatgtggctcctccctttccactgtaaagtgggagacaaaaactaaatagccaaacaaataaattgttgtatttttggaaaaatgcaatgaaaaaatttaaaaggttctgtgatagaaaattaggacaggaaaagatctacttcagacaagatagtcttgctgagaagatagcattgaaggtgagggtaggaagacaagtaaagacgtggagggacagtttttcaaatattaggtagatcaagggcaaaaacccaaattttggwatgagcatggaagctttgatgtacatgtagaccaccatatctggtgaaaagtgagccaggaaaggccagtaggggatgaagaagcagagatgagaccacatgattcattgtagactaggacaaaataaaaagagttgacttgtaaaaatggtggaataagaacctctgaaaattctctcctttgtaaaaaatcaataacaaaaaaagccgacaaaattagctagaataattttttaaaactctggaaagtttttaaatcaatctgg

SEQ ID NO: 457345 - DNA, 607 bp, Homo sapiens
tatttacttaatacttattaaaattgtatgtgcaaggtatcatgctagttactttgaataacctggggaactaaatagatgtggctcctccctttccactgtaaagtgggagacaaaaactaaatagccaaacaaataaattgttgtatttttggaaaaatgcaatgaaaaaatttaaaaggttctgtgatagaaaattaggacaggaaaagatctacttcagacaagatagtcttgctgagaagatagcattgaaggtgagggtaggaagacaagtaaagacgtggagggacagtttttcaaatattaggtagatcaagggcaaaaacccaaattttggtatgagcatggaagctttgatgtacaygtagaccaccatatctggtgaaaagtgagccaggaaaggccagtaggggatgaagaagcagagatgagaccacatgattcattgtagactaggacaaaataaaaagagttgacttgtaaaaatggtggaataagaacctctgaaaattctctcctttgtaaaaaatcaataacaaaaaaagccgacaaaattagctagaataattttttaaaactctggaaagtttttaaatcaatctgg

SEQ ID NO: 457346 - DNA, 495 bp, Homo sapiens
aatatttgagaaatataggaactcagatacataaggtttgcaaatactttcacttatttcatagttcaccttttcattttgttgattgtatttcattgcagttatgaggtttcttagtgcaatgtgataccacttatttttgcttttgttgctgtgcttttggtgtcgtattcaaraaataattgtgaatcattgcttgccaagacagatttctcctgttttcttttggaagttttatggtttaagattttaaatcttcaatacactttagtttgatttttgtatataagataagggttcaattccatttttttgcatgtgaatatccagtctcctgattacatttattgaatagaccatctcttgcccattgtgtattcttggcacccttgctaaatatgagtttaccatatatgtgtaggtttatttctggtctctctattctgttacattggtctatgtatcagtttttatacaagcatcatacttacattg

SEQ ID NO: 457347 - DNA, 432 bp, Homo sapiens
tgaaacccattcttggctcagagtccttcagtcagtctccatgagccctacccctccacccacagcctgcccagcatccggcttcctagggagtccctcggctctgagactacatcaggacaatattccacagggattcagttggaagacttctgacctggagggtggggtctggctgtttctcaaagggagcraccaaagcctagaaggcacataggctctgccactctcaggcccatctccttaggaaggaatcagggacagcaataagaacccagaacaaagggccaggaggctgatagaggggacaagatccaggtcagaaacaaaaactcagcttagccacagtgatgcttgagagttatgagatggctggggagatccacaagcaccttttcattgggcacaggtataacctaccttgaacttggg

SEQ ID NO: 457348 - DNA, 568 bp, Homo sapiens
aaaacccaattgtcaactagaagcataaaaaacagtaccaagscatccaattcacatctagatgattttcaccagatcactaggttacatttacctgattaaatctttagtatttcaaaatccaatattaaagacataagatatagagataaccatatccaaattggctttgtaactgttagaggaaaggcattccatagctacaaggtgttactcccttgtagatatgcagttgaaactctctgtggtaaccgctaccatgtagaaacaaaacttaaaaattacatgtaagaagcagtcattctagagtgtgaaatgcaaaaattccaaacattaggtcaagaatgcaggtttctcttatttttaaaaaatgtgttagcaagtaattaaatttccaactatatttttaatgtatatttggtctcaaactaagcactatattttattataaattttaaacaaatcacacgcttacataattcatttaaataaattagtgtatatcacctattaaatgagaaaacatctttatataaaatggacgctattaaattttaaagtgtatatt

SEQ ID NO: 457349 - DNA, 564 bp, Homo sapiens
ccagcctgaccaacatggtgaaaacctgcctccactaaaaacacaaaattagctgggggtggtggtgcatgcctgtaatcccagctacttaggaggctgaggcaggagaattgcttgaacctgagaggcagaggttgcaatgagctgagatcgcacccttgcacttcagcctgggcaacaacagcaaaaactccacctcaaaaaaaaaaaaaaaaagaaaagaaaagaaaatgagctaaggagctaggcttccttatttcacaaccttggctctgtctcctatgaaaccagggcaactatttaacccctccatgtctgagtttcctcatgtataaatgaagggagcaatagtacctagcttataaggccattataaggattytaaaagttaatctaaagtgcttaggacagtgtatggcatagagcaagcactcagtaaatccattcattcaataaatgtttattgaatataggtgtggctgctgttttggctgatgagtatactaaagtcagtgaaacagacgaaatctgtggagctttcttccttgggggaggaggccaaca

SEQ ID NO: 457350 - DNA, 554 bp, Homo sapiens
cctcctgtgtatttagtaatcatgtccagctcagcaaatctgagtttctttattccttgagcyactgtccattttaatgaacagggaacatttgatctcaagcagcttcagaaactcaattttcccccagcctttgtctaggttttatagaggaaaaggtatagttgcagtactggttgatatttgcttgtgagagctcttgggcagctaattcttgatcctttgctccacctagtggatttccaggctagagagactctggaaaagagatcagtgatcagaagggtgtacatttgctgataaatgagacttaccagtcagtttctggattatcgtcagtttctggattatcgtctgtttctttactgacgatacccgattccatcccaaagtgtccttgtttgaattgattgaaatctttcatttatttccattaatgccagatgtgtagctgtaagtcatcaaaatctaatgcattccttttctctcttcttaatatataaataacattatataatcaggagacccatatcagcacaagaaagcatattcta

SEQ ID NO: 457351 - DNA, 608 bp, Homo sapiens
tctattccaaattccatctgccaccaatgaaagcagaaaggaaatatgtaataagagccaagccatggggaaatagtccaagatgggtgtgcctcctgtgtatttagtaatcatgtccagctcagcaaatctgagtttctttattccttgagctactgtccattttaatgaacagggaacatttgatctcaagcagcttcagaaactcaattttcccccagcctttgtctaggttttatagaggaaaaggtatagttgcagtactggttgatatttgcttgtgagagctcttgggcagctaattcttgatcctttgctccacctagtggatttccaggctagagagactctggaaaagagatcagtgrtcagaagggtgtacatttgctgataaatgagacttaccagtcagtttctggattatcgtcagtttctggattatcgtctgtttctttactgacgatacccgattccatcccaaagtgtccttgtttgaattgattgaaatctttcatttatttccattaatgccagatgtgtagctgtaagtcatcaaaatctaatgcattccttttctctcttcttaatatataaataacattatataa

SEQ ID NO: 457352 - DNA, 608 bp, Homo sapiens
tctattccaaattccatctgccaccaatgaaagcagaaaggaaatatgtaataagagccaagccatggggaaatagtccaagatgggtgtgcctcctgtgtatttagtaatcatgtccagctcagcaaatctgagtttctttattccttgagctactgtccattttaatgaacagggaacatttgatctcaagcagcttcagaaactcaattttcccccagcctttgtctaggttttatagaggaaaaggtatagttgcagtactggttgatatttgcttgtgagagctcttgggcagctaattcttgatcctttgctccacctagtggatttccaggctagagagactctggaaaagagatcagtgatcagaagggtgtacatttgctgataaatgagacttaccagtcagtttctggattatcgtcagtttctggattatcgtcygtttctttactgacgatacccgattccatcccaaagtgtccttgtttgaattgattgaaatctttcatttatttccattaatgccagatgtgtagctgtaagtcatcaaaatctaatgcattccttttctctcttcttaatatataaataacattatataa

SEQ ID NO: 457353 - DNA, 608 bp, Homo sapiens
tctattccaaattccatctgccaccaatgaaagcagaaaggaaatatgtaataagagccaagccatggggaaatagtccaagatgggtgtgcctcctgtgtatttagtaatcatgtccagctcagcaaatctgagtttctttattccttgagctactgtccattttaatgaacagggaacatttgatctcaagcagcttcagaaactcaattttcccccagcctttgtctaggttttatagaggaaaaggtatagttgcagtactggttgatatttgcttgtgagagctcttgggcagctaattcttgatcctttgctccacctagtggatttccaggctagagagactctggaaaagagatcagtgatcagaagggtgtacatttgctgataaatgagacttaccagtcagtttctggattatcgtcagtttctggattatcgtctgtttctttactgacgatacccrattccatcccaaagtgtccttgtttgaattgattgaaatctttcatttatttccattaatgccagatgtgtagctgtaagtcatcaaaatctaatgcattccttttctctcttcttaatatataaataacattatataa

SEQ ID NO: 457354 - DNA, 571 bp, Homo sapiens
tgttttgaaataaatgcccaaggtcacacagcaagttggtgacttagtcactcttttagctcaactttcagtccatcaatgttctatcacagtctgccaastatttcaaagatggtggcaaaatcagccaatgatggtgattagatccaaaacttagttgcaaataatttttcggggaactatatgcaagcataggtccttcctaaatatttgctaatggaagcatgtgctaaataggatgcctaccagaagactgatacccagcagaatagctagacaggtaatttgacctctggctgggcccgtaggattcatcatccctccagacaagcacttggttgtggtaaagatctggctctggttggaaggctgtcccatcccactgagggtgattcaccagagcaacttaatcatctacggatcagaagctcaggttcatgtgagcagggtgggggttaagggaaagagagtctgagtaatgcttcacagtgggtgtggggacttgttataatagtaggcacgctgttgattaaagtacatgacagaagtaattgccagagatcccaaacca

SEQ ID NO: 457355 - DNA, 571 bp, Homo sapiens
tgttttgaaataaatgcccaaggtcacacagcaagttggtgacttagtcactcttttagctcaactttcagtccatcaatgttctatcacagtctgccaactatttcaaagatggtggcaaaatcagccaatgatggtgattagatccaaaacttagttgcaaataatttttcggggaactatatgcaagcataggtccttcctaaatatttgctaatggaagcatgtgctaaataggatgcctaccagaagactgatacccagcagaatagctagacaggtaatttgacctctggctgggcccgtaggattcatcatccctccagacaagcacttggttgtggtaaagatctggctctggttggaaggctgtcccatcccactgagggtgattcaccagagcaacttaatcatctayggatcagaagctcaggttcatgtgagcagggtgggggttaagggaaagagagtctgagtaatgcttcacagtgggtgtggggacttgttataatagtaggcacgctgttgattaaagtacatgacagaagtaattgccagagatcccaaacca

SEQ ID NO: 457356 - DNA, 567 bp, Homo sapiens
ccagaaacgggctggtaagtctcatttatcagctaatgtacacacttctgatagcagcctcttatctggtcccactgcatgttttctgtatcagccagagttcatttgcagataacagaagccattctagctatttgaagcagaaagggattcaaaacagttgtggtagattgatgttacaaaaatccttcctgtttcacccacctttttgcaattgccacaactcccataaagagatgaagtctatttttctctccttgtaaatctgggctagccctcggtttaattctgaccaatggaaagaggcagaactgatgctgtgtcacttccagacctagccttaagaggctttgcggctcccactctcaccctcttagaagaaagcagccgtcctgtaaggaagctcaggctagattactgaatgatgagagaccataggagagagaggtctcagcctttcaaggcatccctgccaaaatcctagacataygagtgagacaaagtagggccactgacagctgaatacacccacctgcctgtggagccaggcaggatcagcagaattgc

SEQ ID NO: 457357 - DNA, 582 bp, Homo sapiens
gatagcaaaatggataaagtgctgtgaccaccttttccccactgaagtttgttctgaaatcaagacttatgcaaatgcatataactagcaaaaagtaaattatataaacccctagctgcaagagaatctttttagcttttttattttttatgtttattttttgtggcagggtcttgctctgttgcctaggctggaatgcattggtgcaaacatgrctcactgcagccttgagcttctgggctcagaccttcctcccacctcagcctcccatgtagttgggaccacatgtgcatgtcaccatgccccgctaatttcttgattttttctagagactggggtctcactttgttgccctgaatggtctcgaactcctgggctcaagcaatcctcctgtcttggactcccaaagtgtgggattaacaggcatgagctaccgcacccagcccacttttagctttttggcctaggcactgtgggtaggcatagaagaaagaatttttttaaaaatgctttgttcactgcgtaacgctcacaatagtgttcacacaaaagagatgctcattaaatatttgttaaatgatt

SEQ ID NO: 457358 - DNA, 582 bp, Homo sapiens
gatagcaaaatggataaagtgctgtgaccaccttttccccactgaagtttgttctgaaatcaagacttatgcaaatgcatataactagcaaaaagtaaattatataaacccctagctgcaagagaatctttttagcttttttattttttatgtttattttttgtggcagggtcttgctctgttgcctaggctggaatgcattggtgcaaacatggctcactgcagccttgagcttctgggctcagaccttcctcccacctcagcctcccatgtagttgggaccacatgtgcatgtcaccatgccccgctaatttcttgattttttctagagactggggtctcactttgttgccctgaatggtctcgaactcctgggctcaagcaatcctcctgtcttggactcccaaagtgtgggattaacaggcatgagctaccgcacccagcccacttttagctttttggcctaggcactgtgggtaggcatagaagaaagaattttttwaaaaatgctttgttcactgcgtaacgctcacaatagtgttcacacaaaagagatgctcattaaatatttgttaaatgatt

SEQ ID NO: 457359 - DNA, 582 bp, Homo sapiens
gatagcaaaatggataaagtgctgtgaccaccttttccccactgaagtttgttctgaaatcaagacttatgcaaatgcatataactagcaaaaagtaaattatataaacccctagctgcaagagaatctttttagcttttttattttttatgtttattttttgtggcagggtcttgctctgttgcctaggctggaatgcattggtgcaaacatggctcactgcagccttgagcttctgggctcagaccttcctcccacctcagcctcccatgtagttgggaccacatgtgcatgtcaccatgccccgctaatttcttgattttttctagagactggggtctcactttgttgccctgaatggtctcgaactcctgggctcaagcaatcctcctgtcttggactcccaaagtgtgggattaacaggcatgagctaccgcacccagcccacttttagctttttggcctaggcactgtgggtaggcatagaagaaagaatttttttaaaaatgctttgttcactgcgtaacrctcacaatagtgttcacacaaaagagatgctcattaaatatttgttaaatgatt

SEQ ID NO: 457360 - DNA, 472 bp, Homo sapiens
agatttttggaaacgttttccaggagggagtaatagcatttcctgaagcaccttttatcttggtttrtggcaaatgattctttcaatgccctcaggtcacttataccctaagaccctgcatgagtttattcaaccttcaaatcagtcacttctgccctcatctagggcacataacaatgtagttagttacccagcaggtatcccggctaagtaagaccataaataaatcatatgagcaggagcttttggagtcagtcttctgtctgagcacctctaaccggttatgctaccttaaacaaattacttaacttctctctgtctcacctgatttaccagttttaaaaaaaaggaataataatggtacctacctcataggtttgttgtgaggagttaaacatctaaagcacttagaacagtgtctggcatatggtaagtattcaataaacattagccttatattctatactttaag

SEQ ID NO: 457361 - DNA, 550 bp, Homo sapiens
aaaaactttatttacaaaaccacaactcagtctgctttggtattgacaaaatccctacaactgagatattaaagagatacatttattttagagttacataaaaccagaatccaacactaccctactttcctattcctttgtrgctctgaatgcagctttaaaaaaacaaaacaaagcaaagcaaagcaaaacaaaacagctctttataatgtacaatggcttaagcaaatcgctttagtttttttttctatttaagatttaggacagactactcgtctaaaattcactatttacagagaaggtcctagggaacaggataacttatttaggtttagctctcataatacaatatccataatggctttagaagaatgtaaataaataacattggtaaacagcgtatactgatattttctgacaaactcatttatctaacatcatgctgagcaatcaagaggattcctctatatattttaaattttaatttattctatttcctgattcacaaactcttgctccatgttaaagcagttatcaccaatagaaccta

SEQ ID NO: 457362 - DNA, 550 bp, Homo sapiens
aaaaactttatttacaaaaccacaactcagtctgctttggtattgacaaaatccctacaactgagatattaaagagatacatttattttagagttacataaaaccagaatccaacactaccctactttcctattcctttgtggctctgaatgcagctttaaaaaaacaaaacaaagcaaagcaaagcaaaacaaaacagctctttataatgtacaatggcttaagcaaatcgctttagtttttttttctatttaagatttaggacagacyactcgtctaaaattcactatttacagagaaggtcctagggaacaggataacttatttaggtttagctctcataatacaatatccataatggctttagaagaatgtaaataaataacattggtaaacagcgtatactgatattttctgacaaactcatttatctaacatcatgctgagcaatcaagaggattcctctatatattttaaattttaatttattctatttcctgattcacaaactcttgctccatgttaaagcagttatcaccaatagaaccta

SEQ ID NO: 457363 - DNA, 611 bp, Homo sapiens
ggcaatcctgcattgagtaagtctaacagcatatgcttaccttgtgtctgttacattttgataattctctcaatatttcaacctttttcattattattatatatattatggtgatctgtgatctttgatgttactgttataattgtttcagggtgctatgaaccacacccacttaagaccacacccacttaagactgcaaacttaatcgataaatattttgtgtgttctgactgctccactgaccagctgttctckctctctttcctggggcctccctatttcctaagatacaacaatattgaaattgggccagttaatatccctacaatgacctctaagtgttcaagtgaaagagagtggcatgtctctcactgtaaatcaaaagctagaaatgattaagcatagtgaggaagacatattgaaagctgagacaggctgaaagttgggccttttatgcccaattgttagccaacttgtgactgcaaagaaaagttcttaaaggacataagaagtgctactccagtgaaaacaagaataaaaaagtgaaatagccttattgctgatatggagaaagttttagtgacctagatagaggattaaaccagccatg

SEQ ID NO: 457364 - DNA, 569 bp, Homo sapiens
caattctttgtgcagagagaaacaacaagcttagttcctgttgacctgaagagcataatgttctggcacagaatcttccaccttcatagaagagtaacaaactcaattgggattatttttctaactaaaacwgtcatttgatgtcttcttttatctcaccaagatacaaccttctgagccactcatcttctatcctcatcagttccataataagcaaatacaactttgggacagtctgagacagcgttttctgaattttttctgaccacaacccataatgagcaatacatgttataatgtgatccagtatgtgaacacatgcacactcacccaaaaaagtctgacacaacaatatttaccctttttgcatccaattcactttacaatttttcattatttttctatcctattccatttacattttgaagaaagctggtgagtagtcagctaaaatggctccacaacctactctgcaaaggagttgcaatctgcacttggaaaaacactggtctatggacagggctctggtcagtgttctcaataacagtttggagactttaagcagtaac

SEQ ID NO: 457365 - DNA, 574 bp, Homo sapiens
tgctttttatggatgagcaaagaaaatggtttcttgaggtgaaatctactcttgatgaagatgctgtaaatattgttgaaatgaaaacaaaggatttagaatattacataaacatagttggtaaagtagtagcagaatttgagaggattgactccaattttgaaagaggttctactatgtgtaaaattctatcaaatgrcatcacatgctacagagaaatcttttgtgaaaggaagagtcaatccatgcggcaaacctcattgttgtcttattttaagaaactgccacagccatcctaacctccagcaaccaccaccctgatcagtttgcagtcatcaacatcaaggcaagaccctccaccagcaaaaagattatgacttgctgaaggttcagatgatcattagcagtttttagcaataaagcatttttttttcttttttgagacagggtctcatattgttgcccaggctgaaatgcactggcatgatcacagctcacttcagcctctacctcccaaattcaagtgatcctcccacctcagcctcctgggtagctgggacgatagtatgcccca

SEQ ID NO: 457366 - DNA, 574 bp, Homo sapiens
tgctttttatggatgagcaaagaaaatggtttcttgaggtgaaatctactcttgatgaagatgctgtaaatattgttgaaatgaaaacaaaggatttagaatattacataaacatagttggtaaagtagtagcagaatttgagaggattgactccaattttgaaagaggttctactatgtgtaaaattctatcaaatggcatcacatgctacagagaaatcttttgtgaaaggaagagtcaatccatgcggcaaacctcattgttgtcttattttaagaaactgccacagccatcctaacctccagcaaccaccaccctgatcagtttgcagtcatcaacatcaaggcaagaccctccaccagcaaaaagattatgacttgctgaaggttcagatgatcattagcagtttttagcaataaagcatttttttttcttttttgagacagggtctcatattgttgcccaggctgaaatgcactggcatgatcacagctcactkcagcctctacctcccaaattcaagtgatcctcccacctcagcctcctgggtagctgggacgatagtatgcccca

SEQ ID NO: 457367 - DNA, 571 bp, Homo sapiens
accctattgctacaaaaataaaaaacttagccaggcctggtggtgcctgcctgtagtcccagctactcaggaggctgaggtaggagaatcacttgagcccaggagttcaaggctacagtgagctatgatcatgccactgcactccagcctgagcaacagtatgagacccctctaaaaacaaagaaagggagtaataacctagaaattaaataagaaaacagaggttcagcagtttagaggctaaaggagttcactcaagrtcacatagagagtaagggtagggtcagacctcaaacatgatttttattattgtaaatccaggtgtttctcccccctaacctacattgccttgttctgaaaattgaagcggatactgtgaatacactttgaaaactgtaaaattatatactaatgtgaagcatcagaaaacccttttaaaaaatagctctaagtaataagtaatttttcaatggctcattgcatgctttataccagtccttgttgcagcccactgaacctttctctatgctttggtgtcaatatccatcttccaaacccagagctatccaga

SEQ ID NO: 457368 - DNA, 571 bp, Homo sapiens
accctattgctacaaaaataaaaaacttagccaggcctggtggtgcctgcctgtagtcccagctactcaggaggctgaggtaggagaatcacttgagcccaggagttcaaggctacagtgagctatgatcatgccactgcactccagcctgagcaacagtatgagacccctctaaaaacaaagaaagggagtaataacctagaaattaaataagaaaacagaggttcagcagtttagaggctaaaggagttcactcaaggtcacatagagagtaagggtagggtcagacctcaaacatgrtttttattattgtaaatccaggtgtttctcccccctaacctacattgccttgttctgaaaattgaagcggatactgtgaatacactttgaaaactgtaaaattatatactaatgtgaagcatcagaaaacccttttaaaaaatagctctaagtaataagtaatttttcaatggctcattgcatgctttataccagtccttgttgcagcccactgaacctttctctatgctttggtgtcaatatccatcttccaaacccagagctatccaga

SEQ ID NO: 457369 - DNA, 635 bp, Homo sapiens
gttcagcagtttagaggctaaaggagttcactcaaggtcacatagagagtaagggtagggtcagacctcaaacatgatttttattattgtaaatccaggtgtttctcccccctaacctacattgccttgttctgaaaattgaagcggatactgtgaatacactttgaaaactgtaaaattatatactaatgtgaagcatcagaaaacccttttaaaaaatagctctaagtaataagtaatttttcaatggctcattgcatgctttataccagtccttgttgcagcccactgaacctttctctatgctttggtgtcaatatccatcttccaaacccagagctatccagaatagtgccacaaattaccattttaaacatgcgatgtccttcagtttacatttgcagattttggtgaaatagcatcttccagtgaagtccactgcgctggagagagaaaggtataaaaagacagtcagatgtactttacaaaaaatttaattgtggcaaaaaattaacaaaatttaccaacttaacaagttttatgtgtgcagagcagatgtgytaaatataatcacattgctgtgtaatgaatctcctgggtttaagtgaccctcctaccagagtttcctgagtagg

SEQ ID NO: 457370 - DNA, 555 bp, Homo sapiens
agcatcttccagtgaagtccactgcgctggagagagaaaggtataaaaagacagtcagatgtactttacaaaaaatttaattgtggcaaaaaattaacaaaatttaccaacttaacaagttttatgtgtgcagagcagatgtgttaaatataatcacattgctgtgtaatgaatctcctgggttyaagtgaccctcctaccagagtttcctgagtaggtggaactataggcgccctataccacattttgtttatctgttcatctgtagaatcaatggacatttggattgcttccacctcttggctattgtgaataatgctgttaatgaacatgggtgtgcaaatatctcttccaagatccagttttgaattcttttggatatgtacccagaactgctggatcagatagtaattctacgcttgatttagcacaaattttgtcaatccaaagagctgaaagctaacatagaactatagtatatttttaaagagtcagttcatatttgtgagctcaacataaacatctgacaaattttccattaaaaaaatttttatg

SEQ ID NO: 457371 - DNA, 489 bp, Homo sapiens
ggtgggagtggctgaaacaccgaaatgataacctccttgttgactcccacagatccaagccataagtgttcccatttagttaaaagctaccgttgcccgccactagcatgacttacttggtaggagggatgtctgtagagaaaaggtctatttcagtatcagccagcaaaacagccttcattcccctagagctgagcacttgtttacagaatttgcaacacaggatggacacgcacctgtccttgaaactacaaatgttggtagacatggcgtcgcaggaaggatgaggtgtgggattttgaaaaaggaaacaagagtaatgctcctactattttgattcccctaggctaaaattcaarttgcgggacctagagcttttctaagtcctaatattgggaaggaaattagttttttttttctgttttcccggtggcggagtagaagaagtatttattgagtaggaacaggggagcgtggcaaacttggctt

SEQ ID NO: 457372 - DNA, 463 bp, Homo sapiens
ctggctgatcgccccctcccccttttcctgcatttacaggcaagtgaaccggagcaaacgacttccgatccagtctgcgctgttgcggctcccgtttgggatttgatttgcagcatctttgagcctctacgacaaaaaaccgcgaagcacgcccagccctcccccggcaccccgaaaagcacccactccctcccggggacacagctgggcgcgtccacacccccgcagccccacaccatgttgtgcggaaggacttccactccccgcctgtgtcgttgatgtcagaccccaggccagcctccgggcgctgcagttctcccggctaatgctgaggctgcggctccggctctagcacaggcaccagccgccgccgcacccggccycagcgcccaccgtctgcatgtgcccgccgtagccgtctgcccagcccgcagcccgcgctccacggagcgctggagaccac

SEQ ID NO: 457373 - DNA, 554 bp, Homo sapiens
acgccatttgactaaggtgcaaagtgactttaaatgtttaatttttggaaggttcaaggctgataggtgttaatagaaccatatctgccaatttcttattggcaaaggatttctcaagagtgtctcaaaattaaacactttggatatttacaaacattgctcattgagatgakgtaatgcagtcggctatttgggttctctcttcaaccttgccacaaacagactattttgctttgctctgatattttcccattgatactattcaggatcatagaattttataggtggctgagcatgatgtcttactccgagaaggtgcctgatgaatgcttatggaactgatttgaatagtttagtccttcattttacagctgaggagaatacagagaactgaagaggcttgtccaaggtcacacggctagatggtggcagatctgaaactagaagcagatttaccaactctcaattctctattctgtatctttactatgaaacatcatctgaccagggtggaaaaaaataaaaaattcttaaggagcccaaatctgtcaatg

SEQ ID NO: 457374 - DNA, 585 bp, Homo sapiens
ggtggcagatctgaaactagaagcagatttaccaactctcaattctctattctgtatctttactatgaaacatcatctgaccagggtggaaaaaaataaaaaattcttaaggagcccaaatctgtcaatgaataatratagtaataatgataatgataatagattacattttggttgctcattatgttccagtccatcccaagtgctttaaatgaatggtctggtttaatccttacctcaacccagggaatgggtattattgtcaccttccattcaccatataaggaaactgaggcttagagaggatgagaagcccttccaaggtcacacagccaaaccatggcagcttgacttcattcctttattcattaactatttattgagtgcttgctgtgtgttctggcgattggccatacagctgtgaagaagaaaaagtctctaccctcgtggagcttatattctggaagctgggctctctatggaacagcacagaatttggagacaaagggcctgcgatctggtttggctctgcctcccactagctagaagccctgggtcagaattattatgagtgtcagctttttg

SEQ ID NO: 457375 - DNA, 585 bp, Homo sapiens
ggtggcagatctgaaactagaagcagatttaccaactctcaattctctattctgtatctttactatgaaacatcatctgaccagggtggaaaaaaataaaaaattcttaaggagcccaaatctgtcaatgaataatgatagtaataatgataatgataatagattacattttggttgctcattatgttccagtccatcccaagtgctttaaatgaatggtctggtttaatccttacctcaacccagggaatggrtattattgtcaccttccattcaccatataaggaaactgaggcttagagaggatgagaagcccttccaaggtcacacagccaaaccatggcagcttgacttcattcctttattcattaactatttattgagtgcttgctgtgtgttctggcgattggccatacagctgtgaagaagaaaaagtctctaccctcgtggagcttatattctggaagctgggctctctatggaacagcacagaatttggagacaaagggcctgcgatctggtttggctctgcctcccactagctagaagccctgggtcagaattattatgagtgtcagctttttg

SEQ ID NO: 457376 - DNA, 560 bp, Homo sapiens
agttcatccatgttgtagcatatgtccaaatttctttcttttttaaggttgaataatatttaattgtatgtatataccccattttgtttacccattcgttcattgatgaacacttgggttgtttccaccttttgcctattttgaataatgctgctgtgaacataggtgtaacataggggtgttcttttttcttttttttttttttttttttcagatggggtctcactctgtcacccaggctggattgcagtggcttgatcacggctcactgcagccttgacctcctgggctcaagtgatcctcccacctcagcctccgaagtagctggggctataggcacatgccaccacacycagctagttttaaaattttttgtagagatgaagtctccctacattgcccaggctggttattttttttttaaaaggtacactataccaaagttttacaagcctgtatatacatttctatataatcacttgtcctgataaattttttaaatttaaggttttaatatgtgcattagcttgtatattagtatattattaattataaagttg

SEQ ID NO: 457377 - DNA, 604 bp, Homo sapiens
tggagttaaaactgggttgacctgaaaaaggaactgttttgttcctttttcaaagcacggtgtggagagagctattgcctggttagaagcagctgtgagatctttggtaaatggggaaggagaggtcctaaggaacaagcaggaaaatggtcccttatgrtttttcaagtcatttggtatgaaatagccttgaccttatttatacgttgtgaatgaatggttctgaacttgaaatatgtattcgtgaggaaggaaaaacagttggggcatgttcctccattttggtgtatattttaggatatcatcctttaggaagaaggcatattctctttgttttttttttttgtttgtttgtttgtttttcttaaccatatcttctaaatgcattaatcagtggagaggtgacccagaaatcactgtgaaagttgggaccttatctttgctgtttgagcccagatcttgcatttagaatcatggcatggtgggcaggatctgaatactctccctggagaagatgaccctggcagccatgggtggctgggtggccagggctccacaggaggacaaagcacagaaaacaaagggacttaagagcatgagctgg

SEQ ID NO: 457378 - DNA, 604 bp, Homo sapiens
tggagttaaaactgggttgacctgaaaaaggaactgttttgttcctttttcaaagcacggtgtggagagagctattgcctggttagaagcagctgtgagatctttggtaaatggggaaggagaggtcctaaggaacaagcaggaaaatggtcccttatggtttttcaagtcatttggtatgaaatagccttgaccttatttatacgttgtgaatgaatggttctgaacttgaaatatgtattcgtgaggaaggaaaaacagttgggrcatgttcctccattttggtgtatattttaggatatcatcctttaggaagaaggcatattctctttgttttttttttttgtttgtttgtttgtttttcttaaccatatcttctaaatgcattaatcagtggagaggtgacccagaaatcactgtgaaagttgggaccttatctttgctgtttgagcccagatcttgcatttagaatcatggcatggtgggcaggatctgaatactctccctggagaagatgaccctggcagccatgggtggctgggtggccagggctccacaggaggacaaagcacagaaaacaaagggacttaagagcatgagctgg

SEQ ID NO: 457379 - DNA, 607 bp, Homo sapiens
tttaagaaatatgtcttgtttctgaagagttggctgttgccaactcttctccaaacattgaaatcccttagaaatctgcttcctttccccattagattttgtgtgtgcgtgtgtttattattttggtaggcggtggagatactgcacyagagcttgtcagatgagtaagctgctctttgggaagacatcttgactgaggtacctattctggagcaacatttcttttgggccaatacagtactttgttacgcgttgagctacaggattctacacaggcagaatgatcctaagggaaagtgctggattgggaggcagaaagcttgggttctagtttagctttgtcattggctgccatgattttagagataactcacctaaggtctcaaaatccctagtttccctataaaatccctgtaagatgggaacaacaattcttggcccttataataatgatggtgatgatggttagcgtttatcaagtgcttcttatgtctcagctctgttttaggtgctttacatatatgaactcatgaatttctcaacagtcctgtgaggtagctgctattattatccccattttacagatgacgcacagtgaggttaaata

SEQ ID NO: 457380 - DNA, 607 bp, Homo sapiens
tttaagaaatatgtcttgtttctgaagagttggctgttgccaactcttctccaaacattgaaatcccttagaaatctgcttcctttccccattagattttgtgtgtgcgtgtgtttattattttggtaggcggtggagatactgcaccagagcttgtcagatgagtaagctgctctttgggaagacatcttgactgaggtacctattctggagcaacatttcttttgggccaatacagtactttgttacgcgttgagctacaggattctacacaggcagaatgatcctaagggaaagtgctggattgggaggcagaaagcttgggttctagtttagctttgtcattggctrccatgattttagagataactcacctaaggtctcaaaatccctagtttccctataaaatccctgtaagatgggaacaacaattcttggcccttataataatgatggtgatgatggttagcgtttatcaagtgcttcttatgtctcagctctgttttaggtgctttacatatatgaactcatgaatttctcaacagtcctgtgaggtagctgctattattatccccattttacagatgacgcacagtgaggttaaata

SEQ ID NO: 457381 - DNA, 607 bp, Homo sapiens
tttaagaaatatgtcttgtttctgaagagttggctgttgccaactcttctccaaacattgaaatcccttagaaatctgcttcctttccccattagattttgtgtgtgcgtgtgtttattattttggtaggcggtggagatactgcaccagagcttgtcagatgagtaagctgctctttgggaagacatcttgactgaggtacctattctggagcaacatttcttttgggccaatacagtactttgttacgcgttgagctacaggattctacacaggcagaatgatcctaagggaaagtgctggattgggaggcagaaagcttgggttctagtttagctttgtcattggctgccatgattttrgagataactcacctaaggtctcaaaatccctagtttccctataaaatccctgtaagatgggaacaacaattcttggcccttataataatgatggtgatgatggttagcgtttatcaagtgcttcttatgtctcagctctgttttaggtgctttacatatatgaactcatgaatttctcaacagtcctgtgaggtagctgctattattatccccattttacagatgacgcacagtgaggttaaata

SEQ ID NO: 457382 - DNA, 559 bp, Homo sapiens
agttgaaaacaaaccagatcaatattaaaatccagaccctacgttcctgtagagctggctctggagagttcacttcattttgtgcaggacccagcttagcataagtactggcacattgtttcaagtttagttcaacaagcagggaccaagcacctattcgttaccagtgagaaggacaaacaaaaatgattaaagaagaccaagaagttcagttggcccgtgaaatgcctacraagcatcctactggaaaaggcagttgtattctccttctgttctcaggagaggtcaagtctagaaatagacacttgggagccatcagcaaatattatagatggcagttaggaagttaaccagcaaagtgaatgcagctgtccatagacagcatgtagaattaaaaagatgtaggcttaggatatccccatttaggtggaaagcaaagcaaggagagataggaaagtagattaagaatgaagagagatgtacaaaagtgtcaataactatggagtatttaaataagacagcaaggcaaagagctcattaaccttggcaatgagaagtc

SEQ ID NO: 457383 - DNA, 496 bp, Homo sapiens
cttctcatagatctgagattcctttttattcccgagttggataaattagggtaaacaaaatcaaatacttgtaaaaatactgtacaaaggaatgacatatgyatgctggttccctagcagggtaattccatcagcgctttaaaaaagaaaaaaaagattacattccttctcaaccagccaaaggagccattttccaatctcttatcttgttggggtgtgttagaaaaatataccaagtgcaagaacctgtaagcctggggttcattaacctgcttaaaaccagttttacttcaaataggtgatctttagtgtcaaccgttgtacttttgtctgcagggaacaactcaagtttcgtcctgtcctcagtaagcagatgagaggtagggttgacgttagaagccaagtttttgtggagcaataaggtaaaattatgaaggaagcctatagaattccaggagagtttaaagaaaacagtagaatactttcttagcaaggg

SEQ ID NO: 457384 - DNA, 496 bp, Homo sapiens
cttctcatagatctgagattcctttttattcccgagttggataaattagggtaaacaaaatcaaatacttgtaaaaatactgtacaaaggaatgacatatgtatgctggttccctagcagggtaattccatcagcgctttaaaaaagaaaaaaaagatkacattccttctcaaccagccaaaggagccattttccaatctcttatcttgttggggtgtgttagaaaaatataccaagtgcaagaacctgtaagcctggggttcattaacctgcttaaaaccagttttacttcaaataggtgatctttagtgtcaaccgttgtacttttgtctgcagggaacaactcaagtttcgtcctgtcctcagtaagcagatgagaggtagggttgacgttagaagccaagtttttgtggagcaataaggtaaaattatgaaggaagcctatagaattccaggagagtttaaagaaaacagtagaatactttcttagcaaggg

SEQ ID NO: 457385 - DNA, 496 bp, Homo sapiens
cttctcatagatctgagattcctttttattcccgagttggataaattagggtaaacaaaatcaaatacttgtaaaaatactgtacaaaggaatgacatatgtatgctggttccctagcagggtaattccatcagcgctttaaaaaagaaaaaaaagattacattccttctcaaccagccaaaggagccattttccaatctcttatcttgttggggtgtgttagaraaatataccaagtgcaagaacctgtaagcctggggttcattaacctgcttaaaaccagttttacttcaaataggtgatctttagtgtcaaccgttgtacttttgtctgcagggaacaactcaagtttcgtcctgtcctcagtaagcagatgagaggtagggttgacgttagaagccaagtttttgtggagcaataaggtaaaattatgaaggaagcctatagaattccaggagagtttaaagaaaacagtagaatactttcttagcaaggg

SEQ ID NO: 457386 - DNA, 496 bp, Homo sapiens
cttctcatagatctgagattcctttttattcccgagttggataaattagggtaaacaaaatcaaatacttgtaaaaatactgtacaaaggaatgacatatgtatgctggttccctagcagggtaattccatcagcgctttaaaaaagaaaaaaaagattacattccttctcaaccagccaaaggagccattttccaatctcttatcttgttggggtgtgttagaaaaatataccaagtgcaagaacctgtaagcctggggttcattaacctgcttaaaaccagttttacttcaaataggygatctttagtgtcaaccgttgtacttttgtctgcagggaacaactcaagtttcgtcctgtcctcagtaagcagatgagaggtagggttgacgttagaagccaagtttttgtggagcaataaggtaaaattatgaaggaagcctatagaattccaggagagtttaaagaaaacagtagaatactttcttagcaaggg

SEQ ID NO: 457387 - DNA, 565 bp, Homo sapiens
ttattggtttgatttggtttcactgctcctaagttccttttgtcttatcttgcaagcatatcactgtgagtacttaaatcattaacaactcattaaaactcttgaccattttcattttctaccaagctgaagcctgggtgtggtggaaacttgtgcaggcctgcttggctgtgcsgcaactgagcagctcctagcagtttggctgtcaaaaggccactgaataaacaaattgataggaatggcggacataatctctgcagttccttgaaaagaaggaaggggctgcaggatacaggatagtgaaggatccttctcttcaacctgaaggactcttcagcaattaacaccttgactctctttttatgcaacacttttttttttgtcctctcagagactatttgtacttggtcttttcttctttcaggatttctatagcttcttttagagactcaaagtgcttccagttttgttacctcatttattctctaggggcaggaattaaggtcttgatggagatgaagtggtacatcacttactgggctgtggaggcagtctacaacaggca

SEQ ID NO: 457388 - DNA, 565 bp, Homo sapiens
ttattggtttgatttggtttcactgctcctaagttccttttgtcttatcttgcaagcatatcactgtgagtacttaaatcattaacaactcattaaaactcttgaccattttcattttctaccaagctgaagcctgggtgtggtggaaacttgtgcaggcctgcttggctgtgcggcaactgagcagctcctagcagtttggctgtcaaaaggycactgaataaacaaattgataggaatggcggacataatctctgcagttccttgaaaagaaggaaggggctgcaggatacaggatagtgaaggatccttctcttcaacctgaaggactcttcagcaattaacaccttgactctctttttatgcaacacttttttttttgtcctctcagagactatttgtacttggtcttttcttctttcaggatttctatagcttcttttagagactcaaagtgcttccagttttgttacctcatttattctctaggggcaggaattaaggtcttgatggagatgaagtggtacatcacttactgggctgtggaggcagtctacaacaggca

SEQ ID NO: 457389 - DNA, 565 bp, Homo sapiens
ttattggtttgatttggtttcactgctcctaagttccttttgtcttatcttgcaagcatatcactgtgagtacttaaatcattaacaactcattaaaactcttgaccattttcattttctaccaagctgaagcctgggtgtggtggaaacttgtgcaggcctgcttggctgtgcggcaactgagcagctcctagcagtttggctgtcaaaaggccactgaataaacaaattgataggaatggcggacataatctctgcagttccttgaaaagaaggaaggggctgcaggatacaggatagtgaaggatccttctcttcaacctgaargactcttcagcaattaacaccttgactctctttttatgcaacacttttttttttgtcctctcagagactatttgtacttggtcttttcttctttcaggatttctatagcttcttttagagactcaaagtgcttccagttttgttacctcatttattctctaggggcaggaattaaggtcttgatggagatgaagtggtacatcacttactgggctgtggaggcagtctacaacaggca

SEQ ID NO: 457390 - DNA, 419 bp, Homo sapiens
tcctgtggtaactctgggtagaactcatgagtatgaagcaacttgtatctgtgcttccaytgtttattagagcttattttatgaaaaggatgggaagggcaaccctgaggtagcattaagcctggacacaccacagtgaagtttccttgataaccacctgtagcttgttcagttctgttagtactggattttgagaaagagaaatagaaactcaagagatctgagttgatccctcagagtctacattaattctgtctccccaattctctcttcctcattattttccttggaccaactgatatctttattctctgatctcttgcagttccagttgatgggcaagtgggtgagtgatctctaactcagcttctccttctatgccactttcctacttccaaaggatgggtcctattaacctg

SEQ ID NO: 457391 - DNA, 419 bp, Homo sapiens
tcctgtggtaactctgggtagaactcatgagtatgaagcaacttgtatctgtgcttccackgtttattagagcttattttatgaaaaggatgggaagggcaaccctgaggtagcattaagcctggacacaccacagtgaagtttccttgataaccacctgtagcttgttcagttctgttagtactggattttgagaaagagaaatagaaactcaagagatctgagttgatccctcagagtctacattaattctgtctccccaattctctcttcctcattattttccttggaccaactgatatctttattctctgatctcttgcagttccagttgatgggcaagtgggtgagtgatctctaactcagcttctccttctatgccactttcctacttccaaaggatgggtcctattaacctg

SEQ ID NO: 457392 - DNA, 419 bp, Homo sapiens
tcctgtggtaactctgggtagaactcatgagtatgaagcaacttgtatctgtgcttccactgtttattagagcttattttatgaaaaggatgggaagggcaaccctgaggtagcattaagcctggacrcaccacagtgaagtttccttgataaccacctgtagcttgttcagttctgttagtactggattttgagaaagagaaatagaaactcaagagatctgagttgatccctcagagtctacattaattctgtctccccaattctctcttcctcattattttccttggaccaactgatatctttattctctgatctcttgcagttccagttgatgggcaagtgggtgagtgatctctaactcagcttctccttctatgccactttcctacttccaaaggatgggtcctattaacctg

SEQ ID NO: 457393 - DNA, 419 bp, Homo sapiens
tcctgtggtaactctgggtagaactcatgagtatgaagcaacttgtatctgtgcttccactgtttattagagcttattttatgaaaaggatgggaagggcaaccctgaggtagcattaagcctggacacaccrcagtgaagtttccttgataaccacctgtagcttgttcagttctgttagtactggattttgagaaagagaaatagaaactcaagagatctgagttgatccctcagagtctacattaattctgtctccccaattctctcttcctcattattttccttggaccaactgatatctttattctctgatctcttgcagttccagttgatgggcaagtgggtgagtgatctctaactcagcttctccttctatgccactttcctacttccaaaggatgggtcctattaacctg

SEQ ID NO: 457394 - DNA, 539 bp, Homo sapiens
cgtggtcctattaacaaatttgtcaagagttggagtgtatttgttttctattgctgtgtaacaaatttagcaacaacatacatttaagatcttccagtttccatgggtcaggactcccatcacagcttagctgagtgctctgctgagagtcttccaaggctgcagttagggtgttgactttgctgtgtttctttttgcagctcttccaggctcacaaggtcactggcagaattcagttctttgtggttgtaggactgaggttcctgctttcttgctgcccatcagtggggggccactctcagctcctagaggcccttgccttgtggcactcttgyaggccctctcctggcgtggcagcttacctcttcaagttcaggaggagactttccatccagactgctaagatagagtcttacataatgtagcaatcccaagagtgacatttcatcacccttgtcatattctgttggctagaagcaagtcataggttccacccacactcaaggggattatgcaagggagtgagtcattgggatcat

SEQ ID NO: 457395 - DNA, 394 bp, Homo sapiens
ctggaattctaacctcaccattctgaaaaccaacataagtcacaatggcacctaccattgctcaggcatgggaaagcatcgctacacatcagcaggaatatcacaatacactgtgaaaggtattgtattggaatagtcatagaactgatagtccctccccctgagggaccatcataaatattctaaactcctcactttaatttacaagtgaagaaacygggctccagagaggtaaactgcattactaaaggccacaccatgaccagtagctggaaccagaactgaggtctctgggtcctagtccaatactctttccagtgtaccgcaacccccatcaataatcacaggagctaatgtcaatgtcagggcataatggtgatccatttcatccatc

SEQ ID NO: 457396 - DNA, 617 bp, Homo sapiens
ttgtattggaatagtcatagaactgatagtccctccccctgagggaccatcataaatattctaaactcctcactttaatttacaagtgaagaaactgggctccagagaggtaaactgcattactaaaggccacaccatgaccagtagctggaaccagaactgaggtctctgggtcctagtccaatactctttccagtgtaccgcaacccccatcaayaatcacaggagctaatgtcaatgtcagggcataatggtgatccatttcatccatcattattttagttgtaaagaatacagactcactctaggtagataggagagttagaaaataataccatggaatctcatggaagccccatagaaagagaaacctggaaaacatgaggaacgggctatactgtccatctacctctcagggacaaagcagcctctgtggtgccacttcttcctgagcatctgcaggctaagcagtttgcatatggccttgttctgaccctttcacggcctttcctcttaatacaatcactagcaacctttctctgtctgagaaaaaaaaagttcactcctgtgggaaagaaattattgtcccagattatcttttaaagtcaggaacaaaa

SEQ ID NO: 457397 - DNA, 617 bp, Homo sapiens
ttgtattggaatagtcatagaactgatagtccctccccctgagggaccatcataaatattctaaactcctcactttaatttacaagtgaagaaactgggctccagagaggtaaactgcattactaaaggccacaccatgaccagtagctggaaccagaactgaggtctctgggtcctagtccaatactctttccagtgtaccgcaacccccatcaataatcacaggagctaatgtcaatgtcagggcataatggtgatccatttcatccatcattattttagttgtaaagaatacagactcactctaggtagataggagagttagaaaataataccatggaatctcatggaagccccatagaaagagaaacctggaaaayatgaggaacgggctatactgtccatctacctctcagggacaaagcagcctctgtggtgccacttcttcctgagcatctgcaggctaagcagtttgcatatggccttgttctgaccctttcacggcctttcctcttaatacaatcactagcaacctttctctgtctgagaaaaaaaaagttcactcctgtgggaaagaaattattgtcccagattatcttttaaagtcaggaacaaaa

SEQ ID NO: 457398 - DNA, 617 bp, Homo sapiens
ttgtattggaatagtcatagaactgatagtccctccccctgagggaccatcataaatattctaaactcctcactttaatttacaagtgaagaaactgggctccagagaggtaaactgcattactaaaggccacaccatgaccagtagctggaaccagaactgaggtctctgggtcctagtccaatactctttccagtgtaccgcaacccccatcaataatcacaggagctaatgtcaatgtcagggcataatggtgatccatttcatccatcattattttagttgtaaagaatacagactcactctaggtagataggagagttagaaaataataccatggaatctcatggaagccccatagaaagagaaacctggaaaacatgargaacgggctatactgtccatctacctctcagggacaaagcagcctctgtggtgccacttcttcctgagcatctgcaggctaagcagtttgcatatggccttgttctgaccctttcacggcctttcctcttaatacaatcactagcaacctttctctgtctgagaaaaaaaaagttcactcctgtgggaaagaaattattgtcccagattatcttttaaagtcaggaacaaaa

SEQ ID NO: 457399 - DNA, 520 bp, Homo sapiens
aatggcaagtgtgtgagtcagggttcactcctagttgaccactgccaaaagggcatggttattgaccagatgacacggtcattcagggaaggatggaccatgtagggcaggggttcccaacccttactggtcygtggcctgttaggaactgggctgcacagcaggaggtgagcttcttcatgagccagcattacggcctgagctcctcctcctgtccaatcagtggtgacattagattctcatagaaacatgaatcctactgtgaattgtgcgtgcctgatgatctgaggtggaacagttaccttccaaaaccgtccccacttcaccccccggctgtggaaaagttgccttccacaaaatccatccctagtgccaaaaaggttggggaccactggtatagaggtatcctcagtaggactcagcaagctggcaaccctaattatgtctattaggacaccccaagaatggctctctgctggaagtaaaaagggttaatgccttatggattcattttctaggg

SEQ ID NO: 457400 - DNA, 473 bp, Homo sapiens
ttttgtgaaaaggacctggatgctaaacaggcaaccytgtcccccatcaactttctccttagagctatttccagctccagtgctgaatgcatctgtgacatccccactcctggaggggaatctggtcaccctgagctgtgaaacaaagttgctcttgcagaggcctggtttgtagctttacttctccttctacatgggcagcaagaccctgcgaggcaggaacacatcctctgaataccaaatactaactgctagaagagaagactctgggttatactggtgcgaggctgccacagaggatggaaatgtccttaagcacagccctgagttggagcttcaagtgcttggtgagaatgacgggaagccactggcacagaagaagggactcccttatctcccatgggactgaggtttgttcaagggtttttggcccagacaagaggggaaagtctcttcaggaaaagcccacaagc

SEQ ID NO: 457401 - DNA, 473 bp, Homo sapiens
ttttgtgaaaaggacctggatgctaaacaggcaaccctgtcccccatcaactttctccttagagctatttccagctccagtgctgaatgcatctgtgacatccccactcctggaggggaatctggtcaccctgagctgtgaaacaaagttgctcttgcagaggcctggtttgyagctttacttctccttctacatgggcagcaagaccctgcgaggcaggaacacatcctctgaataccaaatactaactgctagaagagaagactctgggttatactggtgcgaggctgccacagaggatggaaatgtccttaagcacagccctgagttggagcttcaagtgcttggtgagaatgacgggaagccactggcacagaagaagggactcccttatctcccatgggactgaggtttgttcaagggtttttggcccagacaagaggggaaagtctcttcaggaaaagcccacaagc

SEQ ID NO: 457402 - DNA, 447 bp, Homo sapiens
aatagtatagacaataaggaaggaaatagtacttacaaatgactcctaagggactgtgagactgagagggctcacgcctctgtgttcaggatacttagttcatggcttttctctttgactttactaaaagagaatgtctccatacgcgttctaggcatacaagggggtaactcatgatgagaaatggatgtgttattcttgccctctcttttgaggctctctcataacccctctatttctagagacaacaaaaatgttgccagtcctaggcccctgccctgtaggaaggcagaatgtaactgttctktttgtttaacgattaagtccaaatctccaagtgcggcactgcaaagagacgcttcaagtggggagaagcggcgatatcatagagtccagatcttgcctccagagatttgctttaccttcctgattttctggttactaatt

SEQ ID NO: 457403 - DNA, 601 bp, Homo sapiens
attagctagacctgcccagcgattccagccctgagaaccagacagaatggaggtatagcygacagctggctgggagggggctgacggtcctcactgccaccaggcttagttggagacagattccccgggctgtagagagacaacagtagaagcaaagagaccagttaggagtctaggtgagaggcagcggcagcctggactaacatggtaacagtggagctattgagagtggtcacatttggaagatgttttgtaggaagtgtcaacaaagtttcttattgattagatgtagggaatgtgagaaagagaaggcggggggaacacgtagattttgggtcaaagcaataaatattccattgacagaattgagacagcaagttggtggaggaggggaacggggtagcaagaagcaaatgtttcatattggacattttaagattcctatttgacatttaagagtaactcttgaaaaagcaatggatatatgaagaatcctagactagagatacaaatttgccaatcatcatatagatgtggtatttagagtcaggggactagaaagaacaatgtaagggggaagtacagatagaaaaaggtctaa

SEQ ID NO: 457404 - DNA, 601 bp, Homo sapiens
attagctagacctgcccagcgattccagccctgagaaccagacagaatggaggtatagccgacagctggctgggagggggctgacggtcctcactgccaccaggcttagttggagacagattccycgggctgtagagagacaacagtagaagcaaagagaccagttaggagtctaggtgagaggcagcggcagcctggactaacatggtaacagtggagctattgagagtggtcacatttggaagatgttttgtaggaagtgtcaacaaagtttcttattgattagatgtagggaatgtgagaaagagaaggcggggggaacacgtagattttgggtcaaagcaataaatattccattgacagaattgagacagcaagttggtggaggaggggaacggggtagcaagaagcaaatgtttcatattggacattttaagattcctatttgacatttaagagtaactcttgaaaaagcaatggatatatgaagaatcctagactagagatacaaatttgccaatcatcatatagatgtggtatttagagtcaggggactagaaagaacaatgtaagggggaagtacagatagaaaaaggtctaa

SEQ ID NO: 457405 - DNA, 519 bp, Homo sapiens
attcttaggtccttcatttttgtgttattgtaaatggtattgtcagaatcttcagaagtaattattggccaggtgcggtggttcatgtctgtaatcctagcactttgggaggccaaggtaggcagacacttgagccaggtgttggagaccagcctgggcaacatggcaaacctcatctttataaaaaatacaaaaattagccagtggcacacgyctgtagccccagctactcaggaggctgaagtaggaggatcaattgagcccaggaggcagaggctgcagtaagccaagatcgcaccactgcacttcagcctgggtggcagagggaaaccctgtctcaaaaataaataagtaaataaataaataaataaataaatgattattaccagtctcacagctgaggcagaaatttaaaacaaataaataataagtactgcatttattcactccaagaaaagtaaaagctaaggcccagaatgtggcaagacaagggttaaaaagaagagaacaagttttcct

SEQ ID NO: 457406 - DNA, 466 bp, Homo sapiens
tagattatgtgacctgtcactgtatgattaactgcttttgttttgtgtctgtaaggccgcttataaaaaccccactctgtctttgttcagtgctcagctttttagatgcaaacctgctgagccrtgcgtacctaaaataaacaacaatcctcctgtttttccatattggcctctcctttcctcagtttaccacaacatagccataatagtataaaaactgaaagaccctaagacacatatacattaagcttggcaacggaaagcaggatgtcacacacacacaaagctagtaatgtgaaaatctggtcttgcataaggtcttttaggtacagacttctttgttaatgcacattggcaggaaaatgggaacgaataaaattgcttgctgtccttctccctttattctccacttcttgttttttctaaatgtggggtcaaaacttccatgagggtaagaagttcagtt

SEQ ID NO: 457407 - DNA, 466 bp, Homo sapiens
tagattatgtgacctgtcactgtatgattaactgcttttgttttgtgtctgtaaggccgcttataaaaaccccactctgtctttgttcagtgctcagctttttagatgcaaacctgctgagccgtgcgtacctaaaataaacaacaatcctcctgtttttccatattggcctctcctttcctcagtttaccacaacatagccataatagtataaaaactgaaagaccctaagacacatatacattaagcttggcaacggaaagcaggatgtcacacacacacaaagctagtaatgtgaaaatctggtcttgcataaggtcttttaggtacagacttctttgttaatgcacattggcaggaaaatgggaacraataaaattgcttgctgtccttctccctttattctccacttcttgttttttctaaatgtggggtcaaaacttccatgagggtaagaagttcagtt

SEQ ID NO: 457408 - DNA, 621 bp, Homo sapiens
tgactagtaacctccactgtagtgaccaatagttttttttcctgaatatcgtaatgagctcatagattattgtttgcatttgagcccattgtagtcactattaattgttttagatgctcatattgtctcaggttaataagtatctcttcaagttgactcccatggccttttgacgtgatcctgttggacttggatggcttccttgytttctggcaaaaaaaaaaaaaaggtgttccaggatctatatcctgcaccatacatggagtcagccatttctctagggggtcttgattccttttagtagagaacacagtttgggctctaggactgaattacttttgtgaacctcctttcctgcgattacagcctgcacccctgcttatagccagtagaagctcttgttgggcatcaacagatcgaaaaccaccatgtagttctgcctcactcttacaaagattcatctcttgagaattttgtgctctacccccgttgtagtctttatggttttgaaacttttgcttcagtcaccctgaattttgccagccatagacatgccataccttggattgccaaactgccctcactggagccaatttctctggttagaatagttgtcccaac

SEQ ID NO: 457409 - DNA, 621 bp, Homo sapiens
tgactagtaacctccactgtagtgaccaatagttttttttcctgaatatcgtaatgagctcatagattattgtttgcatttgagcccattgtagtcactattaattgttttagatgctcatattgtctcaggttaataagtatctcttcaagttgactcccatggccttttgacgtgatcctgttggacttggatggcttccttgttttctggcaaaaaaaaaaaaaaggtgttccaggatctatatcctgcaccatacatggagtcagccatttctctagggggtcttgattccttttagtagagaacacagtttgggctctaggactgaattacttttgtgaacctcctttcctgcgattacagcctgcacccctgcttatagccagtagaagctcttgttgggcatcaacagatcgaaaaycaccatgtagttctgcctcactcttacaaagattcatctcttgagaattttgtgctctacccccgttgtagtctttatggttttgaaacttttgcttcagtcaccctgaattttgccagccatagacatgccataccttggattgccaaactgccctcactggagccaatttctctggttagaatagttgtcccaac

SEQ ID NO: 457410 - DNA, 562 bp, Homo sapiens
ctttgagccactcagagtagcgtgtagagtggtcattcaggactgtgctaacttacacttcattgtatcaaatgggagatccagtaatttatagtctattatttctggagtctggagatgactctgtataagctttgctgaagcagattttattacattagaagagaacctacctggctgcatccaacaccagaagcttttagatgctaagtaaggaggtcatagtaaaggtaacagaatgactctggaacccattacccctaccaagaaggggagtaatgaattccgggttgccctcttttcatttccctttgattttgagtaataaattccctycttacttcccagctgaacaatttgggagtctgtattccctagaaagactgttcacatacccgtcagactaaattaggtgaaatctctttggccttaatgaatgttgaaggattttaaagggctaatggaaattcttctagaagtaacaattcccattctattggtgaggcagttctaaagaaagtccctgaacctcttaggttattttgtacagcaaaagaaccag

SEQ ID NO: 457411 - DNA, 555 bp, Homo sapiens
tgtgttcgctccagtccttgtgtcaaagttcactttgagccactcagagtagcgtgtagagtggtcattcaggactgtgctaacttacacttcattgtatcaaatgggagatccagtaatttatagtctattatttctggagtctggagatgactctgtataagctttgctgaagcagattttattacattagaagagaacctacctggctgcatccaacaccagaagcttttagatgctaagtaaggaggtcatagtaaaggtaacagaatgactctggaacccattacccctaccaagaaggggagtaatgaattccgggttgccctcttttcatttccctttgattttgagtaataaattccctccttacttcccagctgaacaatttgggagtctgtattccctagaaagactgttcacatacccrtcagactaaattaggtgaaatctctttggccttaatgaatgttgaaggattttaaagggctaatggaaattcttctagaagtaacaattcccattctattggtgaggcagttctaaagaaagtcc

SEQ ID NO: 457412 - DNA, 630 bp, Homo sapiens
gctttatttggaagattcagcttgagggagtcattattagaagattcttagaacacttgagccctctgaaaatgaaaagtctcacatttcccttctactttggctctctgttggaggggaacacttatgtcattaaaaacattgtactttgcttatctaattcccactctgtgttcacattaatagcttcccattgctcttaggaacaattccatacttcttcagactatttgcaatactcaccagagcttgacccctgcttctttcaacagtctcatctttttttcctcttctcatttaaattctatgcttcagttaccctgaatttcttcgattatttcggttccttgcatgcagcttcttttctgttgcctctgggcctttgaacatgctgttggctggagtacttttcctgccttcttcccataggtaattccaatcctttacrtctagctcctctgcaagccccttgctgagccctagaccaatttctgtatactcctacagcatcgtctttttccccgataatgggctttttacattgcaattacttcttatggtagtctgtcttctctggtagactagattcctttggaaggcaggcccaagaagctggtttaaattactgga

SEQ ID NO: 457413 - DNA, 630 bp, Homo sapiens
gctttatttggaagattcagcttgagggagtcattattagaagattcttagaacacttgagccctctgaaaatgaaaagtctcacatttcccttctactttggctctctgttggaggggaacacttatgtcattaaaaacattgtactttgcttatctaattcccactctgtgttcacattaatagcttcccattgctcttaggaacaattccatacttcttcagactatttgcaatactcaccagagcttgacccctgcttctttcaacagtctcatctttttttcctcttctcatttaaattctatgcttcagttaccctgaatttcttcgattatttcggttccttgcatgcagcttcttttctgttgcctctgggcctttgaacatgctgttggctggagtacttttcctgccttcttcccataggtaattccaatcctttacatctagctcctctgcragccccttgctgagccctagaccaatttctgtatactcctacagcatcgtctttttccccgataatgggctttttacattgcaattacttcttatggtagtctgtcttctctggtagactagattcctttggaaggcaggcccaagaagctggtttaaattactgga

SEQ ID NO: 457414 - DNA, 590 bp, Homo sapiens
cctgctattgccttcaagaagaaatggtaaaaaggtggttccccctctttcccaacacatacacctaaacattcagagttaagacagygagaatgaggattcttaatttggtgaaggtgaaggaattcggggattctttttgttaaccaatcaacattgccagcctagcactaaaagattccactatgacagacaaccacatgaggccgtatctcagcattagaaacaaatggatgggggagagtggttaagagcactgattttaagaattaaacacatctaggttcaaatcctgttgtgatctgttactgtctgagtgagcttaggcagttaactgatctctctgaacctcagtggtccctcgttgtgaaatgggaggaatcgtggttgccttttaatggaggcttactaggcatcaggcatgtagcaagcactttatattctccatctcttttattcttcataacaatccagtggagtggctgctattacaaactccattttgtagataatgaaaacaacttagagagattaagtgtcttgttcagggagacacaggtaccaggtggcagaactacaattaaaattca

SEQ ID NO: 457415 - DNA, 590 bp, Homo sapiens
cctgctattgccttcaagaagaaatggtaaaaaggtggttccccctctttcccaacacatacacctaaacattcagagttaagacagtgagaatgaggattcttaatttggtgaaggtgaaggaattcggggattctttttgttaaccaatcaacattgccagcctagcactaaaagattccactatgacagacaaccacatgaggccgtatctcagcattagaaacaaatggatgggggagagtggttaagagcactgattttaagaattaaacacatctaggttcaaatcctgttgtgatctgttactgtctgagtgagcttaggcagttaactgatctctctgaacctcagtggtccctckttgtgaaatgggaggaatcgtggttgccttttaatggaggcttactaggcatcaggcatgtagcaagcactttatattctccatctcttttattcttcataacaatccagtggagtggctgctattacaaactccattttgtagataatgaaaacaacttagagagattaagtgtcttgttcagggagacacaggtaccaggtggcagaactacaattaaaattca

SEQ ID NO: 457416 - DNA, 541 bp, Homo sapiens
ccactatgacagacaaccacatgaggccgtatctcagcattagaaacaaatggatgggggagagtggttaagagcactgattttaagaattaaacacatctaggttcaaatcctgttgtgatctgttactgtctgagtgagcttaggcagttaactgatctctctgaacctcagtggtccctcgttgtgaaatgggaggaatcgtggttgccttttaatggaggcttactaggcatcaggcatgtagcaagcactttatattctccatctcttttattcttcataacaatccagtggagtggctgctattacaaactccattttgtagataatgaaaacaacttagagagattaagtgtcttgttcagggagacacaggtaccaggtggcagaactacaattaaaatycaagtttttctgaatgcggtctatcctcttaatcactcagctttgctgtgaactaatctccctggggtgttttgaggattaagtgagatacctttatacttgaatagtgactcaataggagcctacttggcac

SEQ ID NO: 457417 - DNA, 425 bp, Homo sapiens
ccaacatccagaacagtacctgtcacaaggtaggtgtcttagtctagagtccttgaaaatataaattagagggagaggcaaaagcgtacacttcatttgcaagagtcatcccagggaagcaggaatggggagaaagggaaggagggagaacataacaagagattgcttataagttgactatagcttcatgagaggatgattgcttggtcttgtgggacatcttcaygtaactatgtgaagctactgcatctctgaacagtccactggggcaaggagggaaaatatttcattcgtcagtttctatctcctgtaggtcaaagtttgattcttgaagcctccacttctctgtacttgttgttgacatgactgctgattgaataggtcactccaagtctcatgcttcagtagcaggagagaaagcctgg

SEQ ID NO: 457418 - DNA, 425 bp, Homo sapiens
ccaacatccagaacagtacctgtcacaaggtaggtgtcttagtctagagtccttgaaaatataaattagagggagaggcaaaagcgtacacttcatttgcaagagtcatcccagggaagcaggaatggggagaaagggaaggagggagaacataacaagagattgcttataagttgactatagcttcatgagaggatgattgcttggtcttgtgggacatcttcatgtaactatgtgaagctactgcatctctgaacagtccactggggcaaggagggaaaatatttcattcktcagtttctatctcctgtaggtcaaagtttgattcttgaagcctccacttctctgtacttgttgttgacatgactgctgattgaataggtcactccaagtctcatgcttcagtagcaggagagaaagcctgg

SEQ ID NO: 457419 - DNA, 425 bp, Homo sapiens
ccaacatccagaacagtacctgtcacaaggtaggtgtcttagtctagagtccttgaaaatataaattagagggagaggcaaaagcgtacacttcatttgcaagagtcatcccagggaagcaggaatggggagaaagggaaggagggagaacataacaagagattgcttataagttgactatagcttcatgagaggatgattgcttggtcttgtgggacatcttcatgtaactatgtgaagctactgcatctctgaacagtccactggggcaaggagggaaaatatttcattcgtcartttctatctcctgtaggtcaaagtttgattcttgaagcctccacttctctgtacttgttgttgacatgactgctgattgaataggtcactccaagtctcatgcttcagtagcaggagagaaagcctgg

SEQ ID NO: 457420 - DNA, 425 bp, Homo sapiens
ccaacatccagaacagtacctgtcacaaggtaggtgtcttagtctagagtccttgaaaatataaattagagggagaggcaaaagcgtacacttcatttgcaagagtcatcccagggaagcaggaatggggagaaagggaaggagggagaacataacaagagattgcttataagttgactatagcttcatgagaggatgattgcttggtcttgtgggacatcttcatgtaactatgtgaagctactgcatctctgaacagtccactggggcaaggagggaaaatatttcattcgtcagtttctatctcctgtaggtcaaagtttgattcttgragcctccacttctctgtacttgttgttgacatgactgctgattgaataggtcactccaagtctcatgcttcagtagcaggagagaaagcctgg

SEQ ID NO: 457421 - DNA, 561 bp, Homo sapiens
tcgtaggcatttcacgggccaactgaacttcttggtcttctttaatcatttttgtttgtccttctcactggtaacgaataggtgcttggtccctgcttgttgaactaaacttgaaacaatgtgccagtacttatgctaagctgggtcctgcacaaaatgaagtgaactctccagagccagctctacaggaacgtagggtctggattttaatattgatctggtttgttttcaactcgattgtgttggagccttgagmacatacagtgtgcctttgtcctctaagagagtggacatgtttgaactgacatttggtcttttcaggaattgtttggtaggaaatttcttggatttttactctccttgagctttgactcttcttgggctgtcctgcttttcaagactctcattttgctttgtccagagtttacagagccctttagaactgtgtttgtatctgttctgctcatcaggcatgcaggaccctctctgctggccctggcctgcttatttaccccttctcttcatactcttctgtgtgaaccttcaagtcacaaggcttct

SEQ ID NO: 457422 - DNA, 540 bp, Homo sapiens
ccccctcgcttctgtttaaatccccccctacccaaggtctcaagaggtccatgctagattttactgatttcttcctctcttaatgtagtctgggaccattattttggcacttaggatgccagtcttatactcttaaatatttttgcatttagtcctccttttctccaattcaattgtaagctccttgagagtaagagactgtcttacattttcttgtgtaaatatcttacattttcatgtgtgttccaatgattcatcacccagatcttcccacagagttggtgttagataaatatttgctgggtttgttggttgattatcgtggtccttgggaactgacttgcagcttgtcactagcaatgaatcaggagcatcagactagctgacatttcccagaggagctgctggtcttcacatcctgcatctttagtttgtggtacaagttaattctaaattttggaccttgagaattctgtttcttaaacatctcargcaagacctaggagctaaaattactactttggcatttgatgtggcagc

SEQ ID NO: 457423 - DNA, 553 bp, Homo sapiens
catttgggatccttttgtctttaacttgcttttgagtcacttgaaagaactaaggcagcctgccaragtagtcacgatgatattgaaatatccctctcattggctttatgagattgccttctgtgcattcacttggggctggaaagttaatggatgactgaacgtcttttggaaacttgtagggccatttttcttcttctctttcccactagctggtttctctttgttaccaaaggtgcatgcattgtttttaggtagtgtggagttaatgtaaggggaggagtgtttctttctttcatagctttggaataatctaccgcacagggcagacagttttgaagatggccatgtttaaagtccatcagagaaaactacagtcaaaaggaaagccagggaggccagagttccagtcacaactgcccccactacccccttcctcccaccaagattactgtcttacctttgaacccaaggatgtctcttatggctccagtttgctgactactgtgaagggaaggatggtttggaatcatactatagagtcatgggctct

SEQ ID NO: 457424 - DNA, 473 bp, Homo sapiens
catatatttgcaaggatgtgtgtgtcttcaatgctgttcttactttgatcaatttttcctacttccctggagtttcacccagatcagatttttagagtatgtgccaacatgagatgactaaaatattcgagacagaaagaaaaatctgagccccagtttagagattctcaatcttcctccagggatgatcataagactggcttgatggatgaggggcaaatgtcaccatgcacatcactctgaattcccttcattgcagtagcaaaagcatgtttcccagtttggacatagaattaaacagcccatactcttycagtgcccaaagtttttgaatgaattgattcttccttataactgtcatttagacatgcctcctctcctgaccttctcctattctcattgctttggtttgccccaaagaaaaggaagaaaagaaaagcagataaagctctcctttccccattacaactccc

SEQ ID NO: 457425 - DNA, 563 bp, Homo sapiens
gggttcatttggtccagccctgtttccaggcaaggctgcaatcagaaggtaacagataacagcagatgtactaaacaagcagacaaactaacaatggacattaagtacatcataccaagaggcttttcaaaatcagtaatcaagtggcactatcaggagaacctttataggaaaaaaaaaaagtcttaattgcccaatcaaaaggaaatacttgtattccttatgtcatttaccttaggaacaaggtaaatgattcagktacgctctgtattcatgctcttttactaaaaccttcttggggactaaaccaactgtaggaaaatatccaacaatttgacgtcatgttttcagaagacaaaaaaaaaaaaaaaaacccacgataaaaccctgttcactgaaatcccattcatacatttatttttttaccaaagtaatacatgcgaacaaaagcaatcaactggtggcagcatttaggcccactaagacacaaccacccattaccaaagaaggcctgcacatcattctgactcatgtttggaactttctctagagcacatctcttg

SEQ ID NO: 457426 - DNA, 616 bp, Homo sapiens
gaatgaagaataataatctcattttaagtagcatatgcagtgctgtgcgaccctttaaaaagctgcctttgttcactgaagtattgcttgtaatagcaaatactggaaacaactcaagtgcacatttgtaaggaactgattcaataaagtaggaggcagccatccacacaatggaatactatgcagctctgatatacgaatgagaaagctttctctgtaccaacaaggaaagatccccaagacatactgttaaggacaaaatagtacacaacaggttagataatgatttacctttcatgtaaaagaacgtggaggggtaagaacatatrttcatatctccttttacttacataaagaaacactgcacagatatataaggaactattaagagtgacacccacaataaggagcaggggttctacagggtggaccagacaggagtggaaataatactcgtcaacatatgcctttcaaaaaaattttttttcatattttaaatttacctttactacctatttatttggttcaaggctccatttcgtccactttgggactaggtaatcaggctttaaactacttacctctgcctgtcagaagtcactaacctcatgacagg

SEQ ID NO: 457427 - DNA, 568 bp, Homo sapiens
aatattatatgtaagacggggttaaaatgtgttcaaaaagtgtcttctaaaaatgtacaaacaacagaggtgtgacagtatgctgaaaaaaatatgaggggggtggaagagcgggatagagagtggtcctccttccctactccctttacaatgttgatttcatccttggrttttcataatgaacttctgtaaaggggagatttgcatccagttttaagaccattttcagcacaagtgcttttttattaagtatttctgtggttccccttccccagacaaaaaggaaaggggaagctattgttcaggacttctaatgggtttatctagctttgtgggttaaaagaacccacaatatttaataaatttaataatatttaataatatttaataaatttattaatatttaacaatgtttaataaaacttagccacttacctaacccttgggtcagagagttcttgctctaacaaaacaccaagaacaactagacacttctacctacccatagcctcaactagataaatgcaaacatgttggctcactcctgtaatcccagtactttggaaag

SEQ ID NO: 457428 - DNA, 559 bp, Homo sapiens
caacccaactaagagaaagaggttggcagccagaggaacagataaggcaargcttcatctgagcctatcagcttctgcagaaaaaatatgccatggtcatgggatgatctgactgactgactgatgcaaactgtccacacagctagtttacctttgcctcctctctggatccaaaatgtaatggaaatgaatgccttatgaaatccaaccctgaccttctcatcacacacccttcttaggagagcccacactagctaacgactccagaattctggttaccataagtctacgcatcatgccaccgagctctgtctttccaactaccttttagacatctctacctggatgtcccgggagtctcatgtccaaagattaattccttcttcctggcagtgtatgctctttgtatctccacttctcctgtctcagttaatagcctgttgattgatcaatttcattctaggttcatggaacaccaaccatgcaccaagatccctgaaccagaagcctgaagggcatctacagtcctccttctgtcctactcctatttctattcacc

SEQ ID NO: 457429 - DNA, 559 bp, Homo sapiens
caacccaactaagagaaagaggttggcagccagaggaacagataaggcaaggcttcatctgagcctatcagcttctgcagraaaaatatgccatggtcatgggatgatctgactgactgactgatgcaaactgtccacacagctagtttacctttgcctcctctctggatccaaaatgtaatggaaatgaatgccttatgaaatccaaccctgaccttctcatcacacacccttcttaggagagcccacactagctaacgactccagaattctggttaccataagtctacgcatcatgccaccgagctctgtctttccaactaccttttagacatctctacctggatgtcccgggagtctcatgtccaaagattaattccttcttcctggcagtgtatgctctttgtatctccacttctcctgtctcagttaatagcctgttgattgatcaatttcattctaggttcatggaacaccaaccatgcaccaagatccctgaaccagaagcctgaagggcatctacagtcctccttctgtcctactcctatttctattcacc

SEQ ID NO: 457430 - DNA, 559 bp, Homo sapiens
caacccaactaagagaaagaggttggcagccagaggaacagataaggcaaggcttcatctgagcctatcagcttctgcagaaaaaatatgccatggtcatgggatgatctgactgactgactgatgcaaactgtccacacagctagtttacctttgcctcctctctggatccaaaatgtaatggaaatgaatgccttatgaaatccaaccctgaccttctcatcacacacccttcttaggagagcccacactagctaacgactccagaattctggttaccataagtctasgcatcatgccaccgagctctgtctttccaactaccttttagacatctctacctggatgtcccgggagtctcatgtccaaagattaattccttcttcctggcagtgtatgctctttgtatctccacttctcctgtctcagttaatagcctgttgattgatcaatttcattctaggttcatggaacaccaaccatgcaccaagatccctgaaccagaagcctgaagggcatctacagtcctccttctgtcctactcctatttctattcacc

SEQ ID NO: 457431 - DNA, 520 bp, Homo sapiens
atgcaccaagatccctgaaccagaagcctgaagggcatctacagtcctccttctgtcctactcctatttctattcaccttgtcaacaataagctgcactgattttttacctcctaaatatttctcaaaacctcacttccccttcatattcactggcactcccttattcagcatctcatcattcattcaacaatatttaatgagtataaagcatacctaggtgtttttaaacagaacaaaaacggtgtgatctttgctttctggtggctcaacatctagttatttcttatctgaactattcagatatactcttgtctcctaccattaattatctcaacagtagccagagtgtctcctcaaaacttaaattagatcatttaattcagggatagtaaactyttcctataaaggccagatagtaaatattttaggcttctgggccatatgttctctgttgaaactactcaactctgctcttgtaacattaaaaatagccatggacgatatacaaacccatgggt

SEQ ID NO: 457432 - DNA, 580 bp, Homo sapiens
gggcatctacagtcctccttctgtcctactcctatttctattcaccttgtcaacaataagctgcactgattttttacctcctaaatatttctcaaaacctcacttccccttcatattcactggcactcccttattcagcatctcatcattcattcaacaatatttaatgagtataaagcatacctaggtgtttttaaacagaacaaaaacggtgtgatctttgctttctggtggctcaacatctagttatttcttatctgaactattcagatatactcttgtctcctaccattaattatctcaacagtagccagagtgtctcctcaaaacttaaattagatcatttaattcagggatagtaaactcttyctataaaggccagatagtaaatattttaggcttctgggccatatgttctctgttgaaactactcaactctgctcttgtaacattaaaaatagccatggacgatatacaaacccatgggtatgactgttccaatatggcttattcataaaaataggcagcaggacagatttgacccatgggctgtagtttgctgacccctgatttaattaat

SEQ ID NO: 457433 - DNA, 520 bp, Homo sapiens
atgcaccaagatccctgaaccagaagcctgaagggcatctacagtcctccttctgtcctactcctatttctattcaccttgtcaacaataagctgcactgattttttacctcctaaatatttctcaaaacctcacttccccttcatattcactggcactcccttattcagcatctcatcattcattcaacaatatttaatgagtataaagcatacctaggtgtttttaaacagaacaaaaacggtgtgatctttgctttctggtggctcaacatctagttatttcttatctgaactattcagatatactcttgtctcctaccattaattatctcaacagtagccagagtgtctcctcaaaacttaaattagatcatttaattcagggatagtaaactcttcctataaaggccagatagtaaatattttaggcttctgggccatatgttctctgttgaaactactcaactctgctcttstaacattaaaaatagccatggacgatatacaaacccatgggt

SEQ ID NO: 457434 - DNA, 566 bp, Homo sapiens
gtgacaattccaggccttatcatgttcaacaaactggtcacaatgtgtcagatgaagggcaagatcaattctctgggcctcttgcttctacatctcttatagaaagttaccatcatcaaaatctttcgcatcactcaaatcatcaacaatagttagaagaacaataacacacacaaaaaaattagtagcaaagataagccagtacaagtaagtgtgacacagtccaaaccaacctgggcacattctcacaatcccttggaaatgactttacctgaagkctacgtgactcatttaactcggcactaagatggaaaggtctagggctctacagaagttcctagtaggaaaacttcattcttttccaagccaggtctccagggcctggctctgacatggttaccacttccacggagaagctgacaacagctggtcacattcttttctctaccctattcctccccatcaggtgaagatagctaactgccatgtatcttatctaaggaggctaacttgcagcaatgatgtggcatgacaagtgaaaagtaatggggatcttgaacagtcaa

SEQ ID NO: 457435 - DNA, 550 bp, Homo sapiens
ctctgcccagcttccaagcccaggccctgagacccacactgctgtttgtttcggcacctgcaagcagcttgttcacaagcatccagactacagagcaagaggagtttcagaagggccctccaacaagtgagtggcctgggaagaaaagtgacaggcagggtctaatgtcccacagtagcttgttttcactgccactttggcattacctaccatggccagcagctattcaaacactctgcccaatgcccagccacaggatcctattaattctcttcaattaagagaggacctaccctggttcccagaaagccaaaagtaagtgtcagtttctccctctaggcagtctctagatttaagggttcctttcacctcgcctagaagggccctcaaccttgaaaataagaagcagcactatgaaaacaaactacccatttctcaactgttcaaagattagaccttgtaccacctccttgctggctcccaaagagacctcatctataaatggaaataataacacaacatgycttgttgtgtcttctttcagggctgt

SEQ ID NO: 457436 - DNA, 510 bp, Homo sapiens
cgggtgatactttcttaactgacttgccagcttatgtgacataccaacttctcttcaaaataaactggctgagttgcatagcacactggaggctggttgtgtattactcacatctactcccaccagccaggttggctgcttcagggtcagtagttagttcacgctaggtatacttgttattttaattacatattaaattmttatataatacaaacaagtgaaatatgagtataaaaaagttatttctatgaaaaagaggttgaatgcttggaagaaatttgaaggcaagttgctaaaaaaaattcctcctgaattagatatgggcaagacaacagtaaaaggttgtagtggtggagcttaaaaatctggaagaattctgcccttcatttctcaaatgtatttaagaacttggttcacttaaactggaaatcacagatcaaatgttaagtgtataatttatgaaagaaagtcaactgaactctacttgaaagatccacactttaagaaaaa

SEQ ID NO: 457437 - DNA, 510 bp, Homo sapiens
cgggtgatactttcttaactgacttgccagcttatgtgacataccaacttctcttcaaaataaactggctgagttgcatagcacactggaggctggttgtgtattactcacatctactcccaccagccaggttggctgcttcagggtcagtagttagttcacgctaggtatacttgttattttaattacatattaaattcttatataatacaaacaagtgaaatatgagtataaaaaagwtatttctatgaaaaagaggttgaatgcttggaagaaatttgaaggcaagttgctaaaaaaaattcctcctgaattagatatgggcaagacaacagtaaaaggttgtagtggtggagcttaaaaatctggaagaattctgcccttcatttctcaaatgtatttaagaacttggttcacttaaactggaaatcacagatcaaatgttaagtgtataatttatgaaagaaagtcaactgaactctacttgaaagatccacactttaagaaaaa

SEQ ID NO: 457438 - DNA, 510 bp, Homo sapiens
cgggtgatactttcttaactgacttgccagcttatgtgacataccaacttctcttcaaaataaactggctgagttgcatagcacactggaggctggttgtgtattactcacatctactcccaccagccaggttggctgcttcagggtcagtagttagttcacgctaggtatacttgttattttaattacatattaaattcttatataatacaaacaagtgaaatatgagtataaaaaagttatttctatgaaaaagaggttgaatgcttggaagaaatttgaaggcaagttgctaaaaaaaattsctcctgaattagatatgggcaagacaacagtaaaaggttgtagtggtggagcttaaaaatctggaagaattctgcccttcatttctcaaatgtatttaagaacttggttcacttaaactggaaatcacagatcaaatgttaagtgtataatttatgaaagaaagtcaactgaactctacttgaaagatccacactttaagaaaaa

SEQ ID NO: 457439 - DNA, 510 bp, Homo sapiens
cgggtgatactttcttaactgacttgccagcttatgtgacataccaacttctcttcaaaataaactggctgagttgcatagcacactggaggctggttgtgtattactcacatctactcccaccagccaggttggctgcttcagggtcagtagttagttcacgctaggtatacttgttattttaattacatattaaattcttatataatacaaacaagtgaaatatgagtataaaaaagttatttctatgaaaaagaggttgaatgcttggaagaaatttgaaggcaagttgctaaaaaaaattcctsctgaattagatatgggcaagacaacagtaaaaggttgtagtggtggagcttaaaaatctggaagaattctgcccttcatttctcaaatgtatttaagaacttggttcacttaaactggaaatcacagatcaaatgttaagtgtataatttatgaaagaaagtcaactgaactctacttgaaagatccacactttaagaaaaa

SEQ ID NO: 457440 - DNA, 622 bp, Homo sapiens
gatagcaaaatgagtttatattcatgcagcccaatccaagcaggtagcagaaaaggctgccttgggattttataaaatagacctgttaaatacttctcaagtagatcaagtgcaggtggaatactaaattttagccatatttcaaaagactgagatgctaatgcctgtgaacatgygctatacactaactactcatggcctgaagcacagaccaaaaggtgaatgatatcccaaatgccacctcagttttggtcacaggtctggatacaactcattggttgatccaagcatctgatgttccaccttgacatgtgatgctatctctggaaaaagaaaatgtcgcaggtgttgagaaaaggtacaagtaccaactatcaaagaggagtaagatcccttcccaagacccctttatagtcagtctaatacctttcggtttattcgcctagaatgctggacttctataccacataacaagattccacacactgaaacggaaccaacatcattagcttcttaccagtgttctgccatcgagatgcagtctgtcaagagaagcagcacagagtctcatgtcaagagaagtctgcagcggcagaaagacaactaaaaagagagacttcag

SEQ ID NO: 457441 - DNA, 622 bp, Homo sapiens
gatagcaaaatgagtttatattcatgcagcccaatccaagcaggtagcagaaaaggctgccttgggattttataaaatagacctgttaaatacttctcaagtagatcaagtgcaggtggaatactaaattttagccatatttcaaaagactgagatgctaatgcctgtgaacatgtgctatacactaactactcatggcctgaagcacagaccaaaaggtgaatgatatcccaaatgccacctcagttttggtcacaggtctggatacaactcattggttgatccaagcatctgatgttccaccttgacatgygatgctatctctggaaaaagaaaatgtcgcaggtgttgagaaaaggtacaagtaccaactatcaaagaggagtaagatcccttcccaagacccctttatagtcagtctaatacctttcggtttattcgcctagaatgctggacttctataccacataacaagattccacacactgaaacggaaccaacatcattagcttcttaccagtgttctgccatcgagatgcagtctgtcaagagaagcagcacagagtctcatgtcaagagaagtctgcagcggcagaaagacaactaaaaagagagacttcag

SEQ ID NO: 457442 - DNA, 622 bp, Homo sapiens
gatagcaaaatgagtttatattcatgcagcccaatccaagcaggtagcagaaaaggctgccttgggattttataaaatagacctgttaaatacttctcaagtagatcaagtgcaggtggaatactaaattttagccatatttcaaaagactgagatgctaatgcctgtgaacatgtgctatacactaactactcatggcctgaagcacagaccaaaaggtgaatgatatcccaaatgccacctcagttttggtcacaggtctggatacaactcattggttgatccaagcatctgatgttccaccttgacatgtgatgctatctctggaaaaagaaaatgtcgcaggtgttgagaaaaggtacaagtaccaactatcaaagaggagtaagatcccttcccaagacccctttatagtcagtctaatacmtttcggtttattcgcctagaatgctggacttctataccacataacaagattccacacactgaaacggaaccaacatcattagcttcttaccagtgttctgccatcgagatgcagtctgtcaagagaagcagcacagagtctcatgtcaagagaagtctgcagcggcagaaagacaactaaaaagagagacttcag

SEQ ID NO: 457443 - DNA, 632 bp, Homo sapiens
ctggaaaaagaaaatgtcgcaggtgttgagaaaaggtacaagtaccaactatcaaagaggagtaagatcccttcccaagacccctttatagtcagtctaatacctttcggtttattygcctagaatgctggacttctataccacataacaagattccacacactgaaacggaaccaacatcattagcttcttaccagtgttctgccatcgagatgcagtctgtcaagagaagcagcacagagtctcatgtcaagagaagtctgcagcggcagaaagacaactaaaaagagagacttcagtggaatttgagtcacctgacattagtcttaaaaaagatatttaaaatacagagaatcccactgatggaggagagaaaaataaccctctttttttctttaaagacaggcattgatatgagcgaaaggaaaagaactggggaagtctttgtatattgagagctcagtttatttttactctctgccaatagaggcaaggtaattctataagcaccatttaactttctcactacaaacaaaatagagtaagtcgtattaacgacttacttgcgttctaaacttccagctccagaacacttttttccccctgaaaattaaattgattcttacagaatg

SEQ ID NO: 457444 - DNA, 632 bp, Homo sapiens
ctggaaaaagaaaatgtcgcaggtgttgagaaaaggtacaagtaccaactatcaaagaggagtaagatcccttcccaagacccctttatagtcagtctaatacctttcggtttattcgcctagaatgctggacttctataccacataacaagattccacacactgaaacrgaaccaacatcattagcttcttaccagtgttctgccatcgagatgcagtctgtcaagagaagcagcacagagtctcatgtcaagagaagtctgcagcggcagaaagacaactaaaaagagagacttcagtggaatttgagtcacctgacattagtcttaaaaaagatatttaaaatacagagaatcccactgatggaggagagaaaaataaccctctttttttctttaaagacaggcattgatatgagcgaaaggaaaagaactggggaagtctttgtatattgagagctcagtttatttttactctctgccaatagaggcaaggtaattctataagcaccatttaactttctcactacaaacaaaatagagtaagtcgtattaacgacttacttgcgttctaaacttccagctccagaacacttttttccccctgaaaattaaattgattcttacagaatg

SEQ ID NO: 457445 - DNA, 632 bp, Homo sapiens
ctggaaaaagaaaatgtcgcaggtgttgagaaaaggtacaagtaccaactatcaaagaggagtaagatcccttcccaagacccctttatagtcagtctaatacctttcggtttattcgcctagaatgctggacttctataccacataacaagattccacacactgaaacggaaccaacatcattagcttcttaccagtgttctgccatcgagatgcagtctgtcaagagaagcagcacagagtctcatgtcaagagaagtctgcagcrgcagaaagacaactaaaaagagagacttcagtggaatttgagtcacctgacattagtcttaaaaaagatatttaaaatacagagaatcccactgatggaggagagaaaaataaccctctttttttctttaaagacaggcattgatatgagcgaaaggaaaagaactggggaagtctttgtatattgagagctcagtttatttttactctctgccaatagaggcaaggtaattctataagcaccatttaactttctcactacaaacaaaatagagtaagtcgtattaacgacttacttgcgttctaaacttccagctccagaacacttttttccccctgaaaattaaattgattcttacagaatg

SEQ ID NO: 457446 - DNA, 632 bp, Homo sapiens
ctggaaaaagaaaatgtcgcaggtgttgagaaaaggtacaagtaccaactatcaaagaggagtaagatcccttcccaagacccctttatagtcagtctaatacctttcggtttattcgcctagaatgctggacttctataccacataacaagattccacacactgaaacggaaccaacatcattagcttcttaccagtgttctgccatcgagatgcagtctgtcaagagaagcagcacagagtctcatgtcaagagaagtctgcagcggcagaaagacaactaaaaagagagacttcagtggaatttgagtcacctgacattagtcttaaaaaagatatttaaaatacagagaatcccactgatggaggagagaaaaataaccctctttttttctttaaagacaggcattgatatgagcgaaaggaaaagaactggggaagtctttgtatattgagagctcagtttatttttactctctgccaatagaggcaaggtaattctataagcaccatttaactttctcactacaaacaaaatagagtaagtcgtattaacgacttacttgcgytctaaacttccagctccagaacacttttttccccctgaaaattaaattgattcttacagaatg

SEQ ID NO: 457447 - DNA, 537 bp, Homo sapiens
ttccccagagacagttaaaaataggctaggcagccatctgtcttggtgggatacagcccttccaggaggccggcatcagaacaaaacccttcttccctccctcccagggagtccactaatgagaagtgattaagggctatgaagaataaaggaaggagacagcagcccaaccaggcccatgggctaggcggctgagatttcctgtagaaagggaagatacaagctgcaaagaggaatatacaaggggaaaaasacaggaaataaccacagggctgtgagcattttggggagggctgcaccaatctgcttcccagctgcaacagctcaatttggtcctggggactgggagctcagccacagctctttggggagggtattattccccttcctagctcccaaacccatgtatacatgaagcctaagtggaaaatgggaactgtcaaataaatccaagatttccccaggtgaccagcagcatccatgaaatagctccaaaaagttttcctttaaaatacattgtctttttttgttccttgc

SEQ ID NO: 457448 - DNA, 537 bp, Homo sapiens
ttccccagagacagttaaaaataggctaggcagccatctgtcttggtgggatacagcccttccaggaggccggcatcagaacaaaacccttcttccctccctcccagggagtccactaatgagaagtgattaagggctatgaagaataaaggaaggagacagcagcccaaccaggcccatgggctaggcggctgagatttcctgtagaaagggaagatacaagctgcaaagaggaatatacaaggggaaaaacacaggaaataaccacagggctgtgagcattttggggagggctgcaccaatctgcttcccagctgcaacagctcaatttggtcctggggactgggagctcagccacagctctttggggagggtattattccccttcctagctcccaaacccatgtatacatgaagcctaagtggaaaaygggaactgtcaaataaatccaagatttccccaggtgaccagcagcatccatgaaatagctccaaaaagttttcctttaaaatacattgtctttttttgttccttgc

SEQ ID NO: 457449 - DNA, 545 bp, Homo sapiens
ttggaaacctaaccccaatgagaaatggaagagacagcattgctgtggactgtcacctctgcaagagtgggactgtccctctttgcagacatgagcagctctctgcccccatctttgtacaaacacttcagatatacacacttggggctttcaactaagtctctgttcctgctactgtgtctcctgaagaatactggagtcagccatgcagcactgtcacatggggattcaggtacccagctttgctggtagacaaaacacaggaagcccactgtttwctaagctccccatagttcaagaggcccctgcaggggaaagaagatggcagtaaggtcaaggaatcaacatcaaggactcatcaagctgaggtatgcagcaaagtaaagatggaggccagggatggccaccagctgttaagagttagacactggggagtacagggcaaaaccagtgcctgaggctcagtgctctcaaaaagaatttttttctggttgaggctgccagctaaggagaaacctgaagctcaagcatgcagtctggtgatt

SEQ ID NO: 457450 - DNA, 545 bp, Homo sapiens
ttggaaacctaaccccaatgagaaatggaagagacagcattgctgtggactgtcacctctgcaagagtgggactgtccctctttgcagacatgagcagctctctgcccccatctttgtacaaacacttcagatatacacacttggggctttcaactaagtctctgttcctgctactgtgtctcctgaagaatactggagtcagccatgcagcactgtcacatggggattcaggtacccagctttgctggtagacaaaacacaggaagcccactgtttactaagctccccatagttcaagaggcccctgcaggggaaagaagatggcagtaaggtcaaggartcaacatcaaggactcatcaagctgaggtatgcagcaaagtaaagatggaggccagggatggccaccagctgttaagagttagacactggggagtacagggcaaaaccagtgcctgaggctcagtgctctcaaaaagaatttttttctggttgaggctgccagctaaggagaaacctgaagctcaagcatgcagtctggtgatt

SEQ ID NO: 457451 - DNA, 384 bp, Homo sapiens
taatagtgactttagcctcctaacagttttcataatctttttttaaccttagagaaaacttttaggaactattatctttggtagagaaaaaagtacagcagctctttcactttcatttcagttttcttttcttctgttaaattcaagtaaaaagaaatgcagttatttttatttttatagtacatayggtataatgccattcttataaaattatttcaccctcaccagccacccttctgtttatgtgtaccaaatgttaacactggaagagaaagtccatacgcaccattaccaaatccagagccttcccctcctacctgcctgccctgtctcagcctctaacctaggtttatctttctacctgcaaaccagaacccacccctt

SEQ ID NO: 457452 - DNA, 384 bp, Homo sapiens
taatagtgactttagcctcctaacagttttcataatctttttttaaccttagagaaaacttttaggaactattatctttggtagagaaaaaagtacagcagctctttcactttcatttcagttttcttttcttctgttaaattcaagtaaaaagaaatgcagttatttttatttttatagtacatacggtayaatgccattcttataaaattatttcaccctcaccagccacccttctgtttatgtgtaccaaatgttaacactggaagagaaagtccatacgcaccattaccaaatccagagccttcccctcctacctgcctgccctgtctcagcctctaacctaggtttatctttctacctgcaaaccagaacccacccctt

SEQ ID NO: 457453 - DNA, 586 bp, Homo sapiens
atattctctcctcagtgtttggtaaagctgtctgggcttgcttttgtttgttttttgagacagagtttcgttgtgtcacccakgctggagtgcggtggcatgatctcagctaactgcaacctccacctcccaggttcaagtgattctcctgcctcagcctcccaagtagctggaattataggcacacgccaccacacccggctaatttttgtatttttagtagagacaaggtttcaccatcttggctaggctggtctcaaactcttgacttcaaataattcacccacctcgccctcccaaagtgctgggattacaggcatgagctgccgcacccggccttggtgctatttttaaggatatgtatatctgatttttttttctgtttctcttatagttaattctttagtcaggtattttacttttcttagctcaactttggtaatttgtatggaaaagtcaacattttgtctacatttgcaaatatatatcaaaaatacacatcattttaatatctactatatctagtattacttatgtgctttttcaatagtaagtttacggaaggattaactcttaattttctttt

SEQ ID NO: 457454 - DNA, 586 bp, Homo sapiens
atattctctcctcagtgtttggtaaagctgtctgggcttgcttttgtttgttttttgagacagagtttcgttgtgtcacccaggctggagtgcggtggcatgatctcagctaactgcaacctccacctcccaggttcaagtgattctcctgcctcagcctcccaagtagctggaattataggcacacgccaccacacccggctaatttttgtatttttagtagagacaaggtttcaccatcttggctaggctggtctcaaactcttgacttcaaataattcacccacctcgccctcccaaagtgctgggattacaggcatgagctgccgcacccggccttggtgctatttttaaggatatgtatatctgatttttttttctgtttctcttatagttaattctttagtcaggtattttacttttcttagctcaactttggtaatttgtatggaaaagtcaacattttgtctacatttgcaaatatatatcaaaaatacacatcattttaatatctwctatatctagtattacttatgtgctttttcaatagtaagtttacggaaggattaactcttaattttctttt

SEQ ID NO: 457455 - DNA, 529 bp, Homo sapiens
taattatagttatgattaatcttattaaccgtgttcttcaaattctccatatcctcaataagtttcagtcaactagatctgtcaattcctaagaaaggtatattaaacttatcactgtgattgttgacttatatgcacatatgtgtatgtatccttgttaaatgcaaacaattcatggtcattccttaatggagcactacytttatgaatatgatatacccttctagtgccatatataaatgtatttttaaaccgactttaaaaaaaaaaaaaaagaggaacttgctctgtcaccaggccagagtgcaaaggtgcaatcatagctcactgcagcctcgacctcctaggctcaagcaatcctcctgcttcagcctcctaagtagctgggactacaggtgcatgtaaccatgcctggctaatatttttactttttgtagagacaagggtcttgctttgttgcccaggctgatctcgaactcttggcttcaagtgatcctcctgcctcagcttcccaaagtgccaggattac

SEQ ID NO: 457456 - DNA, 529 bp, Homo sapiens
taattatagttatgattaatcttattaaccgtgttcttcaaattctccatatcctcaataagtttcagtcaactagatctgtcaattcctaagaaaggtatattaaacttatcactgtgattgttgacttatatgcacatatgtgtatgtatccttgttaaatgcaaacaattcatggtcattccttaatggagcactacttttatgaatatgatatacccttctagtgccatatataaatgtatttttaaaccgacttwaaaaaaaaaaaaaaagaggaacttgctctgtcaccaggccagagtgcaaaggtgcaatcatagctcactgcagcctcgacctcctaggctcaagcaatcctcctgcttcagcctcctaagtagctgggactacaggtgcatgtaaccatgcctggctaatatttttactttttgtagagacaagggtcttgctttgttgcccaggctgatctcgaactcttggcttcaagtgatcctcctgcctcagcttcccaaagtgccaggattac

SEQ ID NO: 457457 - DNA, 604 bp, Homo sapiens
tagtgccatatataaatgtatttttaaaccgactttaaaaaaaaaaaaaaagaggaacttgctctgtcaccaggccagagtgcaaaggtgcaatcatagctcactgcagcctygacctcctaggctcaagcaatcctcctgcttcagcctcctaagtagctgggactacaggtgcatgtaaccatgcctggctaatatttttactttttgtagagacaagggtcttgctttgttgcccaggctgatctcgaactcttggcttcaagtgatcctcctgcctcagcttcccaaagtgccaggattacatgtgtgacccaccatgtaagcccacatttttctaacttctacagtaatatctatatcctatttatttataacataaatcttacttagcttgttttacttctcttcactcttgctttccctaccacccttctacatcacctggaatttgaattccaggttttctttttaattttctagaatctaatttcactttgtttagcaatatcttttaccaaatacatgaccacctttgcttccattatctcacatcttcccttatgatctttttaaaattattgctggaatagaattctgaaaa

SEQ ID NO: 457458 - DNA, 529 bp, Homo sapiens
taattatagttatgattaatcttattaaccgtgttcttcaaattctccatatcctcaataagtttcagtcaactagatctgtcaattcctaagaaaggtatattaaacttatcactgtgattgttgacttatatgcacatatgtgtatgtatccttgttaaatgcaaacaattcatggtcattccttaatggagcactacttttatgaatatgatatacccttctagtgccatatataaatgtatttttaaaccgactttaaaaaaaaaaaaaaagaggaacttgctctgtcaccaggccagagtgcaaaggtgcaatcatagctcactgcagcctcgacctccyaggctcaagcaatcctcctgcttcagcctcctaagtagctgggactacaggtgcatgtaaccatgcctggctaatatttttactttttgtagagacaagggtcttgctttgttgcccaggctgatctcgaactcttggcttcaagtgatcctcctgcctcagcttcccaaagtgccaggattac

SEQ ID NO: 457459 - DNA, 529 bp, Homo sapiens
taattatagttatgattaatcttattaaccgtgttcttcaaattctccatatcctcaataagtttcagtcaactagatctgtcaattcctaagaaaggtatattaaacttatcactgtgattgttgacttatatgcacatatgtgtatgtatccttgttaaatgcaaacaattcatggtcattccttaatggagcactacttttatgaatatgatatacccttctagtgccatatataaatgtatttttaaaccgactttaaaaaaaaaaaaaaagaggaacttgctctgtcaccaggccagagtgcaaaggtgcaatcatagctcactgcagcctcgacctcctaggctcaagcaatcctcctgcttcagcctcctaagtarctgggactacaggtgcatgtaaccatgcctggctaatatttttactttttgtagagacaagggtcttgctttgttgcccaggctgatctcgaactcttggcttcaagtgatcctcctgcctcagcttcccaaagtgccaggattac

SEQ ID NO: 457460 - DNA, 604 bp, Homo sapiens
tagtgccatatataaatgtatttttaaaccgactttaaaaaaaaaaaaaaagaggaacttgctctgtcaccaggccagagtgcaaaggtgcaatcatagctcactgcagcctcgacctcctaggctcaagcaatcctcctgcttcagcctcctaagtagctgggactacaggtgcatgtaaccatgcctggctaatatttttactttttgtagagacargggtcttgctttgttgcccaggctgatctcgaactcttggcttcaagtgatcctcctgcctcagcttcccaaagtgccaggattacatgtgtgacccaccatgtaagcccacatttttctaacttctacagtaatatctatatcctatttatttataacataaatcttacttagcttgttttacttctcttcactcttgctttccctaccacccttctacatcacctggaatttgaattccaggttttctttttaattttctagaatctaatttcactttgtttagcaatatcttttaccaaatacatgaccacctttgcttccattatctcacatcttcccttatgatctttttaaaattattgctggaatagaattctgaaaa

SEQ ID NO: 457461 - DNA, 604 bp, Homo sapiens
tagtgccatatataaatgtatttttaaaccgactttaaaaaaaaaaaaaaagaggaacttgctctgtcaccaggccagagtgcaaaggtgcaatcatagctcactgcagcctcgacctcctaggctcaagcaatcctcctgcttcagcctcctaagtagctgggactacaggtgcatgtaaccatgcctggctaatatttttactttttgtagagacaagggtcttgctttgttgcccaggctgatctygaactcttggcttcaagtgatcctcctgcctcagcttcccaaagtgccaggattacatgtgtgacccaccatgtaagcccacatttttctaacttctacagtaatatctatatcctatttatttataacataaatcttacttagcttgttttacttctcttcactcttgctttccctaccacccttctacatcacctggaatttgaattccaggttttctttttaattttctagaatctaatttcactttgtttagcaatatcttttaccaaatacatgaccacctttgcttccattatctcacatcttcccttatgatctttttaaaattattgctggaatagaattctgaaaa

SEQ ID NO: 457462 - DNA, 604 bp, Homo sapiens
tagtgccatatataaatgtatttttaaaccgactttaaaaaaaaaaaaaaagaggaacttgctctgtcaccaggccagagtgcaaaggtgcaatcatagctcactgcagcctcgacctcctaggctcaagcaatcctcctgcttcagcctcctaagtagctgggactacaggtgcatgtaaccatgcctggctaatatttttactttttgtagagacaagggtcttgctttgttgcccaggctgatctcgaactcttggcttcaagtgatcctcctgcctcagcttcccaaagtgccaggattacatgtgtgacccaccatgtaagcccacatttttctaacttctacagtaatatctatatcctatttatttataacataaatcttacttagcttgttttacttctcttcactcttgctttccctaccacccttctacatcacctggaatttgaattccaggttttctttttaattttctagaatctaawttcactttgtttagcaatatcttttaccaaatacatgaccacctttgcttccattatctcacatcttcccttatgatctttttaaaattattgctggaatagaattctgaaaa

SEQ ID NO: 457463 - DNA, 538 bp, Homo sapiens
gccagacatggtggttcacacctgtaaacccagcactttgggaggccaaggtcggtggatcccttgagcccaggagtttgagactagcctgggcaaaatggtgaaaccccatctctacaaaaaatacaaaaattagctggttgtggtggtacatgcctgtggtcccgactactggggaggctgaggtgggaggagagcttgagcccaggaggttggggctgcagtgagttgagatygtgccactgcactccagcatgggtaatagagcgagacccggtctctagaaaataaataaaaagacttcagtcaccaaggtaaggagatgggtggatattcctactgtggtacctgaactgtcatcctatcagttgccccaagaccaacttttgtctcctggttccaaaacatgtggatcattttttggtccactcctgtcttctgcagaagtcctccttggcactcttcactgttactccatctgccatctttgtcaattttttatcatttctaggaatttggggtggaatatgagaagaaa

SEQ ID NO: 457464 - DNA, 538 bp, Homo sapiens
gccagacatggtggttcacacctgtaaacccagcactttgggaggccaaggtcggtggatcccttgagcccaggagtttgagactagcctgggcaaaatggtgaaaccccatctctacaaaaaatacaaaaattagctggttgtggtggtacatgcctgtggtcccgactactggggaggctgaggtgggaggagagcttgagcccaggaggttggggctgcagtgagttgagatcgtgccactgcactccagcatgggtaatagagygagacccggtctctagaaaataaataaaaagacttcagtcaccaaggtaaggagatgggtggatattcctactgtggtacctgaactgtcatcctatcagttgccccaagaccaacttttgtctcctggttccaaaacatgtggatcattttttggtccactcctgtcttctgcagaagtcctccttggcactcttcactgttactccatctgccatctttgtcaattttttatcatttctaggaatttggggtggaatatgagaagaaa

SEQ ID NO: 457465 - DNA, 629 bp, Homo sapiens
ccatcacatctgcaccccagccagtggagagggtaagagggcaagggtaacacatacatattcttttttagggcacaaactagaaataatacatgcaacttccrttcacatctcattggccccaaactttggacaaacccagatgcaagagaagctggtaaattagcctttaattgagaagccaagcgcccagaaagcagggagttagagtatacaaggaaagatcatttttatggatatcagtctcattcagaaataaacaaataaataaatacattagtattcagatggtatatggagaaaaattaagaaaattatgagaggccgggcgcactggctcacacctataatcccagcactttgggaggccgaggtgggtggaccaaaaggtcaggagatcgagaccatcctaacacagtgaaaccccacctctactaaaaatacaaaaaattagctgggtgtggtggcacttgcctgtagtcccagctactcgggaggctgaggcaggagaatcgcttgaacccgggaggtggaggttgcagtgagccgagattgcaccactgcactccagcctggacaacagagcgagacgcgagactccatcccccaaaaaaaaaaaagttacgaga

SEQ ID NO: 457466 - DNA, 629 bp, Homo sapiens
ccatcacatctgcaccccagccagtggagagggtaagagggcaagggtaacacatacatattcttttttagggcacaaactagaaataatacatgcaacttccgttcacatctcattggccccaaactttggacaaacccagatgcaagagaagctggtaaattagcctttaattgagaagccaagcgcccagaaagcagggagttagagtatacaaggaaagatcatttttatggatatcagtctcattcagaaataaacaaataaataaatacattagtattcagatggtatatggagaaaaattaagaaaattatgagaggccgggcgcactggctcacacctataatcccagcactttgggaggccgaggtgggtggaycaaaaggtcaggagatcgagaccatcctaacacagtgaaaccccacctctactaaaaatacaaaaaattagctgggtgtggtggcacttgcctgtagtcccagctactcgggaggctgaggcaggagaatcgcttgaacccgggaggtggaggttgcagtgagccgagattgcaccactgcactccagcctggacaacagagcgagacgcgagactccatcccccaaaaaaaaaaaagttacgaga

SEQ ID NO: 457467 - DNA, 629 bp, Homo sapiens
ccatcacatctgcaccccagccagtggagagggtaagagggcaagggtaacacatacatattcttttttagggcacaaactagaaataatacatgcaacttccgttcacatctcattggccccaaactttggacaaacccagatgcaagagaagctggtaaattagcctttaattgagaagccaagcgcccagaaagcagggagttagagtatacaaggaaagatcatttttatggatatcagtctcattcagaaataaacaaataaataaatacattagtattcagatggtatatggagaaaaattaagaaaattatgagaggccgggcgcactggctcacacctataatcccagcactttgggaggccgaggtgggtggaccamaaggtcaggagatcgagaccatcctaacacagtgaaaccccacctctactaaaaatacaaaaaattagctgggtgtggtggcacttgcctgtagtcccagctactcgggaggctgaggcaggagaatcgcttgaacccgggaggtggaggttgcagtgagccgagattgcaccactgcactccagcctggacaacagagcgagacgcgagactccatcccccaaaaaaaaaaaagttacgaga

SEQ ID NO: 457468 - DNA, 629 bp, Homo sapiens
ccatcacatctgcaccccagccagtggagagggtaagagggcaagggtaacacatacatattcttttttagggcacaaactagaaataatacatgcaacttccgttcacatctcattggccccaaactttggacaaacccagatgcaagagaagctggtaaattagcctttaattgagaagccaagcgcccagaaagcagggagttagagtatacaaggaaagatcatttttatggatatcagtctcattcagaaataaacaaataaataaatacattagtattcagatggtatatggagaaaaattaagaaaattatgagaggccgggcgcactggctcacacctataatcccagcactttgggaggccgaggtgggtggaccaaaaggtcaggagatcgagaccatcctaacacagtgaaaccccayctctactaaaaatacaaaaaattagctgggtgtggtggcacttgcctgtagtcccagctactcgggaggctgaggcaggagaatcgcttgaacccgggaggtggaggttgcagtgagccgagattgcaccactgcactccagcctggacaacagagcgagacgcgagactccatcccccaaaaaaaaaaaagttacgaga

SEQ ID NO: 457469 - DNA, 560 bp, Homo sapiens
ttaaattttgtctgaagcatgtcagagaataacaacatgctataaaatttcacttgtgttcacccatgtgtcagctgagtattttgcattgttacatttttattttactgtattttattttattttttttttgaaatggggtctagctatgttgcaaactcctggcctcaaactcctgggcgcaagcaatcctcctgccttagcctcccaaaatgctaggattacaggtgtgagccactatgccctgcctattttgcattayttcaaagagaaggtgaggtcacacatttacttccaacagatcaacattatatcttcaagttagcaaaagcaattgaaagtaggtagtggcattctatatttccataaatgctcctttagacttgtaaaaaaattgtcattaattttggccaaaagcttattgatgtcataaaaccatactcagtttttacttggacacattctcctgctgttcctcatcaaccactttgtgggtttagtcattcaaagtatgtacttactagatttagattaattcaatggagatatgttgtgaattc

SEQ ID NO: 457470 - DNA, 554 bp, Homo sapiens
agagcccatgactctatagtatgattccaaaccatmcttcccttcacagtagtcagcaaactggagccataagagacatccttgggttcaaaggtaagacagtaatcttggtgggaggaagggggtagtgggggcagttgtgactggaactctggcctccctggctttccttttgactgtagttttctctgatggactttaaacatggccatcttcaaaactgtctgccctgtgcggtagattattccaaagctatgaaagaaagaaacactcctccccttacattaactccacactacctaaaaacaatgcatgcacctttggtaacaaagagaaaccagctagtgggaaagagaagaagaaaaatggccctacaagtttccaaaagacgttcagtcatccattaactttccagccccaagtgaatgcacagaagacaatctcataaagccaatgagagggatatttcaatatcatcgtgactactttggcaggctgccttagttctttcaagtgactcaaaagcaagttaaagacaaaaggatcccaagtga

SEQ ID NO: 457471 - DNA, 584 bp, Homo sapiens
  misc_feature (1)...(584): n = A,T,C or G
agagtaacaacagtttttgttttttccactaagtataaaagataaaaacgtatactcctgtatagggcacttaccataaatagagtttgcaggactcaacgctgttctgggtgagtcagtgagtgagtggtgagtnnnnnnnnnnnnnnnnnnnnnnnnnnnnnnnnnnnnnnnnnnnnnnnnnnnnnnnnnnnnnnnnnnnnnnnnnnnnnnnnnnnnnnnnnnnnnnnnnnnnctcagcttactgtaaattttttactttataaactttwtaattttttaaactttttgactcttttgtaataacacttagcttaaacacaaacacattgtacagctgtacaaaaatattttctctgtttatatctttattctataagctttattctattatcttaaatttttaattttttctttttttttgttaaaaactaggacacaaagacacacattagcttaggcctacacagggtcaggatcatcaatatcactgtcttccacctccacatcttgtcccactcggaggtctttagggacaataccatgcatagagctgtcatctcctatgattacaatgccttctt

SEQ ID NO: 457472 - DNA, 604 bp, Homo sapiens
acttaagtcacttacaatctaaaatagttcttctccttcctttttcattcccttttcatgacggtgaactgttggagagatgcaagatgttacaggtcttggagaatctttgtttttcttggttggcttaattgtttctatgtgagggtatttaattcattcgtctaaactctgtrttttctgtaagtagaatttagatctaaattcttgattagattcagaacaaacatttttggtaagggtattttcatagccaattttgtatggtttacattgcttcatatcaggcaccacataatgcagttatctcactattagtgaagctaagattgagtaaggtgatgacagatctccctgttgtaaaattatagttttccctttgatactggcatataatctgggaggagtgagatgttggtaccatacaaatagttagttccttgacgtctttgacataatagtgttagtatccattggtgattttacctgaatcagttatctctttgggaatagcaaaatggtgataaaatgggatttttaaagaattgtggtaaaatacacatacctaaaattaaccattttagccttttttatgtggagacag

SEQ ID NO: 457473 - DNA, 604 bp, Homo sapiens
acttaagtcacttacaatctaaaatagttcttctccttcctttttcattcccttttcatgacggtgaactgttggagagatgcaagatgttacaggtcttggagaatctttgtttttcttggttggcttaattgtttctatgtgagggtatttaattcattcgtctaaactctgtattttctgtaagtagaatttagatctaaattcttgattagattcagaacaaacatttttggtaagrgtattttcatagccaattttgtatggtttacattgcttcatatcaggcaccacataatgcagttatctcactattagtgaagctaagattgagtaaggtgatgacagatctccctgttgtaaaattatagttttccctttgatactggcatataatctgggaggagtgagatgttggtaccatacaaatagttagttccttgacgtctttgacataatagtgttagtatccattggtgattttacctgaatcagttatctctttgggaatagcaaaatggtgataaaatgggatttttaaagaattgtggtaaaatacacatacctaaaattaaccattttagccttttttatgtggagacag

SEQ ID NO: 457474 - DNA, 546 bp, Homo sapiens
tttacagttacaaagtccatacccagaggaagtgagaaggggtttgcgtcctaacctttgccttttattccaacataacatagctaaacattctgttgagagaaggtcaaccttgtaatgctggatcaataagctgctgtcttgtttcctgcagacagctttatttcctctggtttgggtaaacagatgaggtttcatcgagagtttaaatgtataactgaatttgtgaagaaccgttttctaatggaataacataatacttatatcatgtttctaagcctctgggaagtcactgtctgacacttaaaaaaaaatgttggttttgtaaattgacttttcttttcttaatgtagagtttaatgtggaaaatrgtcactcttttcagttttgtaagttttttccccagaataaatgtggctcagttttatccttatgctcccagtagtcactatcatgactcttttgttaggcattaaatacgaattgccagtttgaaatactttgaacacttactgaatgttgggcagcagtacaaataatacagct

SEQ ID NO: 457475 - DNA, 559 bp, Homo sapiens
ataggtcactaaatgtctttaaattttctactacatcatcccagaagagctcagtaaatatttattgacttcarttggaaagatcataacttttgactgcatcttgaaggtaaaggtgttggtgtatgtcagggaaggaagcagaagaggagatgggaagtacaagagtaggactacatttaggctctagatctaggaagaaggcaaaggtgtggaggtgattgaagtttctttggaatgatatggacagcagaggttcataactgttctcatttgctggtggtaacccaatattacatattgattcacctgtaagagtttgcgatagcatctcagttgccattgtcattgctggctttgctcactgttgtatttggcatttccttccttaagtagtcctgaaactgtctcacaacaagagtattaacaaatacctttccgtgtaagattggttgttttagccaacagaggtctcggatgcttttcttaggtaggatcttgaactttgtcttcttaactaagagctcccaaactggtagcatgcttaagctgtgcaagt

SEQ ID NO: 457476 - DNA, 597 bp, Homo sapiens
tttatttgtgtattactctctctccactaagaactctgtgacgataaggaccacatctcatttgactttatttttcagcatataacagtgctagtatataaaatcctcaaataattggttaatgaatcaataaattaatgaataaaggaatggaatgcctctttttattcatctctttccttttctgttctccacatcttcccttgttttacttttgtttctgcycttcttccactgtgactaaatttttgcaatatagaaataatacgggctttgtgacctttagcgttttcttagctctacaaatgttggaaaatggattttgaaccttagcaaacaagctgaaacagtttaaacatttgtttgtgggtgcagcaatggaagaaagacttcattggcatttgttatgatggtgagtacatttgtgagattaacattctttgctcaagactgagaggcctctggtcagccgcccccattctaaagcaacacagatcatattctgtcacactgagatctcaggtaactgacctttctcacatcgggggcctcccgagatgccctacatggaaacaaagatgaatatactgtttaaaa

SEQ ID NO: 457477 - DNA, 563 bp, Homo sapiens
taaattttgtcaaatgctttttttgcatctattgaaatgattctatgaatttaaccttcattctcttaatgtggtttatcacatttattgatttgcatatatggaaacttccttgaatctcagggataaatcctactttaacatggtgtatagtccttttaatgtgctatttagtaagttttgctagtatttttgagggtttttacatatacgttcatcagagacattggcctgtaattttcttttcttgtagcattcttatctggctttgacaagagggtaatgctggcctcataaaatgggtttggaagtgttctgtccacctcagttttttggaagagtttgaaaaggattggcattaatttttctttaaatacttggtagagttcaccagtgaaaccgtctggccctgggctactctccgttgggaggtttgattactgatttgatctccttactcattatgggtctgttcagcttttctmtttctttatattcagtcttggtaggtcgcatgtttctagaaactcacccatttcttctaggttatccaatttgttggt

SEQ ID NO: 457478 - DNA, 536 bp, Homo sapiens
gcatgcaggcccaggctcctgcctgacagargggtgtgtctgggcctcaatagttcctctccccagccatgagaatgaggcttccagataggtccagcgaggcaatgacatggtggggcaagaaggaaaatctgagaaccagtcccagtgttttgattagcttataaaaatttattgctctaattcccaaagtacccagggagctgcttctctctacactgtatcattttactggtgggaagcaagaaacagatggtaaaagcagacgaatttggactgagggattttggttctccctaacctgctcctaaaagttaccatcaaatcttatatgctggcttttgttcttgagccaaacgatgtgtccaatccctgttcagtcgcttctatttggatggccttgggcaagtcttcccacctctgagccttgatcttctcagcagtggacggcaggtctgtgtgaagcgtgaagacaatgtgtgtacctggctctgtgccagtcatgttgtcagcgctcggagtcctccgagccagtg

SEQ ID NO: 457479 - DNA, 583 bp, Homo sapiens
tgcatgttgtgcacatgtacccttgaacttaaattaaaaaaaaaaagtcataccttggttaagccttattggttttggtgagtcacttgggaggttgcctttggttaaaacaaaagttcaaatgccaggaataccagctatttttcctggctaaaatctgataataagaggtatgcaaagacttttttttttwaagctctatggttaaagtcagcttaattaaaagctgatatacaagttcctcctttctctttgttgtctttggtcgcacatgaaagaatctagaagagacttctaatgactcaaattcccttaaggcacacagaaaagagtaccactaaccctctttttggggtattctgtcttcctgtggagtctgaagagtcatggacgagttcctctcaggtctaaaactctgctttcttttgtattgtattacctgatctctttggctttgaggggtaccagagatttctctgtactgtgagagagcacttgacctttgtatgtgtgatggctgctgagtcaatggcaagagctgcagttttggaggtagctgacagcagctgtttaaaatgaatgg

SEQ ID NO: 457480 - DNA, 583 bp, Homo sapiens
tgcatgttgtgcacatgtacccttgaacttaaattaaaaaaaaaaagtcataccttggttaagccttattggttttggtgagtcacttgggaggttgcctttggttaaaacaaaagttcaaatgccaggaataccagctatttttcctggctaaaatctgataataagaggtatgcaaagactttttttttttaagctctatggttaaagtcagcttaattaaaagctgatatacaagttcctcctttctctttgttgtctttggtcgcacatgaaagaatctagaagagacttctaatgactcaaattcccttaaggcacacagaaaagagtaccactaaccctctttttggggtattctgtcttcctgtggagtctgaagagtcatggacgagttcctctcaggtctamaactctgctttcttttgtattgtattacctgatctctttggctttgaggggtaccagagatttctctgtactgtgagagagcacttgacctttgtatgtgtgatggctgctgagtcaatggcaagagctgcagttttggaggtagctgacagcagctgtttaaaatgaatgg

SEQ ID NO: 457481 - DNA, 596 bp, Homo sapiens
gaatcccaccatcctttcaagctagtgacttttacaggtctcatggttaagagttttaaatcaaagctataatgtctttatttgtgcctgtctgtattatgtgtacatatatacatggctgtttgtatattggttgtgataccattgacttataaataaatgagggctcataagttaaataacccaaatgcttttcaggtccctgtgactttagtactctttggtaaataaagatagtttttaaattgttgataaaataatagaaatgtcttcagaattttagacatttttgcctgggtctactgatcagatctgtttataatgtctctactagatattttaaagtcataaagctgttgcttttatgatatttttgacacttgcttaatttgtctgtgagcttatgtctttgaatttgggcctttaaatcctgtggtatagatagtggccatggtgaggccttgggacagtgcctgggctgcatcctccctgggtcagctatgcctcttgaccatgctggaaaggctrcatccaacctttgtcctgggatctgcatctgacacataagtaaaatcggttcctaggtttttcactga

SEQ ID NO: 457482 - DNA, 495 bp, Homo sapiens
aattctcccacacattcaaagaagaattggtaccaatccttttgatactattccacaaggcagagaaagaaggaaccctcgctaattcattctgtgaagccagtatcaccctaataccaaaaccaagaaaggacataaccaaaaaagaaaactacagaccgataaccttgatgaatgtagatgctaaaatccttaacaaaatactagctaaccaaatccaatagcatatctaaaagataatccaccatgatcaagtgggtttaacatacacaagtcaataamtgtgatacaccacataaacagaattaaaaacaaaaatcacatgatcatctcaatagttgcagaaaagcatttgacaaaatccagcttccctttatgattaaaactctcagcaaaatcagcatacaagggatatacctcaatgtaataaaagccatctatgacaaacccacagccaacataatactgaatgggaaaaagttgaaagcattccct

SEQ ID NO: 457483 - DNA, 540 bp, Homo sapiens
actcaccaaccatctgctgcctttaggagattcacytaacacataaggactaacagaaacttaaagtaaaagggtgcaaaaggcatttcatgcaaatggacacgaaaagcgggcaggggtagctattcttatttcagacaaaacaaatgttaaagtaacagcagttaaaagagacaaagaggtacattatataatggtaaaagaccttgtgcaacaggcaaatatcaccatcctaaacatatgtgcacctaacactggagctctcaaatttataaaacaattactaatagacttaagaaatgaaatacacagcaacacagtaatagtgggggacttcaatactccactgacagccctagacaggtcattaagacagaaagtcaacaaagaaacaatggatttaaactatagcttgaacaaatggacttaacagatacatacagaacattttatccaacgactgcagaatacacattctgttcaacagcacatggaactttcctaaagatagaccatatgataggctataaaactagcctc

SEQ ID NO: 457484 - DNA, 540 bp, Homo sapiens
actcaccaaccatctgctgcctttaggagattcacctaacacataaggactaacagaaacttaaagtaaaagggtgcaaaaggcatttcatgcaaatggacacgaaaagcgggcaggggtagctattcttatttcagacaaaacaaatgttaaagtaacagcagttaaaagagacaaagaggtacattatataatggtaaaagaccttgtgcaacaggcaaatatcaccatcytaaacatatgtgcacctaacactggagctctcaaatttataaaacaattactaatagacttaagaaatgaaatacacagcaacacagtaatagtgggggacttcaatactccactgacagccctagacaggtcattaagacagaaagtcaacaaagaaacaatggatttaaactatagcttgaacaaatggacttaacagatacatacagaacattttatccaacgactgcagaatacacattctgttcaacagcacatggaactttcctaaagatagaccatatgataggctataaaactagcctc

SEQ ID NO: 457485 - DNA, 559 bp, Homo sapiens
ctattgaaaatagtaaccagaactatgtttctggaaagtaaatttagagagacatgttattttaaggaatgccaaagagggacagcatttttggaagatcgttgctggtggatsgtaaggattagcatggcctttctttttatcatttgggttaggcaccccacatcctgattttgaaattactcttcattttattcagtgctcttcagagactgtaaaaagattgattaatattcattcaagcttaattggctttggaaagaaaaagtaagtcaattaagtacattagtaagcagtttttcatgaagagtaataatggcagagggtgacggggcagcacagcaccagagattgggggtcactgagccccataccacactgaggatgttggtttcatgtctctctttgtgcttctttcatgttctcactcttttgctggctcataagcaatctgtttccccagtacgttacttggatgaagtagaagtagatcatactatctgttccaaggtcttcctttccttatctgcaagttactctcttgaaagaataacgaaag

SEQ ID NO: 457486 - DNA, 620 bp, Homo sapiens
tgtttccctgtagagtgaaatcttactttctgaacatccaaatcctgatgaggttttactgtcaatgaacaactgatatttttacgtgaattaagagacacagcaattccacttcatcccagtgtttttaccagctacttggacacactcgcctactggatttgacctctgtgaataccaatgctggcctgggtgtcagtatttgctagaagcccctgtgtgggtttgtcttcccttagctttagccaggaagacatctggcctcagcaagcacactgctgctgtgattcttttgcttctattaagtgcaaatgaatgcactttatgttgatggtgtattgcataagactaatttctggatyagcgaaaaagagctctttttcatttatcagacattttctttcttacatcttattttccttcagcttcaaaccatgtctgcctcacccatatcagtaaccacattaataatgacgagaataattaactttcattgcaacctttttccatccttataacataagtcatggctgggtgcagtggctcacccctgtaatctgaacatttgggactactaggtaggaggatctcttgagcccagaagtttaaggccagtctga

SEQ ID NO: 457487 - DNA, 544 bp, Homo sapiens
cttgtttcaaattgctactgggtaggtttatatgtgtgtttacatttgtaatgaggcaactgtcatttcatgtttatatttattggcyattaaactttaaagaccagttgtactgaaaattaactcctatatttattccacatgtgctatgctgatgttccaatgacttttttaatgaagtttaagtaaggacagttaaatgaactagacaaaaatcagtagatttttaaaatatataatttacaaaacagagacagcagcttcaaaacctatttaaattaagtctacttccaacatgatctaattgggttgaaacagccctttggcaggcaggggataaagagtcctctcaagaatcagagctgtcacaatagagcagaagtggtcaagctgtttgatagaggggtgaggtggagtttagctaatgcagagaggaggtcaaaagttagggcaaacggccaacagagagaaactgaaaagcagtttctattggcatcttcctgagggaaaaagaaaggaaaggaaaataatacatttcagagag

SEQ ID NO: 457488 - DNA, 544 bp, Homo sapiens
cttgtttcaaattgctactgggtaggtttatatgtgtgtttacatttgtaatgaggcaactgtcatttcatgtttatatttattggctattaaactttaaagacmagttgtactgaaaattaactcctatatttattccacatgtgctatgctgatgttccaatgacttttttaatgaagtttaagtaaggacagttaaatgaactagacaaaaatcagtagatttttaaaatatataatttacaaaacagagacagcagcttcaaaacctatttaaattaagtctacttccaacatgatctaattgggttgaaacagccctttggcaggcaggggataaagagtcctctcaagaatcagagctgtcacaatagagcagaagtggtcaagctgtttgatagaggggtgaggtggagtttagctaatgcagagaggaggtcaaaagttagggcaaacggccaacagagagaaactgaaaagcagtttctattggcatcttcctgagggaaaaagaaaggaaaggaaaataatacatttcagagag

SEQ ID NO: 457489 - DNA, 544 bp, Homo sapiens
cttgtttcaaattgctactgggtaggtttatatgtgtgtttacatttgtaatgaggcaactgtcatttcatgtttatatttattggctattaaactttaaagaccagttgtactgaaaattaactcctatatttattccacatgtgctatgctgatgttccaatgacttttttaatgaagtttaagtaaggacagttaaatgaactagacaaaaatcagtagatttttaaaatatataatttacaaaacagagacagcagcttcaaaacctatttaaattaagtctacttccaacatgatctaattgggttgaaacagccctttggcaggcaggggataaagagtcctctcawgaatcagagctgtcacaatagagcagaagtggtcaagctgtttgatagaggggtgaggtggagtttagctaatgcagagaggaggtcaaaagttagggcaaacggccaacagagagaaactgaaaagcagtttctattggcatcttcctgagggaaaaagaaaggaaaggaaaataatacatttcagagag

SEQ ID NO: 457490 - DNA, 370 bp, Homo sapiens
gtgctaattaaacgtaggaattaatttttaaatgtttcggcaaaaatagatttcttttattaggaatttattttttaagatttattgacatattttacttaaattgtccttgtgatctatattggaagcagtttagaatagttgcatttagtctttttaaaagtttcacaattagatgaataattctctttgttttgtttctggttataattttcttcaccttcaggcaatttgttaacatggtgaagtaattaagaaaataaaataacacctctgayctggtcttgttttatatcacttccaatagagaaaatgatatatgttaatatatgttaaaacaccacatgagaaacatgagcaaaatgatttt

SEQ ID NO: 457491 - DNA, 635 bp, Homo sapiens
gatctttgggttgttctcttggtaatacgatgtaactgatgtttttatttgtttggttctaagggactgatttgattgtaaatattttaaaaataagcagccactttcctaccttctgtatttttcagaagtcacactctctgattaatttttgagaaaygtaactaatcactaactcacaaaacttggtctctaggaaagcacaggcaggatacaggaatatctgaattaccctgctcttttgtttttctcttaaatgcgagcttgtatccttctaaaatttgttattattatcattattattagagacagggtctcattctgtcacccaggcttgagtgcagggatgcaaacatagctcactgtagcttcaaactcccatgctcaagagatcctctagcctcagcctctcaagtagctggggctgcaggtaaacaccaccacactcagctaattgttttatttattttattttttttgtagagaggggtatttcactatgttgttgaggctggtctcaaactcttggccttaagcaatcctcctgccttggcctcccaaagtgctgggattacaagtgtaagccactgtgcccagcccatccttcttgatcactgctgtcagtactttacatc

SEQ ID NO: 457492 - DNA, 635 bp, Homo sapiens
gatctttgggttgttctcttggtaatacgatgtaactgatgtttttatttgtttggttctaagggactgatttgattgtaaatattttaaaaataagcagccactttcctaccttctgtatttttcagaagtcacactctctgattaatttttgagaaacgtaactaatcactaactcacaaaacttggtctctaggaaagcacaggcaggatacaggaatatctgaattaccctgctcttttgtttttctcttaaatgcgagcttgtatccttctaaaatttgttattattatcattattattagagacagggtctcattctgtcacccaggcttgagtgcagggatgcaaacatagctcactgtagcttcaaactcccatgctcaagagatcctctagcctcagcctctcaagtagctggggctgcaggtaaacaccaccacactcagctaattgttttatttattttattttttttgtagrgaggggtatttcactatgttgttgaggctggtctcaaactcttggccttaagcaatcctcctgccttggcctcccaaagtgctgggattacaagtgtaagccactgtgcccagcccatccttcttgatcactgctgtcagtactttacatc

SEQ ID NO: 457493 - DNA, 552 bp, Homo sapiens
cattgaggagggttggagatagtctctaaatgccaatgccacccttttgccattcaccagcagaagtggtgcagagagaaacatctgtactttggaaagggagagcagttactaggagacattacattgaacacagtgttgccctttcacagcagagggtaaaaccgtgctggactcagccagtgcccatgcactgagagagcatgtggactagacctagccagaggggaattgcccatcccattgatcagaactcaagtttctcagcaagccttcccactgtggggccaaagtgctctaggatcctaggyaaacttgaaaggcagcctaggcctcaaagactgcaattttttggcaacttctagtgctgggctggcctgacagcctgtaaactagagtggcacataacctttgaagacagcagccaaggcagctaaagaagtgcttgtgccatctctcccccaaccccaaacagtgcagccaacaacaacaaaagtgtatctttcctttgcttaaagggtggagagtgaagagtaaagaggattttgttgt

SEQ ID NO: 457494 - DNA, 526 bp, Homo sapiens
tgttttttgagacagggtcttgctctgttgcccaggccggagtgtagaggtgtgatcttggctcactgcaacctccgcctcccaggttcaactgaatctcatgcctcagcctcccaagtagctaggtttacaggcatgcaccgccacacctggctaattttttgtatttttagtagagatggggttttgccatgttggccatgctggtctcaaactcctgagctcaggtgatccgcccacctcaggctcccaaagtgctaggattacaagcgtgagccasgatgccctacaagaatagtaactttgaaataactaatctgctttttgttttctgttcctgctttcttcagcacttttctgcctgtaaagccaacatcctctgctcagctccttggaacattcattctacttatataagaagatgttgctcaattctagaatggcaaataaaaccaatgaagatctttaagctatgtttgttgtaattttgtcttttgacattaggagcaaatggatggctgtttca

SEQ ID NO: 457495 - DNA, 297 bp, Homo sapiens
taaatggattaaatattctaactgaaggaaagattaaagaaaataaaaatttaaaattaaaacccatgatctagagacacactttagattcaaagacccaaataagttgaatgggaaaagayggaaagaattaccacgctatcacaaaaggagtaacaaaaagatgggcttttagaataagatcaggcaaaatagactttaagacaaacattgttaaaagaaactaatgacatcttataatgataagaggatcaagtcatcaggaagaaataacaattacaatatatgtatgtacct

SEQ ID NO: 457496 - DNA, 590 bp, Homo sapiens
catgtgagtgaagccttgcacggtatgaagcttgtcaaaagcaaaggcctgtgggctcccaccagaaaagaagggtgagggaagctttctaggggagaaggagatcaagaagatttgggtctaaataatgtcactgcasagcactgcagggaattgctggatcagagaactctgcaaggcagcaaaaacttggagtcctttaaagccacagggtttatcttacctacagctaacagatattaggtacagttttacaaagtatgcaaagcaggcagtctctaaatggctaagtctgctgacacgggttatatttaaaacaattggatgtataaaaattttactttggcactaaagggcttttgacctaatgggtgcctgttaagaagatttaaacaacagaagttctgatatgatttggctctgtatccgcacccaaatctcatcttgaattacaatccccacatgtcaagggagggacctggtgggaggtgaatggatcatggaggtagttttcccattgctattcttgtgatactgagggagttctcactcacaagatctgatggttttaaaagtggcagtttccctgc

SEQ ID NO: 457497 - DNA, 590 bp, Homo sapiens
catgtgagtgaagccttgcacggtatgaagcttgtcaaaagcaaaggcctgtgggctcccaccagaaaagaagggtgagggaagctttctaggggagaaggagatcaagaagatttgggtctaaataatgtcactgcagagcactgcagggaattgctggatcagagaactctgcaaggcagcaaaaacttggagtcctttaaagccacagggtttatcttacctacagctaacagatattaggtacagttttacaaagtatgcaaagcaggcagtctctaaatggctaagtctgctgacaygggttatatttaaaacaattggatgtataaaaattttactttggcactaaagggcttttgacctaatgggtgcctgttaagaagatttaaacaacagaagttctgatatgatttggctctgtatccgcacccaaatctcatcttgaattacaatccccacatgtcaagggagggacctggtgggaggtgaatggatcatggaggtagttttcccattgctattcttgtgatactgagggagttctcactcacaagatctgatggttttaaaagtggcagtttccctgc

SEQ ID NO: 457498 - DNA, 371 bp, Homo sapiens
ataaacatccagaaaggaattgttagaggatcatagagaartaattaaccagagatcataaaagggagctggtgaagagatccatggaaagttattgcttctgcatctggtggtgggtccgaagtcactacaggtaatcatttaaaaggaaaagctggaagtgaagtgagaaaaagcaaagccaacactggaatccacgaaaacaaactgaaatctgcatctgtctctcatagcaaccaaatttggttttgtgcatgacctatagaaggtcgggcccttcaccagagagatgcacacacatctgtcccaaggctcaaggaagctgaaggagaagatatcatgagtgttggagaagctgtgtgccattccat

SEQ ID NO: 457499 - DNA, 371 bp, Homo sapiens
ataaacatccagaaaggaattgttagaggatcatagagaaataattarccagagatcataaaagggagctggtgaagagatccatggaaagttattgcttctgcatctggtggtgggtccgaagtcactacaggtaatcatttaaaaggaaaagctggaagtgaagtgagaaaaagcaaagccaacactggaatccacgaaaacaaactgaaatctgcatctgtctctcatagcaaccaaatttggttttgtgcatgacctatagaaggtcgggcccttcaccagagagatgcacacacatctgtcccaaggctcaaggaagctgaaggagaagatatcatgagtgttggagaagctgtgtgccattccat

SEQ ID NO: 457500 - DNA, 510 bp, Homo sapiens
cttaactatctcatccagttccctttattatcagccscctttaatttccaccatccctttatctttccacataattattttatctatgaatatttgatgacagtttgcaagaaatccattttcaaaagctcttttcagaatatgcctctgagtttaataatcttaatggggtaagcctatttttaagctgaatagctcaaagccttattatcaattcaagtatgcttatttatttatttggaatcacatttcagcaagaagagtctcttagaggcctttcctcatttttctgagctgtaattgcaatatttccgatgctgaaaactaaaatcaagtttaaataattttggaagtgtaacttttttctagcataatttttttatttcatatcattatagaatgtaaccccaaatgctgcatccttatacagataaagtaattgttgggtgtagcattgctattgcatttaaaagagcttatgtccataaatgaagataccttctaggatgt

SEQ ID NO: 457501 - DNA, 607 bp, Homo sapiens
gggctcttgtttacatcactgagctctgcacaagccaacactgagacttgttctatctccagatttcttatttatcagaaaatatatctttcktattgaataagctattttgagttgtggtcttctgttacttgtagccaaaatcatcctaaccaataaaccaatatacttcataatataaagacacactgttaccagctacaaaccataacagaaatgtagtattatctggaagaacaggaaaaaataaagaaataaaagagaaattacccttgcataataattcaccatataccaatcaatgttttaatgtttgctgtacaccctatgaatttagagtcaaatggaagaaagctcccaacaagaagtgaatcatgatactatgctttctatatctttaggagaagaccatccatctgcaattgcaaagatctaaattgatgtccctgtatcaactaagatagattctaaggttaaggaaacaaaaagttacctactggccaagggcccagggctcagctggcatggcaactccctgaatttctatagcaacaaaaaaaccacactcatgctgaactgcctaacaataggagctatcaggcaaaat

SEQ ID NO: 457502 - DNA, 637 bp, Homo sapiens
caatgaaccttgggtgtcaccccagacaacaaagccactttagttggagtggctatagtagtaacaagraaaagagatttagacaaaaaaatactatgagagacaaagaggaacatttcataatgataaaaaagtcaatatatcagcaaaatataacaattataaatatatatacatctgaaaagagagtgaaaacatacatgaaacaaaaattgacagaataaaaaaagaaacaaaattcaaaaataatcaatctgggattttaatatctgactctcaataatgaatagaacaacgtggcagaaaaacagcaaagagatagatgactgaagcaggctaactgacacatagagcacactctacccaatgactacagaataaaaattattttcaagtgcacatggaacattctccagactagaccatatgctaggccataaggcaagtttcaataaatttaaaataattgaaatcatacccagtatattttccagcaacaacagaactaaatcagaagtcaacaacagaataaaatttaggaacccacgacagtttgtaatataaacagcacacttctaaataatccatgggtcaaaaaaagtcacaagagaattagataatatttaaactaaattgc

SEQ ID NO: 457503 - DNA, 637 bp, Homo sapiens
caatgaaccttgggtgtcaccccagacaacaaagccactttagttggagtggctatagtagtaacaaggaaaagagatttagacaaaaaaatactatgagagacaaagaggaacatttcataatgataaaaaagtcaatatatcagcaaaatataacaattataaatatatatacatctgaaaagagagtgmaaacatacatgaaacaaaaattgacagaataaaaaaagaaacaaaattcaaaaataatcaatctgggattttaatatctgactctcaataatgaatagaacaacgtggcagaaaaacagcaaagagatagatgactgaagcaggctaactgacacatagagcacactctacccaatgactacagaataaaaattattttcaagtgcacatggaacattctccagactagaccatatgctaggccataaggcaagtttcaataaatttaaaataattgaaatcatacccagtatattttccagcaacaacagaactaaatcagaagtcaacaacagaataaaatttaggaacccacgacagtttgtaatataaacagcacacttctaaataatccatgggtcaaaaaaagtcacaagagaattagataatatttaaactaaattgc

SEQ ID NO: 457504 - DNA, 532 bp, Homo sapiens
tgaatgagttgcgaaatgggcagcccccagaatcacagcagattcacagatactccaggggtgtctcgtggtcagagcaaatttatagacaaaaaaaggtaaagtgacgtacaggaattggaagtgaggtacagaaacagtgagattggttacagctcrgcgtttgctttatttgaaggcagtttgaacattcagcagtctatgagtggttgaagcatggccgctgggattggccaacactcagctactgttacaggtgcatactattaagtaaggcttcaattttgtctgactattaagctaggttacagttcatatataagtactcaaatacagaagtgcagaggccttctcagggcatatttagtttgctttaacaccctacagatataaatctcccccgtaaaatacagcttttcagctgtttttgtatttccagcccttttgaatagtcatcatgaaatatgtcagagaagtatgttttggggtaaaaaatattttcgtttccttcaaaacaaatttctaaattctg

SEQ ID NO: 457505 - DNA, 535 bp, Homo sapiens
aggtccttcgatttatattagaaacaaacatcttacctatttcccttttctgacaacaaggatatmtttttaaagagaagccaatgtatcttatgtaaccattgatattattttatagtcaagaggtttgggggtggtctaccaattagaaggtgtgcagcccttaaacacagtgtgtgtcttacatttttacattttagaggcattcatggtggattccttgttctgtcactgcctgagtcaccttttccccaaaggtagtattctttcctgtctggtgtcatgaagccaatacacaaaacctcaagtgagtatcaagcagtgcaggctttatttgatggccatggaattgagaagtggaagcgtggctcacagatcaacttctcaaccagcaaaggtgagagggttaaaatgtaaggtttctctaacaaagaagttggacattaacagcaaaaggaggaatgtctatgtcttttttgaaaatgggcagtgaagttctcagaaccagtgtcatctttctttttgtcttgttatg

SEQ ID NO: 457506 - DNA, 535 bp, Homo sapiens
aggtccttcgatttatattagaaacaaacatcttacctatttcccttttctgacaacaaggatatatttttaaagagaagccaatgtatcttatgtaaccattgatattattttatagtcaagaggtttgggggtggtctaccaattagaaggtgtgcagcccttaaacacagtgtgtgtcttacatttttacattttagaggcattcatggtggattccttgttctgtcactgcctgagtcaccttttccccaaaggtagtattctttcctgtctggtgtcatgaagccaatacacaaaacctcaagtgagtatcaagcagtgcaggctttatttgatggccatggaattgagaagtggaagcgtggctcacagatcaacttctcaaccagcaaaggtgagagggttaaaatgtaaggtttctctaacaaagaagttggacattaacagcaaaaggaggaatgtctatgtcttttytgaaaatgggcagtgaagttctcagaaccagtgtcatctttctttttgtcttgttatg

SEQ ID NO: 457507 - DNA, 619 bp, Homo sapiens
ctggttcttcaggctttacaggaagtatggctagggaggcttcgggaagcttacaatcatagcagaaagcgaaagggaagaaggcacattttattatgtggccagagtaggaggaagagasagaagggggtggtgccacacacttataaacaaccaaatctcatgagcactcactcactttacaagagcaacaccgagggggaaatctgcccccaggatccagtcaccttccaccatgccccaccttcaacacctaggattacaatttgacatgagatttgggcagggacgcagacccaaaccatatcactaagtatcctattggttgtgtttcactggaaaaccctgactaatacagccactggcattcattagatgtcactaagctgagcatattaagtatgtggaaaagagccttcattatacaaacatactataatttctttttaaagtactattttactaataaaaagagagggttatccataaggggtcacgtatgtaaataataccaagaatcagaatacctcaaagtgtctaaataaacaaaataaatagcacaagagtttttgccccatttcactaaaattgatgctgtaaacagattactcaaaatttc

SEQ ID NO: 457508 - DNA, 519 bp, Homo sapiens
aactgcattcctccctcactcattaaataactagttatgaatttttactgtgtggcaaaaacataaggcagtgaaaaaatcagataggatcccaccatcctggagccagatttaccatctaatcaaagtcctgcttctaactcatctccttctctacatgtctcccctctaagagtctcctaacccaggcactactgaaacaatcaaccttgtgctttctaagttgattttttttaacttgaaccaactttcttagatgatttcctggctccattctggcctttctgaatttcaaagagttacataaataaatttaattaacatcctcttgagtcccyacattcttcttatcaccagagatagtattattcctctagcatcaggaatacaaggtaatatcatctttaataccacttggcactcattctgttgcaaagggaaatctcattccacaattcccttaagaagcttccaatttttatttcatgagaaattatgatgaagtatcttacagagttt

SEQ ID NO: 457509 - DNA, 610 bp, Homo sapiens
tttataatcattttttctcatcccttttaatttcattattttaggttttataatttatgtaatacatagggggagtaacaggttaatcatttcaaaaatacatctattaagagttcacactcaatttttttaatcagtggggtagatgctcaaaaaaaagcttataaagcattgccctaatttatagaagttggatttgcttattttcctgttgtatcattctcaaattatctttccatctagtctctagaagcctaaaatctctagtcataattttgaattcatttactgaagaaggctgaataaaatagatggtgtaggaaggatgayactgaaagacacaaacactaattgacccttcagcttctgttagttcagcagaccgaaatgctgtgctctgaggaatctaggcacagagctatatatggcataatgtatagaagagaagggaaagaaggttcagaaacccgaggaccttttctggaaggcaacttacgtttggttcttgacaagacaggtctctgaggctcctgaggacacagataagctgtcttgggttgaccactaaagcaaagagtctcagagggaaggaataattgaccagactgaa

SEQ ID NO: 457510 - DNA, 614 bp, Homo sapiens
ttacaagacctgcctcacaaaatcacaggactgcagaaagactatagaccagttagaccagtacttctttggaatgagagtttttatttcagttatcctacacctgttccactgttgagaggattggggagggggaactgatatcctaatcgtttgctttcayaccacacctgaagcagccaattctgtatctgatggacatagactttgatctggatgagatgattaagtgacaatctggggtttgttccccgtaaagagatgttgattgtgttctatgtgtggaaataagaatgaaagagctatttaatgatctgaagggtagatttggcagaacctacctgaatgtttatcaaacatatttctcttctcctttttcatgcagttatactatgtcttcagctttacttgcaaataggatggccatgtgactaaattctaggtagtatatgtgagcagaaaagatgtatgcctgtccaagtctgtcccatcaaaatcccatgatctctatcctcttcctcttctgcggcaaccttggatggtgtgtcataaagacagaggcatcacaaaataaaaagtaccccttaaaactgcatatagcaaagctcccccac

SEQ ID NO: 457511 - DNA, 581 bp, Homo sapiens
cacactgaaaaaaacatatatgcaaaacaaattactgaaccttcgtaagacagtggggtctttgacattttgacacgtggctatttccatcactcctccttcccaagctcggtggcctgacagcctgatgaaaaacaagcaatctcagagctaacagacaagattgaccctgtttggtactccattaaaagcagcatttccacagcatagtcaatattttgtctcaacttcaagctactcacaaaatctctattcctggggtgttgtggctatttgacttaactcggagtccagctcagctgaaattctcaaaagccctactcccagggcattgccaaaacaataacaatttactgacaacattgcagctgccttgagctgtgaagtcagttggtgcaaacaaaagcctggccrtaatttaaaagcagctcctggaaaacaaggtgagcataaggaagttttaaaaacttcaggccgggcgcagtggctctcatgcctgtaatcccagcactttgggaagccgaggcgagcggatcacaaggtcaggagatcaagaccatcctggctaacacggtgaaacc

SEQ ID NO: 457512 - DNA, 617 bp, Homo sapiens
attcacagaatgggagaaagtgtttcaactacccatctgacaaggattaataacatgaaaagaagctcaaacaactctataggaaaaactagtaatccaatcaaaaacgggcaaaatatttgaatagtagacatccaaatggcaaacaggcatgtgaaaatgtactcaacatcattgatcatgagagaaatgcaaatcagaactataatgagatattatctcacctacctgagttaaaatggcttacattcaaaagacaggcaatcacaaatgctggagacaacgtggagaamagggaaccatgtacattgttggtaatgtaagttattacaaccacttggaagaacagtttggagtttcctcaaaaaactaaaaacagagctaccatatgatccagcaataccactgctgggtatataccacaggaaaggaaatcagtatattgaagagatatctgaactctcatgttttttgcagcactgttcacaatatccaagattatgaagcaacttaagtgtccatcaataggtaaatggttaaagaaaatgtcttactcatacacaattgagtactattcagccataaaaaagagtgagatcctgtcatttgcaacctga

SEQ ID NO: 457513 - DNA, 617 bp, Homo sapiens
attcacagaatgggagaaagtgtttcaactacccatctgacaaggattaataacatgaaaagaagctcaaacaactctataggaaaaactagtaatccaatcaaaaacgggcaaaatatttgaatagtagacatccaaatggcaaacaggcatgtgaaaatgtactcaacatcattgatcatgagagaaatgcaaatcagaactataatgagatattatctcacctacctgagttaaaatggcttacattcaaaagacaggcaatcacaaatgctggagacaacgtggagaaaagggaaccatgtacattgttggtaatgtaagttattacaaccacttggaagaacagtttggagtttcctcaaaaaactaaaaacagagctaccatatgatccagcaataccactgctgggtatataccacagraaaggaaatcagtatattgaagagatatctgaactctcatgttttttgcagcactgttcacaatatccaagattatgaagcaacttaagtgtccatcaataggtaaatggttaaagaaaatgtcttactcatacacaattgagtactattcagccataaaaaagagtgagatcctgtcatttgcaacctga

SEQ ID NO: 457514 - DNA, 522 bp, Homo sapiens
  misc_feature (1)...(522): n = A,T,C or G
tcaactactttgactatacagttaccacaggtaactgaaaccatggaaagtgaaactacagataagtggggactactggactgttagtctttccaccagctttccacaagtgactnnnnnnnnnnnnnnnnnnnnnnnnnnnnnnnnnnnnnnnnnnnnnnnnnnnnnnnnnnnnnnnnnnnnnnnnnnnnnnnnnnnnnnnnnnnnnnnnnnnncaagtaaataacaggcaaggcaagggttacaaagaaaaaaaacaaactttactctacctagcaagctcacttcaaggacaattataaggtaacactctccggaaaggcaaggccaaagaaatgggctccagacacccccaatccagagcaagkttgaaggggaaaaaaagagaaagacaaattatttccctggtttcttaagcatgattatgttttacaaatgtctgtatttagccagttcttgttttccttgcaatgcagctacaaggtcaccagctatgcaaggccacaagttatgttatgctat

SEQ ID NO: 457515 - DNA, 481 bp, Homo sapiens
taaaacacatcacgatgttttatgcgactttactttatcaatttatttaaagtcattcataacatattctgaaagtatttataactaaccctaaactaaggacaagtcagtgcaacaaaagactatgaatttactttagtcaaatgatataattatgttccatggaattccsattccattgagatattaatccagctaaagtatttcttgaagtgcagtatagacacactgtatttcagcttaaaatgtttgtttggggaggaggatgaggtaacaatgcagtcattgcttgagaaaattttatttcactcattgattatggaagaaaataccaactacactttttttccctaacctttccctaatcctaatcttcctatttttttcttcagtgtctccatctatatgacacatttgtttcaagagaatcaaaaatagaaaatataaaatactaactgggtagaaagtataataaaatcag

SEQ ID NO: 457516 - DNA, 575 bp, Homo sapiens
gtaatgtggagtgtgctttatataaaattatgttctctttcacagccttttttctacataagaaagtggtcattataagctgtgtaaacagatgtagatttaccatctgttgggtttgtgggtgaagtttgctttaaaaatttcccaaactgtgtccctgttatagcatttttttcttgtagcttttattattttgtatcatgtgggttggtgtgtcctatttctcatattattcaatctttatgaagtcagagtccttatgttatctttaagaaaaaagctatatatacgttgtgattactcaagcatacacttaaggctatgtatgaaattttagtaaaaatcttttattctgtcaatgtaattgtagcatatttatttaagatttagccttmctatgcaactaaatttcaagtaactctaatctattactttagtttcaaggtaatcaattccagaatgtgctataacaattttgttcatacaacagaattacatctatatattcatatattgtatcataggagattaagctgtatgtcagatgatttgccaatgttaaatctgttggcaac

SEQ ID NO: 457517 - DNA, 523 bp, Homo sapiens
gagcagtgtttgcttggtagggtgggtggcagagttttgattgttttttcttggtgtgaactgttgtcatcaccagttccattttagcaccagaaacgacctcgcacaactaaagaaatatacttcagtgttgggttttaccacatatacacaaatatgcatctggcattttgggtcttacatttgaaattctttgtttctgtttaacttcataagtatgaatagcatactggactttgtgacatraaagttgaaatgtaagcattgaaaagttaagtaaaggtttagcctctgaagaagatcagcaattaatacaagaatcattgtcttgcatggatatcatggggattatttaatgtgttacctgttcatagtagatgactatagtttatgtattttcatggaaaaagaaaggatataaattgtaagggtaattagaaggcatgtaagacccaataattaggaaatcagtaatatctcaacagtgttttcaggaaactggtttggtttggattgctaattc

SEQ ID NO: 457518 - DNA, 556 bp, Homo sapiens
taatctgtcttagatattatctattagctaacattttcactgattattggggatatattagataacttaactttgttcctgaaattatttgagagaactttacctcaacaaaaattgaagatgggaatgagaatttaatgttctttaagaaaatattttgtgctcctgccaatttgtgagagttaaaatataggaaagatcacgtttcataygaaaaatcacaattcactacttcctcttgatatgggatatatggacaaaaattactctttaggcatgtagaggtctagtgcaatggtaatgaaataagtgggatgatagagtgtgtctgagtctattggttttaaactactcctgggttactggtaactacatatttgtcactaagcctatttaatacagttccttaccttggggattgaactatacaacacatgagtgagaaatacagactgaaatgacaacaaagatgaaatgatggagataaaagtactttggaaatgagatgatagaattcactaagaattatggatcatttcaaattcataaacataaa

SEQ ID NO: 457519 - DNA, 587 bp, Homo sapiens
tcatcattcctgaacaatcctaatgaagaaaagcatatgtgaccattttgcaagcctcttcagaggaaagtgaatatttaccattgaataaaacaaaacaggaaaacaaacagataaacataagagcaaaagaacaaagtcaaaacaagttgcagaccaatgtagaaagaaacaaaagtctgtgcttcttccgttcaggttcctcgggccagagacagcatgtaggtcatgctgtggttgatcacaagggccacagatgatattccctagtgtttgcaagaacttcctttaaagtactattaataatatagagaaaaatgagaaataagtttagcatgatcattagtatgcagtgtatgtgagtgatgcaaccatcatatacaagcattataactttcgtgggcctattttcttatgctctatctctctgtgtataaaacataaaatatataaatatgtttatattttatgtaaatttatatttatgtttaatttatatatttatatgttatataragtattttcatgtataaatatatttcctataaaatatttatatattatattttatatgaaatatatgtaat

SEQ ID NO: 457520 - DNA, 425 bp, Homo sapiens
atgcattcaagcactagtgtgtttgttagagctttcaaatctgtttccctcttttaatccaaagtgttccaaaacatatttgaatataatgtgtattttctaaaaatattccataatctgcatgtatcacatcttaacccaacaagtaaacactggaaatgactactaatcagggcaagacatgcatgataacatgtaggtgtgggttattactwatacaaaaattctaggaactttcctatgtactctgtaggatgcgaatgagggactgtaaaagtggagaatgacaatctgtatgctaattctgaaacatttgcattgagaagaatggcctgggaaaattgagctaaatctattcccgccttagcaaaattcttcatgaatgtgaaatgctataggttagttaggtaaactagaagcttcta

SEQ ID NO: 457521 - DNA, 599 bp, Homo sapiens
ctattttaatatataaaatgcattgttaactatagtcaccccactatgctattgaatattagataaaaatcctttcatttgcaacaacatggatagaactggaggtcattaagtgaagttagtgaggtgcagaaagacaaacatttacgttctcactcatctgtgggagctaaggaattgatctcatgggggtaggaagtagaataaatccttaacaggttaatttcattattacaacaattcaatgaggtagttatatttttattctattttgcagatgagaaagctaaagtasataaattttaagtaaatgctcaggttcacagtgctagtaattaacctattcagcatctgtacctagaaagtctactgccagagtccacatttatcaccagtttactgtaatgcctcttcctttgtaaccctgaaaattacttatgagaaaacttggctagttttcacccatatacctatataagggacagacatcgatgcgccttttcaaaaaggtgaagtgggagtacagggccagagaaagataaatggaatcatggagtataagtgatgatgccatttttttttctactggaagtttgaag

SEQ ID NO: 457522 - DNA, 412 bp, Homo sapiens
tattgacttagtatgttaacataaatgaataaatgtcttctaaatgctttgtcttttactaaattccagcattttattactaaaaggacacatatacaataagtagtaaatatgcctgatatattttaataatgtaactaatttcctttataaattagttatagttttaatactcttctttatgtgctctaagtggctccattggctaggttaatcattagaggatgactaaattgaaaaatctttctacaaataacgtggkgaataatgtcatcttccaccatcttatgctaatgtataactaattattatccattgctgccatttctgaattttacataatttgttcatttagtgtgagctatctaaaatatatatggatttcaaatatgtattttatgccatggataaa

SEQ ID NO: 457523 - DNA, 581 bp, Homo sapiens
tatggtccacgttcactgggctgagtcctttgcccgctgatgtctgcaaccctgaagttctgtgctcggtatggtgtgggtgctgcacacaggctccttcatggatcttactaccttccccaagaccctcactgaggagcgaacacacctgacatgggtcactcccggagcagggctgagctgccgcaagcgctgacggtttctcttgtcacagttatcattgccgccctgaaaaggctgcaaagtttgccttctgcctcagggttaatccatggctgctgggatggaaggtagcatttgaaattacctacagggggaggctgcacctgcagaacgggcccagttgatcctgtcacatccaatgtcattgcccatctcttggggtgcttrccccccaattacagagatttcgaattcatgtagcgtgcacgtgctaggcgctggggtgcagagatgaaaagatgcactcacaggtgataaattattgtgtctggtgaaagatgtacagagatagatgtgtggaccagcttcaggagggagggtgagggtgtcccaggcagaccagccagtgagagctcgaa

SEQ ID NO: 457524 - DNA, 581 bp, Homo sapiens
tatggtccacgttcactgggctgagtcctttgcccgctgatgtctgcaaccctgaagttctgtgctcggtatggtgtgggtgctgcacacaggctccttcatggatcttactaccttccccaagaccctcactgaggagcgaacacacctgacatgggtcactcccggagcagggctgagctgccgcaagcgctgacggtttctcttgtcacagttatcattgccgccctgaaaaggctgcaaagtttgccttctgcctcagggttaatccatggctgctgggatggaaggtagcatttgaaattacctacagggggaggctgcacctgcagaacgggcccagttgatcctgtcacatccaatgtcattgcccatctcttggggtgcttaccccccaattacagagatttcgaattcatgtagcgtgcacgtgctargcgctggggtgcagagatgaaaagatgcactcacaggtgataaattattgtgtctggtgaaagatgtacagagatagatgtgtggaccagcttcaggagggagggtgagggtgtcccaggcagaccagccagtgagagctcgaa

SEQ ID NO: 457525 - DNA, 554 bp, Homo sapiens
tcacttgtttggccgtcactttgaggtagaatccaaggacatttctttgaggaaggatctaccaacttaagttatttttgctctaaacaaaggctggatgtgtctcctccaagttccactgacagtttctttggagaggagtgagtatttaaaggcacttggaagcaatctcagtgcagaatccttccagagttttaaggccccacctccccagatctcacttctctctcccacgcaaactgcacagtggtatttttagcaacttgcctctactgactccaaagcttagttttcatggaatttacattttcattttacacccrtatgagatcatttaatcaatgtgcattaaaagcttaattacatttattacagagacaagtacacctggtacaaataggtttgggaacagaagcaaccagttcctgatccatgcacagctcagctggtgtggccaggcagttctgaaatcaacagggaggccacgaagtcagcacgggatgcccagcatggctggagccactgaaggatttctgcttcaagaagcctcaacc

SEQ ID NO: 457526 - DNA, 576 bp, Homo sapiens
taagtgctgagaatgcaatagtgaatatgataaaggaggctcccatcttcatggagtttatgtcccattgggaatatattggctgattctcccataatcaagacttttcccattaagatgaatatattctctgtctatgctatgatatgcaagggatgacactgggcttcttagtgatgacgaagttgggaaaagatttaactctctttacttattgaactgcatattttttcagtatttccccccacttcttttccatggccatgaccggtagtaattatgtgaagttctcaaacatctctgattctaaagcagatgactgtgatgcaacaagccttcaactgtatcagttgctttgtcttctcctttatctgaagatgctcaaggcccacatacaaagagaaaggaaatcctgcatatagatactgccttaaactaaaataatagctttagttttctgtttgttccaaagtggccactgcarttgttatctgaaagatttactctgtaagattaatgtggctatagaacagaaactaagtacaatggaattccaccttaaccaatggttttagg

SEQ ID NO: 457527 - DNA, 503 bp, Homo sapiens
taatttattaacaaattcatcatttctactgatttagcaaagccctggcctttctgtgtacttcaagggcttttaactcacaggtttaaaactaagttctagatagtcctaagaattcagcatataacaggggcctgagagtggggagccctctgagactctaccctattttaaccagagtagctccatcctcatgttttacatatgggacttctgagaatctttttaatagcagcaaatttatttgtataaggtttttggctattttaactgctaraaatgaataaccttaaattctttgtcttttttataatctctagattccacaggccatagagattttcttctgagaagaatttgtgtttaattttttgataccaacactgaacattcatcagggaactttcctgaagttcagctcaagactaccctacctgctgtgtttgtgagaagagtaggatcacacacacaggtgcaatcttgaccacacttacctgcaagag

SEQ ID NO: 457528 - DNA, 573 bp, Homo sapiens
atacactgcaggtggaagtgtaaagtggcatcactttgtaaaatagtttgactgatttaagaaagctaaatgtaacacctgtcatactatccagccgttctacttctatttatccacacacaaaaattaaatatatgcccatacaaagacttgtagggcatatacttataggagctttatttgtaatggacaaaaaygggaaacaacacaaatgtccatcaatagtgttgtatcatacagtggaatactcagcgataaaaggaatgcactattgatatacacagcatggatgaatcataaaataattaggctaacttaagccagacaccatgctttttcaaaaacgaataaatactctgtgattacatttatataaaactttagaaaatgcaaaatacagaaagcaacagaaagcatattagtgattgcttggtgatggaggggggaaggaacagatatgcaggagggaggaaattgcaaactacaacaaggaaacttttgagggtgaagaatctaataactgtcttaagtgtgatgatggttttacagatgtacacatatgtccaaacttgt

SEQ ID NO: 457529 - DNA, 613 bp, Homo sapiens
gtgaggtcttacttaagttcagaacattcaaccaaattagtcattcctaaaatgaatcattttctcacacttttcaatcaaggatttgaaatgttatatttattttaactcctcastttgatacatagcttgcaatctgccagtgtgactgcccccatgctgagtttccttacctccaaaccctctgttgctaaggtttgtttgtatttctacattagtcgactgcaaggggttgggggaaggattgaggaaaaaagaaaacccaagggacgattataagccaatgcagtctccctatatgagctaggatgggctaaagtatttcttcttgagagtatcataattttcctgcttacttgtacctaaggttcaacaataatgctaaatatttataaagttcctgtcttctagggagctcagagaaaatatttatgtaagtgatctcagcagttctccaaaataggaagctgaagcattttctcacattagtctataaactaagtcacttgtgtggataggtgactggttcaagttcatactatgagtcagtggcagaaaagccaaaaatagaactacggtgttttgagggttttttttaactacatactttctc

SEQ ID NO: 457530 - DNA, 613 bp, Homo sapiens
gtgaggtcttacttaagttcagaacattcaaccaaattagtcattcctaaaatgaatcattttctcacacttttcaatcaaggatttgaaatgttatatttattttaactcctcactttgatacatagcttgcaatctgccagtgtgactgcccccatgctgagtttccttacctccaaaccctctgttgctaaggtttgtttgtatttctacattagtcractgcaaggggttgggggaaggattgaggaaaaaagaaaacccaagggacgattataagccaatgcagtctccctatatgagctaggatgggctaaagtatttcttcttgagagtatcataattttcctgcttacttgtacctaaggttcaacaataatgctaaatatttataaagttcctgtcttctagggagctcagagaaaatatttatgtaagtgatctcagcagttctccaaaataggaagctgaagcattttctcacattagtctataaactaagtcacttgtgtggataggtgactggttcaagttcatactatgagtcagtggcagaaaagccaaaaatagaactacggtgttttgagggttttttttaactacatactttctc

SEQ ID NO: 457531 - DNA, 613 bp, Homo sapiens
gtgaggtcttacttaagttcagaacattcaaccaaattagtcattcctaaaatgaatcattttctcacacttttcaatcaaggatttgaaatgttatatttattttaactcctcactttgatacatagcttgcaatctgccagtgtgactgcccccatgctgagtttccttacctccaaaccctctgttgctaaggtttgtttgtatttctacattagtcgactgcaaggggttgggggaaggattgaggaaaraagaaaacccaagggacgattataagccaatgcagtctccctatatgagctaggatgggctaaagtatttcttcttgagagtatcataattttcctgcttacttgtacctaaggttcaacaataatgctaaatatttataaagttcctgtcttctagggagctcagagaaaatatttatgtaagtgatctcagcagttctccaaaataggaagctgaagcattttctcacattagtctataaactaagtcacttgtgtggataggtgactggttcaagttcatactatgagtcagtggcagaaaagccaaaaatagaactacggtgttttgagggttttttttaactacatactttctc

SEQ ID NO: 457532 - DNA, 613 bp, Homo sapiens
gtgaggtcttacttaagttcagaacattcaaccaaattagtcattcctaaaatgaatcattttctcacacttttcaatcaaggatttgaaatgttatatttattttaactcctcactttgatacatagcttgcaatctgccagtgtgactgcccccatgctgagtttccttacctccaaaccctctgttgctaaggtttgtttgtatttctacattagtcgactgcaaggggttgggggaaggattgaggaaaaaagaaaacccaagggacgattataagccaatgcagtctccctatatgagctaggatgggctaaagtatttcttcttgagagtatcataattttcctgcttacttgtacctaaggttcaacaataatrctaaatatttataaagttcctgtcttctagggagctcagagaaaatatttatgtaagtgatctcagcagttctccaaaataggaagctgaagcattttctcacattagtctataaactaagtcacttgtgtggataggtgactggttcaagttcatactatgagtcagtggcagaaaagccaaaaatagaactacggtgttttgagggttttttttaactacatactttctc

SEQ ID NO: 457533 - DNA, 594 bp, Homo sapiens
caacaataatgctaaatatttataaagttcctgtcttctagggagctcagagaaaatatttatgtaagtgatctcagcagttctccaaaataggaagctgaagyattttctcacattagtctataaactaagtcacttgtgtggataggtgactggttcaagttcatactatgagtcagtggcagaaaagccaaaaatagaactacggtgttttgagggttttttttaactacatactttctccagctctcacctcacctccaataaaaaaaaaaattaaagctattaggtaatgatcatgaaacattctttcagcagggctgatattttttacatgagcaagatgctatgatctactgttagctcaatgttatatattcattttaataacagatgatattgatgatagtcatgtggatggagaaggtgaggatatagtgcatttactcctattatcaggaaatttgagacttgcttaactgaattcttgaggtttctttgaaattgagtgccagttggcacagaaaatcactcttaggttcttatgaaaatcatagcaagcaaaccactttctctgtgcaaatcctaaacttt

SEQ ID NO: 457534 - DNA, 594 bp, Homo sapiens
caacaataatgctaaatatttataaagttcctgtcttctagggagctcagagaaaatatttatgtaagtgatctcagcagttctccaaaataggaagctgaagcattttctcacattagtctataaactaagtcacttgtgtggataggtgactggttcaagttcatactatgagtcagtggcagaaaagccaaaaatagaactacggtgttttgagggttttttttaactacatactttctccagctctcacctcacctccaataaaaaaaaaaattaaagctattaggtaatgatcatgaaacattctttcagcagggctgatattttttacatgagcaagatgctatgatctactrttagctcaatgttatatattcattttaataacagatgatattgatgatagtcatgtggatggagaaggtgaggatatagtgcatttactcctattatcaggaaatttgagacttgcttaactgaattcttgaggtttctttgaaattgagtgccagttggcacagaaaatcactcttaggttcttatgaaaatcatagcaagcaaaccactttctctgtgcaaatcctaaacttt

SEQ ID NO: 457535 - DNA, 610 bp, Homo sapiens
tttttatactagatgtgatcatttagtttaaaatgcttcattataaacagcaggatgtgtattttgaagtacttgtttctaatctayatatcaggaatgattaattaatatttgaagtactaatcaggactcaacatctaaggagaactacacttaaaagatagcatgtccataatcaaagctgtaccaaaggctttgctaattagcataaggtatgttagaaataatctctattggcttaaatgtgtgttctttaaaataggtgagttgggaatactgggaagactccaccaccctagcataaaccctgagatgccaagtgtagcacacaagatcaggagcacttaagatgagagccaattcttcccccattcttccattgcatggagaacattatagcctgatctcattacaaagacgggtggttctggcatcagaactgtgggatacccctcttggagtaaactttcttgctagggctcgtgtccttaggtcaaaagtgtaacttcaaaagtactgaatagaatggatgatgacatattttggtgcttagttgctaatatcttatttctttaatcttaaagcacacacttttttctcacattttaac

SEQ ID NO: 457536 - DNA, 607 bp, Homo sapiens
aaaccatttttttccctaattctagcaagtcaaagtagaaatcccagctgttacaaataatttaactactttcaataatatttcagacaaaaatcagattgaatctgaagaatacattaaggctaacatgttaaagtgcttaattatttacactaaatatgcaaattaacaattagatcctacatgcttccacttaaattaatttttgccaataagataaggaaaattgtcctcactcttttttatagtaccagttattataagagaataagaaagaacagtacataaaatagagccacatgattgagaaaaaaacttgtagtcttagaaataatatatataagaattgccgttatctaaaatattgrtatccttgaagttcataatttatttgagaagtcccagagttagtgaaataatcttatgagaacttacaacaagtgtgatgacctatatttgtaactaaaaagtgaaagggttgttctttgtggtagccctggccagagctgacactgatgttcagtcctctcccaggccttgtattacaagagacaatggataggcatatccatacagtggtcagcatttcagagttgcaatatacagg

SEQ ID NO: 457537 - DNA, 570 bp, Homo sapiens
gtcatatgtggcccttattattttgaaatgtcttctaacccagtttgttgaagggttttataataaagagattttgagtcttattgaatctcttttcagcatctgttaaaatgcttatatggcttttgtttttgattcaattaatgtgatgtatcatgtttaatgatttgcttatgtagaactatcctcgcatctctgagataaatcccacttagtcacaatgagtgatctttttaatacttacttaaattaggcttgctgatattttgttgagatttttacatcgatgttcattatgaatattggcctgtagttttcttgtttttattgtgtccttttctggttttggtatctgggtagtgctggcctcatagaatgagttgggaagtattccttcttcattttttaaaagtttaactagaattgctattagttattcttttaatatttggtaaaattcagcagtaaaggcatcaggtcctaggattttctttgatgggtgacttttttattatggcttcagttttggaacttattwttggtttgctgaggttttccatttcttctggt

SEQ ID NO: 457538 - DNA, 619 bp, Homo sapiens
ccaaatattaataaaataaaattatcttaaacacctcaaatatttggaaaattaaacaatacatttctaaaaatcaccatrggtcaagagggtgtcttaagggttatttaaaaaatagtttgaatgaaatgaaagtaaaaattccaacatatcaaaatgtgtgtgacgcagctaaagcagtacttaaatgaaaatatatagcagtaaatgcttacataagaaaagaagaaagatctcaagtcagtaacttaagcttccagcttaagaaacaagagaaaaaaggagcaaattaaacttaaagcaagtagaaggaaggaaataaatattaggacaaaactaagtaaaattgaaaaccaaaaaataatagaaaaaaaatcaatggaaccaaaagtttaaaaaaatcgatagtattaataaacctgtttccaggctaagagataaaaagagagaagatgcaaattacagtatcagaaatagaagaaagaatattactactgatcctgacacatcaaagagagaatggggaatgctacaaacaaccctgtacatataaattcaacaacttagatgaaatggacaaacctcttaaaagaaacaaactaccaaaactcactcaaga

SEQ ID NO: 457539 - DNA, 350 bp, Homo sapiens
ttttacccactgccatcactcaccaagcagagcctgccagctccccaaaactttactcttgtcaaagaacattctagaaaaaaaatctaacattttacctttttataaagcctcctacctcctctttgtctttggacatcatactgaagactaccccatctacatgtatgccttgcattgcaattctcacatcccaaataaaatgttacatttaagacatccatctctacagttttattctacctttaacagtgcctgctatgtgtcaggcacggttctaacaaaaaaaagtgccctgayggagggaggtgacattctagttgggggtggagggtggggtaaggagagac

SEQ ID NO: 457540 - DNA, 585 bp, Homo sapiens
tttccatagcggtcgtaccgatttacattcccaccagcagttcccttttcaccacatccacaccaacatctattattttttgattttttgattatggccattcttgcaggagtaaggtggtatcacattgtaattttgatttgcatttccatgataaaagtgatgtttagcattatttcacatgtttgttgccatttgtataacttcttttgagagtagtctattctgttcttagcccactttttggtgggattatttgttttcttcttgctgawttttttaagttctttgtagattccagatattagtcctttgttggatgcgtagtttgggaatattttctcccactctgtggattgtctatttactctgctgattatttattttgctgtgtagaagttttttagtttaattaatttccatctatttctctttgtttttgttgcatttgcttttgggttcctggtctttgcctaagccaatagatgaatttttctgatgttatcttctagaatttttatggtttcaggacttagttttaagtttttgatccatcttgatttgatttttgtgtaagatgagaga

SEQ ID NO: 457541 - DNA, 587 bp, Homo sapiens
ttaaaatttttctttgagttggttttcttctttctctggtatctctttgagtagcttaataatcaatcttctgaattttttatctggcaatttagagatttattcttggtttggatccattactagagagctagtgtgatcttctgagagtgttatagaaccctgttttatcatattatcagaattacttttctggttccttctcatttgggtagactgtttcagtgggaagatctggaacccaagggctgcagttcagattcttttgtcccatggggtgatcccttgatatggtactcttccccttcccctaagcatagggcttcctgagagccagaatgcagtgattgttgttgcccttctgggtgtagcctctcaaggactayggggctccaggttggtgctgggaaaatgtctgcaaagagtcctgtgatgtgatccatcttcaggtctcccagctgtggacagcagcacctgtttcagtggaggtggcaagggagtgaagtgggctctgtgagagtccttggttgtaattttctttagtgtcctggctttcttcaatgctggtaatactagcagtgaagttg

SEQ ID NO: 457542 - DNA, 512 bp, Homo sapiens
gtcagtttattttgcccatagaaagaagaaactgaactgatgcagatccttaaggtctggtatgtttaagtgctccctttctttggcactagctaatgtgcagcagcaactatgrtggtggtaggtaagccaggcactgaggccagacttccagctggagctccctcctctgggcatccctttctttaccgtgaaaatcagaaggtggccctcttctcccccaaccccagcttagcaggcctggattctagggctgacaccaagttttgccagcaacaaacataaatcctgtgggggaaggaggacagaggtagagaatgttttttcaacaatgggcaccccatgaatgcaagcctcagaaattgcatttagatgatataattaaatgcttaaaaaaaaagacaagaatgagatccagtcatctttccagatatttttccactcaataaaagttcaggatgtacttttctaagctcctttcctctaaaatgtgtgtattttgaaggaaatgt

SEQ ID NO: 457543 - DNA, 563 bp, Homo sapiens
ctttggctgaactgtcctctgtgggtggacaagagctagtcatcaacatgcaacccagcagtgtttccaaaaataataaacatgctcaagctgtcttttcaagggagaggtgatgttgaacactagatgttaaggaaactgcttttcaaagaaacttaccctacagagagatagaaaaatgatgcatggaacttttccctccttatgtgattttgttaccaaaaataacataygcatgtcatttatttttaaaaacttcatatctcatacattgaaaacacttgcaaatggaattttctaacctgtttaaaaatcttccaaagtgttttagtggattttgaagctatttgcctaaaaattataaaaatgcaaataccttgtaagaaaaactgagataaaaaaataagttttagccacatttcaacacaagcctttgcatgattggtgaatggagttgaaaacatgagtgctgtgatttaggcagctctgtgcactcgctggatccctgggaacctggtgtgttgagaggggtcctcccaaagcagcccaaactgagaaggttg

SEQ ID NO: 457544 - DNA, 549 bp, Homo sapiens
agtggggagtaagtcagtggagctgccaagtcatattgcaaaggtcaagatatagagagtggtgaaagattgcagccagttctgccatatgctatggtaaacacctagctgctgcaaaatctttcattccttgcatattatcaagtacctgccagggcacagcttacaaacaagaaaacagctccaggaacccaaactaccaaagactctaagaagcagccccttgtcctgtctgtaagaactctgctcctgaccatcacacactgggttcattttcaacctactgctctgtacacagcarggacctctgtgtgctgctccctattcctctcttcctaaataaacctacccctccatcaaggtcaaagctattccaacaacttgaagccttgccactatttcccacaagggcgtcagtctccctccccattctacagcccacagcttccatgttagcttccatgcaaacccaaggcttcatttgcccggccctgggccagcacagcactgctgaatctgtgcgctccgtctccaacagcgacaccgtgt

SEQ ID NO: 457545 - DNA, 595 bp, Homo sapiens
tgtgggctggagcagccgaggctcctcaggcatctctctccatctccctgtggtcttgacacatgcactctccagcgtggcagcctcagggtgctggacctctgactgtcagctcaacaccatcacccgcagcccatgccccgagagatcgggcagaagttccatgccctckacggcctggccttggatgttgtgcagcatcacttccaccacagtttgttcattgaagcagcacaaaggtcccccgggggtatgaagggaggggacacagtctctgcttatgatgggtggtggcgaggttcaagaggggcacgtggggccagaaatattgctggggtcagcgttgagtaataccgtctgccaccgccttgttctccattgccaaaacataaaacaccttaaaccctccctgggctttcccacatgctgggctgggtccatgctcctccctctcctttcaaaagagtggtatttgtaggtctatatgcaagcacatagccagtctatcatctctatacatcatccctgatttgacagtcatcccaaaatgtcattgttatggtgtccattttgaagatgagcacactgagctccc

SEQ ID NO: 457546 - DNA, 595 bp, Homo sapiens
tgtgggctggagcagccgaggctcctcaggcatctctctccatctccctgtggtcttgacacatgcactctccagcgtggcagcctcagggtgctggacctctgactgtcagctcaacaccatcacccgcagcccatgccccgagagatcgggcagaagttccatgccctcgacggcctggccttggatgttgtgcagcatcacttccaccacagtttgttcattgaagcagcacaaaggtcccccgggggtatgaagggaggggacacagtctctgcttatgatgggtggtggcgaggttcaagaggggcacgtggggccagaaatattgctggggtcagcgttgagtaatacmgtctgccaccgccttgttctccattgccaaaacataaaacaccttaaaccctccctgggctttcccacatgctgggctgggtccatgctcctccctctcctttcaaaagagtggtatttgtaggtctatatgcaagcacatagccagtctatcatctctatacatcatccctgatttgacagtcatcccaaaatgtcattgttatggtgtccattttgaagatgagcacactgagctccc

SEQ ID NO: 457547 - DNA, 635 bp, Homo sapiens
gaactgtttctggtgaaagagtagccttccttcgcgggcactgacactgagggaagcagctcagtggctacttccacctgcagatattccaggtggtggctcagaacwgctgacaaccatacctggggaagactggcctttatttttctggttgttcatactccaacagctagcaccgtacgttggggtccaatgaagcgagcagcagtagatggcatggccagggcaaggcagacacgctggagcagtcgggaaacctggcatctacacccatgcactggcaccctcaccttcctgtttcccgtgggaacaaagtgggcggcaaatgcagggtgagatactgggtcacttcaggctccaacttgcagaagctgtttcagacccacaacgggagcaggctgcatcttttgcctactcaggataaaacgtgacactgctgcgtcatacagagatagttctgcatggtttcctaagaaaggcaaagccagaatgcccggggactaccagcattttacctgagtaattaccatgtgagcatgttatcttcaggaacaattttgctgtgctttaataatttatctctgagctaaaaaattataattgaaaatgataagcactttcacgagttgggttgc

SEQ ID NO: 457548 - DNA, 559 bp, Homo sapiens
ccgaatcctggaccacacactgcgtgctgaggctccatcgctgtgctgggtgaggggtggaggactgtccagctgacagccacccaggaggcctgcccaggagacccagcccagcctctccttggaacctgaagaactccaggcagctgatgggacactggggcccaggtcagcccctccccttccctgaggttgcctgaggacgccttcactgttctagagaaggaggccctccccatggctggggacagtcacagcagctgcagacagatgatgggagggagcattctttccctaaccctasaggcgggcgagcattcaccaagtgttgttgttaaagaaaaaaagaaagaaaaagaaaccaggattgtacctgaggtcaggcagacagtgctcaactcagcactgggaagattgctagaagccttgggcctatctaggaagactgggccaacatgcgatcccctctgcaaggtggaggccatgcacctgcctcctgctcctgagctccggtatcctcactgtgacccaggccccactgcagaaaagagacactggg

SEQ ID NO: 457549 - DNA, 621 bp, Homo sapiens
  misc_feature (1)...(621): n = A,T,C or G
nnnnntctactgcaatataggataatagtagaacccgtttgcaatgttttcacatgaacagctcagcagagtacaaatcacatagtaagcatataatgagtggcagttgctactattattattattattatcaccaccattagggatgttagtatctctttgtagaattgatttcagtccacaccaggacatcacagggccatttggagtgtgtctgtagccatagatgtgaacttgaaggtaggcagcactacctcacttaaatctctgctctgagcccccgggtaagggctgggggctgggagatgctctggtgtctggggtgtctcctgccttgagtcagatccaagaaggaggctgagtgaggaggctggccttcccccatatgagaacccagagatgccaaggcctccctctgtctgctcagtgaaaggaaggctcagagcctggcgtgaggttaatgagtcgctctcactctaataatctgataaatggctcttcctcccctggatcctctrtggaacttttagctcctttcttgggctggttgctgcctggtggagacctctgagcaggccattattgcttaattactggctaaacagtctcatttgttctcca

SEQ ID NO: 457550 - DNA, 396 bp, Homo sapiens
gatgttaccaacttctcacaattatgttaaataggcagaggttatgttcctgtgaggctttggggctgctgctggtggttcgtctaacattacctgtagaataagtgacattatcggcaacactttttccagatgccacgccttcctcagtgttctaccatggcttccattgactgttgaacaagaatgagactccttggtgtggcaattcaagggcttgggaatgtggtcctcaggtttcatcacttcacactggatcagaaatctctgatttagccagacctctttcctcatcaccctacgcccacgccttaaacattctcragcctgtgtgacccacattccttctgcacacacaggtcagcgcagtgctgctaatatgtgagcccacaataa

SEQ ID NO: 457551 - DNA, 601 bp, Homo sapiens
acagaagaagatgaatatctcacttcaagcagaaaaagaatgaattaacccttcctctaccattttgttctattcaggccctcaatagatggcctctgcattgttgagggtgacttttttacccagtctaccaattcaaatgctcttcttttccagaaacatccttatagacacacccataaataatgtattaccagctttctgggaaaatcttagtccagtcaagttcacacataaaattaaccatcacacaaacatataaagaatacctttgtaaagaatagaaggcattactaaacttaccactttgacacttagattgagaatatctgtatatgcctttctgtgtactcagaagtaactattatagtgatcttggcattttcattaccttctattgyttccttacagatgtctaaggaaataaattattgttttggcatatttttaaaatgatatgataatgaatgttatacattcattaaattgcatttttctgtattcatatgcaacttgccttttgcagtcaacattatgttaggaaataaaatcatgttgatatatatgtctattctggatgctgtggtacgctgttcagatt

SEQ ID NO: 457552 - DNA, 580 bp, Homo sapiens
ggaaacacttatataacattttgttaaatatgctttttctaaggagaaataatcagacatatcgattatggaataagaaaaacaaaaataaaaaagctttcaacaactcatgatcaggaaataggacatacagaatacacttcatttttctgactccagggaaagctcttactgtgacatcaacctctaaatattttgattgagctgtcagtgtagagtgttgtagtaaagttaacatttcagaaacagataatctagagtctttatgccaattttaccatggatgagctacgtgatcttagacaagtcaccttagctctctaattattaggttcttttactggaaaacagggaaacataccatttactttaaaatgcctggttaggattaatgacaatatataaaaataagttagcccaatgcctgrctcataaaaatgcattgataaatgagaaatatacctaaaatgaattatgtgaatataattattttaattatttctatgcatattataattcttgaaactcaagtacaagcaaatattctctcttcattttttttttttagatagagtctcgc

SEQ ID NO: 457553 - DNA, 521 bp, Homo sapiens
aaagattagttctttgaagggattaaagtaatttaaaaaaaactataaatcctgatcaagaaaaaattgggggaaaggggaagagagagagagagagacagagaaataggtaactagaacaactatatggtctataaagtctacgttttgccttttcaatttctgaataatgtacttagataaatgaaagttytgaaattcaataaagcctattaagaacatctgtctatcaaagtacaacattctctaggccaaatacttgtcaaatacttatatttgacaacagaatttgattcgtctatattcagaatagaaaaataattgtcaaatatcaacaacagaaaaaaataagtaaaacatagagaataaccaaatgactaataaccatatcaaaatttgctcaacgtcattactcatcatggaaatgcaaatattagcataatgtgataacaccacaaaccatcaggtaagtaaaataaagaacatagtgccaatgctaggagaaataatagcaactggaa

SEQ ID NO: 457554 - DNA, 521 bp, Homo sapiens
aaagattagttctttgaagggattaaagtaatttaaaaaaaactataaatcctgatcaagaaaaaattgggggaaaggggaagagagagagagagagacagagaaataggtaactagaacaactatatggtctataaagtctacgttttgccttttcaatttctgaataatgtacttagataaatgaaagttctgaaattcaataaagcctattaagaacatctgtctatcaaagtacaacattctctaggccaaatacttgtcaaatacttatatttgacaacagaatttgattcgtctatattcagaatagaaaaataattgtcaaatatcaacaacagaaaaaaataagtaaaacatagagaataaccaaatgactaataaccatatcaaaayttgctcaacgtcattactcatcatggaaatgcaaatattagcataatgtgataacaccacaaaccatcaggtaagtaaaataaagaacatagtgccaatgctaggagaaataatagcaactggaa

SEQ ID NO: 457555 - DNA, 530 bp, Homo sapiens
tactaattacttttatggagatggggttaaatttttttcagttaattaagggacacagtatcaattcactctctcaaccttggaagttcttgcaacctgtagaatcagatatctctatagmaaacagtccacaaatttcagagtcctatgagaagaaaggtttattttttctacgtcttacaagaaagtttcaatgtagatgttctggactgtatagctctcttgagtggctcttcttaaagtggtggctaagaaatcatggctaaccaagttatggcttcaccatgttcaacatgtaatttggaaattatcctgtcatcctcggctgactgatggggaaagagagaggaaatgggggaagcacaccctcttctcaacaccactatctggaagatgctttatgtggagtaaattagatgttaggtcatggaccattaagaaaacacagatttgtttgaaaaccagccaatctctgccacacaagctctctaaagttttagcatttttccacagcaaaattcatgtattat

SEQ ID NO: 457556 - DNA, 571 bp, Homo sapiens
gctgagttttttattattcgtttatttcatgcattaaatgaaggatttttgacactttttataggttggccactattctaagtgctgaataagacaaacaagtttcctgttctcaaaaggcttaattttcagtgacgaagagttagaacaaataagcaaacaagcaagataattacagaatatcaagagcgctatgaataaactaaaacaggaaaatgtgagagacaacgtctgggtgggggttatgattttacttatagatccttctgacaaacatttgaactatttctcaatataatgagaagaatccagcttgtgacaacctctgagaagagtcttccaaccagaggrgagaaaatcttcaaaggtctagaggtaagaatgaacttagaagattaaaagaatacaaagaaggcccatgcagctggagcaaggagactttagaagaaatagtagagagaccagagagggaaaaaagggctagggcagaagcaccctgagaccatgagccaggctcaggtctcattccctatgcaacggggactgactgaacaggtgtaagcatggaaac

SEQ ID NO: 457557 - DNA, 542 bp, Homo sapiens
catgtgcaggatgtgcaggtttgttacataggtgaacttgggcagtttactgcacctgggtactaagcccagcatccattagctatttttcctgatgcactccctcccatagacaggccccagtgtgtgttgtaccctccccccaacccacattgtgtccatgtgttctcatcattcagttcccatttataagtgaggacatgctcttctttctacatggagctctctgctgctgctcttcacgcagataaattcagcgtagccttcacatctcggctcaagtgtcactccytcacagaggctttcactgcatcttcagactagatctggcctccttactattgatgctcacagaaccatgtgctacttgcctgtagtgtttatcaagtgttttttattagcatcatttgatcaatagtcatctcttcccctgcactgtaaatgacatgatgctagaaatttctgtgattttattttgtctttagtgttctcccagaaccgcatgaaaatccagaaggagaataatcctgacagagacaaaa

SEQ ID NO: 457558 - DNA, 588 bp, Homo sapiens
actgtaactaatacagatgcctctccctctttttagatggccatcaacccacagttttgaagctaattctgaaactttaaaacaacttgatattgctgtggcctacgtatacactcacaagtaaaggagagttaaaaactctccaatgctgtttgtgaaaatatttcgagatcactttctgtttgctgctgtcttgcttgattcttaaactctttgttctttgttccatcatccrtttggaatcctgcctccagcctgggattgtccactccagtcagcctcttggatctcaacctctaactaaggggcactccagctcaggggaagaactatctctggagcctttctacaagaaatctctaattttgacccccatctctactctgtcttctcccaatatttgggaatatgttccttcatgactactctggttattttacctgactgttttgttccgttcgaattgagtaccatccctgctatccctctttaccttccaggctcacatccatcacaactcacttccatcttttatttactcccactaaggcaatcctctaagtcctcccaactttcctatcaggaatc

SEQ ID NO: 457559 - DNA, 581 bp, Homo sapiens
gtgtgtgccagttccttaaaatagatctccctctctatgtacacattctattaattctttttctctgaagaactgtaactaatacagatgcctctccctctttttagatggccatcaacccacagttttgaagctaattctgaaactttaaaacaacttgatattgctgtggcctacgtatacactcacaagtaaaggagagttaaaaactctccaatgctgtttgtgaaaatatttcgagatcactttctgtttgctgctgtcttgcttgattcttaaactctttgttctttgttccatcatccatttggaatcctgcctccagcctgggattgtccactcyagtcagcctcttggatctcaacctctaactaaggggcactccagctcaggggaagaactatctctggagcctttctacaagaaatctctaattttgacccccatctctactctgtcttctcccaatatttgggaatatgttccttcatgactactctggttattttacctgactgttttgttccgttcgaattgagtaccatccctgctatccctctttaccttccaggctcacatcc

SEQ ID NO: 457560 - DNA, 588 bp, Homo sapiens
actgtaactaatacagatgcctctccctctttttagatggccatcaacccacagttttgaagctaattctgaaactttaaaacaacttgatattgctgtggcctacgtatacactcacaagtaaaggagagttaaaaactctccaatgctgtttgtgaaaatatttcgagatcactttctgtttgctgctgtcttgcttgattcttaaactctttgttctttgttccatcatccatttggaatcctgcctccagcctgggattgtccactccagtcagcctcttggatctcaacctctaactaaggggcactccagctcaggggaagaactatctctggagcctttctacaagaaatctctaattttgacccccatctctactctgtcttctcccaatatttgggaatatgttccttcatgactactctggttattttacctgactgttttgttccgttygaattgagtaccatccctgctatccctctttaccttccaggctcacatccatcacaactcacttccatcttttatttactcccactaaggcaatcctctaagtcctcccaactttcctatcaggaatc

SEQ ID NO: 457561 - DNA, 539 bp, Homo sapiens
tgttgctgcaaaggacatggttttgtttctttttgttggctgtgtagtattccatgatgtatatgtaccacattttctttatctaatccactattgatgcacacctaggttggttctatgactctgctattstgaatactattgtgataaacatatgagtgcaggtgtctttttggtagaatgatttcttttcctttgggcaaatacccagtaatgggattcctgggtcaaataatagttctagttttagttatttaagaaatctccaaactactatccacggggattgaactcatttactttcccatcaatagtgtacaaatgttcctttttctctacatgttcactgttattttttactttttaatatatccattctgactggtgtgaggtggtatctcattgcagtttcaattttcatttctctgattattagtgccgttgggcattatttcatatgtttgttggctgcttgtatgtcttcttttgagaagtgtctgttcatgttctttgcccactttttaatggggttatttgat

SEQ ID NO: 457562 - DNA, 458 bp, Homo sapiens
tattgatgcacacctaggttggttctatgactctgctattctgaatactattgtgataaacatatgagtgcaggtgtctttttggtagaatgatttcttttcctttgggcaaatacccagtaatgggattcctgggtcaaataatagttctagttttagttatttaagaaatctccaaactactatccacrgggattgaactcatttactttcccatcaatagtgtacaaatgttcctttttctctacatgttcactgttattttttactttttaatatatccattctgactggtgtgaggtggtatctcattgcagtttcaattttcatttctctgattattagtgccgttgggcattatttcatatgtttgttggctgcttgtatgtcttcttttgagaagtgtctgttcatgttctttgcccactttttaatggggttatttgatttttcttgtt

SEQ ID NO: 457563 - DNA, 458 bp, Homo sapiens
tattgatgcacacctaggttggttctatgactctgctattctgaatactattgtgataaacatatgagtgcaggtgtctttttggtagaatgatttcttttcctttgggcaaatacccagtaatgggattcctgggtcaaataatagttctagttttagttatttaagaaatctccaaactactatccacggggattgaactcatttactttcccatcaatagtgtacaaatgttcctttttctctacatgttcactgttattttttactttttaatatatccattctgactggtgtgaggtggtatctcattgcagtttcaattttcatttctctgattattagtgccgttgggcattatttcatatgtttgttggctgctwgtatgtcttcttttgagaagtgtctgttcatgttctttgcccactttttaatggggttatttgatttttcttgtt

SEQ ID NO: 457564 - DNA, 458 bp, Homo sapiens
tattgatgcacacctaggttggttctatgactctgctattctgaatactattgtgataaacatatgagtgcaggtgtctttttggtagaatgatttcttttcctttgggcaaatacccagtaatgggattcctgggtcaaataatagttctagttttagttatttaagaaatctccaaactactatccacggggattgaactcatttactttcccatcaatagtgtacaaatgttcctttttctctacatgttcactgttattttttactttttaatatatccattctgactggtgtgaggtggtatctcattgcagtttcaattttcatttctctgattattagtgccgttgggcattatttcatatgtttgttggctgcttgtatgtcttcttttgagaagtgtctgttcatgttctttgcccactttttaawggggttatttgatttttcttgtt

SEQ ID NO: 457565 - DNA, 546 bp, Homo sapiens
actaatacaccaatatttatagccactttatttgtagtagcccaaactggaagtaaactaatatctatcaagaggtgaacaggtgaaatgttctgttatatctgtgcaacacagtgaacaatataaggaaatgagcaacatacagagaaatataaataaatgaattaattatacacagcaacattgatgaatctcaaaataatgatgctctgtagaaaaataagacaaaaaaagagtacatgttttataatcagatttctataaaattctggcaatgacaatcaataaaaytctaaagcttaccctatagcgcataatgaaagactgaatattgttttcataactttatgaacatagcaagaatgcactccactatcacttctattctgaaggtcccaggcattagaataaagcaagaaaaaggaataaaagcataataatttggaatggaaaaaataaatatttctctacctgcaggtaacttgagtgtttacatagataatactaatgaatatacaaaatctattgatttagcatttgtaatat

SEQ ID NO: 457566 - DNA, 578 bp, Homo sapiens
gaatggccaataaaagagatgcagagcagaaatacttctggcccttcctagtattcttgaatgtagttaataatgtmcctgatcatgctgattcactggcaaggtttggagattcacattttaaaataccatatatatctagttgttgaactgattgcagcttctagtgcctgagagactttctgctcttctcttgcatcaagaggataggtaaaatgagaatttatctcatgcctttcttatgaaagcccatttgaagtaaaagttgtacatcaactctcagatcaaaatggctacttctgcttctgagtaatttaaataacctgtcaaaattgagatttcccaagtccattttgtgttcagaatttgcaggtaagctcctcaatatcctggcctcttatctcagtaaaaatatgcccagaatttctagtactttctttcttcattaaccccacaactttaattacaaccaattacctagcattcccttcctactcgcagtcatggctctgtatggtgtggcaaaacgctgttcaaaatatatagttctattaagcacctgacatgtgccaagaatt

SEQ ID NO: 457567 - DNA, 440 bp, Homo sapiens
acagtaaggagttcaaggacaatctgaacaacatattgaggcccccatctttaaaaaaagrttaaaaaatcaaaacttttctaatgtgtcagaaccctaaatagttgtacagtttatctcctaccatttggtgtacacatgtgttatcagtgctcccaaagcacttcatacttcttgttcaataggtttaaggttattaatacagttgatcatcatgaaagtctttgggatatccagatgatctgggacctttcaggctctactgttacaaagtaaggggatagcacaaccctgaggcaagagagtgaatgtttactgttgttcattccaggcaaatgtgaaactcttgtaattcccctgtaatgatgattgttggaaacaacatatgaagcatttcaagagccaaattttatgaaccagagaccaggctgatcagtact

SEQ ID NO: 457568 - DNA, 599 bp, Homo sapiens
atcatcatgaaagtctttgggatatccagatgatctgggacctttcaggctctactgttacaaagtaaggggatagcacaaccctgaggcaagagagtgaatgtttactgttgttcattccaggcaaatgtgaaactcttgtaattcccctgtaatgatgattgttggaaacaacatatgaagcatttcaagagccaaattttatgaaccagagaccaggctgatcagtactaatctatctatctatctatctatctatctatctatctatctatctatctggcatagagctgcatttgaagctgctcattagttcagtttacagtagtctaataatgtcaattgctactcatctggatttttgaggagtcatacyggtgaattaaagagagaaataatggggaccaccattcctgtgttatccaggtcctttaagatcgtactaatctctgcctttctaattcagttgcctttgatttaatatggccaagacatattttcagaggctttcacctttcctacaacaatagctcttccttcaacatgtcaaagaactaatgtgagttttgtgccaagttttaattatgtccattaaaatt

SEQ ID NO: 457569 - DNA, 595 bp, Homo sapiens
tgattcaaataaacaaaagtatcttacttttgattatttgtttgctttgcatttcctgtaagataygtttatttttctacagggagatagtggttgtttttcttctttagactatggcaatactatttaacatttaaagtttgtcttttagggtgctttcctatgtggcctagggttcagtttttagtaaaggctttgctgaagtttgaatggggacagggatgccaggtgggtcggttctcaggccccagtggtggtagtggtgggctgagtgtgcctgttttaagccctagggtcgtatgcactggtgccagtgttagtgtgtcccagtaggcttattctcgggcttccaggtagattgctggaatgctagtagttgcagcagtgggccaggtaggtcagtgccttcttgggcctctaggcagtggatgtggcattggcaatggcaatagtagtggtaagacaaacctttcactcccaagcagttcatgtagttgttgttcgtggctgtgacaggctgggtgaggcagtccctaggtccacaggtggtatgtgtaggtgcatgtaagctgctgtggtagtggcaggttgggtg

SEQ ID NO: 457570 - DNA, 595 bp, Homo sapiens
tgattcaaataaacaaaagtatcttacttttgattatttgtttgctttgcatttcctgtaagatatgtttatttttctacagggagatagtggttgtttttcttctttagactatggcaatactatttaacatttaaagtttgtcttttagggtgctttcctatgtggcctagggttcagtttttagtaaaggctttgctgaagtttgaatggggacagggatgccaggtgggtcggttctcaggccccagtggtggtagtggtgggctgagtgtgcctgttttaagccctagggtcgtatgcactggtgccagtgttagtgtgtcccagtaggcttattctcgggcttccaggtagattgctggaatgctagtagttgcagcagtgggccaggtaggtcagtgccttcttgggcctstaggcagtggatgtggcattggcaatggcaatagtagtggtaagacaaacctttcactcccaagcagttcatgtagttgttgttcgtggctgtgacaggctgggtgaggcagtccctaggtccacaggtggtatgtgtaggtgcatgtaagctgctgtggtagtggcaggttgggtg

SEQ ID NO: 457571 - DNA, 560 bp, Homo sapiens
catatctgttttaataatgaaaactttatatattctggatacaagccatttgtcaaatgtatcatttgcaaatactttatcccagagtggcttgtatgttctttttcttaactgtgtcttttgaaatactatttatcaattyttttctttttatggattttactattgttgctatatctagaaaatgtgcctgatataaagcactgttcctatgttttcacctagcaattttatagttttaggttttttacactgaagtctataatctatttggagttcattttcgtatggtataaggatcttttactgttttctaaatgtggatatccagtttttccagaagcatttattgacctgattattctttcttctctaattgtccttgtatatttatcaaaaatcaattgaccatatgagtaaaatcaacttctaaactctatactttgttactactttgttttatttatctatctgtcaaactttaggctaattgtacattatcttgatgatttagctttatttacaaagtcttgatataaggtaatgtgaagtcaccaaat

SEQ ID NO: 457572 - DNA, 560 bp, Homo sapiens
agctttgctaaggaagagaagcctggtattttttttttttttttacaaataatgatgtataagtatctgttggggtcaggtygagacagttacttcttatgcttcatgattccccaaggagattttatttatttgatccctgatccatacaaatgtgcatggaaacacacacagaatccaaattttggatttctgggtgaatacttttatttcatgttgccaattctctcgttctctgccccctctaaaaaaggaatcactaacctgataagagatattggggacaatctgacatcaactggattatctcaaacaggaaggcgttggcacttcactgaaatacagggagtggggcccatctatttggctctatttctttcttcctctctccttcactcactcatgactataaaatacattttctaccctagaaatggcatgggctttctagtaaagttgttagctcctttatgactggaggaattacaaaaataaccaggctactgcttgccaagtatactggagagaagtgttaaactttgaatattgaactagataac

SEQ ID NO: 457573 - DNA, 655 bp, Homo sapiens
gtcaattattaatattagtgaacgccaatattgttccaaaagccatactaaaggtaatgtttgagttgggccttaaaaggtaaataggaagggtatggagagggtagagaaagtgggattaatttccctatgtatttaattggrtgtcaatgtaaatttaaaaaatcatattcaatttttccttagctgtagatgtaactacttgctgataattcccatatgtttgtcctcatcccgaactcctctctctgactctgggaaagtagttctctccagatatgctaataatatctcaaatttaacacattcttacatatattgtgagcattgtcttttcataaaaaaatgagcactatgttagctcctgtctcaactaaggtcattactatctattaggagaagatttctgccctggtcctgagtgtctttgctgggtatgcaagagtacccaaaggcctaactgttctttaaaccagagtcatttctactgctagtcatatagatgtttaagcaggccaagatgactgcaacatgatgcagtatgaccacctactccccaaagactggggactgtcctatttagtgcttgctataaaatatactgggcccttagccctgggttcttcagctgcaatgcaacccaccgagtgtgtag

SEQ ID NO: 457574 - DNA, 655 bp, Homo sapiens
gtcaattattaatattagtgaacgccaatattgttccaaaagccatactaaaggtaatgtttgagttgggccttaaaaggtaaataggaagggtatggagagggtagagaaagtgggattaatttccctatgtatttaattgggtgtcaatgtaaatttaaaaaatcatattcaatttttccttagctgtagatgtaactacttgctgataattcccrtatgtttgtcctcatcccgaactcctctctctgactctgggaaagtagttctctccagatatgctaataatatctcaaatttaacacattcttacatatattgtgagcattgtcttttcataaaaaaatgagcactatgttagctcctgtctcaactaaggtcattactatctattaggagaagatttctgccctggtcctgagtgtctttgctgggtatgcaagagtacccaaaggcctaactgttctttaaaccagagtcatttctactgctagtcatatagatgtttaagcaggccaagatgactgcaacatgatgcagtatgaccacctactccccaaagactggggactgtcctatttagtgcttgctataaaatatactgggcccttagccctgggttcttcagctgcaatgcaacccaccgagtgtgtag

SEQ ID NO: 457575 - DNA, 508 bp, Homo sapiens
tgaacataatgcaaaaatcttaacaaaatgctagcaaattgattcaacaacacatttaaaaagtctttcaccataatcaagtgagaatcattccaaggacacaaagatggttcacatatgcaaatcgattgaatgtggtacatcacattwacagaaccaagacaaaacccatacgatcatttcaatagatgctgaaacagcattcagtaaaatccaacatcagtccatgataaaaagacttagcaaactggctatagaaggaacatacctcaaaataattaagaccatatataacaagaaacatggtactgaatggggaaaaactgaaaccctttttttttttcccagttcttagaatctggaatattaaaaggattcccactttcaccactattatttaacataaaagttgaattcctgaccaggaccattaggcaagagaaagaaataaacaacatctaaactggaaaggaataaatcaaattaaccttgttcacagatgtcgtga

SEQ ID NO: 457576 - DNA, 572 bp, Homo sapiens
aggtaaatgtggtccttcctcttacagtatgagccttcatgatgacaccaaatctatccagagacaaatgttcaagtggccgaggagcaacattcctagatctttctacctcctatagtcaaaaatcagaatagcaaaatgcatctcagtatttccctctactgtataaggaggagctaaatctgccatctgctcttcttttgttctgagctagatcatattcttatttcttttgattattgctcctatttatgctytgcaacacagatgaacttatagatgagaaagaagggctattattcccctagaaaggggaaaagcaaaatccatttagaaatatttcttaaatagtggtctgtggttgatgaattatgcatgcagtaagcagcgacactccagctctcataaccagaggggaaagctgcagtcctcactttccggctcaactgaacaggggccctggctgccagggaatgacaagtcatctcatttaaaaatcgtactctttcctgaaaaaccaaatggaagtttaaatcaggtaaaacgtggcaccctaggagctatctccagta

SEQ ID NO: 457577 - DNA, 572 bp, Homo sapiens
aggtaaatgtggtccttcctcttacagtatgagccttcatgatgacaccaaatctatccagagacaaatgttcaagtggccgaggagcaacattcctagatctttctacctcctatagtcaaaaatcagaatagcaaaatgcatctcagtatttccctctactgtataaggaggagctaaatctgccatctgctcttcttttgttctgagctagatcatattcttatttcttttgattattgctcctatttatgctctgcaacacagatgaacttatagatgagaaagaagggctattattcccctagaaaggggaaaagcaaaatccatttagaaatatttcttaaatagtggtytgtggttgatgaattatgcatgcagtaagcagcgacactccagctctcataaccagaggggaaagctgcagtcctcactttccggctcaactgaacaggggccctggctgccagggaatgacaagtcatctcatttaaaaatcgtactctttcctgaaaaaccaaatggaagtttaaatcaggtaaaacgtggcaccctaggagctatctccagta

SEQ ID NO: 457578 - DNA, 610 bp, Homo sapiens
ttttctaacctacttcatctttaaaacattaagttccttaaagtccaacattggcataatttggctcatttgacataaaaattgtacaggaagcattgtcaaatataaatggtgtttagttttctttgggctgtatttgtataaatacattattggtatatgttccaaagctatgggaaactcctgtaattctgatataacttagtgtacattatcattaagaatcataattgttatgttaaaattattgtgtgccacagaggtaacaaatttatttgtcaattgtgtcttttgactatggctgccttaaaactttttttcatccatggccaattgttctcttgttttggtcctctttagaagatggttttataattagctataaaactccaacaggtgctcttaaatgcaggtttctgataactttggagattgtgacatcagaataggggaaaaactttcaggactcatggagatctaaaacaatcatgrctatcaagcataacaggaattaactgcatagactgcaccaatcttttttactttttgcttaaaatgtttactgatcctttgttttgtttttcagagtcttaagatttttcttttgatc

SEQ ID NO: 457579 - DNA, 521 bp, Homo sapiens
tttccaatcttgcacaggtccctgtagagagtgtgaatccttctgggggttctcactgacttatcctttcccatgttggagaggttctcctgactccatgcggagcccaggcaggctggtgcccagctttgctcctctctgctctctgtgttcccctgctgccttgatggatcctgacatagtttcttagatgatcagcctgcagggtgagtgttcactagcccttttgttcctctccatgagaaccagcatatgtgagccacttttagtctgccatcttggccctgtccccatgctgttttctataatggctgtactaattaacattcccaccaacagtgtacaagaattcacttttctccacatcatcaccaacatttatttatcatcttattgataatagccattctgacaggtgtgagatgataattcattttggtcttaatttgcatttcccttatgatyagtgatgttgagctttttaaaatatgtctgttggcaatttgtatgcctacttttga

SEQ ID NO: 457580 - DNA, 535 bp, Homo sapiens
agcccaggcaggctggtgcccagctttgctcctctctgctctctgtgttcccctgctgccttgatggatcctgacatagtttcttagatgatcagcctgcagggtgagtgttcactagcccttttgttcctctccatgagaaccagcatatgtgagccacttttagtctgccatcttggccctgtccccatgctgttttctataatggctgtactaattaacattcccaccaacagtgtacaagaattcacttttctccacatcatcaccaacatttatttatcatcttattgataatagccattctgacaggtgtgagatgataattcattttggtcttaatttgcatttcccttatgatcagtgatgttgagctttttaaaatatgtctgttggcaatttgtatgcctacttttgagaaatgttcatctaggtcccttgtccatttttgaattggattkttttcttgctattgagttgtttgagtttattatatgttttgaatattaaccccttatcaaatttatggcttgcc

SEQ ID NO: 457581 - DNA, 554 bp, Homo sapiens
acccaactctgctgttgtagcgcaaaaccagccccagagaatccataaatgaatgggcatggctgggatccagtaacacttaacttctgggacactaaaatttgaatttcatatacatttatgtgtcatgaaatattattcctttttttttttttttttttgagaccgastcttgctctgtcgcccagagtgcagtggcgcaatctcggctcactacaagctcggcctccgaggttcacgccattctcctgcctcagcctcctgagtagctgagactacaggcacccgccaccacaccaggctaatcttttgtatttttagtagagacagggtttcactgcgttagccaggtgatctcctgacctcgtgatctgcctgcttatttcttttgatttttttcatccatttaaaattgtgaaaacaattcttagcttgcaagctgtataaaaacaggcagtgagtctgctccacaataaactctgaaaaatattattagcattgccattaataatagtaactgaagatagaggttatatatttgatagttgtgttac

SEQ ID NO: 457582 - DNA, 669 bp, Homo sapiens
gatcttagtgtcagatccgtattcattctctttgagtagaagtacctcaagctccagatctgatgccttaactgcactctcttctgagaagttctcactgataatgttcatacaattctgccagttgttttcactttccaakcagagtggagtctattctgaagtcagagctcctatgaggttctctttgtccatccataccaccatatttgctccaattaaatgtccactcatcatcccacattattcaccactgctaatgttctgaatgctgttgtcaaggaaaattaaaatagtttctaccctttgtacttccataacattttatgtgcatggaaacgaagaatgaagattagggaaaagaacctgctgttctctaaaatcatagtttttatttcttgaaataaaggcttcaatgctagtcaaaatcctcattaaatattgacttcttggtctcctttcataccatctgcaattcagtaattttcaaaaatatttgttgtcatctcagaaggaaaagctaacaagaaatacatgacagaaatacacccagtaaagttagagtcaaaattacttcatttcctataactgatttacagaccacatcaatgtaaaaagaaataaagaaaggctaatttatttagaaagaaaaacaggaaactgtaaata

SEQ ID NO: 457583 - DNA, 453 bp, Homo sapiens
aaatataaaatgcatttctgctaaggaaacacgaaatcaattaaaggcaaagaagcacgaagacatctgtcagagcaagactgctcagatttctagagttttcttcaggctaggatctaaattatgctttacctatgaacaggtgaaagctgagttgttctccgggaatacagaaaagttctcaaaggattagtccacactcatttgttgtccttgaattaagctgaaagatataaaaaggcttacttcttgctcactgctatatccatagtacctgccacacagtaactgctcaataagtatctattaattgtttaaatgaacgaatatttacaatgactgaaaataggaaactattattatgttttttcttatactggcacttctgtaaaaatatcasctaaaggaatgactataatttcaaaaaattcaaatttattttggctaaagatt

SEQ ID NO: 457584 - DNA, 577 bp, Homo sapiens
ggggctttgtgaaatgggaataattaggctttcttcaaagacaatcaagggtgcttgtacctcctgccaccccttacatttctttaatgatgtgcatcctggaatcccagatttagcagaggttttggaggtctagcccatctgatcacccaaacctcagtgggaggtttacttatgtagatttctaaagtttcccccctcacacattgtctcaaaatcaacgatgttgagaacacctcacaaacagagtctgcaatcttacacatgaggctctagacaaggttccatggttaccataaacatataaaacagaaacccattcgatgagtaaaaagaatcagaggcctcaaactcaacacgggtagaagaaatttcacaactgtgctaacagcaactttttactacagtaaagggaaaaaaattctgataagtaattcttgctggcacagttaggagaaacatgaatcagatactcctgatgagatgtacaaagtgctccatcatcccatcatgctgggaaacaaaaggctccaatattgaaaayatcatcagctggatcccatggatacaagttaag

SEQ ID NO: 457585 - DNA, 543 bp, Homo sapiens
  misc_feature (1)...(543): n = A,T,C or G
gagcttataaaaaaattggtatcatgagaaaaaaatgttcagttggacacaaacagagacattttaagtggtcactacatatattttgaaaatgtatcccagtactaaycaaaaaagtataaaataaaacaagatactattttctatcaagtgagacaagttttttattccttgttaaaatcatactactttggattggcaaaggtactcttagacagacttgccattttgcatacaaaacagatccaagtgacgaacaaaaataaaaatcagaaacggattaaaagacgtatgcagcaggctgttcataaaaccttatttaagcacatgaaactagaaacacgtggagactggttaactataaccatggntcagccattgaaaatgtcttcaaagatttcttaaaggcatgagaatgttttcatggtatggcaagtgaaaaatcaagatttaaaaaaacttcatgttcagtactctaatttaattacaaaatttattttcatctatataagaaagccctagaagtatataaaccaaaatagg

SEQ ID NO: 457586 - DNA, 593 bp, Homo sapiens
ccctttaacttaatttctagaactataaagactgaaaagctaaaaaatatgatatcccactccctagcagccaaggtactgcaagcaatctatttttttactagactgacccacctatacttgatttgcagatagcaatgagaaacataggtggtggctgtaccaagaaagagtgtatctactggcaaaaatgatgtcagaggtgcccatctgaagtgatagtgaagcttctgacttggtgtcacaagtattggggtggggagcacagttgtgttttacatttggatacagtagtgtcttttgatttttctcttggctgctctattcctggttggataatcagacccaatacttagatactccaagatacctgtgaactacgtaattttttttwaaaaaaacttgttcttcataagccagctagaggggattctgttgtctgcagttattttcacaaacaatagaagatttgatcaattatagtaatgcatcaattaatgacagggatatattttgagaaatgtgctagatgatttcatcattgtgaaaacatcttgagggtgaacttatacaaaccgaggtggtatagcctt

SEQ ID NO: 457587 - DNA, 600 bp, Homo sapiens
acctaattatgtaagtcagtgccttacctgtctgtatcatgagcacccacctgatagataaggaactgaactaagcctaagaggcccaacacaggctgctggaaatcatctccagcagtaggagctgccagtgatgtcgagagcaaaagctcttcagagctggtaaagagaaatggcacctcagatatatttgatgctgtcacatttaacaagtgaggtaaatatactgattcctcatctttcaaaattctccagcatagagggacagactaacaatttcccactagtggagacggaaaatcaggcatgtgacacagcattggggtcagccaggcagaggcaaagggccctcagatgcccargggaagaggtgatccggaacagggcttggatggaggccaatcagtgagctttacaaacattcagtttcaaacatccaacttccagggtggctctagcacttgtagaaaataaaaagaacatataaaaacctaaaactatatccttagtaagtttttccgagttaagtaagaaaagtaaaactgattaataagcggcccctgcatttttggtctgacatgaacaattagggtagtataa

SEQ ID NO: 457588 - DNA, 569 bp, Homo sapiens
ctcagtaaatcccagaatgccacctggtccggcttgtcacatatctccccatttttaaatctaaggaaatctaagtagaactgttttgagagaacaaataagtataagaaaacagaaaacactgatttgctcttcaccttcaggtccctgtgcctccacattaatgcaagtggacagttttgcccagggtcacagagctaattagaggcaaggcagcaatttgaatcctacacatccaatcatcttttgactacaactcygtaaagtacattaacaccctctattcttttgtcttgtgttgccattttctagtgtgcttgtaattatgcactcagtaaaactgagtgcacaaaatgacaacctcagttccttagtataaattttattctcattttcttaaaagatttctagttcaaatttgtccaatcctgttttcagatattttctcttagatttatgttccacctatgcctacttaagaaaaaatttttctgatgtcgagtgtccaccttcctgacaaagaagtttcgttgttagcttacaaggaaatttgcatgccagggaaagta

SEQ ID NO: 457589 - DNA, 596 bp, Homo sapiens
taagtgaatagtaaagtaattcattcagttgtacatgtctgtgattttattttagtttagacatatttaagaatgtattatttgactatatgttaaataatatgaaaaaaatttatttccatttcttagaaatgacttagactattttaaaggcccttatttatcaacattgatgtctcaacacctgctttcttctgtgccttaactgtaatttaaggaattataattccaacactgcacattttcaaattaaatgttttaatcatgtttactgttaatgttcaatactcatttaaattgtaaacgttatttcagatggtttctctatatctatcatcttaattttataatggaaatcatctattttactttaatctgtggctatgtgtgccaagaatgtttgaagtaagtcaatagccagagccattgycattcacatccatcttttgagtcactctactgaagagtgatgccccttgaaggcacagatttatatatgccaaggatcttccatggcagctggtacagagtactcaataaatgatgctcaataagtgcttatcaaacaaaatcagcaaaatcaaaatcactagtcc

SEQ ID NO: 457590 - DNA, 583 bp, Homo sapiens
tcactgacacaggtgaacaagtaacatattcaaactgtgtccaacctgaaggcgataattacatgatgaaaatgatcrtagtaaacagtcagttccaggaatggtgttaaaggatggaggctttttttctgagccgtggactgctggaaagggtcacaagggcgtctcacataaatcacaccttggcagaaggtttaccaacctaacaaagaggctttaaattcaaatttttggaaagaggggaaataactactcgaaaaaaataataaagtgcttgtcaaattggatatgatggaagacagcaggtgtgccaagagaggaataaacaataacttgtaatggttatcatttgtattattattcctaataatttcaagaagaaaatactggagaagcatgttaagactaatgaactaacattgtcagcatcagaagcacaacgtattacagctctactatcaactctgaactggcatttcttcttactaacttccaggttttggatgcttggtgaagttaaggaacatcccagagtataagactttgaaaaaccactcaatctttccatgcctcaggacacata

SEQ ID NO: 457591 - DNA, 583 bp, Homo sapiens
tcactgacacaggtgaacaagtaacatattcaaactgtgtccaacctgaaggcgataattacatgatgaaaatgatcatagtaaacagtcagttccaggaatggtgttaaaggatggaggctttttttctgagccgtggactgctggaaagggtcacaagggcgtctcacataaatcacaccttggcagaaggtttaccaacctaacaaagaggctttaaattcaaatttttggaaagaggggaaataactactcgaaaaaaataataaagtgcttgtcaaattggatatgatggaagacagcaggtgtgccaagagaggaataaacaataacttgtaatggttatcatttgtwttattattcctaataatttcaagaagaaaatactggagaagcatgttaagactaatgaactaacattgtcagcatcagaagcacaacgtattacagctctactatcaactctgaactggcatttcttcttactaacttccaggttttggatgcttggtgaagttaaggaacatcccagagtataagactttgaaaaaccactcaatctttccatgcctcaggacacata

SEQ ID NO: 457592 - DNA, 589 bp, Homo sapiens
tttctcaagaggtacaagagctttcattttgctttaagaaacactttctttaatatggaatctataaatcagaaaaatatgtttaaattcttaaacccaaatgtaaacagcatagccaacatggggacaccaagtcttaaaataacgaagaaggagataaaccatgaccagggatcaaatttgacatgcagccttcaggtaacagtgagcatcatataaatataaatgcaagttgccattttgtattttgaagagaagttttcagatgtgtgaaataatctaaaaaaccacatctttgggccaggcatggtagctcatacctgtaatcctaacattttgagaggcccaggtgggtggatcacttgagtccaggagtttgaggctagccttggcaacatggcaaaactccatctctacaaaaaatactaaaattatatgggtgtggcggcatgtgcttgtagtcccagctactcgtgtggctgaggtgkgaggttcacctgagcctgggaggtggaggctgcagggagctgtgattatgccactgtactacagcctgggtgacagagtaagaccctgtcacacacacaca

SEQ ID NO: 457593 - DNA, 577 bp, Homo sapiens
ttgatttacaaggagcggttaaaaagttgaatcctatcctagatgcccaacagcaactgctcagtatagtttaaatttcggagatcacccttcagcggctcattccctttgcagctctttttctgtagttcatgaatttccctccacaatgccttactctgtcggagcaaacccatgatcaacagccaactttccaaatgatttccacttttgttatttccattgaatggaaatcagtggtccactgattccactttaatttgaaacaaaacataggtcrggacaagcagaagcacatccaccaaagcagtgagcactgagctctacgttctcacgcagggtcctagaaagtgcactagcagtttagaacctgaatgaagaatattcataaagtcatggagcccaccacacccaagcgtatttttcactttgttatcacaagagccctctctgtctgctacaatggctgcctgactgctgctcagcctctggcactcaccagtgggaagagagagagctgggcaatcagagcacaaaagcagctttctctatcctgctttccatgaagctgaaagag

SEQ ID NO: 457594 - DNA, 639 bp, Homo sapiens
tgccagcacattaagaagaaagactatacatatgctttagaaataaacttcatctggtttgtcagaaggactttgggctgtattgtcatgtataatcacggattttaagagtttgcagggatttagaaaccatgtatttcagcaaacttgtcaaaatttgcatagctgttgcacagatatattctcaaacatttattgaccagtgtgcctctgaaaatctggtgaaatgatgtttgattccattggtggagggtcctgaacatattttaaagatrgcaaagatgatctctaagctctccatgcttatgtgttctccgctagcccaaaatgcttccaactctctagtgatacaatttgctcccctgtaaaaccccaacttcatggtcataaagtggctgctggtaacacaggaagatgcttagggatgctttcagctgcaagttaaacaaatcccaactaaacctggctcaaagaggatattaattatcccacataatgaaagtccagtgacagggcaagctacaagcatgtagcactgcaatcagacctgtcctaatgtccaatgtcccatgttctaaagatgccttcaagtaatgctcccatccttctctgtgattgatttcagctcttaaagggaaa

SEQ ID NO: 457595 - DNA, 639 bp, Homo sapiens
tgccagcacattaagaagaaagactatacatatgctttagaaataaacttcatctggtttgtcagaaggactttgggctgtattgtcatgtataatcacggattttaagagtttgcagggatttagaaaccatgtatttcagcaaacttgtcaaaatttgcatagctgttgcacagatatattctcaaacatttattgaccagtgtgcctctgaaaatctggtgaaatgatgtttgattccattggtggagggtcctgaacatattttaaagatagcaaagatgatctctaagctctccatgcttatgtgttctccgctagcccaaaatgcttccaactctctagtgatacaatttgctcccctgtaaaaccccaacttcatggtcataaagtggctgctggtaacacaggaagatgcttagggatgctttcagctgcaagttaaacaaatcccaactaaacctggctcaaagaggataytaattatcccacataatgaaagtccagtgacagggcaagctacaagcatgtagcactgcaatcagacctgtcctaatgtccaatgtcccatgttctaaagatgccttcaagtaatgctcccatccttctctgtgattgatttcagctcttaaagggaaa

SEQ ID NO: 457596 - DNA, 594 bp, Homo sapiens
ccgcaaataaactaacgcacgcattaattccccaccagggattcttgaatggttcgggatttgatataactaaattaaactatactcccaaaataaggatatttctcaagattctatttctgtacatagtttgtactcccaccagagctttgagccccagacagttccgtgtgaattcgttgggaatctctgctacccaacacaatgccacacagaaacctgtatgaacagagcgactggaacagttacccctacagatgcatcgaaaggcacccacgcatccaaacaaaaaagaacacaaaacccattccctatacaattttttaaggtgtcagctcgtcaaccatttcaagttacttaagtagaaaaagtccctttcacatcacagttgagtcagaggtgccagaggtacccccattttcacgtcaacccaggtcctcatcctaaaacgtcaacgtcctgaatccactacgcagattccagcactgsaggcgccggcgatcggcacccgccccctccggcatgggcgcttcggaataactgggcgccgccggctcacaccctgcccgcaatgttttgcactttgctgggtct

SEQ ID NO: 457597 - DNA, 567 bp, Homo sapiens
gcaggctggagatcagggaagagatgatgttgcagttcaggtccaaagaccaactgctggcagaactcccttttgctcttttgtctgttcaggctaccaactaactgaaggaggctcacccacattgtggagagcaatcttctctactcaaagtccacccatttaaatgttagtatcatctaaaaacaccctcacagaaacatccaaaataacatttaccacatacctgggcactgtagcctacccaggttgacacaaaaaattaactgtctcactgaccctctacttgcttactctaaggcttcgcccctttagttattcccagtctctcctatatatctaacattaatatctctcatctcagaaaataagacttcctaggttcctgattgcattttccacacattcytctaaatgccatccagtctgttagcttgtctatagtcactttttcacctctctttttttaacatgttccactactgctctggtctccattgtgaaagggaaataaatctcaggacgccagaatcactaagccaaagggaaaagtcaagcagggaactg

SEQ ID NO: 457598 - DNA, 582 bp, Homo sapiens
gcaaaacaaaacaaaaccaatacctctctcaattccgtgttccatctaaatgcttgatcaaggagtgttttatwttctgtctatattttctctctcactctctctctctctctgtgtgtgtgtgtgtgtgtgtgtgtgtgtgtgtgtgtgtgtgtgtgttttgagacagggtctcactctgtcaccaaggctagagtgcagcgacatgatcacagctcactgcagccttgacctgcgggctcaagtgatcctcccaactcagcctcccaagtagctgggactataggcacacatctccacacctggctaatttttaaatattttttatggagatgaggttcccttgtgttgcctaggctggtctcaaacttttgggttcaagaaatcctcctgccttggcctgccaaagtcttcggatacaggtatgagtcacagcaccaagcctatatttccattttgctctattcactctgtaatctgctgaaggacagcttttgccccaatacatcactgaaatggatttcattaaggtcaccaaaaactttcatatctcttgcattttccaaagccaattatattaga

SEQ ID NO: 457599 - DNA, 608 bp, Homo sapiens
aaagtataaatgattatacatgttcatagtaatgtaaataaatgattgaatagataaatgaataggaaagaagagttttttttttttacagaagactttaaataatatatgtatgtagatactcccccctccagaggtggagcttaataccaccacctccgtctaggtgaagtggatggagtgatttgcatccaaagaagaaagatggaaaggaaaacacagtaaatttacagtggcaagcaagaccttaattagccaagtgatgaatattagcatcaccagtgagaaatcatttgataccacacccccctgatatgatggaatgagaaatggcactccacttctgtgatattcttcctagaaatttacaacttcaacctagttatgagtaaaacatctgacaaaccaaaagtggggaattctataaaataagtgaccaatgctctttcaaattttcaaggtcatraaagataagaaaataatgagaaattgtcagaggcctgaggagactaaagaagcatgcattatggtatactatcagaggtgaataccttactgccccatagaagtgcctccacaactcaagactcatgacatttttacagaaa

SEQ ID NO: 457600 - DNA, 562 bp, Homo sapiens
tcaagtcatctatataagtcaatctcagctaagaattgcctttttagatttggtttttattttggaggaggaactaaaatgctgcaagagttaaaaaaaaaaaaagaaaagaaaaaattgaacacgaatggaaataaagccccttatgaccataactaatccataactaattcctttcatacaaatatgtttttcaaatgtccataaaaactattctgtttacattctcttttcttatgcttattttgtccatatttttgagattttgtcactttttttccatagcattcctctcccatctcgacaagttattaataattatcaggaatttgaatacatgaaagattaaccatttctactgctgtgaccagactaaacatttcttaaaagaaccataaatttcctctcattctttgttattcttttcgtcacattaactggagagctggttcttttgtcatacttgaaaacccacacttttttctctttacaggaaaagctttcatatgtrttcttgaatttgctttcctaattgtttccttctttcgttttgagtcttttc

SEQ ID NO: 457601 - DNA, 468 bp, Homo sapiens
aatccatggaattcagtctgagtggagtrgtgtcctacaggaggtagcagttgcctggcagacaagtcccagcacccggcagcttggacttctttccaagtacatttaaaggcgtctcttggagactcttaaaaatattttgtgggggatgaaatacaccagaatagaaaggtcctgcgtttgaggaggagttaagaatcagaacaatttgcattgttcctatgcatatgattttttttttcaatatttattcatctgttaagacctgtgtgaactcagttcacattattattttcatttttaagtaaaaaagttgaggcacaatcagggcaaattattttcttgagggccagttgtgggaaggtggtaaaacaggaataaaactcagaatctccaacacaaaatcctgtgttaggcaacatttgatcctgagcaatgttcactggctggagtttcaaatctcccagt

SEQ ID NO: 457602 - DNA, 605 bp, Homo sapiens
actgttaccagctcttcaaaatgtgctgacaactgctttcattattcattcattcattccctcactcacatgtttcatttaaaataaatatttatttagtacctactttccatacagcacagtattaattattgtgagcagattaagaagaaaatatcagaagttgatagtataaactctcttaagtagggcagtrtcacttgtgtgtatgttttctcagtatgacgttcataacccttttgccattttgtaaacatattctgtatttacttttcttgtctttatctgttatgctcttctcgtcacccaaaaggcccaccatattatgtttattttgaatactcaattcaaattcttttgtttgaagccttttttcttccttacttcctccttctcatcccaacaagttgtgatttctcttcatgggtgggagttataataaagggcccctaagttgcaggattatggctacaattttaggtaaaattaattgagatgttggagtaatccagtcaatgcatggtctcaactggctgctcaatagaaactgatttctctcatttaattttgatttattttgtttttgccttactttagatattcat

SEQ ID NO: 457603 - DNA, 549 bp, Homo sapiens
attagaacattcttaatatgattatattcttaactttacaatgagttttattttatttatttatgtccaaattttattttaggtttagtgggtacatgtgcatttttgttacatgaataatttacatktcgtggggattttgtgcacagatacttttctttgcaaacttaccagaatctgttgctttttgactttttaataatagccattctgactggtatgagaaactatctcattgtggttttgatttgcatttctttaattattactgatgttgagcattttttatatgtcttgttggctgtgcttatgtcttcttttgagaagtgtgtgtttgtgttcatgtcctttgcccactttttattggggttgtttgttgatttgtttaagttacttatagattctagatattagacccttctcagatgcacagtttgcaaatattttctctcattctttatgttgtctgtttactctgttaatagtttttttttttttaatttacttggccctgctcaagcaggacttcaaaacatttcttactaactc

SEQ ID NO: 457604 - DNA, 549 bp, Homo sapiens
attagaacattcttaatatgattatattcttaactttacaatgagttttattttatttatttatgtccaaattttattttaggtttagtgggtacatgtgcatttttgttacatgaataatttacatttcrtggggattttgtgcacagatacttttctttgcaaacttaccagaatctgttgctttttgactttttaataatagccattctgactggtatgagaaactatctcattgtggttttgatttgcatttctttaattattactgatgttgagcattttttatatgtcttgttggctgtgcttatgtcttcttttgagaagtgtgtgtttgtgttcatgtcctttgcccactttttattggggttgtttgttgatttgtttaagttacttatagattctagatattagacccttctcagatgcacagtttgcaaatattttctctcattctttatgttgtctgtttactctgttaatagtttttttttttttaatttacttggccctgctcaagcaggacttcaaaacatttcttactaactc

SEQ ID NO: 457605 - DNA, 587 bp, Homo sapiens
gcataaacagaatttctacaaatcaattatttgaaatacacataggcagtgtcaaagtgaagaaactaaattatgcatctcattcttaagaaaaamatttaaaatttatttatatcaattattatatatgtttaccatgatatatataacatatatagctatatatagttgtcaatatacagcatatgtatatatcatagtatataatatgtattatgatatattgttatgcggtattttttcatgtgttttttcactgttaaaatctagattaaagcacatcaaaaatatctggtatgctctaatagatgcacatctattacggttgatacacacaaaacaaatgtattatcttgtttaagataattcccaacgtaactactggcaatgctgctaacatttagcaaactgatcctttaataatattcttctaatggttaataatgtctgagaagtgtgtctttaggaactacacttgcatgataaaggagatagtaaacctagagagaaaagacttgaaattcagaatgggggttgggaaggtatcttcacttaaaatctgccaggatccattggaagacctaaga

SEQ ID NO: 457606 - DNA, 587 bp, Homo sapiens
gcataaacagaatttctacaaatcaattatttgaaatacacataggcagtgtcaaagtgaagaaactaaattatgcatctcattcttaagaaaaaamtttaaaatttatttatatcaattattatatatgtttaccatgatatatataacatatatagctatatatagttgtcaatatacagcatatgtatatatcatagtatataatatgtattatgatatattgttatgcggtattttttcatgtgttttttcactgttaaaatctagattaaagcacatcaaaaatatctggtatgctctaatagatgcacatctattacggttgatacacacaaaacaaatgtattatcttgtttaagataattcccaacgtaactactggcaatgctgctaacatttagcaaactgatcctttaataatattcttctaatggttaataatgtctgagaagtgtgtctttaggaactacacttgcatgataaaggagatagtaaacctagagagaaaagacttgaaattcagaatgggggttgggaaggtatcttcacttaaaatctgccaggatccattggaagacctaaga

SEQ ID NO: 457607 - DNA, 587 bp, Homo sapiens
gcataaacagaatttctacaaatcaattatttgaaatacacataggcagtgtcaaagtgaagaaactaaattatgcatctcattcttaagaaaaaaatttaaaatttatttatatcaattattatatatgtttaccatgatatatataacatatatagctatatatagttgtcaatatacagcatatgtatatatcatagtatataatatgtattatgatatattgttatgcggtattttttcatgtgttttttcactgttaaaatctagattaaagcacatcaaaaatatytggtatgctctaatagatgcacatctattacggttgatacacacaaaacaaatgtattatcttgtttaagataattcccaacgtaactactggcaatgctgctaacatttagcaaactgatcctttaataatattcttctaatggttaataatgtctgagaagtgtgtctttaggaactacacttgcatgataaaggagatagtaaacctagagagaaaagacttgaaattcagaatgggggttgggaaggtatcttcacttaaaatctgccaggatccattggaagacctaaga

SEQ ID NO: 457608 - DNA, 606 bp, Homo sapiens
cggtcttgcctttcatttcattgaggtgaaactaatgaaccccatggtcctggaggagatggtggagttatggaatagaaggagcttgaatccctgaatcacctagaaggttctcctccaagcaccagcaytgaactactgtgaacttgtatgagtgagaaatgaccttttattataaaaccactgaaatgtcagagtttgtctattattttcattaataccttaaataatacactaatactatatactgacatacacttccaagaaggtacatttgtaaacatactgatatccaagctttcaaattactttctaaattttacatcatttatgagcattagacccataatattgtatgatttctatttctattaatttaaatatttgaaaaatagcaaagcatgccacacagttgtattgtaatttcttattggtagacttctgtgttatttagtttttgtcaataactatgaaaccatggtctgtttgacatcctcttttatatattgttttctatgtaagaattaagtaattacaaatattcctacaagtgagattactgtcccaaagtttgtgaacattagtgtatacaaatttatttcaaaa

SEQ ID NO: 457609 - DNA, 573 bp, Homo sapiens
acaagtgtgaggacagaatatgaaaatgtattagcatcaactgatatatatgtgtatacatatacatatactataaattatatatatatatacacatacacacacacaccaattatacttaatccttaaaagacatagggagtcagagtgtgagcactaggaaggtagagagtaatcgtcaaagaatagaatacatcaaactgagatgctgagatgttataatcactgataatgccaagatctaaggcatgaacatggaagtagatgamttatttaagacaaaggataagatcattgaaagagagagggacatagaactaaaatgccacagggtatttgaaaagacatcaaaatggacattgaaatcaccaagaaggatgaaaaagtagtgctttagtgaatgataataaaccaggagcaaaaactcatcaaggagtaagtatttattttaaaaaatgagacaaagtaaatattgacaatggggctaggacctttttcatgcaggatacagacatcaagagttcaaatctaattgttctctctttggggaaattcattttcatgcatgatact

SEQ ID NO: 457610 - DNA, 569 bp, Homo sapiens
aaaaacattgaggaacttgtggaagttacaattcatgcacagaagtggtagaattacttccacccacattcccttgtccaggactcagtcacatggtcccacctcactgcagggaggctggaaatgtaatagagtatataacaaaatagattcaggtatacttaatgtagcttgttttatatataatatgtgaatatacagtattcaatgtgcaatacaagtaatattttaaattattctctcaagcaaaatggaagttagagaaagataagaagtgccaygtttatcctgtggcttctcaaacctcctttacaaagtcagcaggaggatcacagagtgagaaacaagagtatgctaaacaatgacgtggggaaaatgttcccctccctaaattttctgggcaatcatggcaaatcatattgatacagacagaacacacggaaataccgggcagaagagggcagttccctggcaaaggcctcaccctcaagtctggaaacccacaccctaaatggtaacaggcatttgttttcatgcccaaaagttgccttttggccggccatgccccc

SEQ ID NO: 457611 - DNA, 569 bp, Homo sapiens
aaaaacattgaggaacttgtggaagttacaattcatgcacagaagtggtagaattacttccacccacattcccttgtccaggactcagtcacatggtcccacctcactgcagggaggctggaaatgtaatagagtatataacaaaatagattcaggtatacttaatgtagcttgttttatatataatatgtgaatatacagtattcaatgtgcaatacaagtaatattttaaattattctctcaagcaaaatggaagttagagaaagataagaagtgccatgtttatcctgtggcttctcaaacctcctttacaaagtcagcaggaggatcacagagtgagaaacaagagtatgctaaacaatgacgtggggaaaatgttcccctccctaaattttctgggcaatcatrgcaaatcatattgatacagacagaacacacggaaataccgggcagaagagggcagttccctggcaaaggcctcaccctcaagtctggaaacccacaccctaaatggtaacaggcatttgttttcatgcccaaaagttgccttttggccggccatgccccc

SEQ ID NO: 457612 - DNA, 466 bp, Homo sapiens
ttttctcatctgggtgggctgatgttcctctaatttttttttttctgttgaaagctttatttgtacacacttagggtaaatgaaaattttatgacttggggaaaacttcactctttgaaaagtattattttacacaaggagaagttaagggtactggctcccaagacaaagcttagattcaagcccagtttcrccatttacaccagtcccctgattttgctcagtttccttatgatataaggcactcagtagcacatgcccagcacacagtaagtgctcagtaagttttggcactatgaagttcaaacagcaccactggtaaactaagtgcagatatcagaggtggacactgtttatacatcttcacagctgaggtgatgccatggtgaaatttttaaatcaagaggcctttgggaaaaatgatgagaatagcagaggaatggactttatttatttatttctgtgg

SEQ ID NO: 457613 - DNA, 598 bp, Homo sapiens
attatgattcactttgcttctctaggtaaataggagtaataactgagaataccatcctatatccctgagaagtaaaaatccatttctgtgacaatatacaaagtccctacagagtagtaccaygctaaacaaatggcttactcattgcattgatattccaaataacttttgttctttcttctccagaagtgaattttcaatgattgcatctgaaattagtaactttcctttgtatattaatctgccttttttcagattattgactattgctggtaacatttcatttccagggagctgcaagatttgttttcattcacaaggtctgctcattaggaatttaatctaaatctgatggtgtttcacaaaatatttctctttattactgatccattgtacttgtattactgtacattgaatagttaagtcagcaatatttaagattcaatcattacaatgaattgatgttgatatactcaaaatgaaaaagtagcttaaggaaaataatcctcaaaatatctgaattatgggggtgagatttatatgagaaaatataggaaatttgcttattataaacttaatttaaaccaatatttataaa

SEQ ID NO: 457614 - DNA, 586 bp, Homo sapiens
ctttgcttctctaggtaaataggagtaataactgagaataccatcctatatccctgagaagtaaaaatccatttctgtgacaatatacaaagtccctacagagtagtaccatgctaaacaaatggcttactcattgcattgatattccaaataacttttgttctttcttctccagaagtgaattttcaatgattgcatctgaaattagtaactttcctttgtatattaatctgccttttttcagattattgactattgctggtaacatttcatttccagggagctgcaagatttgttttcattcacaaggtctgctcattaggaatttaatctaaatctgatggtgtttcrcaaaatatttctctttattactgatccattgtacttgtattactgtacattgaatagttaagtcagcaatatttaagattcaatcattacaatgaattgatgttgatatactcaaaatgaaaaagtagcttaaggaaaataatcctcaaaatatctgaattatgggggtgagatttatatgagaaaatataggaaatttgcttattataaacttaatttaaaccaatatttataa

SEQ ID NO: 457615 - DNA, 504 bp, Homo sapiens
ctaaaaggagccaaggtatagcttggaccattgcttcagagggtgcaagtgccaagctttggtggcttccatgtggtgtgggcctgcaggtgcacagaagacaagaattgaagcttgggagcctttatctagattgcttgggatgtacggaaatatctggatgttcaagcagaaggctgttgcaggggcagagccctcatggagaacctctactaggacagggcaaagagaaaatgtggggtggggccccagaacagcagatccactaacagcttgcaccatgcacctggaaaagccagaggcactcaatgccaggccttgagagcagccaacggaactgagccctgcagagtcacaggggcagagctgcccaaggccttgggagcccaccccttgcatcagtgtggcctggatatgagacatgaagtcaaaggagattattttggtgctttaaaatttaatgactgccctgctrggttttggacttggatggtgcctatagct

SEQ ID NO: 457616 - DNA, 527 bp, Homo sapiens
tgcacatcttattgccccaactgcattatacagtccttgagggcaaagcctgattctcctgcttcttggaacctgctatagcatagagctttgtgtcatgcacagcatacatatcaataagggtttgttcatttattgcaccatggacagctgtattcagttcttctgttaagcatttgtctttctatatattctatcttagtgggtcaagtagtattacaagtagctgtgactgccagaacctctcagtcatacaagatgcaggatgatgtactagttaagagaattcatgggctttagataaaaaggcacttgaatttaaatttcagctctgccacttcctagatgtgtgatctgagtttctctgaaccttaatctactcacttatgacatgtatatagccaaaggataatcataaggaaatyaaataactatgaactatgtttggcacatagtagacacctagtaaatggcagttaggattatgtggctttgcattactcacttttactcttatactctttgtt

SEQ ID NO: 457617 - DNA, 541 bp, Homo sapiens
ccacatcattcctatattattacaaaattcaagcagctacaytataaattttaagacatggactttgaagccctcaactttctagtcatcagggctttatgtactttaagaaaacaatcagagcttggaggaaagcaaaaggaaagtaaaagagaatttgggtgtttatacatagagagagagaaaaggaaaaagacattatttccagaaagactgcatgaggatgacagacaaataaagacagaggggatatttgtgatttaattctgcaaatcctcccaaatatttattagttaaatcttatcctaaatatcaaaatttaaagtccatatagttttataagatgttgttagaaaagtttaaaatttctcagactcacaaaaatctaaagatatcttttgccaaaatactctgaaatagtaaaacccttcagactcacttgcattgaaggagatgtttcagtaaaacagtcttctctagctctcccaattcctggaagtttgtctggcaggagctgttgagggtttcgtcatggagggac

SEQ ID NO: 457618 - DNA, 541 bp, Homo sapiens
ccacatcattcctatattattacaaaattcaagcagctacattataaattttaagacatggactttgaagccctcaactttctagtcatcagggctttatgtactttaagaaaacaatcagagcttggaggaaagcaaaaggaaagtaaaagagaatttgggtgtttatacatagagagagagaaaaggaaaargacattatttccagaaagactgcatgaggatgacagacaaataaagacagaggggatatttgtgatttaattctgcaaatcctcccaaatatttattagttaaatcttatcctaaatatcaaaatttaaagtccatatagttttataagatgttgttagaaaagtttaaaatttctcagactcacaaaaatctaaagatatcttttgccaaaatactctgaaatagtaaaacccttcagactcacttgcattgaaggagatgtttcagtaaaacagtcttctctagctctcccaattcctggaagtttgtctggcaggagctgttgagggtttcgtcatggagggac

SEQ ID NO: 457619 - DNA, 653 bp, Homo sapiens
gcaaatttctttaggaaacctgctgccatatatcctttrcaagcactgactagaagaaccaggctttataaagaattgtttagattaatccaataagaagcctgaggaatagaaacaaataagaaaattgcaccattgtcacttaaacagggttttcttatgaattatatatgagttatttatgttgccctttgattcttttatgtttccttttcaaaaaggaacaagtattttggcagttacattcaataattagaaattcatattaagctgctagatttgtatctaccaacttttctcccaggccaaacttattatatgccaactaagtttttcttagttgacttcttgaaagtaagtttgtttttctacatgaatagttgatttctgaataatcaattcaatttacaaattttcagaagtggataataggagtaataatgctttagggatgtagagaaaaaattcacttagaattcattaaacactgtgtgtccacaaccccaatctccctcttccctccttggatacaggaaaaaaagtcatttcatgttttgaggtcttttgtgttctgtctgtgtacaaagaaaaggaggttcctctccaaggcctacttagaaactaaaactttgacccattcatttatgtgcccg

SEQ ID NO: 457620 - DNA, 653 bp, Homo sapiens
gcaaatttctttaggaaacctgctgccatatatcctttgcaagcactgactagaagaaccaggctttataaagaattgtttagattaatccaataagaagcctgaggaatagaaacaaataagaaaattgcaccattgtcacttaaacagggttttcttatgaattatatatgagttatttatgttgccctttgattcttttatgtttccttttcaaaaaggaacaagtattttggcagttacattcaataattagaaattcatattaagctgctagatttgtatctaccaacttttctcccaggccaaacttattatatgccaactaagtttttcttagttgacttcttgaaagtaagtttgtttttctacatgaatagttgatttctgaataatcaattcaatttacaaattttcagaagtggataataggartaataatgctttagggatgtagagaaaaaattcacttagaattcattaaacactgtgtgtccacaaccccaatctccctcttccctccttggatacaggaaaaaaagtcatttcatgttttgaggtcttttgtgttctgtctgtgtacaaagaaaaggaggttcctctccaaggcctacttagaaactaaaactttgacccattcatttatgtgcccg

SEQ ID NO: 457621 - DNA, 548 bp, Homo sapiens
agattatagagccaattccaaaaatcctagaaccaatttagtaaactcatccttaaaattctatttatctgatattgaatgttaccaacacaaataaatgataaatgtttgagatgatggatgtgctaattacccttatctgatcattatacattataaaaactgtttctttagaacaattcacggtaccaaaatctctattgatgtttaaagagctatctggaggttccatggcccagtcaagttgacatataaaattaaccgtaacatcttccttgtttattttccaaaacttcgtgggtgactattagcaaatgtttttaaatggacattttcctgtctgaagaataaagaaaacaatcacatttataattgcawcaaaaacaattaaatacttaggaataaattaaccgaggaggtaaaagattttacattaaaaactataaaacactgatgaaagaaataaagacacaaataaatggaaagatatctgtgataatgagtcagaattcatattgtttaagtattcatactacccaaagtagtct

SEQ ID NO: 457622 - DNA, 473 bp, Homo sapiens
cattcaaaaaaataatttgaaatggtttaaggaccaagaatktaagacctaaagccataaaactcttagaaaaaaaaaaaaaaaacacatagaagctcattaacatttgtcttagcagtgatttttttgggggtataacaccaaagtacaagcaaccaaaaataaactgagactacatcaaactaaaaagattctgcactaacaaaggaaataatcaacaaaatgaaaagtcaacctacagaaggggagaaaatattctcaaatcatacatctaataaagggttaatactcaaactataaaggaactcctataactcaatagcaaacaaataagtaatttgtttaaaaaaggatctgaatagacaattttcccaggaagacatacaaatgaaccacaggtacattaaaaggtgctcaacgtcactaattatcagagaaatacaaattaaaaccacgatgagataccacttgat

SEQ ID NO: 457623 - DNA, 473 bp, Homo sapiens
cattcaaaaaaataatttgaaatggtttaaggaccaagaatttaagacctaaagccataaaactcttagaaaaaaaaaaaaaaaacacatagaagctcattaacatttgtcttagcagtgatttttttgggggtataacaccaaagtacaagcaaccaaaaataaactgagactacatcaaactaaaaagattctgcactaacaaaggaaataatcaacaaaatgaaaagtcaacctacagaaggggagaaaatattctcaaatcatacatctaataaagggttaatactcaaactataaaggaactcctataactcaatagcaaacaaataagtaattygtttaaaaaaggatctgaatagacaattttcccaggaagacatacaaatgaaccacaggtacattaaaaggtgctcaacgtcactaattatcagagaaatacaaattaaaaccacgatgagataccacttgat

SEQ ID NO: 457624 - DNA, 655 bp, Homo sapiens
taagtaatttgtttaaaaaaggatctgaatagacaattttcccaggaagacatacaaatgaaccacaggtacattaaaaggtgctcaacgtcactaattatcagagaaatacaaattaaaaccacgatgagataccacttgatacctaataggatgaatattattaaaaagacaagagataagtgttggtgaggttgtggagaaaaggggactttcatgcactgttggtagggatgtaaactgatgcagtcatcatggaaaagagtatggagctttctcaaaaaacaaaaaataaagctaccaaatgatcaagcaatctcacatctggttatatatctaaaggaaacacaatcaagatcttagagagatatctgtcctctcatgttcattagagcattattcacaatagccmagacatggaaacaacctcagtgtccactgatggatgaaaggatttaaaaatgtggtatgtgtatacaatagaatattatttatccataaaaacaaggaactcctgccatttgcagcaacatgtttgaacctcgagggcattatactaagtgaaataaatcagacaaaaaaaaatactatctgatctcacttatatatggaatctaaaaaggatgaacttatagaagcacagaatggaatggtg

SEQ ID NO: 457625 - DNA, 560 bp, Homo sapiens
caaatcacaaaaactgactcaaggagaaatagaatatctcaacagacctataacaactaaagatatggaatcagtaaccaaaagccttccaacaaagaaaagcccaggaatagatgatcttcactgatggattctaccaaacatttaagaaagaattaacactaattctactcaaactcttccacaaaaaataagagaagagtagagaaaactttctaaaatatcttatgagggcagcattaccgtgataccaaatccaaagacaactcaagaaaaaactacagactaaagttttatgaacatagatgcataaattcttgatggartatggccaaaatgaatccaacagcacattaaaaggtttatacacattgaccaagtagaatttatctcaggaatgcaagagtgatttaatataagacaaacaactaataaaatcaaacacagtctaagtgactctttatacagaagagctcatcaataagattaacatcagacttctcattggaaacattgaagaccaaagaagaaaattttgaaaatttccagaagaaaaaaac

SEQ ID NO: 457626 - DNA, 560 bp, Homo sapiens
caaatcacaaaaactgactcaaggagaaatagaatatctcaacagacctataacaactaaagatatggaatcagtaaccaaaagccttccaacaaagaaaagcccaggaatagatgatcttcactgatggattctaccaaacatttaagaaagaattaacactaattctactcaaactcttccacaaaaaataagagaagagtagagaaaactttctaaaatatcttatgagggcagcattaccgtgataccaaatccaaagacaactcaagaaaaaactacagactaaagttttatgaacatagatgcataaattcttgatggaatatggccaaaatgaatccaacagcacattaaaaggtttatacacattgaccaagtagaatttatctcaggaatgcaagagtgatttaatataagacaaacaactaataaaatcaaacacagtctaagtgactckttatacagaagagctcatcaataagattaacatcagacttctcattggaaacattgaagaccaaagaagaaaattttgaaaatttccagaagaaaaaaac

SEQ ID NO: 457627 - DNA, 554 bp, Homo sapiens
ctaagtgactctttatacagaagagctcatcaataagattaacatcagacttctcattggaaacattgaagaccaaagaagaaaattttgaaaatttccagaagaaaaaaacgtgtaatttatcaccagmagattttatgtaccaaaaaaatgctgaagggagttcttcaggcagaataaaaggacagtagacagtaacttagatccacctaaagaaataaaaagcaccactaaaggtaactaaacagcaaaatgaaaaaaaaaaaagtatgaatgcatttttgtttataactcttttattctcttgtcagattaaaagacaaccaaataaagcaatgattataaaactgtgtcaatgtgctattaaagatgtaatttatatatctcttagctgatgacatgactctatacttagaaaatcctaaagactaccaaaagactcctagcctgatacaataattcacttcagtaaagtttcaggatacaaaatcaatgcataaatatcagtagcatttatgtataccaatagcactcaagctgagaaccaagtcaac

SEQ ID NO: 457628 - DNA, 554 bp, Homo sapiens
ctaagtgactctttatacagaagagctcatcaataagattaacatcagacttctcattggaaacattgaagaccaaagaagaaaattttgaaaatttccagaagaaaaaaacgtgtaatttatcaccagaagattttatgtaccaaaaaaatgctgaagggagttcttcaggcagaataaaaggacagtagacagtaacttagatccacctaaagaaataaaaagcaccactaaaggtaactaaacagcaaaatgaaaaaaaaaaaagtatgaatgcatttttgtttataactcttttattctcttgtcagattaaaagacaaccaaataaagcaatgattataaaactgtgtcaatgtgctattaaagatgtaatttatatatctcttagctgatgacatgactctatacttagaaaatcctaaagactaccaaamgactcctagcctgatacaataattcacttcagtaaagtttcaggatacaaaatcaatgcataaatatcagtagcatttatgtataccaatagcactcaagctgagaaccaagtcaac

SEQ ID NO: 457629 - DNA, 612 bp, Homo sapiens
atcatttccagcctgagtatacatgtgaactcatagtctgccacaatctgggtgatgtcttctgccttccacaaattgggaataccaaaggactccaataatctgtcccacacaacagcttgacctttgttgtaccttttgttttggactccagggatttctttcaactagaatcctgtctttgttcagtccacttcctcttttgtccaggcctttctagcgtaygcaagttctgctggttatcacagttactagcctccagtttctcctgatggtgtataagcaccttaacagtttctatctgctccttttgaagactttttatgtatcaacttccacccatttggcattcttggtgggaagttttgacctgatgacccagtgacgggcaggaatgagtccattctcctggtattgccaacaggagagattatgtctttgacaactctgtatcttcctgttccacttgtagtccttggccagctcaaacaacctgaggtgcatgttggtgataggattaaaagaaccacaagcaaggagaaccacttcagacttctctgaattttccatggtaagaagttgaagttgttgatttcattagaaaactgtaat

SEQ ID NO: 457630 - DNA, 549 bp, Homo sapiens
cccattaaaacttagagttttgaataattgggagaacaaagactatttgcagggttgccaaaagtgctttccttgaagccagtcttacagaattttataggtattttgtggaaaatggtttctattgtcaagttagtttgggacacactaatcaaaatatagaagtggttttaccagaatccctctccaataataagcttatcttaaccgtcaatctcaagaaggggggatacaacatgtaatgtttagccaacttttgaccataaagtagtcttttttcaaaaaaaaatatttcttagaaatagcgttctgtaggagcataccttgaagaatgctttccattgagttcaagtaggatgactttctcaaagcaactagaagaattttgcagtcaaccttgattttctcctttgtgtctgagaagttgctagcaatttkcttcagtggactctgaggaggccagatttatgcctcccaacagagtaaagtgacttcaatgtacggattgttggtgttgagaaatgtaagctctggggataagggagggtt

SEQ ID NO: 457631 - DNA, 590 bp, Homo sapiens
taggttgcgtttattataatcatgactatcatttgtaaattcataatgattcataaataatatcctcccatgtcatccttgaacattctaaaggtagaattttattattttctgtttatttcgaagaaggaatatagggacagaaaagcactaagagatgtgatcatcatcaatgctagatacaatgctaacaatttggcagttactgtttaatcctcaatgatcttaacacacattttacagaagaggaaagtgatgtttcaaaagcttcaggcttcttcagattctagagcttcaattgtcacccactgcctgcctgcctcccaaattaagattcatcyttaagacttctgtttctgattcacactctctttccaatatagtcataaactgtcaaaagatatggatgtaaagtgagagtaaatcaataacccaagtaccttctgtatgagagaaatcacgtgtgtgcatgtcaaaatatgtgcatgcgtaaggtcataaatggaaacccagcacactgtgtcttaaacagttcatttattttagaactgagaggtcaaggttctttgtatgtcccatctccatggctt

SEQ ID NO: 457632 - DNA, 503 bp, Homo sapiens
gtggggaagctattcctcaagtctaagcaagagttagtatggaccggtctgagaagttagcagaggagatggacaggaatggacaaggctgagatacgagaggacctgtgattgtctagctatgaggagaaagagagagaagggccaaggacaatgtaaaagtttcaggtggatggttggtgtattaattgacaatactatggccagaaaccttgtcagatgatatactttgatttgggacagtaattgcaaatgtatgcaaatatatatttatctcttactccccttgggactataataaccctttgagagcagatataatgccccctccatctatctctagcctgcaatacagtgtatggcatattgmagttgtccaatataatttacagaaaattgaacaaattttagtattttattcatgttgcacaaatataggttgactaggctaagccaaactaaattttgtctagcacactgatatttcaatgtttgaacattag

SEQ ID NO: 457633 - DNA, 659 bp, Homo sapiens
cagcatttaaccccaacacaaagctctggaaaaacaacaagaaatacagaaagaagagataaaactgctaattaatatgctgaagttctaagataataagtcaacataattggaaatctggatgcctgaaaattttggttgatctagataatttatcttaaatggccagaaatctttcaatgagtgaaaaatttatctgattgggtcgaggcagatactgattcactgagttaacattgttatcaaatggctcattattcattcaatgcaattcaatttaataatgataattcaaatacacgctgttakataaacaaggctcttgaatcacccacttttgaaccgtactctatgtcttcctaacagtatgcagttcatgactaacctactaaatattcttaggcaaatatctgaggtccttttcctgccagaaatagttgaaattctatttttccaccttaaatgagcagttaatactgccactgtgatgtaataaaatccattaaatttacatgtgctttttattttacaaattagttcaagagcagccctgattcttcagagggataaattgagcaccaagaaattcaagctttctcttctctctagttgagatcttttcctttcgattgtgtcttgagattttggtgctatttcat

SEQ ID NO: 457634 - DNA, 577 bp, Homo sapiens
tgtggttgttataagtattaaatgtatgaatatgtataaaatgcttggactagcgcttagcccatgtaaatgctcagtatatgtttcttcttactactttcttaatgttgtttttattatgggcaatggcttctgagcagaacaagaaaggaaataaatytgaaagagggctgatggatagtgagagagtagtggaataatggtatgtaggtaatgaaaatgtcaaattgttatagtaatagtaatagaacaaaaaaggtgatgggacaagaaactgttgtatgagagctggagattaccattcatgatttcaggggtgaagataatttttctgatgataaaatatgttttgaaagagggatagtgtggcagattgtactattgttcttaattatgtaatgtcttccctgtaccagtgttatacattactttctcttatgtgtgcctagcagtgcttccctgtgaaagaaacatacttttctgctttattgagtcaggcttggccatgtggcttggtttagtcaatagaatgtgaacagaagtgacactagccattactgagaagcagctttaagaa

SEQ ID NO: 457635 - DNA, 654 bp, Homo sapiens
catatcaattaaactgaaattgtgcaaaaaatcatttttattcataatttaatagattttataatcacataaaatttatatttcccttggtttgtttgtttgttttcccagaggatctttgaaagggggtccattgaataatactctggaaaaataactaatccagtgcttctcaatggttgtttctggcctagcagcatcagtaccaccagggaactgtttaaaaatacaaattgtcaggccccttccrgacctactgaatcagaaactttgggggtggaactaacaacctattttaataagtcatcctggtgattttcatgccacccaaaagtttgagaaacactgctctaatccaatatagttgcacaggtgagaatgttcagccccagaaagttcaaatgccccttctgcccctgcaggtcagattttcaccttggtcattgtgagatcttaggcaccccaagtttcagattattctgccaattaatcatcaactctccctgatgctccacagtgatacacatttccagcatccaccttagagcaacagattgtacagttgcactccttgcagaggatttactttcttatgctttgattccatatctctatggagtgtttatagcttgaatggaaataatatgtcttaat

SEQ ID NO: 457636 - DNA, 617 bp, Homo sapiens
tgctctaatccaatatagttgcacaggtgagaatgttcagccccagaaagttcaaatgccccttctgcccctgcaggtcagattttcaccttggtcattgtgagatcttaggcaccccaagtttcagattattctgccaattaatcatcaactctycctgatgctccacagtgatacacatttccagcatccaccttagagcaacagattgtacagttgcactccttgcagaggatttactttcttatgctttgattccatatctctatggagtgtttatagcttgaatggaaataatatgtcttaatactgcctgggcccctactttaaaacaaatatgaatagcagatcaaattatagcatctttgtgtacaaaagtcttttgctatcttttattcaagaaattgtttagaaaagccccatgattcttctccgtaggccaccttgtctttgtgaagtgctctggaagtaatctagcatcatgaagtattactaacaaattattaaagaaaggctacttagtgaagcaaaaaaaaatgaggggactaagcttcataaaatggggaaaaacaaatttaagtttcgattaagaaaaataatggataaatattagaaaa

SEQ ID NO: 457637 - DNA, 550 bp, Homo sapiens
atgcatttctattggccgggttgagttttgttgtagtcacattaatcaaacgcaaaattgattttggttcagcactgaaactcttcaaaattacttttcaaaaatgatactttttaaaacatagagaaagacacattataaagccacaaaattttttcagtataagatcagcttgataatgtgtttttcttttataaagagttwtttatcaacagttttccaagaaaagagtttgtttgtttgtttgtttgttttcaggaaagataagacagcacggttacatctactcagatgaaattacaatttcactgaagaaattttctgattttaataaaataggagtttgtcagaaacatttacaataagttattggaagacgtttcttcctctcacacatgcctaaagtccgatcgaaaaatcctgttctgaaaagtgaatgcaagcttgcttactgaatgattcattgttaacttttctttcagtgaatgaaagagatcaagagaactgaatctttaagccactacccatcttcatacagggtggaagaata

SEQ ID NO: 457638 - DNA, 550 bp, Homo sapiens
atgcatttctattggccgggttgagttttgttgtagtcacattaatcaaacgcaaaattgattttggttcagcactgaaactcttcaaaattacttttcaaaaatgatactttttaaaacatagagaaagacacattataaagccacaaaattttttcagtataagatcagcttgataatgtgtttttcttttataaagagttatttatcaayagttttccaagaaaagagtttgtttgtttgtttgtttgttttcaggaaagataagacagcacggttacatctactcagatgaaattacaatttcactgaagaaattttctgattttaataaaataggagtttgtcagaaacatttacaataagttattggaagacgtttcttcctctcacacatgcctaaagtccgatcgaaaaatcctgttctgaaaagtgaatgcaagcttgcttactgaatgattcattgttaacttttctttcagtgaatgaaagagatcaagagaactgaatctttaagccactacccatcttcatacagggtggaagaata

SEQ ID NO: 457639 - DNA, 550 bp, Homo sapiens
atgcatttctattggccgggttgagttttgttgtagtcacattaatcaaacgcaaaattgattttggttcagcactgaaactcttcaaaattacttttcaaaaatgatactttttaaaacatagagaaagacacattataaagccacaaaattttttcagtataagatcagcttgataatgtgtttttcttttataaagagttatttatcaacagttttccargaaaagagtttgtttgtttgtttgtttgttttcaggaaagataagacagcacggttacatctactcagatgaaattacaatttcactgaagaaattttctgattttaataaaataggagtttgtcagaaacatttacaataagttattggaagacgtttcttcctctcacacatgcctaaagtccgatcgaaaaatcctgttctgaaaagtgaatgcaagcttgcttactgaatgattcattgttaacttttctttcagtgaatgaaagagatcaagagaactgaatctttaagccactacccatcttcatacagggtggaagaata

SEQ ID NO: 457640 - DNA, 578 bp, Homo sapiens
tatgaagattaataaattaacatttataaagtattgaaataaggcctagcatataataagatatagattagtgtttgttaaatgaaataaatatatccgttggagcaaaaaagttgagtcatttctccccattaaaattatttctagtgttgtctctaataattaagtactatcaccaatgaccaaaaatgtcacttttagaaaattcatgtatataacacaaattttaatgttaataatttcattgagaagtgccttggcacctaattgatgacctcatggattgaaagattatgaaagtgtgaaagtgaaaaagcaagtattatatttttagaaaaataatttttgcattccctgtaaccaaaacatttttctttttcttttttttttaaagtaagtaaaggaggtgttttattatttgttaaatagcttcacaaataattcattctgattattctgttttaattggccaagatacttcttacaattgggctaattctgtttctyttttctcttgctttgaagcagtacaaaacaagcagacacccatggcctttccatgtctaagatgagtctaa

SEQ ID NO: 457641 - DNA, 580 bp, Homo sapiens
ttaagtctctgaagaatattagattgctaggaagacagttaaaaaatcagatatatttctacctggggagttagaaagaaaaatatttttgtattgtttctaagtgcttttcataataaaaaagtagctaygttgataatagattacctttgattattaattacagcttatattaaaaatatgcatgattactaaaaagtctagaagataacactgctctaaccacattaatcaataagagattattggttaaggattaatctaatactttggatagctagattttaactgaaagatataagtaaaatattaagtctactgctatctactttgaatgtacttttaaaaatctgtatgattcaagaatattctctattgctgttattgattattaataagaaccatgtcactaactccatatcttactcttttccatttcatataaaaacaaaaaaatagctagagtagcagcctgtgttcttcttggcttgcctttcctggaaaggaacctccactatataagtaaatgaaggtgagagcaatagggcaccagtgttcttggctttctcagcctggagta

SEQ ID NO: 457642 - DNA, 617 bp, Homo sapiens
agttggacagatagattattttcatgtcccttagttattctgtatgacccaacaaataaactcctcgaaatgtaaaggtagaaattgatggtcttacaaaagtgtttgtgattactttgctagaagctttgatattgagatcatgttattaaacaccaaagggcattcagacaaaagatatcttggagataaaattaattcacctgtctctcwataaaaagaaaaaaatttttatttttttcattttacttgtctatatcttaaaatttgaattattttgttcattgctggcattcatcatttcatctcaaaaattcacttcataaatgaaatacttgtctttcataattcaccttatagttagatttagaaattataattaagtgtcttaatctcctttcaaaatttatcactgtaaaaaagttttgatgaaatattaattttcccctttctataaatgagaggtgaatgctagcctagtcaaacaaaaacctaaaaccagagtgcctttccttgaagttcattaagttttcttctttccctaaggtgaattctgttttccaattctataggttgctttttttaatttttcaaatataagtgacaaaaattctgta

SEQ ID NO: 457643 - DNA, 604 bp, Homo sapiens
aattatttggcagggtttagtccctgtaagtaattatggaaagaaatgggtgcaaagtggttggtttgcatttgttaataaagaaaaatttaagggcagacaargatttcctatttccttgggtaacgcattaaagcataaataaaaatatctgctttccaacagatggtgttttttttaggaaaagagcaagattaggagaatgctaaaagcagccatatcttatttttgtgtaacatttctggttttatggcataaaataagatagacccctacattttgaaataaagaaggaaaaaatgtaaattatacagctgaccctgcaaaatcacaaaaggaaaaatgagtctttaactgaaaaaggtttgttaaggttgggagctggccaaaccatcttctcctagatgatttacagtcagtaaaaggttatctgcaattctaaaattgcagagctctgttttctaatctgaataagaagtaaactttgtcataagttttggaagaaaatcactgttttagattaaggcttctcatttatattcacaatcctgtggttgatgaagcttagtggctagaaaactggaatggtaagaataataaatga

SEQ ID NO: 457644 - DNA, 596 bp, Homo sapiens
gtgttcctttgaaaaggctttcccttatggcgtctattttattctgtgggttggaagctgaagcttgaatttctttgttgattccaagtcagtttgttacctccttctactgccagatctctagctgtgttagatagttaatagattcagttgatattttcttcaaggtagtgtagtctgattagtatacttcaagtkgtgattacgtattgatcttctgtctgacattttttaatagtcgtaagctctttgccaaggcataatcttttcacaagaccttcatgctaattaagagtagcccaggtttaaatgccataccctatgaacgctacctagcatgaggatcaaatgcaacaaagcagctgcttacaacagcagcatttccagcaatttatgagagccttaatttatggaattttattttaaaaattgcattgtatgtggagactgtaaagtctgtttccaatatcccagtggaaacatacagtcactgaggtttgaaatatcgtaatctcaaagagtcataaaatgccaatagcacagggacagcatgaaacaacacagaggagagtttctgatacaatgaaagtcatagt

SEQ ID NO: 457645 - DNA, 555 bp, Homo sapiens
tctgcaattctaaaattgcagagctctgttttctaatctgaataagaagtaaactttgtcataagttttggaagaaaatcactgttttagattaaggcttctcatttatattcacaatcctgtggttgatgaagcttagtggctagaaaactggaatggtaagaataataaatgatagctcattaagcaatttatccatgttaggtgttattcyaagttctttagttatacattttttcactgtatcctcctaacaagactatgaactagaattattattatcccaaacttacagatgggatgcattgggcaggtgtctcctactcaacaacatacagtaagtggcagaacaggacaagaacccagaaggcagatgcagcctattctccgactgccagttaagtagagatttcttctttttctgctgcattatgatgtcacaagaaacacagcaaaagctgtaatcggggttagggtatattagctaggacatttgggtggaactagacatcaagaaacctgggtacatgaccttgttctgaccctgaagtgcca

SEQ ID NO: 457646 - DNA, 555 bp, Homo sapiens
tctgcaattctaaaattgcagagctctgttttctaatctgaataagaagtaaactttgtcataagttttggaagaaaatcactgttttagattaaggcttctcatttatattcacaatcctgtggttgatgaagcttagtggctagaaaactggaatggtaagaataataaatgatagctcattaagcaatttatccatgttaggtgttattccaagttctttagttatacattttttcactgtatcctcctaacaagactatgaactagaattattattatcccaaacttacagatgggatgcaytgggcaggtgtctcctactcaacaacatacagtaagtggcagaacaggacaagaacccagaaggcagatgcagcctattctccgactgccagttaagtagagatttcttctttttctgctgcattatgatgtcacaagaaacacagcaaaagctgtaatcggggttagggtatattagctaggacatttgggtggaactagacatcaagaaacctgggtacatgaccttgttctgaccctgaagtgcca

SEQ ID NO: 457647 - DNA, 607 bp, Homo sapiens
acacatctaatatatgatgaatgaaagattacaaaggcctagccatatcagtcaactctgggatcayatcagttccccatgggatcagccaaggctgtcactgcacctacattgaagctcagcttcctcttctatgtaattttgtttccttccctcttcccctttcttttgtatgttgttgtgagacattatgttgtatagagttttggcagatattttgtgatagtaaagaagaaacagagaggaagagaaggggcaggggagggagacacagagagacagagagggagggagactgcatagaagcctgcacaaagtcctaagacactgagccatggcattgtccaaagctgaggacatctatctccagaagggttggtaggtaatatttactaatgaatccctaccatttaagccactttagccattcttttacttgcaatgaaaaaatgtctaacataaatgacttctggaatgagtttaattttcaacttacatgtttggatagcaagagagaaactttcataattcttactgaaatctagactcacgctgtatatcatattttctgttcctccaattgagtttgattttaaattaaattgga

SEQ ID NO: 457648 - DNA, 607 bp, Homo sapiens
acacatctaatatatgatgaatgaaagattacaaaggcctagccatatcagtcaactctgggatcatatcagttccccatgggatcagccaaggctgtcactgcacctacattgaagctcagcttcctcttctatgtaattttgtttccttccctcttcccctttcttttgtatgttgttgtgagacattatgttgtatagagttttggcagatattttgtgatagtaaagaagaaacagagaggaagagaaggggcaggggagggagacacagagagacagagagggagggagactgcatagaagcctgcacaaagtcctaagacactgagccatggcattgtccaaagctgaggacatctatctccagaagggttggtaggtaatatttactaatgaatccctaccatttaagccactttagccattcttttacttgcaatgaaaaaatgtctaacakaaatgacttctggaatgagtttaattttcaacttacatgtttggatagcaagagagaaactttcataattcttactgaaatctagactcacgctgtatatcatattttctgttcctccaattgagtttgattttaaattaaattgga

SEQ ID NO: 457649 - DNA, 617 bp, Homo sapiens
atggggcatagtacagcaatgggaggagagagaattataggatatacttccagagcaaagaagcaaccaaaaattccgaaattagaacatagtgggaaaaaatcattatcactttagtatagaattcacctatattttaatatagataatggcacactgataggttttgactgttatgtaatgagattaatatataaacccaaacatgaatatcagcattgggctctataaagcaggaattttttttagaatgatcaraatattatgttacttttggcctatttatagaagctgaagctctttgaaatcctgctattctcaataatgtcaaatttgtttagaagatagaccattagttttgaactaacactgaatataatctagtgaataagtaattaatatatttgagtaaagtcacagttatttgatatcaagatgtgactacattgtggttggctgcaccaggcttgcacatgtgctaggaggcctgtgtgatgaatcagagcattgagggacatagaaatcagaggcagggtaatccagcaagataatataatgccctgggatacttccgtttgtaaggcaaagttggagtaaggtgtaatcataaggcagaa

SEQ ID NO: 457650 - DNA, 594 bp, Homo sapiens
aattgcagcttgccttcagtctttttattcctttacaactgggtcaggtttagctcagtgtgattgcatmtagtgtcatagcagataccatgttttctctgatagtgttttctgaagtaagatgtatccccaacatacaagatcttcaatgaaaacacagtgaattgtgctaccctttgacagctttagtagaatcatgaaattaaaaacaaatcattcaaccaaggatttctagggggtttgcagagtattccagggctattcttatgtttgggctattaatgccataggaacagggaaataatggaggactcttgaaggaaagtagttctatattcctcaaggaagcacacagatttcataggctgggcttgagcagctactaattaaccatggccccagcaaatatacacacatatcattagaaaaagtatcagtggatatagtatataccatatccatatctatatacatgcatgctatatatatattttgtatataaaccaaatatgtagaactgttcattgataaccatgttttaaatctattcaatcaccagcctgaaggtctcccttttttcaataggaacagttg

SEQ ID NO: 457651 - DNA, 594 bp, Homo sapiens
aattgcagcttgccttcagtctttttattcctttacaactgggtcaggtttagctcagtgtgattgcatctagtgtcatagcagataccatgttttctctgatagtgttttctgaagtaagatgtatccccaacatacaagatcttcartgaaaacacagtgaattgtgctaccctttgacagctttagtagaatcatgaaattaaaaacaaatcattcaaccaaggatttctagggggtttgcagagtattccagggctattcttatgtttgggctattaatgccataggaacagggaaataatggaggactcttgaaggaaagtagttctatattcctcaaggaagcacacagatttcataggctgggcttgagcagctactaattaaccatggccccagcaaatatacacacatatcattagaaaaagtatcagtggatatagtatataccatatccatatctatatacatgcatgctatatatatattttgtatataaaccaaatatgtagaactgttcattgataaccatgttttaaatctattcaatcaccagcctgaaggtctcccttttttcaataggaacagttg

SEQ ID NO: 457652 - DNA, 425 bp, Homo sapiens
ttgtttttttattttctgttgataaacagaaattcttaattttattataaccaaaatatcctttttaagctcatgattaaaatatttgtactttaaggatctcgctactcaagagtcttatatacattttactatactgtcttattagatttaaatttgctttttatatttaaatctgtttgtaatggagtcttttttacataggatataagtatctattaatttaattagtrtgtaatcaattgtcttagcactatttaacaagtagttccataccatactgcattggtatgctatgacaaacctaatataggtaatgtgttcacataaacatgactgtgtctgtggtttctatcccattccattgattaatttgtctcttctaccacactttttaaataaatatatctttttttgagacagag

SEQ ID NO: 457653 - DNA, 594 bp, Homo sapiens
aattgcagcttgccttcagtctttttattcctttacaactgggtcaggtttagctcagtgtgattgcatctagtgtcatagcagataccatgttttctctgatagtgttttctgaagtaagatgtatccccaacatacaagatcttcaatgaaaacacagtgaattgtgctaccctttgacagctttagtagaatcatgaaattaaaaacaaatcattcaaccaaggatttctagggggtttgcagagtattccagggctattcttatgtttgggctattaatgccataggaacagggaaataatggaggactcttgaaggaaagtagttctatattcctcaaggaagcacacagatttcataggctgggcttgagcagctactaattaaccatggccccagcaaatatacacacatatcattagaaaaagtatcagtggatatagtatataccatatccatatctatatacatrcatgctatatatatattttgtatataaaccaaatatgtagaactgttcattgataaccatgttttaaatctattcaatcaccagcctgaaggtctcccttttttcaataggaacagttg

SEQ ID NO: 457654 - DNA, 517 bp, Homo sapiens
attgggaactattttgaaatgaggattgtattggtttcctattactgctrtaacaaatccccacaatgtactggcttaaaatagcacaaattgattctcttacagatttgaaggtcagcagtctgaagtcagtcttaccgggctaaaattaagatgttagcagggctggaggctccaagggagaatctgttccttgtctcttccaatttctatttatcatataatgaaatatatttaattattttaataaaaaatagatcctggccagcacagtggctcgtgactgtaatcccagaaccttgggagcccacggtgggtggtggatcatttgaggccaggaattccagaccagcctggccaacatggtgaaactctgtctctactaaaaatacaaaaattcgctgggcgtggtggtgtgcacctgtaatctcagctactcaggaagctgaggcaggagaattgcttgtaccccggagacaaaggtcgtagtgagccaagatcatgccactgcattaca

SEQ ID NO: 457655 - DNA, 517 bp, Homo sapiens
attgggaactattttgaaatgaggattgtattggtttcctattactgctataacaaatccccacaatgtactggcttaaaatagcacaaattgattctcttacagatttgaaggtcagcagtctgaagtcagtcttacygggctaaaattaagatgttagcagggctggaggctccaagggagaatctgttccttgtctcttccaatttctatttatcatataatgaaatatatttaattattttaataaaaaatagatcctggccagcacagtggctcgtgactgtaatcccagaaccttgggagcccacggtgggtggtggatcatttgaggccaggaattccagaccagcctggccaacatggtgaaactctgtctctactaaaaatacaaaaattcgctgggcgtggtggtgtgcacctgtaatctcagctactcaggaagctgaggcaggagaattgcttgtaccccggagacaaaggtcgtagtgagccaagatcatgccactgcattaca

SEQ ID NO: 457656 - DNA, 517 bp, Homo sapiens
attgggaactattttgaaatgaggattgtattggtttcctattactgctataacaaatccccacaatgtactggcttaaaatagcacaaattgattctcttacagatttgaaggtcagcagtctgaagtcagtcttaccgggctaaaattaagatgttagcagggctggaggctccaagggagaatctgttccttgtctcttccaatttctatttatcatataatgaaatatatttaattattttaataaaaaatagatcctggccagcacagtggctcgtgactgtaatcccagaacyttgggagcccacggtgggtggtggatcatttgaggccaggaattccagaccagcctggccaacatggtgaaactctgtctctactaaaaatacaaaaattcgctgggcgtggtggtgtgcacctgtaatctcagctactcaggaagctgaggcaggagaattgcttgtaccccggagacaaaggtcgtagtgagccaagatcatgccactgcattaca

SEQ ID NO: 457657 - DNA, 517 bp, Homo sapiens
attgggaactattttgaaatgaggattgtattggtttcctattactgctataacaaatccccacaatgtactggcttaaaatagcacaaattgattctcttacagatttgaaggtcagcagtctgaagtcagtcttaccgggctaaaattaagatgttagcagggctggaggctccaagggagaatctgttccttgtctcttccaatttctatttatcatataatgaaatatatttaattattttaataaaaaatagatcctggccagcacagtggctcgtgactgtaatcccagaaccttgggagcccacggtgggtggtggatcatttgaggccaggaattccagaccrgcctggccaacatggtgaaactctgtctctactaaaaatacaaaaattcgctgggcgtggtggtgtgcacctgtaatctcagctactcaggaagctgaggcaggagaattgcttgtaccccggagacaaaggtcgtagtgagccaagatcatgccactgcattaca

SEQ ID NO: 457658 - DNA, 549 bp, Homo sapiens
ttttaagcatgtatttttcccaaagagccaccttacatatacccacaagagctgtgtattcaaaatgtcctaatatctgcctcttttttctccctatacccccgcaaacatatcccactttcttacattttcaactctacttattgatttttatgatattaktcatggaaaggatctcagatattacttagcccaactcctttattttatagaagaataaatgacagcctacagaaggtaaagggcttgcctaagccagtgagcatgccaggctcaatctcaatacactgaggtaaaggttctttttcaaatctatttattcaatagatattagagaaggattaatttatgtgggtcgatacatttttttttctaatattgatttagtacatatatatatttcatatgaaaaaaatatctacaacttaggataattttcccccccaattccaatggatccatgctatttgggagctcagagacactcaatgcaagtataaagtaattgtgctgcatctacaactaagtaggcagggatgctgagagccc

SEQ ID NO: 457659 - DNA, 598 bp, Homo sapiens
actctttcatctgtttttttctttaatattaagttaagaggctttccaattgatttctggactaaaacatgttgattctaattttcgtgctaaaagtggtgatctcagtaaactgaatcaaagcatgygggatgtggagactaccggcctaatggaaaaagagctgtctaggattagaaccccacacctagatttttttagtactctgaaatctgtaatggaagtctgtacttctgagaaccaaatggataagatctctctctttcttttttccaagatggtgtcactctgtcacccaggctggagtgcagtgatgccatcacggctcactgcatgtagccttgatctcctggtctcaagcgatccttcctcccacctcagcctcccaagtaggtgggactatagatgctcatcaccatacccagctaattttttgtatttttcttagagacagggtttcactatgttgctcaggctggtttcaaactcctgatcttaagccatccacctacctcagccttccaaagtgttgggattacagacgtgagccactgcacccagccagataagtttttttttttttttttaagatagtctt

SEQ ID NO: 457660 - DNA, 598 bp, Homo sapiens
actctttcatctgtttttttctttaatattaagttaagaggctttccaattgatttctggactaaaacatgttgattctaattttcgtgctaaaagtggtgatctcagtaaactgaatcaaagcatgcgggatgtggagactaccggcctaatggaaaaagagctgtctaggattagaaccccacacctagatttttttagtactctgaaatctgtaatggaagtctgtacttctgagaaccaaatggataagatctctctctttcttttttccaagatggtgtcactctgtcacccaggctggagtgcagtgrtgccatcacggctcactgcatgtagccttgatctcctggtctcaagcgatccttcctcccacctcagcctcccaagtaggtgggactatagatgctcatcaccatacccagctaattttttgtatttttcttagagacagggtttcactatgttgctcaggctggtttcaaactcctgatcttaagccatccacctacctcagccttccaaagtgttgggattacagacgtgagccactgcacccagccagataagtttttttttttttttttaagatagtctt

SEQ ID NO: 457661 - DNA, 598 bp, Homo sapiens
actctttcatctgtttttttctttaatattaagttaagaggctttccaattgatttctggactaaaacatgttgattctaattttcgtgctaaaagtggtgatctcagtaaactgaatcaaagcatgcgggatgtggagactaccggcctaatggaaaaagagctgtctaggattagaaccccacacctagatttttttagtactctgaaatctgtaatggaagtctgtacttctgagaaccaaatggataagatctctctctttcttttttccaagatggtgtcactctgtcacccaggctggagtgcagtgatgccatcacggctcactgcatgtagccttgatctcctggkctcaagcgatccttcctcccacctcagcctcccaagtaggtgggactatagatgctcatcaccatacccagctaattttttgtatttttcttagagacagggtttcactatgttgctcaggctggtttcaaactcctgatcttaagccatccacctacctcagccttccaaagtgttgggattacagacgtgagccactgcacccagccagataagtttttttttttttttttaagatagtctt

SEQ ID NO: 457662 - DNA, 598 bp, Homo sapiens
actctttcatctgtttttttctttaatattaagttaagaggctttccaattgatttctggactaaaacatgttgattctaattttcgtgctaaaagtggtgatctcagtaaactgaatcaaagcatgcgggatgtggagactaccggcctaatggaaaaagagctgtctaggattagaaccccacacctagatttttttagtactctgaaatctgtaatggaagtctgtacttctgagaaccaaatggataagatctctctctttcttttttccaagatggtgtcactctgtcacccaggctggagtgcagtgatgccatcacggctcactgcatgtagccttgatctcctggtctcaagcgatccttcctcccacctcagcctcccaagtaggtgggactatagatgctcatcaccatacccagctaattttttgtatttttcttagagacagggtttcactatgttgctcaggctggtttcaaactcctgatcttaagccatccacctacctcagccttccaaagtgttgggattacagacrtgagccactgcacccagccagataagtttttttttttttttttaagatagtctt

SEQ ID NO: 457663 - DNA, 562 bp, Homo sapiens
tgcatttaccaagtggcatattaaagttttgaacttaggtctctccaaagtacatgcttttatttcttatttgtttattttttgaaatggagtctcactctgtcacccaggctggagtgcaatggagcaatcttggctcactgcaacctccgcatcagctgttcaagcgattcttctgccccagcctcctgagtagctgggattacaggcattcaccaccatgcctggataatttttgtattttttgtagagacagagtttsgccatgttcgctaagctggtctcaagctcctggcctcaggtgatccactcatcttggcctcccaaagtgctgggattacaggcatgagccaccgtgcccagccatgcttttatttatacagtattattatactttaggttatcaagttcataaagttatttatcatacttcttggtcaaaatcctaacagtgtatataccacttgcatgacgtctttcccaactagaaatgatctttctctcctcagaacttccagaatggtttatactgttctccttttaatgtgctactttaaattgc

SEQ ID NO: 457664 - DNA, 525 bp, Homo sapiens
tgtgttattgttcaagaggaagatcttgtagagtagctttttcttccacatactaattcacgaactctaactccttatttggatcaaatcactactatgataggaaatgggagaactcagattgttaaattacatggrtatgatcctggaaaaattattgtccctctcacaagggcacaaatacagcaagcttttataaatagtcttacttggcaaacccatttagctgactttgtgggtattctcaatcatttccctaaaacaaaattatttcaatttttgaaattaactaattggattctccctaaaataactaaatttaaaccaattgaaggtgctgaaaatgtttttacagatgggtctggtaatggtaaagcttcttattctggctcgaaaggtaaagtttttcagacgccctatacttcagttcaaaaagcagagcttgtagctgtaattgaggtattgactgcttttgatatgcctactaatgtgatttctgattcttcatacgtggttcattccaca

SEQ ID NO: 457665 - DNA, 548 bp, Homo sapiens
gctcagtcaaaaataaaaatgctgactgtcgtcaaagtcttctcctattgtccaaggctctcacttgatctcctactccttgagttcccatgcacatctaattctctatctgagtggactttggacatcctgccttcttctacatagattttgattctggtttatcatcgtttccctggctcttacttggatctcatcttaaatcttgctgtgactttcagggtttggaatatttttacagggtccagatcckcagcactgactttcttgagctgtttgactcactgctgtaaatgttcttcctcccatgtttctagttttgttataggtctcctggctctagattcttccctaccaactgttgcttatagaaccagcagtgaccaggccctatgagggaagaaaagacgctagtaagaggctttgtaggggagatatattgacacaatgaacaagaatcaaaactcaggacaagaaaagtatctggcagagttggtctatggtatgaaatttatgaggagaaatatttcttttaagaggatagttcc

SEQ ID NO: 457666 - DNA, 548 bp, Homo sapiens
gctcagtcaaaaataaaaatgctgactgtcgtcaaagtcttctcctattgtccaaggctctcacttgatctcctactccttgagttcccatgcacatctaattctctatctgagtggactttggacatcctgccttcttctacatagattttgattctggtttatcatcgtttccctggctcttacttggatctcatcttaaatcttgctgtgactttcagggtttggaatatttttacagggtccagatccgcagcactgactttcttgagctgtttgactcrctgctgtaaatgttcttcctcccatgtttctagttttgttataggtctcctggctctagattcttccctaccaactgttgcttatagaaccagcagtgaccaggccctatgagggaagaaaagacgctagtaagaggctttgtaggggagatatattgacacaatgaacaagaatcaaaactcaggacaagaaaagtatctggcagagttggtctatggtatgaaatttatgaggagaaatatttcttttaagaggatagttcc

SEQ ID NO: 457667 - DNA, 548 bp, Homo sapiens
gctcagtcaaaaataaaaatgctgactgtcgtcaaagtcttctcctattgtccaaggctctcacttgatctcctactccttgagttcccatgcacatctaattctctatctgagtggactttggacatcctgccttcttctacatagattttgattctggtttatcatcgtttccctggctcttacttggatctcatcttaaatcttgctgtgactttcagggtttggaatatttttacagggtccagatccgcagcactgactttcttgagctgtttgactcactgctgtaaatgttcttcctcccatgtttctagttttgttataggtctcctggctctagattcttccctaccaactgttgcttatagaaccagcagtgaccaggccctatgagggaagaaaagacgctagtaagaggctttgtaggggagmtatattgacacaatgaacaagaatcaaaactcaggacaagaaaagtatctggcagagttggtctatggtatgaaatttatgaggagaaatatttcttttaagaggatagttcc

SEQ ID NO: 457668 - DNA, 420 bp, Homo sapiens
caatatttattgaggacattttatatgctggcactaggttcctacagtcatggagtttacatttgtttgtgtctctttccaatgggagtagggaggcaaatgaataaacagtgaactggtgaagcagtaataaagcttatgattaaaatgaaacaagttgatgacagtgactacttttttttttttttaactgaatgactaaagacttctctgaggaaggaatgtcctctgaagacctgagatctcctcttggaagctattggtagctttcctccaacagctttatttttaaagtcttggttttygtctgtgtatatctattccagtacacagccatttcctgagagaaagagctcagtcttttcattgtgaatcaccttctcgtagacacaaagcctggcacatagttaatgttgaatt

SEQ ID NO: 457669 - DNA, 595 bp, Homo sapiens
ttccaaacattttctaattaagtgaagcgtttggtcttttgaaacatcttttcaaaaattaaattttagtgggatctgtcaggtactataattggtttcttgacagcagtctgaatatgaaataatataaaacctgactgctkttaggctacagaagaatgatatagtaccatctctctttcataatcaaatgtgtgggatagggcacggaagacaacaagctccatttccacaatctatataataataataaattgtcaaaaaaatctaaacgcaaggcaaagagaacatataatatgaaagaatatattgtaattttcactgtgaaaaattatcccttttagaatctactcagctttcctatcactgaacatgaaagaaaagtattggaaaaactctacattatcagagaaataatcatacatttatatgacatgacctaagtttaaaaaaatgtttgattaaagagttaatttgtctttttcttaaaaataaaatgttcagctggacttgtgagtgtttactctgaagtcatgttagttaaaatttccattagaataaaatgtattaactgcttctcatatattaatagttc

SEQ ID NO: 457670 - DNA, 595 bp, Homo sapiens
ttccaaacattttctaattaagtgaagcgtttggtcttttgaaacatcttttcaaaaattaaattttagtgggatctgtcaggtactataattggtttcttgacagcagtctgaatatgaaataatataaaacctgactgcttttaggctacagaagaatgatatagtaccatctctctttcataatcaaatgtgtgggatagggcacggaagacaacaagctccatttccacaatctatataataataataaattgtcaaaaaaatctaaacgcaaggcaaagagaacatataatatgaaagaatatattgtaattttcactgtgaaaaattatcccttttagaatctactcagctttcctatcactgaacatgaaagaaaagtattggaaaaactctacattatcagagaaataatcatacatttatatgacatgacctaagtttaaaaraatgtttgattaaagagttaatttgtctttttcttaaaaataaaatgttcagctggacttgtgagtgtttactctgaagtcatgttagttaaaatttccattagaataaaatgtattaactgcttctcatatattaatagttc

SEQ ID NO: 457671 - DNA, 595 bp, Homo sapiens
ttccaaacattttctaattaagtgaagcgtttggtcttttgaaacatcttttcaaaaattaaattttagtgggatctgtcaggtactataattggtttcttgacagcagtctgaatatgaaataatataaaacctgactgcttttaggctacagaagaatgatatagtaccatctctctttcataatcaaatgtgtgggatagggcacggaagacaacaagctccatttccacaatctatataataataataaattgtcaaaaaaatctaaacgcaaggcaaagagaacatataatatgaaagaatatattgtaattttcactgtgaaaaattatcccttttagaatctactcagctttcctatcactgaacatgaaagaaaagtattggaaaaactctacattatcagagaaataatcatacatttatatgacatgacctaagtttaaaaaaatgtttgattaaagagttaatttgtctttttcttaaaaataaaatgttcagctggacttstgagtgtttactctgaagtcatgttagttaaaatttccattagaataaaatgtattaactgcttctcatatattaatagttc

SEQ ID NO: 457672 - DNA, 292 bp, Homo sapiens
atttccactgggtggtatctaagtaacacaacgtgctacatatctcaatagctttttgttaaggtgttatgagttgtttgctatataactgaactgcttgtaacaaatggcattttacttgaayttagacagaaagtgacctcagaagaacaagtttgttgaaactagacaataatcaactagggaagaacaaaaccagtctgatcagaaatggctcattaagactaaatgtaaaagacaaagctaaagtaaattttcacatgagtagctattttccaatttttttccagcc

SEQ ID NO: 457673 - DNA, 545 bp, Homo sapiens
gatattgaaaagtttgaatttaataggcaatatagctgtgatgcataaaacagttaacgggagggatggaaggaaaagtaggtttaaattcttacattcatcccaggaggctgattcatgcatcrtgttccacctgaaagcaatccctaggctggactaaaattaaacattcccctgtcctctccccagttacattctttgatgctcaaattatatatgcaatagcacttcagtgagactgatgctgaaactacataaatagagagagagagggaaaaaaaaagctgagtccaccaacttttccatgattacttttaggaacaggcataataactaaaaatatatatgtattttagtataggaatgcacccaataaatagaaattctggcatatctatattgtgaattgtgttttaaaaatgttaacttaaaccagagtaaacatatttgaataaatttaataagtacataaaaccatttaaggatatcatatccaaatctcagcttatcttcaagtttcaaggtgatataagtctgttccggaa

SEQ ID NO: 457674 - DNA, 545 bp, Homo sapiens
gatattgaaaagtttgaatttaataggcaatatagctgtgatgcataaaacagttaacgggagggatggaaggaaaagtaggtttaaattcttacattcatcccaggaggctgattcatgcatcatgttccacctgaaagcaatccctaggctggactaaaattaaacattcccctgtcctctccccagttacattctttgatgctcaaattatatatgcaatagcacttcagtgagactgatgctgaaactacataaatagagagagagagggaaaaaaaaagctgagtccaccaacttttccatgattacttttaggaasaggcataataactaaaaatatatatgtattttagtataggaatgcacccaataaatagaaattctggcatatctatattgtgaattgtgttttaaaaatgttaacttaaaccagagtaaacatatttgaataaatttaataagtacataaaaccatttaaggatatcatatccaaatctcagcttatcttcaagtttcaaggtgatataagtctgttccggaa

SEQ ID NO: 457675 - DNA, 545 bp, Homo sapiens
gatattgaaaagtttgaatttaataggcaatatagctgtgatgcataaaacagttaacgggagggatggaaggaaaagtaggtttaaattcttacattcatcccaggaggctgattcatgcatcatgttccacctgaaagcaatccctaggctggactaaaattaaacattcccctgtcctctccccagttacattctttgatgctcaaattatatatgcaatagcacttcagtgagactgatgctgaaactacataaatagagagagagagggaaaaaaaaagctgagtccaccaacttttccatgattacttttaggaacaggcataataactaaaaatatatatgtattttagtataggaatgcacccaataaatagaaattctggcatatctrtattgtgaattgtgttttaaaaatgttaacttaaaccagagtaaacatatttgaataaatttaataagtacataaaaccatttaaggatatcatatccaaatctcagcttatcttcaagtttcaaggtgatataagtctgttccggaa

SEQ ID NO: 457676 - DNA, 545 bp, Homo sapiens
gatattgaaaagtttgaatttaataggcaatatagctgtgatgcataaaacagttaacgggagggatggaaggaaaagtaggtttaaattcttacattcatcccaggaggctgattcatgcatcatgttccacctgaaagcaatccctaggctggactaaaattaaacattcccctgtcctctccccagttacattctttgatgctcaaattatatatgcaatagcacttcagtgagactgatgctgaaactacataaatagagagagagagggaaaaaaaaagctgagtccaccaacttttccatgattacttttaggaacaggcataataactaaaaatatatatgtattttagtataggaatgcacccaataaatagaaattctggcatatctatattgtgaattgtgttttaaaaatgttaacttaaaccagagtaaacatatttgaataaatttaataagtacatraaaccatttaaggatatcatatccaaatctcagcttatcttcaagtttcaaggtgatataagtctgttccggaa

SEQ ID NO: 457677 - DNA, 491 bp, Homo sapiens
ctgtatgtaagaaacaaatcttatttatacttcatacaaatgtaacattttatttatattttctttatttataccttgattttcttcttttatattttttcttcttttatttyctattttctattaatttatatttgtatattacaaattagctcatttcctgagagacaatatagcatgagtcagagaacgaaagcttccattgaaggttagctcttattatctgaataaataataattaatacttatgccttagatacttttttacatttctttttgacacatcaatgtggtatgaaattctaatatcatttctgataaaggtaaaaaacatttgttaagtgcataaatctcaggcaagtactatgctggatgctttatatacttcattaaattctctgtaaatattttatcaaaaatgccatttgtgtagatgagaaaacagaagataagggagaagtgactgattcaaaagctttgagctaaaagtg

SEQ ID NO: 457678 - DNA, 491 bp, Homo sapiens
ctgtatgtaagaaacaaatcttatttatacttcatacaaatgtaacattttatttatattttctttatttataccttgattttcttcttttatattttttcttcttttatttcctattttctattaatttatatttgtatattacaaattagctcatttcctgagagacaatatagcatgagtcagagaacraaagcttccattgaaggttagctcttattatctgaataaataataattaatacttatgccttagatacttttttacatttctttttgacacatcaatgtggtatgaaattctaatatcatttctgataaaggtaaaaaacatttgttaagtgcataaatctcaggcaagtactatgctggatgctttatatacttcattaaattctctgtaaatattttatcaaaaatgccatttgtgtagatgagaaaacagaagataagggagaagtgactgattcaaaagctttgagctaaaagtg

SEQ ID NO: 457679 - DNA, 491 bp, Homo sapiens
ctgtatgtaagaaacaaatcttatttatacttcatacaaatgtaacattttatttatattttctttatttataccttgattttcttcttttatattttttcttcttttatttcctattttctattaatttatatttgtatattacaaattagctcatttcctgagagacaatatagcatgagtcagagaacgaaagcttccattgaaggttagctcttattatctgaataaataataattaatacttatgccttagatacttttttacatttctttttgacacatcaatgtggtatgaaattctaatatcatttctgataaaggtaaaaaacatttgttaagtgcataaatctcaggcaagtactatgctggatgctttatatacttcrttaaattctctgtaaatattttatcaaaaatgccatttgtgtagatgagaaaacagaagataagggagaagtgactgattcaaaagctttgagctaaaagtg

SEQ ID NO: 457680 - DNA, 455 bp, Homo sapiens
ttccttccccttgaagaagtaccatttgccattctcaattgatatggtttggataagggccaatcccaccacctgcctccaagattagcccccatccaaaccatatggattgagactggccaagytgggccaaacaaagcaaaaaggacatatacttcccaacaaagcttcaaaacttgtagaatttaagccataaatgtttatagccatctttgccatcatgtgaggaaggctgcctaaaatagaataaggaagaaagctaagtcaaaagctgaaaaaaggcaaacttacagaacttttgttgaaagagttaatttcagctaaaattgaggtcaattccagcctgggactttttggttacataagcaataaagttctgtcttcctgaaatctgttagaattttctttccctccttttcagtgagattcaatcctgctaattcagtttaaatctc

SEQ ID NO: 457681 - DNA, 439 bp, Homo sapiens
gaccttcatctgtgtcctccggttgaggggttgcctacataatctgaaagagaagcgtgaaactccagaaggggaaaaaaatgcctcttttgaargggacttcccttgccagtgaggtttcagatcatgttctgtaacagcctactggcctgtgacagggcctccaggaaatgagacaactcagatgcagagtactaagggaaaaatttcagtagtggcttgagaaaactaactgttgagtctgacaaagcaaagttctaagatagtgcgaagtataactagggctgctttgaaaggaaacccagagagcaaggacaggtgtcgcttagttttaaaaaataattagagcttctgtttattgaaagcctaccatgtgtcaggagccttgcatgccttatctcttactcttacatcagatgatatgaaattgacattatta

SEQ ID NO: 457682 - DNA, 439 bp, Homo sapiens
gaccttcatctgtgtcctccggttgaggggttgcctacataatctgaaagagaagcgtgaaactccagaaggggaaaaaaatgcctcttttgaaggggacttcccttgccagtgaggtttcagatcatgttctgtaacagcctactggcctgtgacagggcctccaggaaatgagacaactcagatgcagagtactaarggaaaaatttcagtagtggcttgagaaaactaactgttgagtctgacaaagcaaagttctaagatagtgcgaagtataactagggctgctttgaaaggaaacccagagagcaaggacaggtgtcgcttagttttaaaaaataattagagcttctgtttattgaaagcctaccatgtgtcaggagccttgcatgccttatctcttactcttacatcagatgatatgaaattgacattatta

SEQ ID NO: 457683 - DNA, 645 bp, Homo sapiens
tactttttatattatgtttttctacatggcctttgatgtctttagaaaatgtttgttttaagcaaggatctttttgtgactaaaagcacagaaaaatacaacatagttagtatgttacacaccaaatatacaaaatcctagaaacttatagaaggagataggaaaattgatcttataactaatctgaatattgttctctactttccttaatgtttttaaaggtagtgaaagtaaaactatattgttctgatgatgtagaagggagaatgtttaaaattcctcccagtttcaggaggagatattagaacctgtctttattatactgcattgattagagggaagagggtattacagccaaagtgttacctaaycattagactttcactgtatttgatcccaccttcttactagtttaaataaaatttaagcatgtactaccatatatctatgtttttatttatgaatgacataatcattattaatttattgtgaataatataaatcattcataaaaattcatctttttaaagattatatttattaataatgatacatttatatatttttattattctctttttctgtacctcaatagatcatgtgcaccccactttgggaccactgaccttttagcttgcttgtcat

SEQ ID NO: 457684 - DNA, 657 bp, Homo sapiens
gtattttgtacatgagtcttttacaaataaagtgatttgctcagtcacacaaaggcagaggcaggactcagaactatacttacctgtttccagaatcctagctcatcctacaactggccatttacatagttttaattggttttaaaaagttttttttttacattagaaatcatttctgtaataacattttatcttattgcatcctgttttattacagtgaaaggacctgcttacttattatctccccagctacactggaattcttccacagcttacatgaggtcatcagcctctggccatgtctggaaaacagcaggagctcaactaatgtttattaaactaaactagatctaaaatggatacaaaattaacagttctggctgagcacagtggcacacacctataatcccagcacttagggaggccaatgtgagaagatcacttgaagccaggaatttgacaccagcctgggcaacacggaaagataacaagactctgtctctacaaaaaagtttaaaaattagccaggtgtgatggtgcataccagtcatcccagctacatgggaggctgaggtggaaggatagcttgaatccaggagttaaaggtttcagtgagctatgwtcacccaactacactgcagcctgggcaacacacac

SEQ ID NO: 457685 - DNA, 574 bp, Homo sapiens
tgtcttccttctctctttgtgagtgtcttgatatttggggttttatgtcatatctccttctgctattcatttatttaaacatttttctttgaagaaagaggtagataaatataaattttccttcctgtctcacatacttactattgtagagatagaaagaattttttccttttcttaaattgagaaaagaccctttgttttaagatttttacacagattttacacagtgcaggataggtagcagcaagtgacatattatgagtgcatatgtgtacatacagcttttagcctgaaaatatggaaatcctaactcacatttagacaatttctaaaatgtgtgccgtccagttaaataatataccccaaatgggaaaagcaacagaaaaaaaaaaaaggactcatgaaaatatcaatgctggccgattgcagtggctcacacctgtaattccagcactttgggaggctgaggtgagagaactgcctaagcccaggagtttgagatcagcctgggcaacatrgtgagatcctgcctctatttatttaaaaagaaaatcagtgttaaggaagattgctt

SEQ ID NO: 457686 - DNA, 552 bp, Homo sapiens
tggggaaaaacatgtgtggagagacttagacagatagagtgcttagaaccaaaaatakgtagtttagaattacacaagcatccctgatctcttcacgacaatagggaatttttacctgttctttgtctcacgtagcttatagatctaccagaaattcctggaggtgaactagagcaagacatccttcacttttccttcccggaactgagttcacactttgccaacatgaaattttggtttgctgttggaaagaatctatgttaatggtcccaatcttaacaaaacatgctgtcagaggagtttgggaatagaagggaagaaaagggtgggcccggctgtgtggctcttcagcctgagccctgtggaaaagattaccatctggagactgtgacctcttagcaagtgcaaacatcatttaactctttaaaagcaactagagcatccatcatcattctttaaaacaaacagaaaccaaaaaccaacaaacaaatatgaatcccttacttttgcaggcactgtgctttgcaaagggaataagataagcctctcaag

SEQ ID NO: 457687 - DNA, 610 bp, Homo sapiens
tccagttgatgatcttattgaagcaataaaggatttatattgcatataaacgtattcactatagatagtttaagcagaagagtacttataaccagtagcttataccatgtaattgaagaccaaaaaactagtcttgaatgctaccaaggaaaacccaggaaaaatgcccaaccacatcagttttcctaccaaaaacacctctgctgttgctgctgactttttggctcacatggcactagaaaacagaagtgaaaactccactaaagcacccctgaaagtactacccatgccactgtgcttgctgaaagctacaatttcccccgtgtgtgtatgctacctaaccttgcttacttctgccccaagcagcacattgtggtaggcagaattctgagatgctccccaagattcctgctycctgacgtacacaccctctacagtactctctccttgaatgtgagcaggacatgtgaatacaatgggatgtcactcccataattacattctattatatggcaaaaaagggttttgaaaatataattaaggtgtccagttagttggctgtgaattaatcaagagtgagattatgttggggtgagcctgacttaatcag

SEQ ID NO: 457688 - DNA, 541 bp, Homo sapiens
tttgtttttttagcttgagtatctgctgcaagaatgaaatatagaattaggtaatcttcctggtagggcatattctgtacagttgggttgccaatcaaaatgattgaatcaatacatctagatcatatytgataaagtcagcaagcagacttgtgccttcgagagtcatcttataaatttgacctttaacatgaaaaagcaaattgtgcttctttgatttttgatttcacctagtcataaactagtcagggcctcttatactatttcattaatttcagcacagaattcattttcaaaaatataactctctaataaattcagaaaaagaaaaatatattaataacttaaaagtcatttagggagactatgggcaagttcagagactgcaagttcttggcaactactgggtattccagggagccatctccttcctgaaagataactcaatcatgaaattcactgggcattcatcagcttttaaagatatactgcttcttaaaggttagaatgcagggacgaaaactgactgtattacaccaat

SEQ ID NO: 457689 - DNA, 565 bp, Homo sapiens
atatttgataaagtcagcaagcagacttgtgccttcgagagtcatcttataaatttgacctttaacatgaaaaagcaaattgtgcttctttgatttttgatttcacctagtcataaactagtcagggcctcttatactatttcattaatttcagcacagaattcattttcaaaaatataactctctaataaattcagaaaaagaaaaatatattaataacttaaaagtcatttagggagactatgggcaagttcagagactgcaagttcttggcaactactgggyattccagggagccatctccttcctgaaagataactcaatcatgaaattcactgggcattcatcagcttttaaagatatactgcttcttaaaggttagaatgcagggacgaaaactgactgtattacaccaattctaatctaaagataatgcctaaatgggtcttgaaaatagcttattaactcagcaaaggtgaaccctagaaaaaagctcaaaaatgaattcaatgggctttttctttttacagatttataattcttctttactagtggaatgataaat

SEQ ID NO: 457690 - DNA, 565 bp, Homo sapiens
atatttgataaagtcagcaagcagacttgtgccttcgagagtcatcttataaatttgacctttaacatgaaaaagcaaattgtgcttctttgatttttgatttcacctagtcataaactagtcagggcctcttatactatttcattaatttcagcacagaattcattttcaaaaatataactctctaataaattcagaaaaagaaaaatatattaataacttaaaagtcatttagggagactatgggcaagttcagagactgcaagttcttggcaactactgggtattccagggagccatctccttcctraaagataactcaatcatgaaattcactgggcattcatcagcttttaaagatatactgcttcttaaaggttagaatgcagggacgaaaactgactgtattacaccaattctaatctaaagataatgcctaaatgggtcttgaaaatagcttattaactcagcaaaggtgaaccctagaaaaaagctcaaaaatgaattcaatgggctttttctttttacagatttataattcttctttactagtggaatgataaat

SEQ ID NO: 457691 - DNA, 536 bp, Homo sapiens
tctatttgcttcttgagaagtgttgctttgaaagtaaagtttttgcgaccttatttgtctgaaaatattwttctcctccctttaaacttccttgctaatgttgcacagaattccaggttaaaaattattttcagttcgtaattccaaagtacttgtcaaagccaaaataaaaatgtggaaacaaatcttgaaatttaatgttttagtttggaagaaagaattgcatttcagggcatacacacagaccaagtggtctcaggtttgtccaaagaacagagagaagattagaggttttacaaaaatagaaatgttatgtatcactctcgaagaaagttcattggcattaattagggattgaggaggtagctagcttcaactggtaagcaatggtggtgggcaaaattattcctgaatttgcagcaagttatctcaaaagctataggtaaaactggtttcaggttgcaatagtttaaacagtcaggcttgcagagaagtactttcttggagcaatattttgtaccctgagtgatttttcc

SEQ ID NO: 457692 - DNA, 595 bp, Homo sapiens
gccacctaccatgatatttaagctattgtgataactataaaactgtttgagaatggaggagaatagtcaaggaagacaggaaaaatgtacatagtactagcctggttgaaataagggtgatcaatatttcttcttaattgcttaaatgttgaaacagttatatagttcaatgaagggtatgatatgttgagatataaccttaatmcttaaagagcttggcttataacataattgcagggagatagtaagtacagttttgcatggaaaaataactgatgccctaggatttctgtcatcagagttgaaggaataccatggacaataagaatttcagttccaacgtttttcttctatgctggcatttctatcttctgagatattgacaggatggtcaattcagagtccatcagacacaggaaacatattacatgaagaatagcatccctagtgcattactccgtcatttccagctcatttagtttccatctacaaatccatttggtgcttctattaaacagtgactgattttccaatttaaaccacattcattcatattttatttagttttgctttgttataaaaatactctaggata

SEQ ID NO: 457693 - DNA, 566 bp, Homo sapiens
ggctgctttcatatgaaaacagcagaattgtgtagctatgactgagactgggtggctcacgatgtctgaaatacttcctctctaaccatgtacagtaagagcttggtgatctctgctctagaataatgaaatcagtgaggaatttcttttctgcaggattgcattgatttggatatcttcaaaggaaatgttcaacttaatcgaacttggaagcwtttccccaccaaactctagaatataagaataaatgtagttttctctgttggttgggagtttcttgttaataaaaagaaaggaccttagaatttcaatctggagggaacatctaagacactgtaagataacattataccttttgggatgtgttgaaaggcagaaatcagaagaatgtgagttttgctagaataatttctcaactgaaatattaaaaaaatctgtgccatagatatctacataaggttcagaattatgattttcaatttaggagaaaaaaactagatgcttctgtgaataaaaatatttcacagtttggttatgcatcaatgtctttgaatgactattggctt

SEQ ID NO: 457694 - DNA, 566 bp, Homo sapiens
ggctgctttcatatgaaaacagcagaattgtgtagctatgactgagactgggtggctcacgatgtctgaaatacttcctctctaaccatgtacagtaagagcttggtgatctctgctctagaataatgaaatcagtgaggaatttcttttctgcaggattgcattgatttggatatcttcaaaggaaatgttcaacttaatcgaacttggaagcttttccccaccaaactctagaatataagaataaatgtagttttctctgttggttgggagtttcttgttaataaaaagaaaggaccttagaatttcaatctggagggaacatctaagacactgtaagataacattataccttttgggatgtgttgaaaggcagaaatcagaagaatrtgagttttgctagaataatttctcaactgaaatattaaaaaaatctgtgccatagatatctacataaggttcagaattatgattttcaatttaggagaaaaaaactagatgcttctgtgaataaaaatatttcacagtttggttatgcatcaatgtctttgaatgactattggctt

SEQ ID NO: 457695 - DNA, 566 bp, Homo sapiens
ggctgctttcatatgaaaacagcagaattgtgtagctatgactgagactgggtggctcacgatgtctgaaatacttcctctctaaccatgtacagtaagagcttggtgatctctgctctagaataatgaaatcagtgaggaatttcttttctgcaggattgcattgatttggatatcttcaaaggaaatgttcaacttaatcgaacttggaagcttttccccaccaaactctagaatataagaataaatgtagttttctctgttggttgggagtttcttgttaataaaaagaaaggaccttagaatttcaatctggagggaacatctaagacactgtaagataacattataccttttgggatgtgttgaaaggcagaaatcagaagaatgtgagttttgctagaataatttctcaactgaaatattaaaaaaatctgtgccatagakatctacataaggttcagaattatgattttcaatttaggagaaaaaaactagatgcttctgtgaataaaaatatttcacagtttggttatgcatcaatgtctttgaatgactattggctt

SEQ ID NO: 457696 - DNA, 566 bp, Homo sapiens
ggctgctttcatatgaaaacagcagaattgtgtagctatgactgagactgggtggctcacgatgtctgaaatacttcctctctaaccatgtacagtaagagcttggtgatctctgctctagaataatgaaatcagtgaggaatttcttttctgcaggattgcattgatttggatatcttcaaaggaaatgttcaacttaatcgaacttggaagcttttccccaccaaactctagaatataagaataaatgtagttttctctgttggttgggagtttcttgttaataaaaagaaaggaccttagaatttcaatctggagggaacatctaagacactgtaagataacattataccttttgggatgtgttgaaaggcagaaatcagaagaatgtgagttttgctagaataatttctcaactgaaatattaaaaaaatctgtgccatagatatctayataaggttcagaattatgattttcaatttaggagaaaaaaactagatgcttctgtgaataaaaatatttcacagtttggttatgcatcaatgtctttgaatgactattggctt

SEQ ID NO: 457697 - DNA, 502 bp, Homo sapiens
ctcaatatgtattgtattgctcccctaatcatataggcattggactagggacccgggtggtataagcatatataggcctcgattctttcattaaagatattgggagacaattttccacagcttgttcatgattctgtatattktgctaacagaagcagtaaccacctttcgtctcagactatcttttcaaggatgtttgtagagcgaacgacaattggaagatgcagagaccagaggtcaagtttgctgattgtccagtataataaatatatcgtctccctctggagcaaaacaagctgaaaggcttatttacaaaaccttatatgagattcagatctcctacatttggggcttgtcagctgtaacacaaagccccagagtgcacaatatccaactgggcctctcttttttaatcccactggacttgaggaacaagaagaatcaacaaaacatgaagtccatgttgtctgcaatgccgtatgtattaaggccattcgtctct

SEQ ID NO: 457698 - DNA, 502 bp, Homo sapiens
ctcaatatgtattgtattgctcccctaatcatataggcattggactagggacccgggtggtataagcatatataggcctcgattctttcattaaagatattgggagacaattttccacagcttgttcatgattctgtatattgtgctaacagaagcagtaaccacctttcgtctcagactatcttttcaaggatgtttgtagagcgaacgacaattggaagatgcagagaccagaggtcaagtttgctgattgtccagtataataaatatatcgtctccctctggagcaaaacaagctgaaaggcttatttacaaaaccttatatgagattcagatctcctacatttggggcttgtcagctgtaacacaaagccccagagtgcacaatatccaactgggcctctcttttttaatcccaytggacttgaggaacaagaagaatcaacaaaacatgaagtccatgttgtctgcaatgccgtatgtattaaggccattcgtctct

SEQ ID NO: 457699 - DNA, 623 bp, Homo sapiens
ctttttttgccctgggaagttcagttgttaaacatttatcatcacgccactgaagtagagaagcccttcyttatctgtggggaattaatcccaagacccctagtagatgtctgaaactgcaggcagtactgaaccttatatatactattttttcctccataggaaatatagtgtatatatacacatacctatatatatacataaatgtatacactaatgtatgcatatacatattgggaagtttaatttgtaaattaggcatagtaagagagtaacaacagctagtaataaaatagaattataacaatatattgtaataaatgtaatgtgaatgtgctcactctctctatgtctctgtctttcaaaatatcttattgtactgtgttcacctatgtacataccatggttgattgcaggttaactgaaatcatgcaagcaaaccaccagtaaggattgactactgtaatgtattccaggactggtaaatggaagaaatgtccaccttccagagcagctggtttcagaaaatagtgagaccatggctctgcaggaacattccttaggtgttaatacccctaatttttccctttagtatatgcaatgtaaaaatcacaaattggccc

SEQ ID NO: 457700 - DNA, 623 bp, Homo sapiens
ctttttttgccctgggaagttcagttgttaaacatttatcatcacgccactgaagtagagaagcccttccttatctgtggggaattaatcccaagacccctagtagatgtctgaaactgcaggcagtactgaaccttatatatactattttttcctccataggaaatatagtgtatatatacacatacctatatatatacataaatgtatacactaatgtatgcatatacatattgggaagtttaatttgtaaattaggcatagtaagagagtaacaacagctagtaataaaatagaattataacaatatattgtaataaatgtaatgtgaatgtgctcactctctctatgtctctgtctttcaaaatatcttattgtactgtgttcacctatgtacrtaccatggttgattgcaggttaactgaaatcatgcaagcaaaccaccagtaaggattgactactgtaatgtattccaggactggtaaatggaagaaatgtccaccttccagagcagctggtttcagaaaatagtgagaccatggctctgcaggaacattccttaggtgttaatacccctaatttttccctttagtatatgcaatgtaaaaatcacaaattggccc

SEQ ID NO: 457701 - DNA, 441 bp, Homo sapiens
ttctcagcagttctcagcactgtatttatcagtgcacatttatccaaataaaaaaggtttagacctccacatacagttaatctscaatgattgtcaaatgtattctaattgatttaatgcccattaaaattctattttgaaacataaaaaacccagacatgtgatagataaatgatcagtcatctagcacaaccaaaaaaaccccacattgaatacaaattattcaaactgaagtggtatctcaacaaaatctttagaccatctctgtctgtgaattagataagaagaaaaatcaagattttaaaatgtattttcatagtcaaattggtaatatgcttcaaaagcctattactagttgctggaaaataatattaagacaagcccaagtatttatattacttttgcaatacttaaattaaaaaaaaaacacaaaagtgtcca

SEQ ID NO: 457702 - DNA, 441 bp, Homo sapiens
ttctcagcagttctcagcactgtatttatcagtgcacatttatccaaataaaaaaggtttagacctccacatacagttaatctgcaatgattgtcaaatgtattctaattgatttaatgcccattaaaattctattttgaaacataaaaaacccagacatgtgatagataaatgatcagtcatctagcacaaccaaaaaaaccccacaytgaatacaaattattcaaactgaagtggtatctcaacaaaatctttagaccatctctgtctgtgaattagataagaagaaaaatcaagattttaaaatgtattttcatagtcaaattggtaatatgcttcaaaagcctattactagttgctggaaaataatattaagacaagcccaagtatttatattacttttgcaatacttaaattaaaaaaaaaacacaaaagtgtcca

SEQ ID NO: 457703 - DNA, 559 bp, Homo sapiens
gcagacatgggacctgctcctttttttcagtgttgcaattttccccaatatttcctcctccctgagtcttctgccttgagcccaggtttccttaaatataaagcggaagtgcttctatataactgaacccagttttttgatttcctgtggtaagtctgttttaaaatgactgtcatacaatggattttgctstttctatgtcttgtgtatttggttgaaaccctaactagttcttttaatttcttcctttcaaacactctgatgcaaatgaataaaattaaaacccagtgatctcaagatgggagttgggtgggagagggtaaattatttgaaatcaacaggaaacctcattctcgatgtcctgaggttaatgttcacatctgttaagtagctgaatatgtcttgagcaagtcacttggtctctgtaggcattggtgttttcatctgagaaggtgggatgattacaactttgaaagttgctttacatttcaatgactgcatcaggacataatatgtcctatttaaaggctatggtagctttttaccagtgttttcacat

SEQ ID NO: 457704 - DNA, 559 bp, Homo sapiens
gcagacatgggacctgctcctttttttcagtgttgcaattttccccaatatttcctcctccctgagtcttctgccttgagcccaggtttccttaaatataaagcggaagtgcttctatataactgaacccagttttttgatttcctgtggtaagtctgttttaaaatgactgtcatacaatggattttgctgtttctatgtcttgtgtatttggttgaaaccctaactagttcttttaatttcttcctttcaaacactctgatgcaaatgaataaaattaaaacccagtgatctcaagatgggagttgggtgggagagggtaaattatttgaaatcaacaggaaacctcattctygatgtcctgaggttaatgttcacatctgttaagtagctgaatatgtcttgagcaagtcacttggtctctgtaggcattggtgttttcatctgagaaggtgggatgattacaactttgaaagttgctttacatttcaatgactgcatcaggacataatatgtcctatttaaaggctatggtagctttttaccagtgttttcacat

SEQ ID NO: 457705 - DNA, 585 bp, Homo sapiens
gtacatctattaatatgatttatataaaacacttcaatccattatcgaagtggtcttacttggttccattatgaaaatgaaattagtactttctacatgtgaggctgatgccgaagttacatcagttataagataaaatcagcrctgtagatactgtcagaaagaaggatcttagaacagaaactcagctgagaaaattttattaggaattccatgattgtgactttctgtatatctagggctacctacaagaattggaatataatctacagccttttcaaagtaatttagagcaacagctttacagtaagatagagaatggaattaataaattagtctcttttgtactgcaggcattgcagaagcttggttaaagtaaaatgtcacccctttgtgatacctcacaaatcatcccctgcacctgccaaaatttggagtcatttgcaacatgctttcacacatcacaagataatcacttattttctttttccctgaaagttcagagtaattgaaatgttggttccttgtatctctgaaaatatggtgagaattttgtttctggccatttggggactaacattctaa

SEQ ID NO: 457706 - DNA, 466 bp, Homo sapiens
tggtcccttctcagaaatctcaaggtttcctggagctttaatcttctgctttggtgtttacattcataaccttacagtagaggatttctgcgcaygttaacaaatctcaccgctgagcagcaaacaaacgttcattagatggttgtctttgcaacaattggtcaaacaaagagcaccttcatggcaggtgggcgtctatagactaacaggaaatgaatgggcactgtaagaacacttctgtgcatttctgccaaaaacagataaaagttgagcactagaagacaaatactcaactcaacttcacgaactccgctttctttaattgaagcaaattgggctattatattaaccacatttctagttcctggaagcttgatgctttaacatctgccctacacatgtatgctggacataacttgttctagacaacagaataatacatatgacttgctttgctttgttcttt

SEQ ID NO: 457707 - DNA, 558 bp, Homo sapiens
  misc_feature (1)...(558): n = A,T,C or G
ctgctgcttcaaagaggcaggctgggctttacctgcctgccttggagaaaagcagcctggtttgaaaggggaagtggcatttcaggcacttaattagacccgggacaagaatggaagytggctctcaggtcaggccaggggggattgttgggggattaacactcaggtaaacccatcaaggctcaccggccccctggcaggaggcagcaagagaatcccgggcagcagcggaaaggctgggccggctgggcccacagcctgggaatcacattccagagtggggtagtgggggtgtgcagagccggtagagggtgggaggggaagggtgggccactggctgcctccacccttaacctcaactggcccccttctcttccccgcccccccattgccccaggaaggtagagttagaactaccattttattcctgcagcaaaatgtattgagaacccactatgtgccaggcgctattcttaggagcacaggcagcaatagcgcaaggtccnggctgcacagagctcacacactgggggaagagcaggttcaccaatacggaaa

SEQ ID NO: 457708 - DNA, 508 bp, Homo sapiens
gagccaccacacccagcctgtaagttctttatattgaaggaatcacatattattgtgaagaaaaaaaaaaaacctcaaacactaaaagaatatagaaagtaaaaaagcttgtcagcctctgcttcctactctccagagttaaatacaatgaataacttgggagtctgatcttctagatgtttctccacagagaaacggcacatctatacatatgtttattttgacawagtgggattgtgcaacagacactgctctggacttaatcagttaataatgtgtccaggacatcattttccggaggctggttccttctcgacacctcgccagtgatgggttttacccattgttttatcaccttcaacctgatggtagctgagccctgggctcatcacttccacctgttaactgaggagccattgctgtccccattgtacagatgataagactgagggccagagaagctggatgatttcttcaggtctcctgctagaaagcagatgaactggaa

SEQ ID NO: 457709 - DNA, 557 bp, Homo sapiens
aattttctaacaacttttttcacatatttattttaaaacattcatttaaatatgccattatagagccaaaatatatccaaggcactgttctaggtgatgtgggatatgaggtagatagagatatacagatgttagcctgaaaaagcataaaacttttagaaattattatacataaatataattatgatagaaaataataagttctataaaaactgttcaaatataatggtatgtttgtacaaggaagcctasagcctcaaaaggtgagagtgtctacaatataatataaaaaataagacatcaagcctgtaacaatagggaaatatttggatatgaggaggccctttcatgcagggttatggcatgaacatggtacgggctgcatatagtatatgcgggtaacaagaagtaatgcagttgggttggggctcaaatatataaggtgaagtagagaataagagagaaaatttgtttgagtatcagattacaaaggatttaaagatcaaaaacatagattgagattttattttgttatacaaggaggaacactgtaggtg

SEQ ID NO: 457710 - DNA, 528 bp, Homo sapiens
gagatattatacgattggaaaatcccagaaccacagacctttagaatcaaagaccaagacctaaaatgtatgaagccatacaatgtaagcagtactcagggggctttgaggtcataactcaaagacctcagggtccctgattgactggacrttgtgcttttgtttgaacacttctggtaatgggaatctcatcacctcacaaagcatccctgattgtcagtaaatagggatcccagaaatgtaagggtcttagtaattgttgagttccatccccttatttgcagacaggaaacgaagtctcaggaaaggaaattgacctgttgaaggtgacacagctgaccaaaggcaggaaccctgagctctcagtcctgagctctttcctggagaccttcatgttggactttagatgctcctctcttgaccctggccctgggttaaccctttggggatgctcagagcagctgtatctttcaagtctccacttctccaggctaaatgttcttgatttattttattttatatttattt

SEQ ID NO: 457711 - DNA, 559 bp, Homo sapiens
tttggggcagtagtgtcctaaaattgtcccaaaacgaaattaggacttcgagggtggttagaagcaaggagagtcacccaagggacaaccaggtgcccttggaggcagcagccaacagcatatgtcacccgtccctcggctgtgcctcagctgttccctgggacagttccacggctctagccagagctgtaaatgtagtaatcagccaggcctttctagcccccaacaaactggatcattcatgactaccaggagcgtagaactgagcagatgagccacatcacacccgttattggcctctccaagacgcaggcaggcctgcagcccaagcttcggcctgagggacagatagtcattggtcccaagatctctaaggctctaccagcctggtggctctgtctgcagtctcatcttcatctctctccctccccttcttagcagcattcgaatcccccaggtgtgtcctcatccctcktagtgtggcaggagttgggggacacagcatctggggagactcttgcagctgtgactcctctatccatctctgcaggagatttcc

SEQ ID NO: 457712 - DNA, 534 bp, Homo sapiens
aagaaacatccattaaaagagcttaatttctgtccctgaaagtatatggttatccaatatgtattagtctccacagatagcgaaactgtctccattctcttctatgttctgctttataaattgcttttgatttggaattacatacaggtggcttttttgatttaagtctggttttaatgtttaaaatctttttgcactgtgtttaaggggtttaatacttttgtttctacaaagtttgwaagaaaaaattgtgcctttcttctacccatgccttcttgaaaggggagccatttttacttcatcaacctaattcttctagtagtctcatttgcacttctaaataacatgcctctattactattgtggaggttttcacttttaggtattatcaaataatagatattgagaataacttcacttccacacataccctttctactcattggaaacatcttttcttctttcttcatcagtattattgtaatttcagtttttgaatatttgattttatattattttgactatacatgctac

SEQ ID NO: 457713 - DNA, 616 bp, Homo sapiens
tgcatttatgacttttgatgtaaacaaactgacaaggataaacatttcttctcctggatcaccagtcactgcygtaactgacgacttcaagcagggccaacgccacacgcttctagtgtgggcccccaatcactaccaggtggtaagtgtgtgaagacctacagctgactctttgctatttgtgatactggaggccaaaatttttatggtgtgactttgttttactcccatatagtgttatattagatcatcctcaatttcttccttcttctggaacacaagacttcaagaacacctgtcagacttccaataaaagtatgactggtggatagtaaaagttaatattaattgaaatttctaaaaagacaacttctggacattgtatggggtctgtgcacagatgtgcatgcgtgtgtgtacagaagtcacacagagtacatatgtgaattctcagggactttttcagataatttaaaatatataattaattgcactgaatttaaaaatttgcactaaatagtcagaaaattagagcagtctctgaaaaagtataataagcctaccaggtaaaagcaataaaatactatgcatacaaaatatttgatgagaaaataca

SEQ ID NO: 457714 - DNA, 601 bp, Homo sapiens
agggatccacagtgagacacattgtagttaaatggttgaaacctgaacacaaagagagaattttgaaagcagcaagagagaaactaagagtcaagtacaaagaatcttcaataagattaacagatgatttctcttcaggaaccatatgagccagaggcagktggatgacgaatttaaagtcatgaaagaaaaaaactgtcaaccaagaattccacatgtggcaaaatgatacttcaagaatacaagtttaggctgggcgaggtggctcatgcctgtaatcctagcactttgggaggccaaggcaggtggatcacttgaggtcaggagttcaagatcagtctgggcaacatggtgaaaccccatctctacttaaaatacaaaaattagccagacgtgctggtgtatgcctgtaatcccagcgactcggtaggctgaggcaggagaattacttgaacccaagaggaagaggttgcagtgagccaagattgcaccactgcactccagcctgggcaacagagtgaaactctatctcgaaaaaaaaaaaaacataaaaagaatgcaagtttatctggaaataaaattgttccagatacacaaatag

SEQ ID NO: 457715 - DNA, 601 bp, Homo sapiens
agggatccacagtgagacacattgtagttaaatggttgaaacctgaacacaaagagagaattttgaaagcagcaagagagaaactaagagtcaagtacaaagaatcttcaataagattaacagatgatttctcttcaggaaccatatgagccagaggcaggtggatgacgaawttaaagtcatgaaagaaaaaaactgtcaaccaagaattccacatgtggcaaaatgatacttcaagaatacaagtttaggctgggcgaggtggctcatgcctgtaatcctagcactttgggaggccaaggcaggtggatcacttgaggtcaggagttcaagatcagtctgggcaacatggtgaaaccccatctctacttaaaatacaaaaattagccagacgtgctggtgtatgcctgtaatcccagcgactcggtaggctgaggcaggagaattacttgaacccaagaggaagaggttgcagtgagccaagattgcaccactgcactccagcctgggcaacagagtgaaactctatctcgaaaaaaaaaaaaacataaaaagaatgcaagtttatctggaaataaaattgttccagatacacaaatag

SEQ ID NO: 457716 - DNA, 601 bp, Homo sapiens
agggatccacagtgagacacattgtagttaaatggttgaaacctgaacacaaagagagaattttgaaagcagcaagagagaaactaagagtcaagtacaaagaatcttcaataagattaacagatgatttctcttcaggaaccatatgagccagaggcaggtggatgacgaatttaaagtcatgaaagaaaaaaactgtcaaccaagaattccacatgtggcaaaatgatacttcaagaatacaagtttaggctgggcgaggtggctcatgcctgtaatcctagcactttgggaggccaaggcaggtggatcacttgaggtcaggagttcaagatcagtctgggcaacatggtgaaaccccatctctacttaaaatacaaaaattagccagacgtgctggtgtatgcctgtaatcccagcgactcggtaggctgaggcaggagaattacttgaacccaagaggaagaggttgcagtgagccaagattgcaccactgcactccagcctgggcaacagagtgaaactctrtctcgaaaaaaaaaaaaacataaaaagaatgcaagtttatctggaaataaaattgttccagatacacaaatag

SEQ ID NO: 457717 - DNA, 382 bp, Homo sapiens
actcctgtttatggggaaaatatcctgggccagattaattaacatagtcattatcttggcagttttaaatgctaacacaagatgagaaagaaagaggaaatctggcccaatcaggactgggacgtcaatgtgacttagcattgcaagtagcggcttttgcttcaggaattaaaagtgcatyctgcaagtgctactttagtttcacttttcatcaaaggaaaaatattttccatgtgagctattttatgtacttttcctattccttccatccaggaagaagtatccgtcagaaagaaagtggtcatgtaaatcttctccttagaacgttttttaaaaaatactatgataaaaaaaaaacctgacttgttcatatcatggtcct

SEQ ID NO: 457718 - DNA, 615 bp, Homo sapiens
ccttggcaccctgatgtccttgtctcagaattccagggaggtcattagggatagagggggagaggtcggagccacctgaagatgcatccacatcaacccttgtaggaaccacagacaaggccagtactgtagrtgcaggaggacggtttctgatgtgcttcattttgaggtgccctggacagggcggtattggggtacatgagcaccccaggctggctgatcatctggcaccttttcaaggagataccacttaaacatttgctcacacttattcagaagagaactggcttagagtacaggaggggaaggtcactgcactgacagcttgatttcactgtgtccagagcagttcagctccggcactgaagttccaaatccctctttgcaaaacaagagcccatgtacacttaaaagcagttcagatggtacattttatgttacctgtatcttaccacaattaaaaataaaaaatgtaaaaaagaatagaagatcccagcagttacttggacccaccctccttagaaggcagcgaatcaaccatccacgatcacacccgtgtgcccctgtggcgtaccacggcccctcctcgggggctcccacccactgagtcctctc

SEQ ID NO: 457719 - DNA, 598 bp, Homo sapiens
caattcgttttagtatcaagtagatagatgataaataggtagatgaaataattttggctactaaccagctttagaataaaaatatattctttttattattttgatcaggtttaaatttgcaccaaaaacaagttatgattttttaattgaaatttcattattgactagtatrcataaatgtaggtttaatagatgattgcagtggctagtaaggagcagctaattctttcacctggcatagctttttcttgagtaattattttataattagtactaatttatagtaatgaaatgtcttcctagtgaaggaaatactgaataatgtattgacagatagcaaatgttgaataaatgattgagtataatttgaaagcaataattaaattcatgttagtttgacagtgaaatacatcgtgtacaaaattttcggaatacatggtgttttttacggaaaaattatgcatttgtattccaaacacagagatagaaatactccaagtatatgataaaaacagtatatttttctgctgatgtaatatatgtttaggatctatgaaactaggtgaacatttcaaacattcaatctagttaacgttat

SEQ ID NO: 457720 - DNA, 598 bp, Homo sapiens
caattcgttttagtatcaagtagatagatgataaataggtagatgaaataattttggctactaaccagctttagaataaaaatatattctttttattattttgatcaggtttaaatttgcaccaaaaacaagttatgattttttaattgaaatttcattattgactagtatacataaatgtaggtttaatagatgattgcagtggctagtaaggagcagctaattctttcacctggcatagctttttcttgagtaattattttataattagtactaatttatrgtaatgaaatgtcttcctagtgaaggaaatactgaataatgtattgacagatagcaaatgttgaataaatgattgagtataatttgaaagcaataattaaattcatgttagtttgacagtgaaatacatcgtgtacaaaattttcggaatacatggtgttttttacggaaaaattatgcatttgtattccaaacacagagatagaaatactccaagtatatgataaaaacagtatatttttctgctgatgtaatatatgtttaggatctatgaaactaggtgaacatttcaaacattcaatctagttaacgttat

SEQ ID NO: 457721 - DNA, 598 bp, Homo sapiens
tacttttgtatctctgatatctagcacagcgctttttataaggattttctgaactcaactgcaatcaggctagaaacacaaccattttgtatgttcactctcacatacaaacgtgttcacatgtacacrcaaacagagtcagggctacttaggttaaacacaacacatatgaagagaccaaaatattttctcaaattaaaagttgaatatatgtgacaacgatgcagctcccacaaaacttgatttgtgtttcgactgccttatttaaaaattatatgacactttcaactctaaaattccttgtctgcacctgaaacattgcgtttagttcttggtaaacagacacaaaaagagccatagtgattagtgttgaaatatcctcatacaatccacggtaccaattaacctctctaaccctcagtctcctcacctgcaaaatgaggaaattaggcctctgagaaccttcttggatctcagatgtttttaattaaatgccatgtcaagataaggaataaagaacagaaggagtagagtgagaggaaataaaacaaaacttgcttacctctcaatgtgtgcttcatgcacctattaaaacaca

SEQ ID NO: 457722 - DNA, 603 bp, Homo sapiens
ttagtgttgaaatatcctcatacaatccacggtaccaattaacctctctaaccctcagtctcctcacctgcaaaatgaggaaattaggcctctgagaaccttcttggatctcagatgtttttaattaaatgccatgtcaagataaggaataaagaacagaaggagtagagtgagaggaaataaaacaaaacttgcttacctctcaatgtgtgcttcatgcacctattaaaacacagatacatcattttgattaaaacaawtttatgaatctaaacttttcaaaatgcgtgagtgtttatatgacattacagaaatacaggagaaggtgaatatgttttattccttataaatccaataggtattaagtaacaatgcctataaacattaataatctttgttttatttttctatccccaagatagaaagagttgctttaagataatgttgaatctgaaaggaatttaattccttatgtggccattcccagaaaatcaatgggataatgctgagatgtcagtgcactttcattttgttagtcatgtcatgtattaaaatcttcatattattgtatgtgaagttctgagagccattaaaaatatatga

SEQ ID NO: 457723 - DNA, 603 bp, Homo sapiens
ttagtgttgaaatatcctcatacaatccacggtaccaattaacctctctaaccctcagtctcctcacctgcaaaatgaggaaattaggcctctgagaaccttcttggatctcagatgtttttaattaaatgccatgtcaagataaggaataaagaacagaaggagtagagtgagaggaaataaaacaaaacttgcttacctctcaatgtgtgcttcatgcacctattaaaacacagatacatcattttgattaaaacaaatttatgaatctaaacttttcaaaatgcgtgagtgtttatatgacattacagaaatacaggagaaggtgaatatgttttattcyttataaatccaataggtattaagtaacaatgcctataaacattaataatctttgttttatttttctatccccaagatagaaagagttgctttaagataatgttgaatctgaaaggaatttaattccttatgtggccattcccagaaaatcaatgggataatgctgagatgtcagtgcactttcattttgttagtcatgtcatgtattaaaatcttcatattattgtatgtgaagttctgagagccattaaaaatatatga

SEQ ID NO: 457724 - DNA, 629 bp, Homo sapiens
gaatatttaaaagtgttagcaaatttgttttaaaaaatgttagatttaagcagttaacctctctagcagtacactaaatcattaaagatatcaaactattatttaatggaataggagatctgttagaaattttaaaaatcaacgagtccaatcacaaatttaaagaaaatgagaattatattaaagaacaratacgattcttaattttatctcttaagaactattctcataagatttcctttttctccatactgcatttccttacatacttaggatttggagcttaatccattgggaaattttgatagttgtgatgtctgttagttgtataacagcaggaatttatgtctgatgtatcccttgacacatacttctttttgtgggcaagggagttgcaaaacaggtaaatggatttgcagaatgggaacagatagtagtggactcattatcaggaaccaaaaactgtaatgcattgtaattttaaaaagtcatcattgttttgacccagataattcttataagattatgctgcctttaggaaatttttttccttactatgatatggcagagacggctcattgatttcctaatgcctattcccgtttcttaagcacagtatcccctacact

SEQ ID NO: 457725 - DNA, 596 bp, Homo sapiens
agtgatgtggccggaggtgaagaatcaaaacttggtgcatgtagatgataatttctgcaaaaggactgtaagagattgctcaggatagggcacggcacatcaacaaactggagaaggtcaggcatgaccagcctcttattaatataaacaaaaatctcttttttaggtttcatggaagaactgcatatttaatctttaataataataaatgtgctcttttaaacatttttactgaagacccttgatgttttcattctaccatgacatacacaccactatcttcttttgtccggagcccaggtgaaatctaaccacccatgagtaaaatagtgaatttaggaaatactgtcttcaccttctatatccattactttcctgactaatttccattcactggtatccttctttgaccccctgtctacctagaatgactacaaagtaacaarcttgggaaaaagctgatacttttagtcagataagtcttccaatgccttttaaatgatactgcaaagaaagctgtagagtttccctgggcttaaagccagctctgctggcatccttcctagactattttatctaaagacattctctcattg

SEQ ID NO: 457726 - DNA, 467 bp, Homo sapiens
aatctgagataatgagaaatagtggattttaaagaatgaatgagagtacataatttatgtgcaatagtatatacatgttcataaacacattttaattatgactgtgagacacatacactcatcttatattcctttcaacaggtttaaactctcaatttcttgccaaaagtggtagctgggaaatgttgtttttaaaaagtacaatatamaaaatgttgttttaagaaactataacgcaacttgttttgctttaagtaactacgttgatagaattttacaaatcttaggaattttaaatagaaaaagtcttagaagttcgatgatgtatttcagtattaaaagttattttcgttatggttagtaatacgcttgaaatagagctatacaagatcatggttaataatatatgcatagtaatagttttatgtcaagatattttagagacaaaatattgctaatataactaa

SEQ ID NO: 457727 - DNA, 628 bp, Homo sapiens
catacataagaacaaaaaaagctaaagggaaaaagaagcagaattctcatctgaaactatgtaagcttgataccatttgagacatttttaaaaggttgaaagaaaaaaatcatcaatttgtaattatatatccaatcaaaatatatttcagaaaaagtctacatacaaacaaaacagggaattcattaaaaggaattcttgaggcagaaggaatatgataccagagcacataattgtatctatataagaaaatgaaaaactggaaaagttagaaataaagataaatataaaagacactgttcttttattctagttattttaaaaggcaactgataatgatatgccaatgcatgcccatcagttgtaaaaaatacatcgatctgwtggaggaagtttatggggggagggctatacatgtgtggggcagaggtatatggaaaatctttgtacattttgttaaattttgctgtgactctaaaactgctctaaaatgaaggctatatttttaaaaagataactgactgtctaaagtatatatagtagcaatgcattcaaagtttacagcataagaaaaataaaatgtatgacaatgatagcaaaaaagatgagaaaaaagatttggaaatat

SEQ ID NO: 457728 - DNA, 604 bp, Homo sapiens
tatctgaaatgttcttttaaaacatgctattgtttgacatgtgtgtaataaaaaagaaaaactaccactctttctttttttttttttttagatggagtctcactctgttgccaggctggagtgcagtggcacgatcttggctcactgcaacctccaactccctggttcaagagattcttctgcctcaatctcccgagtagctgggattacaggcacgtgccaccaaacccagctatgttttgtatttttagtagagacgaggtttcaccatgttggccaggatggtctccatctcctgacctcatgatccacctgcctcggcctcccaaagtgctgggattacaggcgtgacactctttttttttaattattattaaaaacatatatttattttagaaagacacagaggytaaaatttaaaataaaacttacatgcaattccatatcccagagttagttactaataatagtttggtatacatccttctagttacatagttatattaatatattatataattattagatgttaataaagttttataacctgatttttttttacttacaaatatagactgttttcattttaataaatatatgctca

SEQ ID NO: 457729 - DNA, 604 bp, Homo sapiens
tatctgaaatgttcttttaaaacatgctattgtttgacatgtgtgtaataaaaaagaaaaactaccactctttctttttttttttttttagatggagtctcactctgttgccaggctggagtgcagtggcacgatcttggctcactgcaacctccaactccctggttcaagagattcttctgcctcaatctcccgagtagctgggattacaggcacgtgccaccaaacccagctatgttttgtatttttagtagagacgaggtttcaccatgttggccaggatggtctccatctcctgacctcatgatccacctgcctcggcctcccaaagtgctgggattacaggcgtgacactctttttttttaattattattaaaaacatatatttattttagaaagacacagaggttaaaatttaaaataaaacttacatgcaattccatatcccagagttagttactaataatagtttggtatacatccttcwagttacatagttatattaatatattatataattattagatgttaataaagttttataacctgatttttttttacttacaaatatagactgttttcattttaataaatatatgctca

SEQ ID NO: 457730 - DNA, 583 bp, Homo sapiens
agagttgcttttggtctctttaaataaaaaaggaatgcacttaaaaaaataaaaataaaaaataaactatttcctctggctcaaagactaaagaatgttaggctgcctatctcaggaattctagtgttgaggtgatgagagacaacccttatgattttctcatcccgtttctaaygtgaggaatattcagcgcctctgtttcttcctccctactccaagccaagctggtctctcctaaacatcactgttctagcttcctaacctcactctgttttctctcttaatcttcagtcaatacaaaagttcaagtcatctcttcaaaatatatatcagcatatcatactgttttctatttcagtgctttttgatagtttctcctaataatacaaataaaatctagtgtcctcagtgttcttttatactgtggtccccggcaaccttcctaaatatgtttcctatttctctatggtcccttctgctgaagccatactagcattcttctcaaacagcccagtcatgttcctatcacagggcctttgcatccaccattgcctcagcctagaatgctcaccccacaaatgtt

SEQ ID NO: 457731 - DNA, 576 bp, Homo sapiens
taaagttttataacctgatttttttttacttacaaatatagactgttttcattttaataaatatatgctcattctatcatttttggtagcagcatattatttcatttcattagagtctgttattttcctatgaaaataccaaaacatttacctaaaatcaatagctatttacttatttaggaaaactatccttgaagtagaatttatcaattagatgatatgaatcttttttatattattgaacaaattgtggttctgaaagtctgcacctatttacatacttatctgtagagtataaaactgcctgctatagttcagtaattatagttttttttcattttgatgtaactgcaatggtatctaattattaaaatcttgcatttatttatttcactcagcaaatggcaattttgggcgtccttcactctaggtactgctgggtgctgaatatacactggcaaacaggaccagctgcatctctactctcacaragtttcagtgctagtggaaataaaccaagatatcacagttactattgcaatgagatcagggttcagagagggtagtacaatgagc

SEQ ID NO: 457732 - DNA, 559 bp, Homo sapiens
gcacatgaattccaaagtttgtcacttactatcgatgaaatcttggccaagaaatttaacatgtgagtgctttagtttcttcactaatagttatttttaagcataaaatgaattatacgcatctaaaatgcttagaataatgcctgagatagaaagatgttagtattttcatttttattaatcatttattttttagtcatcagacatttatgatgaatttataaaatttcaggcatagcttttcaaacctggggaatagtaaataaagattatccccctttgctgctgtccctagaagtgtagtatggaaaacagatttgtaagtaaataaccaaaattgatgtgtttggatcaaagacctaaacataagagctaaaactataacacrttttgaagaaaaataggggaaaaattatgacattggcgttagcaattttttttggatataatactaacaaaagaaaaaatagataattgcactacttcaaaaacttgtgcatcaaaagagactattaatatagagaaaaagcagggaatgggagaaaattttgcaaatcat

SEQ ID NO: 457733 - DNA, 614 bp, Homo sapiens
atatactttaaatggaattgttaggtctgaggatatgtgctcaatcaaatatataggataatatcagagttttccaaagtaactgtacagatttaaactctcaytgggttctaatggatctatatctataacaaggatcatcaggctttttcacgtgggctattctggtagatatgtagtaatacctcatttttagtttaattttttatgcttaataatgagttggaatgatttttcatgtattttgagttggaatgatttttcatatatttagccattgaaaaaacaagtacatttaaaatgtattatatagttatgtgcatttatttatgatttttagcttttaaagcataattagaaaattttcccaaataaagattatattttaaaaattcatctgtgttatttcctagcatttttatggtttaatacttcattttaaaatatttaatcctcctctaattaattctcatgtaagctttcaggtaagaatcagacttttattggcccatgtatattttattcggttagctaatattggttggtctaaccataatcttaatctatgtctgagattttggcttgtccttggtgctgattttctttctatgagt

SEQ ID NO: 457734 - DNA, 614 bp, Homo sapiens
atatactttaaatggaattgttaggtctgaggatatgtgctcaatcaaatatataggataatatcagagttttccaaagtaactgtacagatttaaactctcattgggttctaatggatctatatctataacaaggatcatcaggctttttcacgtgggctattctggtagatatgtagtaatacctcatttttagtttaattttttatgcttaataatgagttggaatgatttttcatgtattttgagttggaatgatttttcatatatttagccattgaaaaaacaagtacatttaaaatgtattatatagttatgtgcatttatttatgatttttagcttttaaagcataattagaaaattttcccaaataaagattatattttaaaaattcatctgtgttatttcctagcatttttatggtttaatasttcattttaaaatatttaatcctcctctaattaattctcatgtaagctttcaggtaagaatcagacttttattggcccatgtatattttattcggttagctaatattggttggtctaaccataatcttaatctatgtctgagattttggcttgtccttggtgctgattttctttctatgagt

SEQ ID NO: 457735 - DNA, 489 bp, Homo sapiens
gttccacgaaaaccagtccctggtgccaaaaagtttagggactgctcatctaatccattgagggctccratagaacaaaacaggcagaaaaggggcaaatttgtctctctccagaaagggttctggagttgggacatcctttttctcctgccctctgacattggagctcgtacttctctggctttgggttgggcttataccatttgcacccctgattctaaggcctacgggcttggaatggaaccacaccaccagctttcctgggccgctggcttacatacaatagattatgggacttctcagcctccataactgcatgagccaatggctcataataaatgtctttctacatatctatacctatcctgtgggttctgtttccctagagaaccttgagtaatagaaatatagtccctattttcagcattgtagggtcatgaatcttttcaagctaattcaacatttcagttgactcaattcctcacttaa

SEQ ID NO: 457736 - DNA, 611 bp, Homo sapiens
tgtaccattctacattcccccaaacagtgtgcaaggcttccaacttttaaacattytctccagcatttattttctgggggtgtttcttgatagtagcatcctaatgagagagacgtgttgagactcagaaaataatactgcaaaatgaaggcttcagaagcaaaagattttttctagccttctctcactctcctgtctctcagtcctactttcacctaaggctagtcataggaactaggacctctcttccccaagatgggtcacagaaccagacagtcttttaccccatggcaatcataaaaccaacaacttgccttctgcctttctgtgtaaaaactggctataaaaaagatctgacctaccttatttgactgtaggtcataggacttccattccaaagagggccctgccccacatccagaaggaaggaatgcatgctcagagaggccaattttccctgagtctttggggttctcatgctaaaggccccagtgtacacattaataagttctgtgtgctttttctcccattaatctgtgttttttaaattgatttatcagtgaaacttcagaggtgcaaggaaaaattttggttggcacctaaaggtggta

SEQ ID NO: 457737 - DNA, 611 bp, Homo sapiens
tgtaccattctacattcccccaaacagtgtgcaaggcttccaacttttaaacattctctccagcatttattttctgggggtgtttcttgatagtagcatcctaatgagagagacgtgttgagactcagaaaataatactgcaaaatgaaggcttcagaagcaaaagattttttctagccttctctcactctcctgtctctcagtcctactttcacctaaggctagtcataggaactaggacctctcttccccaagatgggtcacagaaccagacagtcttttaccccatggcaatcataaaaccaacaacttgccttctgcctttctgtgtaaaaactggctataaaaaagatctgacctaccttatttgactgtaggtcataggacttccattccaaagagggccctgccccacatccagaaggaaggaatgcatgctcaragaggccaattttccctgagtctttggggttctcatgctaaaggccccagtgtacacattaataagttctgtgtgctttttctcccattaatctgtgttttttaaattgatttatcagtgaaacttcagaggtgcaaggaaaaattttggttggcacctaaaggtggta

SEQ ID NO: 457738 - DNA, 571 bp, Homo sapiens
tatcatgagattgcaacagttaagtcacatcttcaggatccacttctaattcttcttctcttaccatttccacgacatctgcagtgacttgaacccttcaaagtcatccatgggggttagactcagcttcttccaaactcctcttaagattgatattttgaccccttctcatgaatcacaaatgttctaaatgttatctagaatggtgaaccttttccagaaggtttccaatttactttgccaagatctatcccagtaatcaatatgtatgtcagctatagccttctgaaatatatttcttaaataataagacttgaaagtcaaaattactccttgatccatgggctgcagaagggatgttgtgttagcagccatacaaacagcattaatctgcttttacatctccatcagaacccttgggtgactaagtgcgttgtcaataagtagtaatattttgaaagaaatctttttttcttgaaagggaggtctcaatagtgggcttaacctattcagtaagtcatagtaaatmgcaagtagatttgctgtcataaagggtttattattccattta

SEQ ID NO: 457739 - DNA, 582 bp, Homo sapiens
tttgaattactgtctagcgtccttttgcccttataaacttccttaagcatttcttgcaggccagatttaatgataacaaactgtttcaggttttattttctaggtatagcttaatttgccccttacatttgaaaatacattttgctggatatcagattctattgacagttttttcttttagtactttgaatatatcagttctatgcctattgtcctccatagcttctgataataaatctgctgctaatcttattattgcaaattctttgcatataacaaataacttctcttttcttgctttcaagattctttctttgtatttcgaaagtttggtcatgctctgtctctatatgagtttytctgagttctttttactagagttagttcaacttcttgaatgtttatatcatatctcctaaaatttgggaagttttcagccattatatcttcaaatattttctctgcctatttctctctctcttttctggagaactctctcatgtgtatggtggtctgcttggtgatttaggttccttaggctctgtttacttttcttcaaagtttttctgtctattcttcaga

SEQ ID NO: 457740 - DNA, 595 bp, Homo sapiens
gatcatacatttctgtttctttgtatgccttgttgaaaaataaacattggaatctattcatatggcaattctgaaaatcagagtctacccctttgtccagggtttgctcttttcttgttattgttgttcattgttttaagtttttaaattgttttggttgtctatgtgctaatgaccaaaggtgyaaacttgaggtcttctcaggtcttttctgagcttgcacgtctccctatgtatacatggtcacttttaatttttcctatgtatgtagttgcttttgaatgccctggtgtttaatgtctggctttccaaaagaaaacaagagaaaaatgaagtgggtggggaggggtggggtgtgagctcggccatttaaatcttctggaaattatttccaccagagaggcagaagcttgcaaaaatgaggaaaatgcaagaaaaatgtttgcctgctgtattagtctgttctcatgctgctaagaaagacatacttgagactggttaatttataatggaaagaggtttaaatgactcacagttcaacatggctggggaggcaacagaaaacttccagtcatgggagaaggggaagcaaaca

SEQ ID NO: 457741 - DNA, 529 bp, Homo sapiens
tgggatttatccaacagatacaaccatagttcaacatatgctaactgatcaatgtgatatatcatatcaacagaataaagaataaaaacaaatgatcattttaattgatgctgaaaaagcatttgataaaattcaacatcccttcatgataaaaaacctcaaaaagctgactatagaagaaaaatatctcagcaaaataaaagccatatgtgacagaccaacaactagtatcatactaaatgggaaaaactgaacacctttcttctaagatttggaaaatgacaaggatgaccattttcaccattgctaatcaacacagtactggaagtcctagctaggacaatcagacaagggaaagaaatagcatccaaactggaaaagaagaagtgaaagtatccttgtttgcagatgatataatcttayatttggaaaaactggaaaactccaccaaaaaactattagaactaatcaacaaattcaataaagttgcaggatacaaaatcaacatacaaaggtcattaacatttct

SEQ ID NO: 457742 - DNA, 442 bp, Homo sapiens
taactgaataaataactagggtattttataattaaatatgcagaacacttaagattttaatattcatatcctttactgaagaatggggatggatgaggttttgtaacatataatttatatggtacaacctagccacaattatgtgggttaaaaataggactactgctttgagtatacaaactagataatgttttgacatgatgatgagaccttaaatacaaagacatttgaagttcaaaatactggaaatttaacttaaaatttctgtagaacaacattttagtatytatttctagaatctaacaaattcatagagtctgccttggaaataaggctttggggtggggagatacagctaagcagtcatttgccctccggcctcactgaagctggagtgattattccttctgtgagccaaataatactttaaaagcttgggaag

SEQ ID NO: 457743 - DNA, 579 bp, Homo sapiens
ttttcatccctaacaacacagtccccattgggccaattacaaaggctttgcagggccttacctctctatgagatgaattgtctaaaaactccagaatagatgacctctttacaagcctcatgaaaaagtggttcggtgggtagaaaaagctagtaacttcaatagtcacctccctgacaattgttataagtgtattaattcttgttggatgttgcctcataccctgtgctccagggttaatacaaagacttactgagacaactctctccaaaactttcctcaattctcccttgccttattcagataagctctttcttttagaagatcaggcagaacaacaaagtcaagatatgttaaaaaaggtttgaagagaaaaaattataaatatcaaaaagggggaaattgttagatacagttagstttcctcttcaaacagcttatccagtttccccattctttatcctataattccaaatacccctttccctttgctgtgccccaacttgtctgaatatgcctaggcatgcctgaacttgctacaaccccagtccacattcctttccttattagggaataggt

SEQ ID NO: 457744 - DNA, 609 bp, Homo sapiens
tgctttgtgatagtaacaaatgatttgactgccagattcctcttcaagggtttgcctagatatttcttaaygtcttctcaagctttaaattttctgagactttttctggcattgttttaattttggtccaattggaatagcaaaaggaacattttataggggggtctttccctaaataaattataaaaattatttaagttaccttttataaagaaaaaaggatcctggaccagaatcacatatgttgctgctaccgtaactgccaatgcccagggaaatggtaagaaaagaggcattgaaggcaactattaccatcttccagagcatacagtttaccacttcacttttaaaatttgctcttacaacctttccttctcatttctttttttgtgatattatcaatctgagagctttcattaatgaggatattagctgatttttttactcttaggtaaaatgagtttaataatttacttctatgttatatactgaacttatatagtgtacttctgttgattcctgaagtgatgataatgaaaataatttagaaaaatgtaactagataatgaattaagggcaataaattaaaaagcacaaagagtatatttg

SEQ ID NO: 457745 - DNA, 462 bp, Homo sapiens
attatggttgttaaaaatacctgaaatagtaaggccaattctctcattatagtattttaggagatataaaaaactgaaacaacatagcaaataagtctggttttctcactagaggggaacacgtcatggttgagaagcatgagctgaattcgtgatactgctggatccctgtgctttgtgatagtaacaaatgatttgactgccagattcctcttcaagggtttgcctagatatttcttaatgtcttctcaagctttaarttttctgagactttttctggcattgttttaattttggtccaattggaatagcaaaaggaacattttataggggggtctttccctaaataaattataaaaattatttaagttaccttttataaagaaaaaaggatcctggaccagaatcacatatgttgctgctaccgtaactgccaatgcccagggaaatggtaagaaaaga

SEQ ID NO: 457746 - DNA, 609 bp, Homo sapiens
tgctttgtgatagtaacaaatgatttgactgccagattcctcttcaagggtttgcctagatatttcttaatgtcttctcaagctttaaattttctgagactttttctggcattgttttaattttggtccaattggaatagcaaaaggaacattttataggggggtctttccctaaataaattatraaaattatttaagttaccttttataaagaaaaaaggatcctggaccagaatcacatatgttgctgctaccgtaactgccaatgcccagggaaatggtaagaaaagaggcattgaaggcaactattaccatcttccagagcatacagtttaccacttcacttttaaaatttgctcttacaacctttccttctcatttctttttttgtgatattatcaatctgagagctttcattaatgaggatattagctgatttttttactcttaggtaaaatgagtttaataatttacttctatgttatatactgaacttatatagtgtacttctgttgattcctgaagtgatgataatgaaaataatttagaaaaatgtaactagataatgaattaagggcaataaattaaaaagcacaaagagtatatttg

SEQ ID NO: 457747 - DNA, 530 bp, Homo sapiens
gggaagcagcaagtagtcttctggaatgggccagaacatcttaagtttgacagaatccctgcctgtctccattgttcctgcacactgagatgagaatgttggcttgattacttttattccttttgctttgcctcacattttgaaattttactgtttgattttaggagctttcatttacagtacaggcctgccaggaatactttctggaagagctacagtttgagggaaatgataaataaataccaactgaaaggtaggattttgtagggaaatcaagcagggagaaagcatagggtgaggctctgagtcatraccgagaagctgtgtaatagacaacaactcttctaaaatgcaagttctacatttaggtgtacatagtgattatgatcttactttatccacctagttcctcttagatttattgcatctgtgatgttgttttgcattgtatgaccaaatattatgttattgcacagcaactaacacattgaattcaaataaactatttttgaaatgcaatttacaaattc

SEQ ID NO: 457748 - DNA, 587 bp, Homo sapiens
atctgttaaattaaaaaattatgtatttggggatattctgtgatacatgtgtgagacgtataattacatgtttataaaataaaactgtgacaatttcttttttttataacaatttcttcttttggtaagtctaaaagataaaccacaatgactaggtrctaaggataagtaaaaaaccatttgtgttgtcattatgtcattactagaatcattttactcccctagaacatctagtttcttcttgaagccttccagtgatgggcgatcacatggttttgaaactatgccttctatcacaaaacaaccctgactgtcatatagtcctcaataatgagtaacaatctgcctcctcctaacttccacctctttgtcttggacctgccatcagaagctaaccagaacgctaacactttctctgaatgaaaactgttcaggtatatgaagctgctttttaatcccttccaccaccttctcccaaatcttttctcaacagaaggcactttggggattctaagagaatctttacatggcatgacttctaactttttatcctctttgctcctttgaaggtactctaattatcattg

SEQ ID NO: 457749 - DNA, 588 bp, Homo sapiens
cataagttcagatataaaaaaactacaaaaccaatgaaaaaaatcacaaagagtcagggtcatcaagaaaacaacacaaaattgagtcaaactctcaaagacttcagaaaatgaagaatattataaaaaaattaaagtctgtcaatataacatattgacaggatatggagcaaaaggaactcttataagctatggccttctggtaaaacagtaggaccacagatttgaaggtgcacatcttttgaactgggctttctcgaccacagcactattgacattttgagctggataattctttgctgyagagggctgccctgtgtattgtaggatgcttagcatcatttctggcctctagccactaaatgccagtaacactcctcctgctccctttccagctgcggcagtcaaaactgtcctcaaacattgtcaaatgtctcctggagagcaaaatcactcctggtcagaagttactgctgtacagcccacagttctacccctagagatttatggcagaagaacttttgtatatttgtgttaggaggcaggcatatgaatcagagtagtgctgtttgtaaaacagaaaattag

SEQ ID NO: 457750 - DNA, 588 bp, Homo sapiens
cataagttcagatataaaaaaactacaaaaccaatgaaaaaaatcacaaagagtcagggtcatcaagaaaacaacacaaaattgagtcaaactctcaaagacttcagaaaatgaagaatattataaaaaaattaaagtctgtcaatataacatattgacaggatatggagcaaaaggaactcttataagctatggccttctggtaaaacagtaggaccacagatttgaaggtgcacatcttttgaactgggctttctcgaccacagcactattgacattttgagctggataattctttgctgcagagggctgccctgtgtattgtaggatgcttagcatcatttctggcctctagccactaaatgccagtaacactcctcctgctccctttccagctgcggcagtcaaaactgtcctcaaacattgtcaaatgtctcctggagagcaaratcactcctggtcagaagttactgctgtacagcccacagttctacccctagagatttatggcagaagaacttttgtatatttgtgttaggaggcaggcatatgaatcagagtagtgctgtttgtaaaacagaaaattag

SEQ ID NO: 457751 - DNA, 705 bp, Homo sapiens
acaccagtttgaacctaattaaagttattataattagctcaggaggcagataaaattctgattcaatggaaacccaccagtgaagcagactcacctgaacaaacatataaacgtcctgttccagcaatagataggaggcggctactaaaacagagcctgctgctttagtccactgtgggcccccacagacttctaacattttctgatagaaaaatcccagtttggtttccctagattccgactgataaagtatagttttctcttttcactatccaaaatgttttattatacataaagtaacttgtgaatgtgcatttgttattagcaaatgtaatttttgctcaacaaaaaatgaaaaaagagtaagaaaaaagaatatrtaaaagtaggctctttctccatttgaagtatgttcatatgacatttgtttttatattcaagtactttattttaccagtactgcaaaataccttatcttatttgatacactctcagtcacaataaaaaattttccccaaactttaaatcatagcgctttgaaaaatattgctccaatagcaatttttttatgtctgtgggtttactacctatagcttacaaacttttagcaaaaatattaatttttatatcctctccctatatacggtttttttaaagttaagctttcccccacagtctactgagtacttattttgttctttctac

SEQ ID NO: 457752 - DNA, 705 bp, Homo sapiens
acaccagtttgaacctaattaaagttattataattagctcaggaggcagataaaattctgattcaatggaaacccaccagtgaagcagactcacctgaacaaacatataaacgtcctgttccagcaatagataggaggcggctactaaaacagagcctgctgctttagtccactgtgggcccccacagacttctaacattttctgatagaaaaatcccagtttggtttccctagattccgactgataaagtatagttttctcttttcactatccaaaatgttttattatacataaagtaacttgtgaatgtgcatttgttattagcaaatgtaatttttgctcaacaaaaaatgaaaaaagagtaagaaaaaagaatatgtaaaagtaggctctttctccatttgaagtatgttcatatgacatttrtttttatattcaagtactttattttaccagtactgcaaaataccttatcttatttgatacactctcagtcacaataaaaaattttccccaaactttaaatcatagcgctttgaaaaatattgctccaatagcaatttttttatgtctgtgggtttactacctatagcttacaaacttttagcaaaaatattaatttttatatcctctccctatatacggtttttttaaagttaagctttcccccacagtctactgagtacttattttgttctttctac

SEQ ID NO: 457753 - DNA, 705 bp, Homo sapiens
acaccagtttgaacctaattaaagttattataattagctcaggaggcagataaaattctgattcaatggaaacccaccagtgaagcagactcacctgaacaaacatataaacgtcctgttccagcaatagataggaggcggctactaaaacagagcctgctgctttagtccactgtgggcccccacagacttctaacattttctgatagaaaaatcccagtttggtttccctagattccgactgataaagtatagttttctcttttcactatccaaaatgttttattatacataaagtaacttgtgaatgtgcatttgttattagcaaatgtaatttttgctcaacaaaaaatgaaaaaagagtaagaaaaaagaatatgtaaaagtaggctctttctccatttgaagtatgttcatatgacatttgtttttatattcaagtactttattttaccagtactgcaaaataccttatcttatttgatacactctcagtcacaataaaaaattttccccaaactttaaatcatagcgctttgaaaaatattgctccaatagcaatttttttatgtctgtgggtttactacctatagcttacaaacttttagcraaaatattaatttttatatcctctccctatatacggtttttttaaagttaagctttcccccacagtctactgagtacttattttgttctttctac

SEQ ID NO: 457754 - DNA, 657 bp, Homo sapiens
ttcttactgatgtatattgaaaattataatttgttgaaggcaatgtaagtaamgctgtcaatggatttaaaataactgatatagaattatttaaacttatagttatttgtgcaagaattttatgggctttcaaacaaaagaataacaaaagcaacaacaaagttggacctatggacaaaactgtatccctcctcccccaattttcatgtgactggtgaagccttaatctccaatatgactgcatttggacataaagcttacagggaatacgtaaggttatatgaggtcatagggttggaatctgacctgataggaatagtgggcttataagaaaagacaccagagagctccatccctgaaagggtgcacagatggagggaaacgttgtgtgaagacatagtgggaaggcagcaatcaggaatccaggaagagtgtctcaccagaaacctaattggccagaaccaggattttgaacctcaagcctccagaactatgaataaataaattgctggtttttttaagccacccagtctatagtattttgtgatggcaacctgagttgacttacacactgtaaaagctaaaccggctgggatcatttttaatagttaatctcatacccagaatatcttgctattccattttattggtatatat

SEQ ID NO: 457755 - DNA, 657 bp, Homo sapiens
ttcttactgatgtatattgaaaattataatttgttgaaggcaatgtaagtaaagctgtcaatggatttaaaataactgatatagaattatttaaacttatagttatttgtgcaagaaytttatgggctttcaaacaaaagaataacaaaagcaacaacaaagttggacctatggacaaaactgtatccctcctcccccaattttcatgtgactggtgaagccttaatctccaatatgactgcatttggacataaagcttacagggaatacgtaaggttatatgaggtcatagggttggaatctgacctgataggaatagtgggcttataagaaaagacaccagagagctccatccctgaaagggtgcacagatggagggaaacgttgtgtgaagacatagtgggaaggcagcaatcaggaatccaggaagagtgtctcaccagaaacctaattggccagaaccaggattttgaacctcaagcctccagaactatgaataaataaattgctggtttttttaagccacccagtctatagtattttgtgatggcaacctgagttgacttacacactgtaaaagctaaaccggctgggatcatttttaatagttaatctcatacccagaatatcttgctattccattttattggtatatat

SEQ ID NO: 457756 - DNA, 657 bp, Homo sapiens
ttcttactgatgtatattgaaaattataatttgttgaaggcaatgtaagtaaagctgtcaatggatttaaaataactgatatagaattatttaaacttatagttatttgtgcaagaattttatgggctttcaaacaaaagaataacaaaagcaacaacaaagttggacctatggacaaaactgtatccctcctcccccaattttcatgtgactggtgaagccttaatctccaatatgactgcatttggacataaagcttacagggaatacgtaaggttatatgaggtcatagggttggaatctgacctgataggaatagtgggcttataagaaaagacaccagagagctccatccctgaaagggtgcacagatggagggaaacgttgtgtgaagacatagtgggaaggcagcaatcaggaatccaggaagagtgtctcaccagaaacctaattggccagaaccaggattttgaacctcaagcctccagaactatgaataaataaattgctggtttttttaagccacccagtctatagtattttgtgatggcaacctgagttgacttacacactgtaaaagctaaaccggctgggatcatttttartagttaatctcatacccagaatatcttgctattccattttattggtatatat

SEQ ID NO: 457757 - DNA, 592 bp, Homo sapiens
gtgtgattatttacatcagtggatactggcaagtgctatgaatcagtgctttctcccttccaccccacaaagagttggcttaccagcmcaccactgccaaaaattctatattaagtcagcattctactctgctcagagagtcgagcttgatcaacatagttgtcttttactatgggaagcaatgcaatcagctttgtcttagacacacctagacattaatactttcacatggctaatttaagaggttggtttgctagactcctgtaagaccttaagcttttagaataagagacaggcaagtttagatgagagaagagtaggaaaggaaaaggacttgaatgaagacattgttcttgagatcaagtctgggtgggttcctactaggggaaagttagggtcagcaggggacactggggtacccaaagagataaagggtctcagaagacaaatcctgtcttcactccactgctttggagaggaagataaaaataccttttcctctacccaatctaggttcatggctgaggcccctgtaacaaaagacagaataacagaaaagtatacatgtttatttagcataagtttcatgtga

SEQ ID NO: 457758 - DNA, 592 bp, Homo sapiens
gtgtgattatttacatcagtggatactggcaagtgctatgaatcagtgctttctcccttccaccccacaaagagttggcttaccagcccaccactgccaaaaattctatattaagtcagcattctactctgctcagagagtcgagcttgatcaacatagttgtcttttactatgggaagcaatgcaatcagctttgtcttagacacacctagacattaatactttcacatggctaatttaagaggttggtttgctagactcctgtaagaccttaagcttttagaataagagacaggcaagtttagatgagagaagagtaggaaaggaaaaggacttgaatgaagacattgttcttgagrtcaagtctgggtgggttcctactaggggaaagttagggtcagcaggggacactggggtacccaaagagataaagggtctcagaagacaaatcctgtcttcactccactgctttggagaggaagataaaaataccttttcctctacccaatctaggttcatggctgaggcccctgtaacaaaagacagaataacagaaaagtatacatgtttatttagcataagtttcatgtga

SEQ ID NO: 457759 - DNA, 592 bp, Homo sapiens
gtgtgattatttacatcagtggatactggcaagtgctatgaatcagtgctttctcccttccaccccacaaagagttggcttaccagcccaccactgccaaaaattctatattaagtcagcattctactctgctcagagagtcgagcttgatcaacatagttgtcttttactatgggaagcaatgcaatcagctttgtcttagacacacctagacattaatactttcacatggctaatttaagaggttggtttgctagactcctgtaagaccttaagcttttagaataagagacaggcaagtttagatgagagaagagtaggaaaggaaaaggacttgaatgaagacattgttcttgagatcaagtctgggtgggttcctactaggggaaagttagggtcagcaggggacactggggtacccaaagagataaagggtctcagaagayaaatcctgtcttcactccactgctttggagaggaagataaaaataccttttcctctacccaatctaggttcatggctgaggcccctgtaacaaaagacagaataacagaaaagtatacatgtttatttagcataagtttcatgtga

SEQ ID NO: 457760 - DNA, 592 bp, Homo sapiens
gtgtgattatttacatcagtggatactggcaagtgctatgaatcagtgctttctcccttccaccccacaaagagttggcttaccagcccaccactgccaaaaattctatattaagtcagcattctactctgctcagagagtcgagcttgatcaacatagttgtcttttactatgggaagcaatgcaatcagctttgtcttagacacacctagacattaatactttcacatggctaatttaagaggttggtttgctagactcctgtaagaccttaagcttttagaataagagacaggcaagtttagatgagagaagagtaggaaaggaaaaggacttgaatgaagacattgttcttgagatcaagtctgggtgggttcctactaggggaaagttagggtcagcaggggacactggggtacccaaagagataaagggtctcagaagacaaatcctgtcttcactccastgctttggagaggaagataaaaataccttttcctctacccaatctaggttcatggctgaggcccctgtaacaaaagacagaataacagaaaagtatacatgtttatttagcataagtttcatgtga

SEQ ID NO: 457761 - DNA, 556 bp, Homo sapiens
ttcaggaaaaaggatcagagagaccagagaccaggcaggtcagagggagacctggaggtgcttcttcagttcaccaggtcaagtgccaagtgtcagtattttagggtattgtttgcagacccccagtgcaaagatacaaggcaagttactgttggtatcaatagcaagttccaagtgtggcagcacaagatttcattcaaaaagcagaccataatagtatacatttgctttgcactgtgtggaccttcgagcttgaataatccctagtggctcsactgctctagagtgaaggcaggaaaacaaaggggttacacagtctgctctcttgcctctggctgagggccacattcctcgggagcagtcaggagttcaagagaaggggacaagtggaagctcactgtgctcctagcccagccctgctagtctcattccccagccatagtatagaccttctgccctgtgaaaggctccaggaatggcagcccggctgtgcactgctccgagagtgcactcaggacaatcccatcaggaggtgatgaggatcgtttgtttgacc

SEQ ID NO: 457762 - DNA, 556 bp, Homo sapiens
ttcaggaaaaaggatcagagagaccagagaccaggcaggtcagagggagacctggaggtgcttcttcagttcaccaggtcaagtgccaagtgtcagtattttagggtattgtttgcagacccccagtgcaaagatacaaggcaagttactgttggtatcaatagcaagttccaagtgtggcagcacaagatttcattcaaaaagcagaccataatagtatacatttgctttgcactgtgtggaccttcgagcttgaataatccctagtggctccactgctctagagtgaaggcaggaaaacaaaggggttacacagtctgctctcttgcctctggmtgagggccacattcctcgggagcagtcaggagttcaagagaaggggacaagtggaagctcactgtgctcctagcccagccctgctagtctcattccccagccatagtatagaccttctgccctgtgaaaggctccaggaatggcagcccggctgtgcactgctccgagagtgcactcaggacaatcccatcaggaggtgatgaggatcgtttgtttgacc

SEQ ID NO: 457763 - DNA, 556 bp, Homo sapiens
ttcaggaaaaaggatcagagagaccagagaccaggcaggtcagagggagacctggaggtgcttcttcagttcaccaggtcaagtgccaagtgtcagtattttagggtattgtttgcagacccccagtgcaaagatacaaggcaagttactgttggtatcaatagcaagttccaagtgtggcagcacaagatttcattcaaaaagcagaccataatagtatacatttgctttgcactgtgtggaccttcgagcttgaataatccctagtggctccactgctctagagtgaaggcaggaaaacaaaggggttacacagtctgctctcttgcctctggctgagggccacattcctcgggagcagtcaggagttcaagagaaggggacaagtggaagctcactgtgctcctagcccagccctgctagtstcattccccagccatagtatagaccttctgccctgtgaaaggctccaggaatggcagcccggctgtgcactgctccgagagtgcactcaggacaatcccatcaggaggtgatgaggatcgtttgtttgacc

SEQ ID NO: 457764 - DNA, 587 bp, Homo sapiens
ctcagaagggaatgctaacagctgtggcatgcagcagctggctggctaattgagtattgcctgagtctcttgggtttcagaccatgtgcccagcagaatgagtctgtaggggattctgaagccactgagagccccggaggagctgaaacataaggacaaccatgccagaaggcagctttccatcatgtttggtgacttgcaatgggaaagaaaagattcttgctctgaattgcttggttcaagatagagaagaaaagcaaaatgaccatgcattccttcattcattcattcactcattcattcaaaatatattttttgggatccatgcaaaaggcattgcatttggggccagaaatagaacggagggcagtaggggctgcacatgctcatggaggcaggagccacagagagacaagcggatcgaatctcatatactaatgccacattccaacttccctaagagctgctagggagctgactggagtgtgactgggctgagttggtgaaatcagaggcttcccagaggaaggaatggctgagttgaggtcggagctgtgagygggaatcagtcatggggcaggagagag

SEQ ID NO: 457765 - DNA, 631 bp, Homo sapiens
gagacaaacctgggcaatatggcaaaaccccatctctataaataaatacaaaatatagccaggcatggtggtgcatgcctatagtctcagctacttagcagactgaggtgggaggatggcttgagcccaggaggcagaggttacagtgagccgagatcatgccactgcactccagcctgggtgatagagccatactttgtctcaaaaaaaaaaaamaaaaaacaaaaccgaatatgtatatttagtaggaaaattatgtcgcatttgggctaggacactgctttggtggactctcttatcatttggttcttgtaccaggacacagaccaaccccttagctaaaaggaactccctgttgtttttgcctttcctctactgtagttggattcctacagtatttttctgtaaaataaccattcctatttcttaagcatcaatgaaaaataatagtatttttcttcttccaaaagcttgccactgcttggttaaaagaagggagggggtggggagattgatgggggcagggaggttcacgatgccattacttgagctggcagcctctttgctgcccaacttcagggaaatgataggaagagcaggtataatcaggacaagaaggtccccaggttag

SEQ ID NO: 457766 - DNA, 548 bp, Homo sapiens
cagttgctctttttcctcgtgtcttatcatgagagtcatttgatccaagatactgctccttaacttacgctttttatttggaagaaacactaacgatacttcttagggatattgtacagagaaagtaggttgcacatttaaccttaggaacagaaactgctgytgcttaagtaccgctcaccctttcaccacctgagatgaagaatgactcaaccatatgatgaaacagagaaagccatgtttctaatgaggccagagcctgaaggcagaaacccttcaagagctgaatttcccattttgttgccaacaacaaataaactcagtgttccttcaatgacgattaatccggcaaaaaccatgcagaaatgaaggagctttaaaatgatcatcattcatcaacccaaccatctcccttggatacccacttcattactaagagagtaattatttttgtgttgtcagttttagggaaaagcccttgaggattattcattggtaattggaaaaataaatgttaatgtcttctgtggattaggaaagaatgtttt

SEQ ID NO: 457767 - DNA, 542 bp, Homo sapiens
ctgcctttttgacatacctaaaggaggtaggtctgcagatttttacattttatcacaacaaatttaacatatgtcagcacaatgcaattgaaatccctttagaatggttataatcttcatagtttcttctagaagatcaatttaccttgcaacactagggagaaaacacccagaaccccttcaggtccgctgattcctctcagtagctccaacaattagcttctatttaaaaagcaacaaggccagggcattagggaatggcctaatgatgagatcttaatgtatgcaaatttactgcacatggtggcagcaggaggaaattaaaccattgttgactgattmtttctaagatacaagatcatgacggctttttttcatatacttttcatacatgttccaaattttccacaggaaaagaaattattttaatatatcctcctttgtctttcaatgttttaattcactttgaagtttatcactgaatgcattgacagccttaaacactattcaattggcaggtacccttgaaagtttactgtgcc

SEQ ID NO: 457768 - DNA, 432 bp, Homo sapiens
tgctctctgagagctgagagtctagcagaaggcttggtccaaggagaagggcagccagcgtcataggcagggagcccaagatgctcagaggaaagagatgagctcagccttcctctttccctgctgaagtctgatgggagaatccagggaagctttgacaaagtgacataacgcttggccttcaaggatggggacgtaaatctgggagaaagacatggaaggggattcttgatctgwgcaagaagggcaagccgggggcccaacgggcatacagaaggttcaagttgattcaatggaaccccctggtgggaagcagacactctgagtgatggtcagtttccctgaagctaggttcatgggcttgttctattttatactccttctgcacacatgctccttatagcttctcctctctgcctctctctccaggta

SEQ ID NO: 457769 - DNA, 599 bp, Homo sapiens
tgcgatatgttcgtacaatggtatagagcagtraaaatgaatgacctagagctgcacatttcaacatggactatctcataagcataactgaagaatgttgcagaaaaatatgtaaagtttaatgccatctgtgtagagttaaaatggacaaatattagatactatttagtggcaagagtattttttacatgcatgggcattaataagaccaaattagattagtgctttcttctgtggagggaggaaagaggatggaactggggagtaatatataggcggtattaactgtattgataatgttttgtatcttaacctacgttgtggttacatagttttcattataatattcttaggattttgtgtttatattttaaatgttgccctataaaaattttaaaatttattaaataatgataagtgctctgaagaaaataaacatctgaagtgattgagagtgactggggtttggttgggggtactggagattgggtggtcaaggaaagtttctcagcagaggtactgggttgagctgaatcatgactgacatgaagggagcagccataacagtatctaggggaggagcattgcaggtggagaga

SEQ ID NO: 457770 - DNA, 599 bp, Homo sapiens
tgcgatatgttcgtacaatggtatagagcagtgaaaatgaatgacctagagctgcacatttcaacatggactatctcataagcataactgaagaatgttgcagaaaaatatgtaaagtttaatgccatctgtgtagagttaaaatggacaaatattagatactatttagtggcaagagtattttttacatgcatgggcattaataagaccaaattagattagtgctttcttctgtggagggaggaaagaggatggaactggggagtaatayataggcggtattaactgtattgataatgttttgtatcttaacctacgttgtggttacatagttttcattataatattcttaggattttgtgtttatattttaaatgttgccctataaaaattttaaaatttattaaataatgataagtgctctgaagaaaataaacatctgaagtgattgagagtgactggggtttggttgggggtactggagattgggtggtcaaggaaagtttctcagcagaggtactgggttgagctgaatcatgactgacatgaagggagcagccataacagtatctaggggaggagcattgcaggtggagaga

SEQ ID NO: 457771 - DNA, 599 bp, Homo sapiens
tgcgatatgttcgtacaatggtatagagcagtgaaaatgaatgacctagagctgcacatttcaacatggactatctcataagcataactgaagaatgttgcagaaaaatatgtaaagtttaatgccatctgtgtagagttaaaatggacaaatattagatactatttagtggcaagagtattttttacatgcatgggcattaataagaccaaattagattagtgctttcttctgtggagggaggaaagaggatggaactggggagtaatatataggcggtattaactgtattgataatgttttgtatcttaacctacrttgtggttacatagttttcattataatattcttaggattttgtgtttatattttaaatgttgccctataaaaattttaaaatttattaaataatgataagtgctctgaagaaaataaacatctgaagtgattgagagtgactggggtttggttgggggtactggagattgggtggtcaaggaaagtttctcagcagaggtactgggttgagctgaatcatgactgacatgaagggagcagccataacagtatctaggggaggagcattgcaggtggagaga

SEQ ID NO: 457772 - DNA, 599 bp, Homo sapiens
tgcgatatgttcgtacaatggtatagagcagtgaaaatgaatgacctagagctgcacatttcaacatggactatctcataagcataactgaagaatgttgcagaaaaatatgtaaagtttaatgccatctgtgtagagttaaaatggacaaatattagatactatttagtggcaagagtattttttacatgcatgggcattaataagaccaaattagattagtgctttcttctgtggagggaggaaagaggatggaactggggagtaatatataggcggtattaactgtattgataatgttttgtatcttaacctacgttgtggttacatagttttcattataatattcttaggattttgtgtytatattttaaatgttgccctataaaaattttaaaatttattaaataatgataagtgctctgaagaaaataaacatctgaagtgattgagagtgactggggtttggttgggggtactggagattgggtggtcaaggaaagtttctcagcagaggtactgggttgagctgaatcatgactgacatgaagggagcagccataacagtatctaggggaggagcattgcaggtggagaga

SEQ ID NO: 457773 - DNA, 506 bp, Homo sapiens
gaatcacagccctggctcggggagctcacaggtctgggccccctgaagggccacagctcttctccccttctcttcacttgcaacatggtgagcaaggggcatatttcaactctgtgtgtgttacagctcttttagccctgccatttgatgggtcctgagttcttgtcctgcaaccaggaagaatgagtgatgcagaaaagtggagggtgtgcaagacaaagaggagctttgttgagcaatagaacagcttagaggtgacatgcaggggttaggccctttctacagccagggcatcccaacgagtgttcagctcctagcacagaggagaccctggagtgagaagctcctctctgcrggcaggtcatcccatcatctctgcagctctcagcagaggcagcactggatggggtcattcctgtctacatgcaggtcgtcccatcatcttcccagctctcagcatagaggaggtcctgagtgggtagcttctctctacagctaagtcatcc

SEQ ID NO: 457774 - DNA, 636 bp, Homo sapiens
gggagtcttctaaggcttggaggtagtttcctgcctcagagtaaccagcactaccccaaacccataggctcagaatttcccacagttcctggggatctgcattttaagtaggtacaccaggtgattcttctacaaatcacagcttgagaatgaccctgccctgcttgagttcagactatttggcggtctctgaagattgcttcgggctgcatcaaagttagggacattggggtaattgcctgttcrgcactcttatagctctagcaggaagcacagatatcccaaggactcccaggggtccaagaacacactggccaccatgtgtgcatccacagagcagtagaacacagtgcatccatgcatgtgagctcagcaacggtgggaagggccggagcagcggcaagacaccggtggagaacaagacatgaggaatgtgaggagtagggacagcagtggggtagacactaagccagcagatataggacaggcctaactcattaatcgagccacctggaaaggtcagacacatagactctgcagtcagcctctctggtttgagtcctagctccacttcttactagctgggtgggtgaccttggacaggttatttcatctctctttgccttagtgcctcat

SEQ ID NO: 457775 - DNA, 636 bp, Homo sapiens
gggagtcttctaaggcttggaggtagtttcctgcctcagagtaaccagcactaccccaaacccataggctcagaatttcccacagttcctggggatctgcattttaagtaggtacaccaggtgattcttctacaaatcacagcttgagaatgaccctgccctgcttgagttcagactatttggcggtctctgaagattgcttcgggctgcatcaaagttagggacattggggtaattgcctgttcggcactcttatagctctagcaggaagcacagatatcccaaggactcccaggggtccaagaacacactggccaccatgtgtgcatccacagagcagtagaacacagtgcatccatgcakgtgagctcagcaacggtgggaagggccggagcagcggcaagacaccggtggagaacaagacatgaggaatgtgaggagtagggacagcagtggggtagacactaagccagcagatataggacaggcctaactcattaatcgagccacctggaaaggtcagacacatagactctgcagtcagcctctctggtttgagtcctagctccacttcttactagctgggtgggtgaccttggacaggttatttcatctctctttgccttagtgcctcat

SEQ ID NO: 457776 - DNA, 542 bp, Homo sapiens
tgcaacaatatccatgttctcttcttcttgagataggtccttgggactagttcttacgaatgggatgtaagcagaaattatgtatgtcatcttcagactgaggcggttgagtggaatgtgatttatccatttgccctctcttttgtcacctgttgataggatgcaaagcattggtagagggaaccatggtactagaagatgacagagcaaccagtttgaaagagcctggatccctgaatgaatgtatggagcagggctctctctctgttgaatggtgatgagagtgagaaataaaccttcattgtacaaagccactgaaatggttttttgttactgcagcaagtattacttgctgctactaatgccaagtataaatcatatttaaatctttgccatcctgggattcaatttaattatacaaaactaaattcatgtctactttaatattcatgttttctcatagaagayaccattttttaaataataggagcgccaagccccagaacatagctctaaggtgaaaatgtataatgtcataactt

SEQ ID NO: 457777 - DNA, 581 bp, Homo sapiens
attaaaaaactatgggcatcagaaacagaccaacaatgacttatgatactggagttatcagccacagatcatgaaacaactatgctyactatgtccaaagaaatacaagacacacgactttggcagaaaaaagtgacagcaaatttggaaaaaagaactaaaaagatcctctagaaacaaaaatgaaaacaaactaaattaaacattcaattaataggtttaacatcagtgtaggcacagctaaagaggaaatgaatcaataggaagatagtttcttctaacctatccaaaatgtagcatggaaagagaaagacagaaaacataggtgagaatgtaaaagacatcagaggatacagtgagaaggtctaaccattaattggagtcctgaaaggagaagagagagaggaaatgggccagaggcaatatctgaaaaggcaatggctgaaatttttccaaaattgttgaaaaataccaatccgagattttaaaactcagtattgtctagtaaagttggatagaggtataccctacatgtctctacttaggttctccaagaagctgactcagagactgagtcgtgt

SEQ ID NO: 457778 - DNA, 581 bp, Homo sapiens
attaaaaaactatgggcatcagaaacagaccaacaatgacttatgatactggagttatcagccacagatcatgaaacaactatgctcactatgtccaaagaaatacaagacacacgactttggcagaaaaaagtgacagcaaatttggaaaaaagaactaaaaagatcctctagaaacaaaaatgaaaacaaactaaattaaacattcaattaataggtttaacatcagtgtaggcacagctaaagaggaaatgaatcaataggaagatagtttcttctaacctatccaaaatgtagcatggaaagagaaagacagaaaacataggtgagaatgtaaaagacatcagaggatacagtgagaaggtctaaccattaattggagtcctgaaaggagaagagagagaggaaatgggccagaggcaatatctgaaaaggcaatggctgaaatttttccaaaattgttgaaaaataccaatccgagattttaaaactcagtattgtctagtaaarttggatagaggtataccctacatgtctctacttaggttctccaagaagctgactcagagactgagtcgtgt

SEQ ID NO: 457779 - DNA, 594 bp, Homo sapiens
gaactaattgataagagaggcaagataccatcttgagaaaatatgtggaaatggtgtgccaaaaggttcacattttcttcaaggaattggagtagtttaaagaagctaaggkcatgacactgcagtgttacacaatcatgcttgcttacagtactctaaagtaaagatttttatggcaagaactacaagctgataactttcacaagggctacctgttcatctgagggagtagaacaacctagaaaagccctagaaacaaagttacaattacatacaccttgaaggaaacaaagacatagcaaaatatcaaactactgctgcaaaagaataatacacacacacacacacacacacacacacacacacacacacacacacacacacaaaacaccatcaggaatgccaggagtcatgcacaaaggggaagctactgtgattttgtctataaggtcttctctgagacaagcatataagtcatagtgatactacccagaagtcaccagacctggactcttggagtcattcaccaaggggaaaaatggttattgagatactgcaattcttttgtgaatcaacatgatcagagaaagactg

SEQ ID NO: 457780 - DNA, 566 bp, Homo sapiens
atgattggaaagaaagaagtaaaatgacgtctacttaaaaatggcataatcttgtatattgaaaatcctaaggaaatgaataaaatacttttagaactaacatgagttcaataagtttgcatgatacatgattaatattcaaaaataaattgtatttytgagtatttgcaattaacaatctgaatataaaattaagaaaacaattgcaattttaatagcatgaaaaataaaatacctagaaatgactttaataaaagttatacactgaaaactataaaactttcaggaaagaaaaaaaaggcacaaataaattaaaaagtacatcatgttcaaggattgaaagacttaataattctagaatggcagtactgccctatttgatctgcagatttaacacaattcatgtcaaaataccaaatacattttgtgcagtaattgacaaattaaatttaaatgtatataaaaatgcaaaggatccaagttagccaaaataacataaaaaaaaaaaaagaaaaaaaaatgaaactttgggggactcatattttccacttttaaaactagtttca

SEQ ID NO: 457781 - DNA, 552 bp, Homo sapiens
ttgtttgcaggcagtgggcaagcagggctgagaactagccccatgctatcagcctcctggctgagaaagtaaacagggcatttgtgccttcccacctgttgagtctgaacaccagattcacgctctcccctgagttctggccaggaaattttgtattcagtaggaattgttataaaggtcagcttgaggtttccttctccctgtggtcttttcccagttcctctggcagccatccccaaggacccctgtgagacaagtcagaaatggcttccctggggactgagagagcccatagggcttttcctgctgcttcctcttcccctgtatctcacttggctctcaaaattgtttcagctccgggtaaggtaaaatcctcctgtcatctggaccttcaggttccccagtgagggtgtgtgtttgagggtggatgatcctcctttcycattctcacagtttgggcactcacagtatttgggctatctcccaggtgctacaggagcaatatattatcttcaaagggtctatggatttccttggctttactagtatatt

SEQ ID NO: 457782 - DNA, 493 bp, Homo sapiens
atactatacacaatgatatgcaaactgaacttttcacataatgttttaggcatcattttgtgtttatttatataaacagacatcatagattttagtggacctatagcattcaattagatggatagaccatgatttactaaattaacttcctaatgatgatcatataggttytgttttttctttcacaataatattacactgaatatctatgtttatacctacatctatatttccagtaggacactttcctaggtgtggattgtctgtattaaggaatataccaaatttttaaaacttttcagttattttataattaaatttcataaatattgtaccaatgtataacctcatcactagtctattacatatcttaaatctccacactcccatctccatctccaggcattatcattctttttaatatttttctgatgtgatatgtaaaataaatgttttaatttggattccattgattaataatgagttggaattc

SEQ ID NO: 457783 - DNA, 600 bp, Homo sapiens
ctttcatgggctggccctgtgtctgtggcttttccaggtgcacagtgcmagctgtcagtggatctaccactctggggtctggaggatggtggtcctcttttcacagctccactaggcagtgccccattggagactctgtgtggggattccaaccccacatttcccttccccactgccctagcagaggttctccatgaggagttcactcctgcagcaaacctctgcctggacatccagacttttccacacatcctctgaaatctaggcagaggttcccaaacctcagttcttctgtgcatccacaggcccaatgccacatgaaagttgccaaggcttgggacttgaatcttctgaagccatggcctgagctgtaccttggccccttttagccatggctggagcagctggggacacagagcaccaagtcttgaggctgcacacagcaggggggccctgggcccagcccacaaaaccatgttttccttctaggccttcaggcctgtgatgagagggcctcccatgatagtctctgacatgctccagagacattttcccaattttcttggtgattaacattcagcttcttgttacttacgcaaa

SEQ ID NO: 457784 - DNA, 578 bp, Homo sapiens
agtcccccactattattgtgttgctatctatctatctcatttcttaggtccattagtaactgtgtataaatttgggagctccagtgttaggtgcatrtatgtttagaattgtgatattttcctgttgaacaaggccttttaccattatataatgtccctttttgtctcttttaactgctattgctttaaagtttgttttctctgatataagaatagctacccctgcttgcttttggtttccatttgcatgaaatacaatttccccccatttactttaagtttatttgagtccttatctacaagatgagtttcctgaaggcagcagatagttggttggtgagttcttatccactctgctcttctgtatcttttaagtggagcatttaggccatttactttcagtgttagtattgaaatgtgaggtaccattgcattcatcatgctctttgttgcctgtatactttggtttttttgtttttaggttttgctttttaacttgtgtttttgttttataggtcttgtgtggtttatgttttaaagaggttctgttctgatgtgcttccaggatttgtttcaag

SEQ ID NO: 457785 - DNA, 578 bp, Homo sapiens
agtcccccactattattgtgttgctatctatctatctcatttcttaggtccattagtaactgtgtataaatttgggagctccagtgttaggtgcatatatgtttagaattgtgatattttcctgttgaacaaggccttttaccattatataatgtccctttttgtctcttttaactgctattgctttaaagtttgttttctctgatataagaatagctacccctgcttgcttttggtttccatttgcatgaaatacmatttccccccatttactttaagtttatttgagtccttatctacaagatgagtttcctgaaggcagcagatagttggttggtgagttcttatccactctgctcttctgtatcttttaagtggagcatttaggccatttactttcagtgttagtattgaaatgtgaggtaccattgcattcatcatgctctttgttgcctgtatactttggtttttttgtttttaggttttgctttttaacttgtgtttttgttttataggtcttgtgtggtttatgttttaaagaggttctgttctgatgtgcttccaggatttgtttcaag

SEQ ID NO: 457786 - DNA, 578 bp, Homo sapiens
agtcccccactattattgtgttgctatctatctatctcatttcttaggtccattagtaactgtgtataaatttgggagctccagtgttaggtgcatatatgtttagaattgtgatattttcctgttgaacaaggccttttaccattatataatgtccctttttgtctcttttaactgctattgctttaaagtttgttttctctgatataagaatagctacccctgcttgcttttggtttccatttgcatgaaatacaatttccccccatttactttaagtttatttgagtccttatctacaagatgagtttcctgaaggcagcagatagttggttggtgagttcttatccactctgctcttctgtatcttttaagtggagcatttaggccatttackttcagtgttagtattgaaatgtgaggtaccattgcattcatcatgctctttgttgcctgtatactttggtttttttgtttttaggttttgctttttaacttgtgtttttgttttataggtcttgtgtggtttatgttttaaagaggttctgttctgatgtgcttccaggatttgtttcaag

SEQ ID NO: 457787 - DNA, 549 bp, Homo sapiens
ttctttcactttgctttacttctaaagacattttacacttgttttgagtttcttttccttttttttctttttcgacatttgttttagattctggggatacatgtgaaggatttttacaaaggtatattgtgagattctgaggtttggggtatgaattatcccatctcctgtagtayccaaaaggtagttttaaattatttccccactctaccctcttatattccccagtgtctattgtttccatctttatgtcaacatgtaccctttgtttagctcctacttataagtgagaacatgcaatattttattttctgtttctgcatcctttcacataagataatggcttctagatgcatccatgttgctgcaaaggacattattttattctatttttatggctgcatagtatttgatgatgtatatgtaccacattttctttttcccatccacaattgatgggcacctgggttgattccatgtctttgctattgtgaacagtgctgtgaagaacatatgggtacatgtgtctttttggtagaatgatttatt

SEQ ID NO: 457788 - DNA, 609 bp, Homo sapiens
atatagcgcagcactgcccaatgcaattataatgcaagctatatatatarttttacatttttttgtaggcacaacttagaaaaataagcaagtaaaataaattcaataatatattttgtttaaccaaatatgtccatatagtataatttcaacatgcaataagtattttaaacatattaagtatataagtatatattttacactctttttttatgctaagattttgaaatctggtgagtattttttacatttatagtttatatcaatttggatcaaccatatttcaagtgtttattagccacatacaactagtatctactgtattagacaacaaagtctggaaatttttttgaagactgttccatacatggccatggaaatgctgaactgttgctaccatttggaaaagaataaggtatatttttaggcctcaagatatgagggtttctattagggctgatatagaagtagactaaaacagagtttatcaactctgtttatcaacttcagcactattgacatttttggctgaataattatttgctgtggtggggctgtcttgatcattatagaatatttagcaacaactctggccttttcccaatagat

SEQ ID NO: 457789 - DNA, 609 bp, Homo sapiens
atatagcgcagcactgcccaatgcaattataatgcaagctatatatataattttacatttttttgtaggcacaacttagaaaaataagcaagtaaaataaattcaataatatattttgtttaaccaaatatgtccatatagtataatttcaacatgcaataagtattttaaacatattaagtatataagtatatattttacactctttttttatgctaagattttgaaatctggtgagtattttttacatttatagtttatatcaatttggatcaaccatatttcaagtgtttattagccacatacaactagtatctactgtattagacaacaaagtctggaaatttttttgaagactgttccatacatggccatggaaatgctgaactgttgctaccatttggaaaagaataaggtatatttttaggcctcaagatatgagggtttctattagggctgatatagaagtagactaaaacagagtttatcaaytctgtttatcaacttcagcactattgacatttttggctgaataattatttgctgtggtggggctgtcttgatcattatagaatatttagcaacaactctggccttttcccaatagat

SEQ ID NO: 457790 - DNA, 254 bp, Homo sapiens
tcttagatggatggataagaagactaacakgacttggtgatacttttagtatttgctattatttaaaccaatgattttaagcctggattgaactgtttagcttttctttcttaaaaagttagaaaagatattcttgaacctctcccagcagtaagtggaggaacaaataaatggtggatggttcaaagaaaactaatttaaactggggaaaacagatatgtatcttgcaaatggtaaattgtgaaaggttatag

SEQ ID NO: 457791 - DNA, 503 bp, Homo sapiens
caataacctatggaaaaataaattaattaattaatttaaaaatcatgatagggctgagttgtttgcaaaataaactttagtcttatagttagcctgattatttccataaagtgcagcaagaacaattatttttacataggtttttaaaattggatatgatggaactctgttccwcaaggcatctcagataggagttattaaagttgagcccaggcatgggtttgtactctcaaatacctatgagctgggtgaatttctctcttcttgaggtcctaataatatggggttcctgggtctgttagaaaatgacattctttattcaccacaggttaggaatcctatatggagactgtgtaaacatgctatcagtacagttttcccaaggagattttatcaattctgtaagccaagcttgattccttaaagggaagcatatccttctagtaaaaactttggtaaaagaaccagttcctccaattgtgtcctgttgcaaaagaaaatag

SEQ ID NO: 457792 - DNA, 503 bp, Homo sapiens
caataacctatggaaaaataaattaattaattaatttaaaaatcatgatagggctgagttgtttgcaaaataaactttagtcttatagttagcctgattatttccataaagtgcagcaagaacaattatttttacataggtttttaaaattggatatgatggaactctgttcctcaaggcatctcagataggagttattaaagttgagcccaggcatgggtttgtactctcaaatacctatgagctgggtgaatttctctcttcttgaggtcctaataatatggggttcctgggtctgttagaaaatgacattctttattcaccacaggttaggaatcctatatggagactgtgtaaacatgctatcagtacagttttcccaaggagattttatcaattctgtaagccaagcttgattccttaaagggaagcatatccttctagtaaaaactttggtaaaagaaccagwtcctccaattgtgtcctgttgcaaaagaaaatag

SEQ ID NO: 457793 - DNA, 719 bp, Homo sapiens
ccaactactatgtcaacttggaagcagatcctctccagcagaactctgaaatgagattacaacctcgagtgatamcttaattgaagtctgcagaagatccagctgagctatgcatagattcctgattcacagaaaccgtgatattataaatatgtgttgttttaagctgttatgtttgtggtaacattgttatgaaacaagagatacttaaggtattatgggatgaattttgttcccaccaacattcatgctgaagtcttagcccctcatacctcaaaatgtaatcatatttggacatagggtcttaagagaagtaattaagttacagtgaagtccttagggtaacccctgatccaatatgacttgtgtccttgtaagaaaaggaaatttagacacagacacgtccaagagggaagttggtgtggagatctagagagaagatggctatctaaaaaccaaggagagagttatgaaacagatccttttctcatcgccctcgtaaggaaccaaccctgacaacaccttgatcttggacttctggcctccagaactgtgagaaaataaatctgttgtttaagccacccagactgtggtcatttgttatgacagccctaacaaactaatacatgggggttatagtatgcagtatttccttttttaaggaacatttcataatgcttgaaagactactagtaatttaaggaacttagtttatgaaa

SEQ ID NO: 457794 - DNA, 719 bp, Homo sapiens
ccaactactatgtcaacttggaagcagatcctctccagcagaactctgaaatgagattacaacctcgagtgataacttaattgaagtctgcagaagatccagctgagctatgcatagattcctgattcacagaaaccgtgatattataaatatgtgttgttttaagctgttatgtttgtggtaacattgttatgaaacaagagatacttaaggtattatgggatgaattttgttcccaccaacattcatgctgaagtcttagcccctcatacctcaaaatgtaatcatatttggacatagggtcttaagagaagtaattaagttacagtgaagtccttagggtaacccctgatccaatatgacttgtgtccttgtaagaaaaggaaatttagacacagacacgtccaagagggaagttggtgtggagatctagagagaagatggctatctaaaaaccaaggagagagttatgaaacagatccttttctcatcgccctcgtaaggaaccaaccctgacaacaccttgatcttggacttctggcctccagaactgtgagaaaataaatctgttgtttaagccacccagactgtggtcatttgttatgacagccctaacaaactaatacatgggggttatagtaygcagtatttccttttttaaggaacatttcataatgcttgaaagactactagtaatttaaggaacttagtttatgaaa

SEQ ID NO: 457795 - DNA, 559 bp, Homo sapiens
tcctcttatattggaaagtttaaagctatatatgcacaaaggcatttcctaggagtcccaagtatgggggagagaacaaactattttttargtgcatgccaattgccaacattcaaggggtaaatacaaagcatctttagaaaacttttccccttaggaaaggaataggaaacccaactattactattaaaggtaccaagtaacatgctccccagggtttactcctttcaatttaatgtggcatagtaaaaagaacaacatcctgacagctgaagctctggacagagaaagaaaagtattcagaaggtaactggaaagaaaggggttaaggggtagaggaaggcaataaagaactagggaagaggaaactgaggcataaaacaaatttggatagaacgagctctctagtgggttatcagatggtaggactttgctgttaatccctctaccccaaacccccttttcatccacttagaaagggagcagagaggactagggtaaggaagagagagttgagagagtgtccgacatggccaacaccaagagtgcacttacgatc

SEQ ID NO: 457796 - DNA, 569 bp, Homo sapiens
actgtctcttcatgtctctcagaatgagagcatattagttgacatcatcaaagaaaaagtttgttgtaattgttgagtcattccttataataattgcttttatagccttgaggttggctttaaaagcttgaattatgaatatttcatattatattattgtcatattccatgtgcatagctcatgcaaattaattttcttatagcttcacactgacctttacttcattgaaggaaattaaattgtaaaatgaatctgcttgggaaaaatatttttcaggaaatatccctttctctatttttgttgaggtttgagagaagcctttarcattccaagttatcgatcttattatataatgtaatgaaataaaaatctagatatttaataaaattattttttaaagattaaaatgaaatactgatgtttaaaaagttggaatagagcagaaatgaaatgtagctgttacaattagctcttaatattttcaggatatgagggtaatttccacgtcatatactggcttatttgacatttttctaggctgtttaaaattgataaaatacacattacg

SEQ ID NO: 457797 - DNA, 569 bp, Homo sapiens
actgtctcttcatgtctctcagaatgagagcatattagttgacatcatcaaagaaaaagtttgttgtaattgttgagtcattccttataataattgcttttatagccttgaggttggctttaaaagcttgaattatgaatatttcatattatattattgtcatattccatgtgcatagctcatgcaaattaattttcttatagcttcacactgacctttacttcattgaaggaaattaaattgtaaaatgaatctgcttgggaaaaatatttttcaggaaatatccctttctctatttttgttgaggtttgagagaagcctttagcattccaagttatcgatcttattatataatgtaatgaaataaaaatctagatatttaataaaattattttttaaagattaaaatgaaatactratgtttaaaaagttggaatagagcagaaatgaaatgtagctgttacaattagctcttaatattttcaggatatgagggtaatttccacgtcatatactggcttatttgacatttttctaggctgtttaaaattgataaaatacacattacg

SEQ ID NO: 457798 - DNA, 545 bp, Homo sapiens
ggacgaacttactctccaagaatgtacaataattcaatcaaattgttagccattttctagcccctttcctacatacttaacacattggtggaagtatttattcatgtccttaacacactaagcctaagcctgccttaaatataatataacacacacacacacacacgcgcacaaatttgtcttgttcttcttcgcatctctgttattaaaactctctytaagcctcattttactcatctgtaaaacaaaaactcccagcttgatttttctcatatagttcatacattcattcataatatattgctagaatatctgtttagttaggattaacatgtaggagggaagaaaaacaaatgcatatactgaaaaaagtcacagagaaaagaaaaattgcttgattgtggtttagaatgggcatagttttctaattcaattcttcaactatttgagtgcccattctatgaaaatctccatgtttccttctttttttttctttttttttttacaatacttttcttctttcctaattatatcacaatatatgc

SEQ ID NO: 457799 - DNA, 464 bp, Homo sapiens
tatttgactcaaaattgtggtagcctcctatgtcatgcttacccttcaattttcttgaaattatgttttctataatttcacctgatatattttggatgtcttcttcaaatctcatgttgagaagtaacccccagtgttggtgctagggcctgttgggcagtgattggattcactggggtagatttctcatgaatcgtttaacaccatccccttagtgctgtcctagcaatagtgagtgagttctcatgagacatggttgtttaaaaaagtatgkcaccttgcccttttctctcttatcaccttctgccatgagtaagtttcctgaggccctcaccagaagcagatgccagcaccatgcttcctgtaaagcctacaaaactgtaagccaattaaacatcttatcttataaattactcagccttaggtatttctttataacagtacaaaaatggcctaacaaacac

SEQ ID NO: 457800 - DNA, 417 bp, Homo sapiens
ttaagagaaatgtgagactcattaaatgaattaatacatgcataatggaaatactcgaagaaaaataggaacaaagagcaaaaaaattttttaaaaactcctaacatttcccagatttgctgaaaaacattttacatatccaagaatttcaacaaactccaagtaggatatatgcaaagagatccacagttagaaatatgagtaaaaakgctcaaagtcaaaacaaagagaaaatgttaaaggcatcaagagaaaaacaacttacatagtggaccacaataaaatttacagttgagtcattataagaaacaatggccagaatgcagtgagatggcagtcaaacttcataaaaaatattctcaaccaaggatcttatatctagaaaaactatctttccaaattcaggccaaaccaaag

SEQ ID NO: 457801 - DNA, 585 bp, Homo sapiens
ggtggtgagtgagtgtgctacccagctgaggaaaccatgctttttccatggatctgtgcaactcatggattggaagatcccactcatgaacccacaccactggtgcctaggatctcaaccccagagctgcamagattctcaacagcctcttagatgaaagctgcttaagtctgcctagctcctgggtgaggggcaaccagcaccacagctgctgctgcctgctgtggaagccctttgagccccttgtgtgagggcagcagccagcactgggactcacaactgcctaacaggctaagctccctgggtaggggaagggcggcatccatctctatagctccagtctgtgcttttcccctgctgcagccagggaggctggacagcttggtcccaagaggtgtcccccacagcccaacacaccagctgtgacagactgcagccagagtgcctctccagaactgaccctgacccattattcctcactgggtggggcttcccagcaggaactccaacaacttcagctagggtctcagggacagaacctggatttccctgagcctgagcccacagggggaggggtggccacag

SEQ ID NO: 457802 - DNA, 571 bp, Homo sapiens
caaacctgctgatgtctatttaattgatgaaccatctgcatgtttggattctgagcaaagactgatggcagctcgagttgtcaaacgtttcatactccaagaaaaaagacagcctttgttgtggaacatgacttcatcatggccacctatctagcggatcgcgtcatcgtttttgatggtgttccatctaagaacacagttgcaaacagtcctcaaacccttttggctggcatgaataaatttttatctcagcttgaaattacattcagaagagwtccaaacaactataggccacgaataaacaaacttaattcaattaaggatgtagaacaaaagaagagtggaaaccactttttcttggatgattagactgactctgagaatattgataagccatatattaagaggagtatttactagaattttgtgtcatataaaacttgaatcaggattttatgccccacatactctggaacttgaagtataatttacttaatataacataaaagccagttgggttctaaattgtagttgaaacacagaaaatgccacttttctgttcctgaagagg

SEQ ID NO: 457803 - DNA, 545 bp, Homo sapiens
gttgtcctgtattacctgttcagcaattttccaagtcatttctcccctaaagtttgtggtacagacacactaatatagtgtctccaacacccaagccatttgatcaaggcatcctatttgcatgtaggagagaaataaggactatttaatggtagctgctgcaataattatagttattattgtttttggctacaatctggtctctaaatgatgcatttcttaatttgagagttttctctccttatttatgagactgaagtgtagaaatcatgattatgctcaatgaacttatgtcactggatgcatttkctatttgcaggtatagagaagacctaagaaagaccaaggagaatttgtgtcactaaaatttgaagctttgattccgaaattttattcagcctgagttggtcatttgacttttactgctatcaacttgggagttaaggtggttatggtatgggggtgggttttagggcaatatgtatgatgaagactgaaaatcaagtttgcagaaagaaaacaaaacaaaatgaaaattaaataaa

SEQ ID NO: 457804 - DNA, 545 bp, Homo sapiens
gttgtcctgtattacctgttcagcaattttccaagtcatttctcccctaaagtttgtggtacagacacactaatatagtgtctccaacacccaagccatttgatcaaggcatcctatttgcatgtaggagagaaataaggactatttaatggtagctgctgcaataattatagttattattgtttttggctacaatctggtctctaaatgatgcatttcttaatttgagagttttctctccttatttatgagactgaagtgtagaaatcatgattatgctcaatgaacttatgtcactggatgcatttgctatttgcaggtatagagaagacctaagaaagaccaaggagaatttgtgtcactaaaatttgaagctttgattccgaaattttaytcagcctgagttggtcatttgacttttactgctatcaacttgggagttaaggtggttatggtatgggggtgggttttagggcaatatgtatgatgaagactgaaaatcaagtttgcagaaagaaaacaaaacaaaatgaaaattaaataaa

SEQ ID NO: 457805 - DNA, 592 bp, Homo sapiens
tgcttaatgaagtaagggaaatacgaaggtgagaaagtcttgagtgagagaagctgggcctcatgcttgtgtgactaagtgacttttatgtgtagaggcatctaatatttataactgttagtgttgctgtgaagttaacccctaatgtagccccaaacttctataaagtctaccacatcataaaatgccttttatgaatgcctggcttgtttgtttgtctgttttgagaaaattaaaggggtgaagttaaacatctgtgtgagccctgaggagggtgtgggtgmgggggagagagaggaggagagaaactgtgagttacactgagaattaaatagatgcaaggacatggagtctgtttaaactttaaaaattctcatatattggtgaggatgttggattgcccacagattatgggatacagtactcagaaaaattttatttaaaattcaaaggtttgagtaactttagctgggatcttagtagcagtccaatatattatctccttgtttatgccagccccaaatacatgcctgttacttgaaatcgaagtaaatgtgaataagacagtttacagcatatttagtaaccaagg

SEQ ID NO: 457806 - DNA, 592 bp, Homo sapiens
tgcttaatgaagtaagggaaatacgaaggtgagaaagtcttgagtgagagaagctgggcctcatgcttgtgtgactaagtgacttttatgtgtagaggcatctaatatttataactgttagtgttgctgtgaagttaacccctaatgtagccccaaacttctataaagtctaccacatcataaaatgccttttatgaatgcctggcttgtttgtttgtctgttttgagaaaattaaaggggtgaagttaaacatctgtgtgagccctgaggagggtgtgggtgaggsggagagagaggaggagagaaactgtgagttacactgagaattaaatagatgcaaggacatggagtctgtttaaactttaaaaattctcatatattggtgaggatgttggattgcccacagattatgggatacagtactcagaaaaattttatttaaaattcaaaggtttgagtaactttagctgggatcttagtagcagtccaatatattatctccttgtttatgccagccccaaatacatgcctgttacttgaaatcgaagtaaatgtgaataagacagtttacagcatatttagtaaccaagg

SEQ ID NO: 457807 - DNA, 592 bp, Homo sapiens
tgcttaatgaagtaagggaaatacgaaggtgagaaagtcttgagtgagagaagctgggcctcatgcttgtgtgactaagtgacttttatgtgtagaggcatctaatatttataactgttagtgttgctgtgaagttaacccctaatgtagccccaaacttctataaagtctaccacatcataaaatgccttttatgaatgcctggcttgtttgtttgtctgttttgagaaaattaaaggggtgaagttaaacatctgtgtgagccctgaggagggtgtgggtgagggggagagagaggaggagagaaactgtgagttacactgagaattaaatagatgcaaggacatggagtctgtttaaactttaaaaattctcatatattggtgaggatgttggattgcccacagattatgggatacagtactcagaaaaattttatttaaaattcaaaggtttgagtaactttagctgggatcttagtarcagtccaatatattatctccttgtttatgccagccccaaatacatgcctgttacttgaaatcgaagtaaatgtgaataagacagtttacagcatatttagtaaccaagg

SEQ ID NO: 457808 - DNA, 489 bp, Homo sapiens
tttcatgagaaatgtaattcctttagccaggctttcagcatgtggaaaggccagatgcttgcacaaatgaaacagtgagacagccagcccttaaggtactccctctgccaacatcttcacctcaaccctcctgacaagcgtataaatctaggcatggccgctgtgtatcacaggctcctgcctgcatgctgttcacctgttttcttaagttgtgtagtctatacctttcctgaaagcgcagcatggagggagatagctcctgcaccttatgcagctcagggcactcaggctacgcactggagaaagtgaagcttgtaatgtytaaataagtattctaagtgggcaatttcagtaaattgaatggcagtcaatggacctttctgctactttcttcctttcatccattaccattacttctatgtgggaggttttagctcggagcagatgttacagtagagctcgtgaataacagaaattttgaactgtttt

SEQ ID NO: 457809 - DNA, 608 bp, Homo sapiens
  misc_feature (1)...(608): n = A,T,C or G
tcttgttgcccaggctgaagtgcaatggcgtgatgtccgctcactacaacctctgcctcccgagttcaagtgattctcctgcctcagcctcccgagtacctgggattacaggcatgcaccaccaccacgcccganaaattttgtatttttagtggagacggagtttcttcatgttggacaggctggtctcgaactcctgacttcaagtgatctgcctgcctcagcctcccaaaatgctggggttacaggcgtgagccactgcacccagccacaggaggctaattattttaaggtcagttcaataacaggagacaaagattttggtgtgaaatagaaattagatctctaaataaatatgagacaattgaagtctcctcactcagtgaaagggtgggctagaaaagacactgatgcaggaaaaaaataaataaaatagtgtgagtggaaaaagttcctgaggatttkagccacaggtctaacctaccaagggtcagcagttcaaatgtacactgtcaaattgattcactagaccctagaatctctgacagacacaaatgcaaattttctctcaatgtgtgcaaattcaagccagactttttaggattctc

SEQ ID NO: 457810 - DNA, 423 bp, Homo sapiens
tgactattaggtccacattctttgtgtggtaccaatattttcctatcatttttatacctatacattagaaaaatctcttgattgttatgtttgtacaaaaaacatatttctaaaattatatttatttcaaaatrtatgttatgttttaagtcataaaaaataatttgggctccatcaacagtgcatatatatatatgtgtgtgtgtatatgtgtgtgtgtgtgtgtgtgtgtgtgtatatatatatatatatatatatatatatattattgttacttccagtggtgaaaaatatgcagcttagctgattggaaagcttctcttactgaccccatttcacatacaaaactcaccaagataccaaagatactattatacgtctgtatataatttttatttatttatttaaattttaggttcaggg

SEQ ID NO: 457811 - DNA, 561 bp, Homo sapiens
ctcatacctgaattcctgagaaaaaaaaatgacctatgtaaatataattactaaataataattggtgggggaattctgatattttgatgatgacatttcatggaatgatacaaaacataaattattgatattcatttccaaacttgagccaaataaaggccaactgagaatcaactatatttttttaattatcattatgagtacatacatatctttgactattaggtccacattctttgtgtggtaccaatattttcctatcatttttatacctatacattagaaaaatctcttgattgttatgtttgtacaaaaaacatatttctaaaattatatttatttcaaaatatatgttatgttttaagtcataaaaaataatttgggctccatcaacagtgcatatatatatatgtgtgtgtgtatatgtgtgtgtgtgtgtgtgtgtgtgtrtatatatatatatatatatatatatatatattattgttacttccagtggtgaaaaatatgcagcttagctgattggaaagcttctcttactgaccccatttcacatacaaa

SEQ ID NO: 457812 - DNA, 539 bp, Homo sapiens
aattggttacctcattttatcttgaaatattgagaaagggatcttgaagaattgatatagacagatcagagactatcaacggcacagaggtgagagaacagaggccagagaataggggcaacctttctaagcctcttcaacatgaatcccatactaaatatctggtccaagaaagggcaagtgacaaaataaaggcattatcagctaatttcacaaccttgtcaaggactgatgttgttctcataacctggaaaagtaaaccatctaagatattttctagaaatatcttctcatgttatttttgttctttctaaagtttttctatatctacaaatgtctttatatttcttttgtatccccacgaagayacattttcaattttcaatttttcatacctcatagtctgtactatattcattcttatattggagaatcatgttcttatataaattacttttctaagcaataaatgtttaaaatgtcagactcatctgtgactccctcttttccttgcccacaagtaatatgctaacttttct

SEQ ID NO: 457813 - DNA, 584 bp, Homo sapiens
agtcaagtgtttatgaagtgatagaaaatgtattagtgttattctgttaacaattatgaaaagagtaatcagttcgatttccaactaaatatttactgaagtgtagcacatatacagaaaggtaggcaaattgcaataattttataaagtacacattcctgtgtaaaaccatccagatcaaggaagagaaaattaccatctttctagaagcctccctcatgamctccttcagtcaatacctctcctaaaggtattgctgtttctgcctccatagactagttttgactgcttttgaactttatataaataaaattaaattataatatttacttgtttagtttctttttgtatatgtattttgacacagtgtgttgctgtcgctcaggctgcagtgaagtggtgcctatcagggaaacctgcccccaatatttcaacataggttcttgctattttccctaagtgttggctggtccatgaaataaaaagaaagagtacaaagagaggaattttacagctgggccaccaggggtgacatcacttatcggtaggacagtgatgcccacctaagccacaaaaccagcagg

SEQ ID NO: 457814 - DNA, 472 bp, Homo sapiens
tgatattgtttccttagacaatccaaattcattctttcctcaccccaaccactatattcactttaactttatgtgcttaaattattcaattctaagtgaagctatcttagaaatcaataaacttagtttacagagtatttccaatgcaaataattgtttaaaactgtagtgtatatgtgcatgtgtgtgtagtcttgtaagaagcattcaaattttatttttcgtttcttgtttctgaccttccatttccaatatcytttgcctctcactggattgtgaatgtgccctttccctacatctgaaaatctttcaaccttcaccattcattctaagaatcagcaatatgttacgtttttatagaacctttcttccagggaacagagagtgtttcacatatattaccacattcatccttaaaatttctctcacaacacccatagccctgcttaaactatgattcagttgaaacctc

SEQ ID NO: 457815 - DNA, 468 bp, Homo sapiens
ttacttggatgagactaccactactcataggttaaaaataaatcagacttaaaagtaagtcattacctctaatcagaattaaaataattcattacrttcaatatgcatttcaaaatgaaatcaaaatcattacagagaacttaagaggtaagagctattattctatagaggatttgttttctatttttttccctgagctatctagtgccccattttgtttttgttttgttttgcttaatgaaatggcatacttatacagtcatgtatcaattaacaaaagggatacattctgataaatatgtcattaggtgatttcaatgtatgaacatcatagaatgaacttacaaacctaagtggcatagcctattgctcctaggctgtaagcctgtacaccatgctactgtcctgaatactgtaggcaagtacttgtatatctaaacatagaaaaggcatagtaagattggaaag

SEQ ID NO: 457816 - DNA, 456 bp, Homo sapiens
tattattaatttaacttcctactgctacattagcagtttcagaaaaaaagagaataagaaataacatgagaagaaacaaagcaaatttagaattagctaactgactaaaaatatttttatattttttcagcttggctgaccttaarttaaacatttgtacatttttatgtctggcagcaacaacaaaaaaagattctaaacactaattataatgcttaaggatttacaaaactttgactccccatatcatttataaaccttgcaattagcatatttttaaaggattgactgtataacaggtaatattaccatgactctatatttttaattcatctaattgaatatctattttgaatttgaattttcagtttaatgaagaaatatcctaatatttaaattctaaagctaagacttcatgtctctaaaatatgtatattaaaagctattaataaaatt

SEQ ID NO: 457817 - DNA, 538 bp, Homo sapiens
agtcttagtttcctcatatttaaaatatgaataaaaatattgactatctcatagaataataaccaaggagataatgctcagaaagtttctgacacgkatttctgaagtattttaactattattggttaaaatcctcaattattttaactgttatggtgtttttcccacaaatcttttatgacattcttacttggatgtcatacaatcaaatcggcatttttttttaaaaaaaaagaacattgcttagcacttgcatcaagataaaatatgatacttttgcttaaattatgcaagtaccagaattaaggtcttattaatttttttatcctacctttaatgatgaagtataaacagcagtagtttcttaggttaatagtggggtctcatgtagatttaaatgctctatattgtctttgaatatgcctatgaaattactatgacaggaaagttaaggaaaccatatctaaatgttctacatatctctaaaccttttttttatgtattgattttcctaaccctgtttttttaatggattgcc

SEQ ID NO: 457818 - DNA, 581 bp, Homo sapiens
ttcaacaacacctttaaaaaaatcaagtgggatttattcctgggatgcaagtatggctccatatatgcaaattactagatgtgataaaccacattaatagaatgaaggacaaaagattgtgatcatctcaatagctatagaaaaagtatttgacaaaattcaacatcttttcatgatagaaaaaatctcaacaaattaggcatagaaggactgtccctcatcataataaataatatacgtaacaaatctacagttaacatcatattcagtggtgaaaagatgagaggtttttctctaagattaggaacaaattaaagtaaatgggaattatctgtattagctgcttaatttttctgtaaacctaaagctatttttattaaagtatattaattaaatcaaaaattataaatgcaaatatctgatatgaatcattgtccagagaaactttctaggatttactcctgagatagatcagattagtcatttgtaggtcacatcttgctttagaatatayacttggaaaacaccacaggattagagtagtccagtttataggaaattaattaagaagccatttcaga

SEQ ID NO: 457819 - DNA, 470 bp, Homo sapiens
gcagttctcctgtggtgtgaaagcatatagatttttattagctctctaaactgagagtgagatgccatctgtacaggggcattgacagaatattattgattctgtctgtaataaagccaagtcagggcaactattgtgtgctgagccaccttgaacttccactgctgccaattgttttcctagagaattgggatataaagttgatccttattaagatttcaaattagcgtaggcttttttcttttcatttgttaaaataaactgcctctgtgtcttccacacttcttgacctgaccatcttttgcccttctttttctactaaacrtatgaaatccttttaagaggaaccattttcacaattatgaaagagaacgaagtccctttacgttcataaaaacatatactattccttgggatagagtagtgaaactgaacccaggtcctgcgcaacccatgcctaccacaactgt

SEQ ID NO: 457820 - DNA, 553 bp, Homo sapiens
caagccttggtggcttgcacatagtgttgaggctgcgggttcataggagtcaagaattgaggtttagaaacctctgtctggatttccgaagatgtatgaaaacgcttggatgtccaggcagaagtttgctgcatgggcggagcccgcatggagaaactctgctaaggcagtgtagaagggaagtgccctagcagagcccccacacaaagtccccactggaccactgcctagaggagctgtgagaagaatgccaccatccttcagaccacagaattgtagatccaccaacagcttgcactgtgtgtctggaaccaccacagacattcaatgccagactttgaaaacaaccagaaggggggctataytctgcaaaaccacagaggcagagctgcccaaggctgtgggagcccacattttgcatcagtgtgacctggatgtgagacatgtagtcaaaggagatcgttttggaactttaagttttactgactgttctgttggatttcagactagcatgggccgcccctttgttttggccaatttcttcaatttggaa

SEQ ID NO: 457821 - DNA, 553 bp, Homo sapiens
caagccttggtggcttgcacatagtgttgaggctgcgggttcataggagtcaagaattgaggtttagaaacctctgtctggatttccgaagatgtatgaaaacgcttggatgtccaggcagaagtttgctgcatgggcggagcccgcatggagaaactctgctaaggcagtgtagaagggaagtgccctagcagagcccccacacaaagtccccactggaccactgcctagaggagctgtgagaagaatgccaccatccttcagaccacagaattgtagatccaccaacagcttgcactgtgtgtctggaaccaccacagacattcaatgccagactttgaaaacaaccagaaggggggctatactctgcaaaaccacagaggcagagctgcccaaggctgtgggagcccacattttgcatcagtgtgacctggatgtgagacatgtagtcaaaggagatcgttttggaactttaagttttactgactgttctgttggatttcagactagcatggsccgcccctttgttttggccaatttcttcaatttggaa

SEQ ID NO: 457822 - DNA, 568 bp, Homo sapiens
ttaagaaagaagaatgatgatgaaaagcattcagcccaggtttgattcagtggcataacctgactttacctcatggaaaaaagctaacaaaaataatgcgagatgtgttgtttctctcaaagcttgattttggtttttccaaaataaatagccacagtactgtttattttccttgacttctaccctgctgtcctctgccctcaaatactgactgtatggacatattatgttcatctaagcagagataacaaascccaacaaacagctaggatttggaatctgaatcagggttgctctagggggtgaagagggctgtagaaggagaaaagaagctgcagcaggcagaggtgtaagaaatttaatgcccaagacccaatgctacaggaagaaacctgagagcagaatataacttgcagtgtggtttttcatacattgcagcaattcagatcagcagagaaacatgctcgtgtccctgaattattataggactcatcagaaaattttaagacactcttttacatgctcaatatggtttcagaaaatctgactttctttgtcaagaaatgca

SEQ ID NO: 457823 - DNA, 457 bp, Homo sapiens
tagtggtccttggtggtctgatctcctagccatctgctccaagctcatgctcccagtgctctctggctctggtctttatgaacattgctacactctggctttctggtacccaactgcagccaagacagccctcccctttttctcccaccatgagcctaatcctcccgggagtctggagagaagtggggatttttctgggggagaacagctcacccttgagtgctaaaatgtaaamcccccatagtataaaagccagttgatacttggaagagtcttgaagaagaactgcagagacacagagagaaaggaaggaaagagggaaggaaggaaggaaggaggaaaagaaggaaggaaggaaggaaggaaggaggaaaagaaggaaggaaggaagggagggaggaaggaagggaggaaggaaaggaaaaatagaaaagaggagagaacaccttgcccttgt

SEQ ID NO: 457824 - DNA, 618 bp, Homo sapiens
gattatccagcaatagaattgctatttttagtagagatggggtcttaccatgttggccagactggtctggaactcctggcctcaagtgatctgcccacctaggccttccaaagttctaggattacaggcataagccactgcaccgggcctaggacaatgctctttgatgatcctttgaactcaacacctcaacttccatggctaaggccacactctgctcagagtcagatacagatagagctgtttttgtttttatttttccattgattccggtggtattgatgtcatcagtactggaatyaaggtctctaaatggttttcctaaggcaggtaattctgagattcacaagcaacaccttccttaaagacaatgacgatggtggatagatatgagaaagaaaggagagagagagaaaaacagaagctgcccaggcttccaacccctgagagataaagatgttgggatctcagccaacacctttaagtaataaggagtgatgggagagaaaggctgacagtttgtgacatgtgacatgtgactttctaatgatccagagacaggatttgttctaaacagaaacagcttgtaaggtgacatcaggaacagtttccaatcca

SEQ ID NO: 457825 - DNA, 618 bp, Homo sapiens
gattatccagcaatagaattgctatttttagtagagatggggtcttaccatgttggccagactggtctggaactcctggcctcaagtgatctgcccacctaggccttccaaagttctaggattacaggcataagccactgcaccgggcctaggacaatgctctttgatgatcctttgaactcaacacctcaacttccatggctaaggccacactctgctcagagtcagatacagatagagctgtttttgtttttatttttccattgattccggtggtattgatgtcatcagtactggaatcaaggtctctaaatggttttcctaaggcaggtaattctgagattcacragcaacaccttccttaaagacaatgacgatggtggatagatatgagaaagaaaggagagagagagaaaaacagaagctgcccaggcttccaacccctgagagataaagatgttgggatctcagccaacacctttaagtaataaggagtgatgggagagaaaggctgacagtttgtgacatgtgacatgtgactttctaatgatccagagacaggatttgttctaaacagaaacagcttgtaaggtgacatcaggaacagtttccaatcca

SEQ ID NO: 457826 - DNA, 532 bp, Homo sapiens
tgtaagcatatgtattagatcatgtatgttatgatgttatttaactatatgcgttgttgtgtattctataatattaagtatagattttttacatgcacatacattcttactgtataatttttgttcgtttgtttctttctttctttttgtttgtttttgagacagaatcttacttcatcacccaggctggagtgtagtggtgcgatcttgactcactgcaatctccgcctcctgggttcaagcgattctcatgcctcagcctcccaagtagctggaattcaggcgtacgtcaccacgcccagctaatttttgtatttttggtagagacgagttttctccatgttggcctggctggtctcgaactcctgacctcaagtgatctgcctgccttggcctccsaaattgctgggattacaggcgtgagccactgtgcccagctttactgtgtaatttttacacatcaatccacactcacaatcatcttactattgcatgttttaacagaggtggaattgttacagatcattgtagg

SEQ ID NO: 457827 - DNA, 544 bp, Homo sapiens
gaattggtgggctgagtagagtagatggccttccccggtgtgggtaagcctcatccaaaccactggaggtctaaacagaaaaaaaggctgaataaaagagaatttgctctccatgtcttactgcttaagctgaagcattggtcttcccctgcccctaaactgggacttacaccattaccatgcctgcatcttagggttcagatatgaattagaacttacatcttcagtgcactggttcttggatcagaactgaaacctggttctggttttggcctttgttcttggatcagaaccgaagccattggttctcctggttctcaggtggtcggaaataggctggaaactacaccttgacttttctaggtctctagcttgcagatgcagattgtgggactactcagtctccatcattgtgtgagccaatttctcataattaataargtttattaaataaaacttatatcttattggttctgtttttctgggaaacgcatactaatacagtgtcctagccaattcctaatagatcagcctaagttcaatg

SEQ ID NO: 457828 - DNA, 598 bp, Homo sapiens
ttgaaagccagattatttttaaaattgtgatttttccatgaatccttttatacattacaggcttaatactattttataaattaaatagaaaaatttgagagtaatctgtttggcatactactgtcctatttttacaaaagttttattataataactacatttaatttttatcttcatatgccatattatcttcttataattgtattggacattttggaaaccttctgaatcaaattgacaaatgtgattttgctctgatgtttagtgattttatttattgttgttattttactacacgtagttatctcctttctataacttgccatttctccaattttttaaacaatgcattcctgctataaaagacaaacaatatagaaatgcattaaataaaaagtaaacattgctcttattcctactctacaaaargagtagttaaccacttagtatatatgcttatttatatacttagtttatatgatttctttctagacacatagaagcatatacttttgatattattttatatttttacataggtatgtatacctttatgaaattagtactatatgatttattatttatttatttatttatt

SEQ ID NO: 457829 - DNA, 546 bp, Homo sapiens
cataaccccagtcaatcacacttatataactacatttatttttgcatgttccyttctcatctttttttttttgccatcaatctgtttatatgtgtcactgatgttattctgagttttcacttggcaatatttaatagacattataccataatctttgtcataatcactttaaaattttaataactgtttgaattagtattacctaataagcatcttgccttcaattttacaataatcactgaaaacattttaattcctcttcaatattccatacagtgtatatgccataattgaaggagccatttccttgatgcttgttatttaggtttcttccagttttctctaacttaaattatgctccaatgaaaagctttcatatctatggaaacagacacagtaaaaaagagagaatgacaatgccgtaaaatgttagcatttggatagcaggtgaagagtatacaggaattctttgaaatatttatgcaactcttctataatactgaaataatctcaaaataatataaatgtatatgtgaatcagtggaa

SEQ ID NO: 457830 - DNA, 616 bp, Homo sapiens
ggccttagtagtagtggcagtaggttgggtgagccagttctcatattaatcaatttagaatgtactgtatgaattttgtttactttttaaataacaaaattttatatttattattttttcctcttattcatcttttacaaattttttctattattttctttgcacatatttttacatctttaagtatattcataggcatttgactttagactacttttctcttgactttaaacctttttaatttttctgtaagtactgctttagctgcaaccaccaaatttttatatgttatggattcatcatcattatatttggaaatattattcaatttatcttaagatttctttcttaaccttgtgaattatttaaaaatgtattaattttcaaatatcttgaatttcyatagctatattattgttttagctaatttaatttcactgtgatcagtgaacacgcactgtgttatttctgtcttttaaatttatgtgtaagtgttttaattgcttagcacactgtttattatggtgaatattaccacatatccttgaaaagtaatgtatattctatacatgttatatgtagctttctatagataaaaattaggtcaagattgttg

SEQ ID NO: 457831 - DNA, 575 bp, Homo sapiens
cattcactgttatgtttaaaaatcttcttaaaactgtctgacttttatatcttccaattcctttgtatggcttttgatttctctattactatcccatagtccatccctggagggtgctaattatttcccccagcacctcaaaaatctggcctctatgagcagtccaatggtgactgtaaaactcactttctctgtacgcagtgcaatgttcagaatactttaaaggccagcgtgttcttttgtcaaataataaagaaactgcaattcagaagttgatttttatgtgttccaaaccaacaattcctcaagtgtccaactgtttaacttggctyttttccttttccactacagggggtaatggtaatgtttggggaactcaacatgactatataagtctgttaatggaataaggggaactttagtcagaaagccaatgggatggatttttttttctttgctgttaaaaggcatacattatgtgattacttaaaaataaaccaggacactctattctggatagtttttattatgactatatttaacaatataaaaaccaaaaccctgttcatattaca

SEQ ID NO: 457832 - DNA, 610 bp, Homo sapiens
atgtacttagcatacttacaaaatacaggttgagaagggaaaccacacctgcactcactctctatgtctctgcctctctgtctcacacacagtcacctgaatatttacatgtaccagagaactcactcatctatctgaccatccttctttttctttcctctttaccctgcaatatgtgagaatagaatcagaaggctgaaaaaggctctgttttaggagtgttgcttttctacatatttctcaaaggaaattgaacattatctcaaccaccactaaggtaacataaattttgaaactgaggggagtacaagtgtattgttgtggcttgttatacctcatgatctagaataatatggtcatgtccaagtgatgtagtgaaatctagtctatgttaactggagaagttgcacaagatagaagaaatccttggaacctgggtggtctctgtcaatagataatttgtacactgaggtaagaaactgcattaaaggttgakttttccttagtgctcatgtctggtaaccactatacattgatgttttctgatcataactgtgaaagtcaaggcatttcttgattttacctcaagtcttatttccaggtgtcatac

SEQ ID NO: 457833 - DNA, 608 bp, Homo sapiens
ttaaacacttttctacagtcattctgccactaaaaatagagaccttacctcatcatcctccagctttttggcatctctggttccctttttctcttctcacttcacccactcccacattttctttttcagtcaaccagccaaccaaccaaccaccgacagcaaacacctgcaaaactgttcttatgttatcagataaaggagcattgtatgctgatgaatatttggactgaggagttggttcaaatcccagctttgccacttacacctgcagtactttggttaagtcasttaacctccctatacttcagttttatgatctagaaaatgaaggattatagaattcatgccacataaagtagttatgataattaactttgttaatatggataagcacttgctttgtatagagtaagcaaaaaaaaaaaatgccttttattgttgtttcttggactctatcagtgtgtcactttcaatctccaatgacttaccacgattgtttccagaaaaacaccttttgctttctaagagaaattctggtgccagatgctcagggaatactggttttatattattaaaaatgttttcatcctagaaatgatttgtagaat

SEQ ID NO: 457834 - DNA, 608 bp, Homo sapiens
ttaaacacttttctacagtcattctgccactaaaaatagagaccttacctcatcatcctccagctttttggcatctctggttccctttttctcttctcacttcacccactcccacattttctttttcagtcaaccagccaaccaaccaaccaccgacagcaaacacctgcaaaactgttcttatgttatcagataaaggagcattgtatgctgatgaatatttggactgaggagttggttcaaatcccagctttgccacttacacctgcagtactttggttaagtcacttaacctccctatacttcagttttatgatctrgaaaatgaaggattatagaattcatgccacataaagtagttatgataattaactttgttaatatggataagcacttgctttgtatagagtaagcaaaaaaaaaaaatgccttttattgttgtttcttggactctatcagtgtgtcactttcaatctccaatgacttaccacgattgtttccagaaaaacaccttttgctttctaagagaaattctggtgccagatgctcagggaatactggttttatattattaaaaatgttttcatcctagaaatgatttgtagaat

SEQ ID NO: 457835 - DNA, 608 bp, Homo sapiens
ttaaacacttttctacagtcattctgccactaaaaatagagaccttacctcatcatcctccagctttttggcatctctggttccctttttctcttctcacttcacccactcccacattttctttttcagtcaaccagccaaccaaccaaccaccgacagcaaacacctgcaaaactgttcttatgttatcagataaaggagcattgtatgctgatgaatatttggactgaggagttggttcaaatcccagctttgccacttacacctgcagtactttggttaagtcacttaacctccctatacttcagttttatgatctagaaaatgaaggattatagaattcatgccacataaagtagttatgataattaactttgttaatatggataagcacttgctttgtatagagtaagcaaaaaaaaaaaatgccttttattgttgtttcttggactctatcagtgtgtcactttsaatctccaatgacttaccacgattgtttccagaaaaacaccttttgctttctaagagaaattctggtgccagatgctcagggaatactggttttatattattaaaaatgttttcatcctagaaatgatttgtagaat

SEQ ID NO: 457836 - DNA, 568 bp, Homo sapiens
aatgaaatgataagcacaaatatttaaggtcatctcctgggtacaggaataacatgtgaacagtagctcccaggacattttaaaataaaatctaaagtcaaaggagatgctctttaaagtaacggagaggtgtgggaagggaaaagactgattaacaaagattagtgccaaattaatttaaggaacaagacaaattaaactgagaatgcagacttctagttgctccaaatgaccatcaacaccacccagcaccttgttaggaatacaaattatgggggtcctcaccctggctgtgaactcagtcgtaatcagaatctttgtaggctggccccaggaatctgtgttttaataagattcccaggtgattcttatacttgctcagtttgagaagcactatggaatgtgcatttctgagttatgcacrtcctttaaaataactgcgatacacacatacacacatacaagagactgtcattcagtctttaaaaaaagaaggaagttttgttatatttgagacatatataaacttggaggacattgcgctaaagaaaataagcaagtcgcagaa

SEQ ID NO: 457837 - DNA, 593 bp, Homo sapiens
taaattgatgactctaaaaattaaaacaaagctgaaaaaaatatatattgagcacctagtatgtgacaggtgctgtgatgaacagaaataacttcaggtcaaatgcctgattgtgtttagttaaaagggacactaatggcaactgcatgtcatgtgccatgctttgtactttcatagcacatctcgtttaatccttacaactcagagaaaaatacatataatggatctcatctatgttacaaaagtcatatatgtttaaaagtaacatcttaaygtatttcctatatataattaaatatatatgttttgcagttatattatggcatggagatgtaaagttggagccattctgctttgatttaaatatttgtttcaccagttattagcttcgtgcccttgaacaaattagtgagcttctctaagtatcggttctttccctggaaaaacagagatattcatgatctgtatctcacaaggtagttaagaacatcaatgagataatccatttgaagcaaatagtcaagtgttctgcatagagctaacacttcataaatgtcataactattattattttgtgaatgtatagaaaccta

SEQ ID NO: 457838 - DNA, 591 bp, Homo sapiens
gtgacaggtgctgtgatgaacagaaataacttcaggtcaaatgcctgattgtgtttagttaaaagggacactaatggcaactgcatgtcatgtgccatgctttgtactttcatagcacatctcgtttaatccttacaactcagagaaaaatacatataatggatctcatctatgttacaaaagtcatatatgtttaaaagtaacatcttaatgtatttcctatatataattaaatatatatgttttgcagttatattatggcatggagatgtaaagttggagccattctgctttgatttaaatatttgtttcaccagttattagcttcktgcccttgaacaaattagtgagcttctctaagtatcggttctttccctggaaaaacagagatattcatgatctgtatctcacaaggtagttaagaacatcaatgagataatccatttgaagcaaatagtcaagtgttctgcatagagctaacacttcataaatgtcataactattattattttgtgaatgtatagaaacctactctgaggtaactcacataatttattaatggtagtgtggcctgggaagagaattgtagta

SEQ ID NO: 457839 - DNA, 591 bp, Homo sapiens
gtgacaggtgctgtgatgaacagaaataacttcaggtcaaatgcctgattgtgtttagttaaaagggacactaatggcaactgcatgtcatgtgccatgctttgtactttcatagcacatctcgtttaatccttacaactcagagaaaaatacatataatggatctcatctatgttacaaaagtcatatatgtttaaaagtaacatcttaatgtatttcctatatataattaaatatatatgttttgcagttatattatggcatggagatgtaaagttggagccattctgctttgatttaaatatttgtttcaccagttattagcttcgtgcccttgaacaaattagtgagcttctctaagtatckgttctttccctggaaaaacagagatattcatgatctgtatctcacaaggtagttaagaacatcaatgagataatccatttgaagcaaatagtcaagtgttctgcatagagctaacacttcataaatgtcataactattattattttgtgaatgtatagaaacctactctgaggtaactcacataatttattaatggtagtgtggcctgggaagagaattgtagta

SEQ ID NO: 457840 - DNA, 530 bp, Homo sapiens
tacttcatcacatcattcttataaacatttatgtctaaaaatgtactaattagatgttatatgtcattatttatgactyttatgaactaatatgaaaaatatattcaattattcattagctttggatggcaactctactctgtttttaataaaacttatggggttcatctcaaatttcagtgacatgaactaataagattaaaggtggcattttgacggacagctagaaatcaaacttgagaacctcactgtgacaaatacagtagcctactctgatatttctaggtgtcataaggatgaaattagattttgttgtaacatcggcgataatagaggaaaacatattttctttgaaactagggggtttgagggttcttttcaaatttgttaatcgatttttatgtaataaatacttttttattctgtatgcaggaatttttttaattattattatactttaagttttagggtacatgtgcacaatgtgcaggttagttacatatgtatacatgtgccatgctggtgcgctg

SEQ ID NO: 457841 - DNA, 530 bp, Homo sapiens
tacttcatcacatcattcttataaacatttatgtctaaaaatgtactaattagatgttatatgtcattatttatgactcttatgaactaatatgaaaaatatattcaattattcattagctttggatggcaactctactctgtttttaataaaacttatggggttcatctcaaatttcagtgacatgaactaataagattaaaggtggcattttgacggacagctagaaatcaaacttgagaacctcactgtgacaaatacagtagcctactctgatatttctaggtgtcataaggatgaaattagattttgttgtaacatyggcgataatagaggaaaacatattttctttgaaactagggggtttgagggttcttttcaaatttgttaatcgatttttatgtaataaatacttttttattctgtatgcaggaatttttttaattattattatactttaagttttagggtacatgtgcacaatgtgcaggttagttacatatgtatacatgtgccatgctggtgcgctg

SEQ ID NO: 457842 - DNA, 428 bp, Homo sapiens
ccatcagtaaaattggaactagtattagaagtcaggattatctaaattcaaagacaatattcataaactctattcaacagtggtttgtagaaaattaacacyaactttgtccaattcaagtaataaacataataaagatactgactatacatgtagaaaaatattacgtagtccattctcttctctagctactaatgatgatgaaaaattcttctgtcagtattttataggttgtctaccacttatcttgggtaaaattttgagtttttttaaatcattgaaggttttttaaaaaatatgaatatatatagacttctatttatcctgctcaggatttggcgtacccttttaataggaggatgtatgcatgtctctcttcaactcaagaactttcttagctaacatctcttcaataacttttttcctca

SEQ ID NO: 457843 - DNA, 408 bp, Homo sapiens
gaccctgccaaaaacctatcaaaagaatggaaagtgcaacccgccttctagagctggaggaaagaaattttcagtgattccaatgtttagacaccccatgttgctatctacatgcctaaaagggattcctcccatcttgttatttaaaactcttacttcacatttttttcaccatagagtggaaacacatttgctaataaacctctgatagtcacgctatttcatagatgtgacttcaaacaatccctattcctttagttccccccttataagctcgcatattattcagtcgacatcactgctttgtgcccttatattgctatggcaagaattagaaaaaatacattyttgtaagcaaataaacgacattctgggctcatccactcattcaacaaacattcactgaaa

SEQ ID NO: 457844 - DNA, 572 bp, Homo sapiens
ttctcaggataaattcaaattcttcacagtttctcctcagattctccttagcactccaggcatttcccaacttccttcaccatccctggttacaggattgctaagctatgccatatccacatagtttatcttcactacaaaaattacattaattttatatttgtaagttttaagttcaaactgcaagattaatagaaaaaacatatgccctttgctcagattcacctattgttaatattttgctccatttgtttgccacatgccatctatctatccatctgtatatacgtatataagtatatcgatgtctgtgtgcatgcatttatatttttttctgagccatttgagagtaaattgtatagattatggtcctttaccttaaataattcagtgcacatttctagtttagtcaacggtccagtaatgtttatacagtatgttttcctctattacaaagattcagtctaggttcatgtattaatttgagttaccatgtctctttagtcttctytaatctggagtagttactcagctttttgttgtcttttatgaacatgacatttttaaagaat

SEQ ID NO: 457845 - DNA, 521 bp, Homo sapiens
ataaaataggatgaagacacactcatgttggaacactaaaaaacaaaacacaaacgaacaaaacagaacagtgcaaattataaaaatgawccactgtctccctctcttatctcacatgagtgactgcttatttttaccaattataattaagctccatttagtttctcctgactcctaaataaaaattaaactatccaatcactgaattgcccctgctttatgatagtgttcaatcctgagaaaactcttgttctttgaactcttcctcagattatctagcatagagctaaaccttatgacaagccattccttacatcttcttgagacatcctatagtttattctgggatgcagactcctgtgctataccaaaaaacaaatctaggcttgtttcactggagttgtttttgcttagcttgtggacatcaagagaagcttacaatttctttgtatgctttttatttttagaatatgttctagattgcaaaatttgatatgtacttgtatattacacttcattga

SEQ ID NO: 457846 - DNA, 570 bp, Homo sapiens
attatagtaattctgcgaccataatgaaacaggataaaataggatgaagacacactcatgttggaacactaaaaaacaaaacacaaacgaacaaaacagaacagtgcaaattataaaaatgaaccactgtctccctctcttatctcacatgagtgactgcttatttttaccaattataattaagctccatttagtttctcctgactcctaaataaaaattaaactatccaatcactgaattgcccctgctttatgatagtgttcaatcctgagraaactcttgttctttgaactcttcctcagattatctagcatagagctaaaccttatgacaagccattccttacatcttcttgagacatcctatagtttattctgggatgcagactcctgtgctataccaaaaaacaaatctaggcttgtttcactggagttgtttttgcttagcttgtggacatcaagagaagcttacaatttctttgtatgctttttatttttagaatatgttctagattgcaaaatttgatatgtacttgtatattacacttcattgattaaactgtttgtgtt

SEQ ID NO: 457847 - DNA, 567 bp, Homo sapiens
tttaataggtcatctaagcctatttatatttgttaatgtgactgatatatttgggctcagtacatattattattattgttttggcacagggtctcactatgttgcctaagctggtcttgaactcttgggctcaagcaatyctctcgcctaagccttctgagtagctgggactacaggtgcacacaaccttacctggcatcagctcatgttattttaagttaaaattactaaatatattatattcactacgtttcactatgtgacctcttttcttttgctttttacatttttattttatatatattttggtattcataaatattgtggttttgttctagtggtaactttcatagaacatagtctctttttcctctccttagccttttttctctttgtaggtagtttgttattagttctgattatccaactgttcctgtattcaaattttttgccatgtaattttgtagtaatttcacactatgtttaggcatatttgcatttttccatgccttgtgacgtttagtttgacaatatgaccctatttgagcaatagaatgagattgaaac

SEQ ID NO: 457848 - DNA, 567 bp, Homo sapiens
tttaataggtcatctaagcctatttatatttgttaatgtgactgatatatttgggctcagtacatattattattattgttttggcacagggtctcactatgttgcctaagctggtcttgaactcttgggctcaagcaattctctcgcmtaagccttctgagtagctgggactacaggtgcacacaaccttacctggcatcagctcatgttattttaagttaaaattactaaatatattatattcactacgtttcactatgtgacctcttttcttttgctttttacatttttattttatatatattttggtattcataaatattgtggttttgttctagtggtaactttcatagaacatagtctctttttcctctccttagccttttttctctttgtaggtagtttgttattagttctgattatccaactgttcctgtattcaaattttttgccatgtaattttgtagtaatttcacactatgtttaggcatatttgcatttttccatgccttgtgacgtttagtttgacaatatgaccctatttgagcaatagaatgagattgaaac

SEQ ID NO: 457849 - DNA, 559 bp, Homo sapiens
tcatctcatcctagttagaatggctattgtcagaaagtcaaaaaaaaaataacaactgctggcaagaatgaggagaaaaaaataactcctacatactgttgatggaaatgtaaattaggagagctattagggacaacaatttggagatgtctcaaaaaactaaaaataggactaccacacaatccagcaattccactactagatgtatatcaagaggaaaggaaatctgtttatcagtaagatacctactctcccatgtttattgtagcactattcacaagagccaaaatattgaatcaacctgtgtccatcaaaggacaaatggataaagaaattgtggtayatataattaagagaatatcattcagccacaaaaaagaatgaaatcttgtcatgcgcagcaacattatgttaaatgaaatcagccaggcacagaaagacaaatattgcacattcctatttatatgtgaaagctataaaatttatttcaaggaggtagagaacataatcattgttaccagaggcttgaggcagtagggccaggagggagaaggggtgt

SEQ ID NO: 457850 - DNA, 574 bp, Homo sapiens
tggagaaatgttaactactaagctcagtaccatcaagaaatacggatgttaatatcaaagacacagtaaaatagagatctcctagtgctcaacaacacttaatagtagtacacaacagawttttttctactataatattactgaaaccagatattaaacccagggagtaaaactaaattctcccagtcatatcttatggtaaacatgctaaaatataaaattcagaataataaaaccagacatcactgaattaatctgtttttaagtatattactcatttatagaaaagaaatagaatcaatatatgagaatagaattatctataattcaaatgattaaatgataattattagatttctattaaaccaaggcatatgagttatttaaaaagatttatccccctttacagtcatttttattcattcaataaatgtatattaagtatctgtgttctaggggcagtgagttctagggattaatcagtagggacacagtaacagcctaagcagacttgcttcttatgtctactcactggaacatttacagaaaatgaaggaaatgtaaaaaccagcat

SEQ ID NO: 457851 - DNA, 559 bp, Homo sapiens
tcatctcatcctagttagaatggctattgtcagaaagtcaaaaaaaaaataacaactgctggcaagaatgaggagaaaaaaataactcctacatactgttgatggaaatgtaaattaggagagctattagggacaacaatttggagatgtctcaaaaaactaaaaataggactaccacacaatccagcaattccactactagatgtatatcaagaggaaaggaaatctgtttatcagtaagatacctactctcccatgtttattgtagcactattcacaagagccaaaatattgaatcaacctgtgtccatcaaaggacaaatggataaagaaattgtggtacatataattaagagaatatcattcagccacaaaaaagaatgaaatcttgtcatgcgcagcaacattatgttaaatgaaatcagccaggcacagaaagacaaatattgcacattcctatttatatgtgraagctataaaatttatttcaaggaggtagagaacataatcattgttaccagaggcttgaggcagtagggccaggagggagaaggggtgt

SEQ ID NO: 457852 - DNA, 598 bp, Homo sapiens
  misc_feature (1)...(598): n = A,T,C or G
ttttatttcctctctgcctgtggccaaagaaaaagtgacactggataaatccatctactctgcagaaccaaaacgtccttcaggtgggctatttgtatagctagactgggagaagaaaaggagagaggattcgtaacataatctgnnnnnnnnnnnnnnnnnnnnnnnnnnnnnnnnnnnnnnnnnnnnnnnnnnnnnnnnnnnnnnnnnnnnnnnnnnnnnnnnnnnnnnnnnnnnnnnnnnnngcagaagataaatgacctccagagaaaaacatggaaatttaggaataaataacaaatattagaaatgtaaactgcatgggatacaataaatttaaaatgtataatcaaaatacataacaacacaaatggtgggcaataagtggtagatgaagttaaagtgtgtcaagrtcctagcattatcaaggaagtggtcaaagcaatcattttcatttgactacaataaacaaagatacaatgtgtaattgccagattaaccagcaaagcaacaggagaaaaacaaaacaagaccaagagtttctaataatttacagaggaaaatagactgataaaaaataccaaataaagaagacaag

SEQ ID NO: 457853 - DNA, 533 bp, Homo sapiens
tgaataccccaaataccttgacktacattacacgttatatgcatgtatcaaaatatcataggtgccctataaatatgtacaaatagtatgtgtaaactaacaaaataaaattttactgtacaaatatatttgtgaacaaataacaaacaatctctgaagacgaatgacacctccagcttcaaagaattgagctgaactaaactgtgctaaaagaaaaagaactgagcaactgtggcaggagacagctcttcctattgtatgaaatgattcacggtggactcggggccaacaagggtgcatcagatcacatccaggcatcttgatgtctttaggagatccaaatttagccttcagattctaggattttactgaaatagaatacaacttctcattcccaaaatataatgaacgggtgtgggtgggggaagagggggtggaggattttagaaccatgaatataggagggaagaagcttaaaattaatcttgaatatctcccttattttatagatagtgaaaaatagacctccaatc

SEQ ID NO: 457854 - DNA, 533 bp, Homo sapiens
tgaataccccaaataccttgacttacattacacgttatatgcatgtatcaaaatatcataggtgccctataaatatgtacaaatagtatgtgtaaactaacaaaataaaattttactgtacaaatatatttgtgaacaaataacaaacaatctctgaagacgaatgacacctccagcttcaaagaattgagctgaactaaactgtgctaaaagaaaaagaactgagcaactgtggcaggagacagctcttcctattgtatgaaatgattcacggtggactcggggccaacaagggtgcatcasatcacatccaggcatcttgatgtctttaggagatccaaatttagccttcagattctaggattttactgaaatagaatacaacttctcattcccaaaatataatgaacgggtgtgggtgggggaagagggggtggaggattttagaaccatgaatataggagggaagaagcttaaaattaatcttgaatatctcccttattttatagatagtgaaaaatagacctccaatc

SEQ ID NO: 457855 - DNA, 547 bp, Homo sapiens
caaaatgactaacattaacctgattcccatttccgtttttcttttcaacttttgcaatctcggagaacctgctaatggatcagtttcytattttgctgagactgtccattataaataatatttctatgcttattatcaataatgccactgctgcaaagcaaattcaggccagttacaatgcacggtacaaagctatctaaaatataagtgtgggtgtttcagcttgggtcttatctcatttgaaattgaaatatgtttgcaatgcttgaatgtgggaagattaattatcacctctgtttcaaaataagcagcagtagaaacccatcacatgaaaatgtggaagtgacattgtcgacagctaacaagagaggttttcagctggaaaagggtgcaaacagaaacaaatgcattcatatttctaatccgcagccaagaaaaattgtatttgatactggctgaatttgcctcagaaaatcaaagccccattttggctaggatactaaatgcagcaagatgaaccacagaattctgcctcgcagttacatca

SEQ ID NO: 457856 - DNA, 550 bp, Homo sapiens
taatcattcttgaagctggaagtgttgtctgctatcttgatgttgctggtactgaaagaggcaaacaaagtcagcctgattgttttaggtttggattagtctggagtgcatagagaaacattttaaaaggcttattttgactatcaaagtgagttgatatgacagcagtcgtcaggggaaaaatgtgcaccatgcaaacacacaaacatccctcagcaaccagctgcagctactttgcagtagcaggtttgagggaaaattgctttctygactatcactggaaaagagggcagcactccaagttactttggaaaaggtacaaccacaaagtggtatccaggatggcatggaggtcaaaggggtttgaaagtcaacttttatagcacataatcttgtagaattgtgtctgtgatttcatacatgcgtgtttctgtgtaatatgtaactattcattaatcagacacagattggcaggttctagtcagttacgtccaaacataatgataatcaacagaaaggaaagtgatttgaattaggaaatggggaaaaa

SEQ ID NO: 457857 - DNA, 550 bp, Homo sapiens
taatcattcttgaagctggaagtgttgtctgctatcttgatgttgctggtactgaaagaggcaaacaaagtcagcctgattgttttaggtttggattagtctggagtgcatagagaaacattttaaaaggcttattttgactatcaaagtgagttgatatgacagcagtcgtcaggggaaaaatgtgcaccatgcaaacacacaaacatccctcagcaaccagctgcagctactttgcagtagcaggtttgagggaaaattgctttcttgactatcastggaaaagagggcagcactccaagttactttggaaaaggtacaaccacaaagtggtatccaggatggcatggaggtcaaaggggtttgaaagtcaacttttatagcacataatcttgtagaattgtgtctgtgatttcatacatgcgtgtttctgtgtaatatgtaactattcattaatcagacacagattggcaggttctagtcagttacgtccaaacataatgataatcaacagaaaggaaagtgatttgaattaggaaatggggaaaaa

SEQ ID NO: 457858 - DNA, 480 bp, Homo sapiens
ggcctgctcctgtgctcttatagatttgtgttcattctctttatctcaaatcagtttgggacttaagtttgtaaaagaaacattattatttattcttcattatcatataaaatttgactcaatatttattcccagaagaacttttctatcacctcactgagatagccttaacccaaggttttattttcttctccccaggaatgccttttgagtataatggccctgtccagtggtcagagccactgtgatttgtagtggcagaaattcaacttgaactagctcattatcgttaagaaatgctcccaattatgggaaaggygggcagaaccgagaccggtaacaatatgctatctgctgtccctgtttttctctaccagttgtctttcttctcccctgatgtaaaacagcttctagtacaacatacttccaccttttctccagagaggaaatggctttttctaactcactccgtttccaggt

SEQ ID NO: 457859 - DNA, 649 bp, Homo sapiens
aaacatacagtatttatagagaattaaaacattcattgtaggactatgtgcattccacaagttgcaccatgtaccaacaaattgctgtcacattgcatttgtatctgtaagcgttagtgccattttcgcatacctgttaagcaatcttccgttattactttgcaacacatcatttatgtttctctctttactaacataagaccattatcttgccattcagcaacgacaggtgattcatcctagattccaaatgacatcttcttgacacagggtgttaaaaaaaaaaaaaaaamaaacttttttttttggacatattttacctgtgctttagattcctttccaaacaaaaactcacaaaatatatttggtagcacaaaccagcagggactcattaaatcctttcaaagggtaaaagacaataacatttcatcatcaattacttgtatattttaccactggagatttctacatgaaaagtccaaaatggtagaagcttggcataaaggagagaggagaggcaaggaatggaaaaacttcataaacttaatcaaacaaaataaacttctgacttgttttttcagttgtcatcaggaaggattagaatgtcaaaaaggcaaaaagtatttttatgcagtgtgacggttaatac

SEQ ID NO: 457860 - DNA, 649 bp, Homo sapiens
aaacatacagtatttatagagaattaaaacattcattgtaggactatgtgcattccacaagttgcaccatgtaccaacaaattgctgtcacattgcatttgtatctgtaagcgttagtgccattttcgcatacctgttaagcaatcttccgttattactttgcaacacatcatttatgtttctctctttactaacataagaccattatcttgccattcagcaacgacaggtgattcatcctagattccaaatgacatcttcttgacacagggtgttaaaaaaaaaaaaaaaaaaaacttttttttttggacatattttacctgtgctttarattcctttccaaacaaaaactcacaaaatatatttggtagcacaaaccagcagggactcattaaatcctttcaaagggtaaaagacaataacatttcatcatcaattacttgtatattttaccactggagatttctacatgaaaagtccaaaatggtagaagcttggcataaaggagagaggagaggcaaggaatggaaaaacttcataaacttaatcaaacaaaataaacttctgacttgttttttcagttgtcatcaggaaggattagaatgtcaaaaaggcaaaaagtatttttatgcagtgtgacggttaatac

SEQ ID NO: 457861 - DNA, 584 bp, Homo sapiens
ttttcttcaatgactatttttatctcctgaagcataattattaggcatcacaaatacaactaagtgaagatttactttcatcttacattattttcattyaaaaatcacaaagcatcaggggacctttctttctatcttgacggttagatgcttctgttccctgctgctattagtcccaaggataaaaatgtgaagttgctataaatgactttgtcaattttatttagaaattcaaagtttcaaactgacaccaagtcaggcaactctaaatcttactgaacttcacccgcatatgtataccttcatggtaattttcttgcacgaagaagagaaagtagcagcagagaattatttttttaagcacagaattatttcccttgctactggtatcacctatgtaatgacaacaatttcaaaatagatatttgagctttgccatttgttttcattaaatcagtcctcagaggagatagtttttttcagtttgttagataaaataatttttctctattattgtacctatcaggctatattacttaatatctgcacaacttgccacaatccagtacactaaatcatctggg

SEQ ID NO: 457862 - DNA, 584 bp, Homo sapiens
ttttcttcaatgactatttttatctcctgaagcataattattaggcatcacaaatacaactaagtgaagatttactttcatcttacattattttcatttaaaamtcacaaagcatcaggggacctttctttctatcttgacggttagatgcttctgttccctgctgctattagtcccaaggataaaaatgtgaagttgctataaatgactttgtcaattttatttagaaattcaaagtttcaaactgacaccaagtcaggcaactctaaatcttactgaacttcacccgcatatgtataccttcatggtaattttcttgcacgaagaagagaaagtagcagcagagaattatttttttaagcacagaattatttcccttgctactggtatcacctatgtaatgacaacaatttcaaaatagatatttgagctttgccatttgttttcattaaatcagtcctcagaggagatagtttttttcagtttgttagataaaataatttttctctattattgtacctatcaggctatattacttaatatctgcacaacttgccacaatccagtacactaaatcatctggg

SEQ ID NO: 457863 - DNA, 542 bp, Homo sapiens
ttgccaaatatggtccattaaaaaaaaaacgagaggtaactctgtgtcttgagatgagtcaagtctaagttaaaaaataatttgtatatagtctatcccagaaccagaagtctcatgacacttttataaaagattcaagataatgcagctttaatttccagatctcagcgttgacattggcttggacctgtaaaatggatttttttgcagctgggcatttgctttttctcctttggtaaataatttttatgtttttcaggatagtttttatttttgatgcttaactttacttggccaataattatcagtgttatttttgaaagtgaatgctcatatattgaactggcactattcttacatagcactgttgaaatatatcttatcaaagcaattagcatatttatactatagacccatttgtcaataaartgattcatattctaatattatgttattattaatgtaattttagtagaaaatataatgttgttatttttatattcaaaacattaagcctcaatatttctttttcttattttttt

SEQ ID NO: 457864 - DNA, 623 bp, Homo sapiens
tatccataatctgtattacctggatccattttcccttaagctcctccttgagatccaacaataggagaactcctccacttcccctattttcttttccagacatgttttctttaccagctgactctgaatgtaataacagattctgcctggctgctttttcccttccaagtcccagctcttatcaggcactggcaatgccattctttcttcttgctttccaggggagctaaagtcttccaactatttttagtacctggatgccttattgcccatatgtttataaatagttatttccttaattaacttaagctaaactctttcaggtgagcatttgtctcttgccaggaccatgattaacactgatactgtctgtgggcattttctacacttcccagaaacaatttattttwacaacatttattgaatgccaattgcatatcaggcactaagtaggcactcagcactatgtgtatctgatatatagacataagtgtcataatgatgatgttttcattaaacaagatagcaagtcttttaggcataattaaaaatcaaaatataacatcattaaattaaaatgtgggttaagaaaatgcagcagaagatttgtgttctggtgagtc

SEQ ID NO: 457865 - DNA, 593 bp, Homo sapiens
tttgtccttaaggaaacttgagctgatatggcagagtagcacaactgatgcagacacagaaattctaaataaatatgattttcaaaagaaaaaaatttccttaatgtagaattttaagtgctagaaaaaaaggagcaaaatcaaaaccaattcagaaagtggagacaaggatgccaaaactgagggctcagttgttttgtttttaagtaaggacccaggtacctgggggttgaagtattgccctggtttccaagaaagcaagaaatctgaaagggagtcyctaacataaaacttgcagctccaatgggctgcagcatctttgaataagggatagaaatacttcatgcttcttctcaggaattaacacagcagtttgttatttttatgctacaagggttacctgtgagaaactatcaatatgtagaaggaattggaatctagaaagaaaatataagtgaaattatagtcattgcctcctccagagtcaaggcagacaaagaaagtgcttgtgaaagcactttcaaataaagatgacctcccaataataacaatattatactttacacagggaaatgaaccggtagacacaacaa

SEQ ID NO: 457866 - DNA, 569 bp, Homo sapiens
ggttcatttgtccatccttgcactagaaagacactattttaattatgataaatattgaaacagacaatgtaaattcctccaactttgttcttcttttaaaaaattgtattatttacccaataatttttattttccaaattcactttagaattggcttgtcaatgtacgcacactaacaattatggataaatttgcagagatgggtgctttaacaataattattttctcaatacataaacatgtatatgtgttcatttatttatgtkttcttttactttagcagtattttttaataattttttaaattcttcccattcctggaaactagtagctatatgtaaaatcttgattaaatttgggttattttttactaccttaattttaagaacaatttttatatttctactaagaattgcagatataatatgtatttgtcagaattagttaaacatgggtgatatggtttggctctgtgtccccacccaaatctcatgttaaattggaatttctataatccccatgtgttgttggagggacccagtggaagataatttaatcatgggggcagg

SEQ ID NO: 457867 - DNA, 569 bp, Homo sapiens
ggttcatttgtccatccttgcactagaaagacactattttaattatgataaatattgaaacagacaatgtaaattcctccaactttgttcttcttttaaaaaattgtattatttacccaataatttttattttccaaattcactttagaattggcttgtcaatgtacgcacactaacaattatggataaatttgcagagatgggtgctttaacaataattattttctcaatacataaacatgtatatgtgttcatttatttatgtgttcttttactttagcagtattttttaataattttttaaattcttcccattcctggaaactagtagctatatgtaaaatcttgattaaatttgggttattttttactaccttaattttaagaacaatttttatatttctactaagaaytgcagatataatatgtatttgtcagaattagttaaacatgggtgatatggtttggctctgtgtccccacccaaatctcatgttaaattggaatttctataatccccatgtgttgttggagggacccagtggaagataatttaatcatgggggcagg

SEQ ID NO: 457868 - DNA, 569 bp, Homo sapiens
ggttcatttgtccatccttgcactagaaagacactattttaattatgataaatattgaaacagacaatgtaaattcctccaactttgttcttcttttaaaaaattgtattatttacccaataatttttattttccaaattcactttagaattggcttgtcaatgtacgcacactaacaattatggataaatttgcagagatgggtgctttaacaataattattttctcaatacataaacatgtatatgtgttcatttatttatgtgttcttttactttagcagtattttttaataattttttaaattcttcccattcctggaaactagtagctatatgtaaaatcttgattaaatttgggttattttttactaccttaattttaagaacaatttttatatttctactaagaattgcagawataatatgtatttgtcagaattagttaaacatgggtgatatggtttggctctgtgtccccacccaaatctcatgttaaattggaatttctataatccccatgtgttgttggagggacccagtggaagataatttaatcatgggggcagg

SEQ ID NO: 457869 - DNA, 419 bp, Homo sapiens
aatcatgaatgagtgttgaaatttgtcaaatgcttgttctgcatctattggyatgctcatataattttccttctttagtctgttgatgtgatgaattacattatttgatttttgaatggtgaactccctttgaatacctgcaataaatctcacttagtcatggtatataatttttataaattgttggattcaacttgttgatatttcgttgagaatttttgcgtctatgttcatgagcaataattgcttgtagattttctttcttgaaatatctttttcaggtttaagataatgttgaccacatgaaatgagttaggaagtattcttcctgcttttgtttttgtttgtttgttttttgattttttttttttttttggaagagtttgcagagaattggtataatttctttgttaaatatt

SEQ ID NO: 457870 - DNA, 393 bp, Homo sapiens
ccacttaataattttatgaggccagcaaaatacttaaacctgacaaacaagctgaaaagatattccagaccaaaaccacaatttatatagacatacccactaaaatataatagcagaaaaaatttcagaaatatccaaatgttgataatagcacaaataagctggattcgataccaaaatcctaagataatttaatatttaaaaatcaatttgattcaacatatttactgaatagtgtgraaaatatcacatgagcattgcagtagatacagaaaagcattgataaaattcagtaaattttcattaagaaatttgcatgcaaagttaaaaatagaaaagaattcccttatcatgggttaaaaaatatatttaaaaatctatattataaaatcc

SEQ ID NO: 457871 - DNA, 417 bp, Homo sapiens
catttaaatagccacacataaaattaaatatttaagaattaaccaaagaagtgaaagatctcrctaatgaaaactgtaaaacatcagtgaaagatttcttgagcaatatcccacaagtgcaggcaaccaaagcaaaaaatggacaaatgaaatcctatcaagttaaaaagcttctgcatagcaaagaagcaatccacaaagtgaagagacaacccacagaatgggaaaaaatatttgcaaactacatgtctgacaagggattaataaccagaatgtatgaggagctccaacaactctgtaggaaaaaaatctaataatctgatttttaaaagggcaaaagatttgaatagacagttctcaaaagaagacacacatgtggcaaacatgcatatgaaaatgtgctaacatcattgatca

SEQ ID NO: 457872 - DNA, 502 bp, Homo sapiens
aacattgcatgttctcatttatttgtaggatctaaaaatcaaagcaattgaactcatggagatagagagtagaaggatggttaccagaggctggcaaacatagtggggggctgaatgtggtaggtgagaatggttaattggtatataaaaaaagaaagactaaataagacctagtatttgatagcacaatagggtgactacagtcacttaacaacttaattgtacattttaaaataatytaaagagtataattggatttttttaactcaaaggataaatgcttgagggatggataccccattctccatgatgtgcttattttgcattccatgtctgtatcaaaacatttcatgtaccccataaatataaacatcctactaagtactcacaaaatcttcttttaaaaaacaaagaaattagagggtagtcatagaagaacacaatacatttacttattaaacagcaacaacaataaatgagactcaaagtaggaccaaactgt

SEQ ID NO: 457873 - DNA, 502 bp, Homo sapiens
aacattgcatgttctcatttatttgtaggatctaaaaatcaaagcaattgaactcatggagatagagagtagaaggatggttaccagaggctggcaaacatagtggggggctgaatgtggtaggtgagaatggttaattggtatataaaaaaagaaagactaaataagacctagtatttgatagcacaatagggtgactacagtcacttaacaacttaattgtacattttaaaataatttaaagagtataattggatttttttaactcaaaggataaatgcttgagggatggataccccattctccatgatgtgcttattttgcattccatgtctgtatcaaaacatttcatgtaccccataaatataaacatcctactaagtactcacaaaatcttcttttaaaaaacaaagaaattagagggtagtcatagaagaacacaatacatttacttaytaaacagcaacaacaataaatgagactcaaagtaggaccaaactgt

SEQ ID NO: 457874 - DNA, 477 bp, Homo sapiens
atggtcttctgcgcatggagacttttagtttcctctctagcaataagagttaaactcctccggttaatatagattccaggaaaggggttccaagataatgacatttcttttggaagagtttcctcagtcaggataatggaactttaaagagggcccctccctgcacttagcagggtagaaacaggaaaggttagagaggtcttgattctgaggcagtttctaaggccttttaatgtccttaattcaaagtgttcagcatgttaaaacatcatactttggattattattttctgaaccttaacaaataaaaacaaagccttaggaaccatgatgttatctgatatggttaggctttgtgttcctacccaaatctcattttgaattgtaatccccasgtgttgagggagaggcctggtaggaagtgattggatcatggggccatttttcaataatatggtcatgctgttcttgtgatag

SEQ ID NO: 457875 - DNA, 588 bp, Homo sapiens
aaatgcaaatcaaaaccacaatgagataccacctcacaccagtcagatggctattattaaaggccaaaaaataacagacactggtgaagttgtggagaaaaaggagcgcttatacactgttggtgggagtgtaaattagtgtaaattggttcaatcattgtggaagacagtgtggtgattccttaaaggcctaaagayagaaataccgtttgactcagccgtcccattactgggtacatactcaaggaaatataaatcattctattataaagacacatgcacatggatgttcactgcagcactattcacaatagcaaaaatatggaatcaacgtaaatgcctatcaatggtagactaggtaaagaaagggggaggggccaagatggccaaatagaaacagctccggtctgcagatcccagcaagaccaacagagaaggcaggtgatgtctgcatttccaactgaggtacccagttcatctcattgggactgattagacagtgggtgcagactacagagagtgagcagaagcagggtgaggtgttgcttcacctggaagtgcatggatccaagggaagcggtgagagac

SEQ ID NO: 457876 - DNA, 588 bp, Homo sapiens
aaatgcaaatcaaaaccacaatgagataccacctcacaccagtcagatggctattattaaaggccaaaaaataacagacactggtgaagttgtggagaaaaaggagcgcttatacactgttggtgggagtgtaaattagtgtaaattggttcaatcattgtggaagacagtgtggtgattccttaaaggcctaaagacagaaataccgtttgactcagccgtcccattactgggtacatactcaaggaaatataaatcattctattataaagacacatgcacatggatgttcactgcagcactattcacaatagcaaaaatatggaatcaacgtaaatgcctatcaatggyagactaggtaaagaaagggggaggggccaagatggccaaatagaaacagctccggtctgcagatcccagcaagaccaacagagaaggcaggtgatgtctgcatttccaactgaggtacccagttcatctcattgggactgattagacagtgggtgcagactacagagagtgagcagaagcagggtgaggtgttgcttcacctggaagtgcatggatccaagggaagcggtgagagac

SEQ ID NO: 457877 - DNA, 565 bp, Homo sapiens
ggaatttaaaacatgtatgattgatttgataaggactctaatgcaaaacatagacaacgtgcaagaagagatgggcaaaataagcagagatattgaaattctaagaagggattagcaagaaatattacagattaaaagccatgtatcagaaataaataatgtcattgaggggcttattcgtagactggacacagctgaggaaagactgagcttgaggttatatagttgacatctgtagactacttcatgcaacaacagtagaataaaaattcttctcaagctcacatagaacattcactaagacasaccaaactctacataataaaacacaattaaacaaatttaaaataacaaaagttacgaaatctatacactcaccacattggaattaagttagaactcaataactgagatatggctgaaaaatccccaaagtgtggcgattaaacaacatattttaaaataaatactacctgagtaaaaaagaaattttaagagaaattttaaaatatttcgaactcaatgaaaatgaaaatacaacttgtcaaaatgtgtgagatgctgt

SEQ ID NO: 457878 - DNA, 564 bp, Homo sapiens
catggagttacgactaagtaatatttcatccaggaatgcaaggttaacttamtatatgacaatcaatcaaaggagctgggtgtggtggcacatgtctgtagttccagctaccgaggaggctgaagcaggaagattgcttgatcccagcagtttaaggctgtagtgacccatgattatgggtcactgtattttagtcgtggggacagggtaaaacagtgagatccttactccaaaaaaaaaaaaaaagaaaatcaaagtaacatagttttattttatatattattttattcatttaagtattcataattttgttattttatattttattatttattaatatgttcaagagaataaaggagaaaagtcacaaaacatctaggccggtagcggtggcttgtgcctgtaatcccagcactttgggaggccaaggtgtgtgggtaacttgagatgatgagtttgaaaccagccaacatggcaaaaaactatctctacttaaaatacaaaaattagcaggatgtggtagcacacacctgtaattccaactactcaggaggctgaggtggg

SEQ ID NO: 457879 - DNA, 564 bp, Homo sapiens
catggagttacgactaagtaatatttcatccaggaatgcaaggttaacttactatatgacaatcaatcawaggagctgggtgtggtggcacatgtctgtagttccagctaccgaggaggctgaagcaggaagattgcttgatcccagcagtttaaggctgtagtgacccatgattatgggtcactgtattttagtcgtggggacagggtaaaacagtgagatccttactccaaaaaaaaaaaaaaagaaaatcaaagtaacatagttttattttatatattattttattcatttaagtattcataattttgttattttatattttattatttattaatatgttcaagagaataaaggagaaaagtcacaaaacatctaggccggtagcggtggcttgtgcctgtaatcccagcactttgggaggccaaggtgtgtgggtaacttgagatgatgagtttgaaaccagccaacatggcaaaaaactatctctacttaaaatacaaaaattagcaggatgtggtagcacacacctgtaattccaactactcaggaggctgaggtggg

SEQ ID NO: 457880 - DNA, 564 bp, Homo sapiens
catggagttacgactaagtaatatttcatccaggaatgcaaggttaacttactatatgacaatcaatcaaaggagctgggtgtggtggcacatgtctgtagttccagctaccgaggaggctgaagcaggaagattgcttgatcccagcagtttaaggctgtagtgacccatgattatgggtcactgtattttagtcgtggggacagggtaaaacagtgagatccttactccaaaaaaaaaaaawaagaaaatcaaagtaacatagttttattttatatattattttattcatttaagtattcataattttgttattttatattttattatttattaatatgttcaagagaataaaggagaaaagtcacaaaacatctaggccggtagcggtggcttgtgcctgtaatcccagcactttgggaggccaaggtgtgtgggtaacttgagatgatgagtttgaaaccagccaacatggcaaaaaactatctctacttaaaatacaaaaattagcaggatgtggtagcacacacctgtaattccaactactcaggaggctgaggtggg

SEQ ID NO: 457881 - DNA, 564 bp, Homo sapiens
catggagttacgactaagtaatatttcatccaggaatgcaaggttaacttactatatgacaatcaatcaaaggagctgggtgtggtggcacatgtctgtagttccagctaccgaggaggctgaagcaggaagattgcttgatcccagcagtttaaggctgtagtgacccatgattatgggtcactgtattttagtcgtggggacagggtaaaacagtgagatccttactccaaaaaaaaaaaaaaagaaaatcaaagtaacatagttttattttatatattattttattcatttaagtattcataattttgttattttatattttattatttattaatatgttcaagagaataaaggagaaaagtcacaaaacatctaggccggtagcggtggcttgtgcctgtaatcccagcactttgggaggccaaggtgtgtgggtaacttgagatgatgagtttgaaaccagccaacatggcaaaaaactatctctrcttaaaatacaaaaattagcaggatgtggtagcacacacctgtaattccaactactcaggaggctgaggtggg

SEQ ID NO: 457882 - DNA, 643 bp, Homo sapiens
aaatgtcatctggaagctagagtctggaacagtgccttcataactatgaccagtaccctatcctcctgtgactgagctggtatccttggtgcaagacaaagtcctccccactctttcctcgcctctctttaagtggaaggaaggtctctttggagaagtgggccatgcagcctggagtggtaatgccagcactcccttggctaccccaactccccggtccactgtttytggatctagttcagcactagggctcacctaagttttgcagtctttgtggcctagactgactttcaagtttactgggagacacagaatgctgtagccctcggtggtgaagtttgcaggcactcaagttcagaccactgggatcggtttttctcctctggctagagctggtttaaatgctcccttccttgctggggatcagctgagtttggtctgcttttcccttctgttctaataggacagcactaagtttcgtgcttcacaatgtaccagtaggtagctagtcaggcctgatcagggcaagagagtgctccccacaacctaacaggaatgtcaagtgaccatcacatgacggtcaggcagctgtcacaccgtttctccaaaataataattggtagcagccagcaccagggaaagg

SEQ ID NO: 457883 - DNA, 643 bp, Homo sapiens
aaatgtcatctggaagctagagtctggaacagtgccttcataactatgaccagtaccctatcctcctgtgactgagctggtatccttggtgcaagacaaagtcctccccactctttcctcgcctctctttaagtggaaggaaggtctctttggagaagtgggccatgcagcctggagtggtaatgccagcactcccttggctaccccaactccccggtccactgtttctggatctagttcagcactagggctcacctaagttttgcagtctttgtggcctagactgactttcaagtttactgggagacacagaatgctgtagccctcggtggtgaagtttgcaggcactcaagttcagaccactgggatcggtttttctcctctggctagagctggtttaaatgctcccttccttgctggggatcagctgagtttggtctgcttttcccttctgttctaataggacagcactaagtttcgtgcttcacaatgtaccagtaggyagctagtcaggcctgatcagggcaagagagtgctccccacaacctaacaggaatgtcaagtgaccatcacatgacggtcaggcagctgtcacaccgtttctccaaaataataattggtagcagccagcaccagggaaagg

SEQ ID NO: 457884 - DNA, 633 bp, Homo sapiens
gggatactactacttcatagccttactgtgaggattaaataaaattatctatgtaaaagtgcctcatacatctaagatgttataaaaatattagttggtgatgatttccctgctcactgtatacagaacacagtgactatgacattattaccctctcttaatttttgatgaccaagaaggaccttctcactaagaaatgacccttaaccaacatctcttttttatgtaaaactacattaaactctgtacatccagtccattgcatttccttccattctcatccttggcaggggtcgggggaggaaattgttccatatcatggaaaatgttccacacctgcactctcccaagtcaaaaatttacttatataatttactttaatctcactttctaaggacttaatttagtggtaaaatgagaggctttctcagacaaatctgctggtgactattaccaagttctatgacatttttktctcttcatccgtaaaataaataaaatatctacttaatgatgaattatgaaaattagaaatgaactgtgcataccttacctagctgatcaaagtcaacgtcaacagtgataaatcatgttcaaaatatgtacacttaatataatacggcaaaaatggca

SEQ ID NO: 457885 - DNA, 633 bp, Homo sapiens
gggatactactacttcatagccttactgtgaggattaaataaaattatctatgtaaaagtgcctcatacatctaagatgttataaaaatattagttggtgatgatttccctgctcactgtatacagaacacagtgactatgacattattaccctctcttaatttttgatgaccaagaaggaccttctcactaagaaatgacccttaaccaacatctcttttttatgtaaaactacattaaactctgtacatccagtccattgcatttccttccattctcatccttggcaggggtcgggggaggaaattgttccatatcatggaaaatgttccacacctgcactctcccaagtcaaaaatttacttatataatttactttaatctcactttctaaggacttaatttagtggtaaaatgagaggctttctcagacaaatctgctggtgactattaccaagttctatgacatttttgtctcttcatccgtaaaataaataaaatatctactyaatgatgaattatgaaaattagaaatgaactgtgcataccttacctagctgatcaaagtcaacgtcaacagtgataaatcatgttcaaaatatgtacacttaatataatacggcaaaaatggca

SEQ ID NO: 457886 - DNA, 580 bp, Homo sapiens
gcagatggcagagaaataaaagaaggcaatattattttttaaaaattagagctctgttaaaaacttcccagggctcttaaatatatgaatcatgtatttcactcatctaaaatgttctatctattctgatactgttatataacacagaataaattaataacatttttggtatatttcaagaccctcctattattatctcttgcagctgcagagagttgggtagatagagagaagggcagaatggaaagacagggaagaagggagaaagaaaataaattcagtgaattttatttcactgagtgtcaggagattttataaattattggggaaagatacttagacaaaatttaaactaaatgaattattaaataaacagatgccaagtggaaatgcataatttattgctgccacgcataagctagtttaaggatyccaaggctttttcttgtttgctcaactaaaatatttccacatacgaccttgtgtacaaccgaggaaaaagtgtagtacagtcatagtcaattaatcaatcacgtttcagtttagttcagcacatatttatacaatgtataaattttct

SEQ ID NO: 457887 - DNA, 495 bp, Homo sapiens
ggatggtatgacttacatacaaatttggaaatattattatttttatagaatatatttatagaatttttttggattatttttatagaataccaaagttatttttgtagaatattgaatttttatttttatagaatattgaagttaatttatcataactacctttactgtgggaactcagactttatttggtaaaatcccgctattctgatcttttgaaagctatcaattaaagtaagtaataattattttatttttatttcatgtatataataaattctatgggatagagagaacatgctatattttcttttcctagaatatyataaatttttgccttcagtaacaagggtaagggagctaacaataagaacttactaagaatgagttattctactatgctctttacacatattagcacatttaatcctaataggaatctgataatcatgttttaataaattttacatagtggcgaaaatgtgactcaatagaact

SEQ ID NO: 457888 - DNA, 576 bp, Homo sapiens
ctacaaggtccaaaagagactagatatgtccaaaactacaataagaaatatatgactaaaagtacattaagcaatcagaaagaaatggataaaaaagacaagaagatctatttgataagtggagtccctaaagaagaaaaactaaacaactgggatgtttgatataaaaaccacaacttaagaaaactttactgaataaactggaacctcatattaaatgctgccatcaattatgtgggaaaaatcaatccattaccatcaaatattagacatatcttagtaaactattataattttwaaaaaccctttgagccacagtcaaatatgaagtaattaacaagcaaaaaaaaaaaatgtttacatctaacttttcaacagcaacataccagtgcaggaaacagcagaagaatattatgaaatgcaaagaaagaaagagggaaagaattaatatacagctgaactgtgtatcaagtgtataaaagcacagttttaatatgaaaatttcaagaaactttttactcaggagcttttcctgtaagatatactagagagaaagcttcattcaaccaagacaga

SEQ ID NO: 457889 - DNA, 561 bp, Homo sapiens
ggttaagctccttgatggccagataggtgctagtcaagggatatcacttaaaaatgtaaaactgttaccattttactatataatactgtattttataaaaccacccaaacctcagaggcttaaagcaagaatcatattctcgtggactgggctaaatyctatgaggcaatgctactaatctaagattgtctcattctcatatctgggtgttggctagggaaggctaaataaggtgaggctcagctgaggcagtttggctttgctacacaagtctcccatcctcaacttgggactttttggctcaggcagtgtcatgacaagccaggcctgtttgtcttatggcagtgggagaagtacagtagagcccatggaaacacacacaaagtctctgaactctgacttaaaaatgccatactaatgtttcaatctcattctattgctcaaatagggtcatattgtcaaactaaacgtcacaaggcatggaaaaatgcaaatatgcctaaacatagtgtgaaattactacaaaattacatggcaaaaaatttgaatacaggaacagtt

SEQ ID NO: 457890 - DNA, 561 bp, Homo sapiens
ggttaagctccttgatggccagataggtgctagtcaagggatatcacttaaaaatgtaaaactgttaccattttactatataatactgtattttataaaaccacccaaacctcagaggcttaaagcaagaatcatattctcgtggactgggctaaatcctatgaggcaatgctactaatctaagattgtctcattctcatatctgggtgttggctagggaaggctaaataaggtgaggctcagctgaggcagtttggctttgctacacaagtctcccatcctcaacttgggactttttggctcaggcagtgtcatgacaagccaggcctgtttgtcttatggcagtgggagaagtacagtagagcccatggaaacacacacaaagtctctgaactctgrcttaaaaatgccatactaatgtttcaatctcattctattgctcaaatagggtcatattgtcaaactaaacgtcacaaggcatggaaaaatgcaaatatgcctaaacatagtgtgaaattactacaaaattacatggcaaaaaatttgaatacaggaacagtt

SEQ ID NO: 457891 - DNA, 591 bp, Homo sapiens
cagctgccacgttttgggaaaccctatgaagagctccatgtagtttacaacagaggactcctgtgaagtcagcatgctactaacaaccatgtgagtgaactcagaagagtagccttctgccccagtggtgtcaccagataaatacggtcctggtggacatctagactgaaaccttgtgagaggccctgagccagaatcacccagcgaagatgatcccgacttcctgacccactgaaactatgatgtaataatgtgtgttgtattaagccattaagtttgagggtactttgttacacaacaatagaaaactaatacagttaacgttatagaaagtaaaaagtttaggttgactgggactaaagaaatataataatatagcaatagctaacacagactagagaaatgtaaaaagcaattacaaaacgtaacttgttggcatagatacattttgaatatgcaatggaaaagagatgayattaagaactatttctcaattgtaatattgtttttgtagttatatattagaatgtgcatgttttttaatgcaagctgaagcattcaggaactaagtaccgtgaagtttctgcaact

SEQ ID NO: 457892 - DNA, 591 bp, Homo sapiens
cagctgccacgttttgggaaaccctatgaagagctccatgtagtttacaacagaggactcctgtgaagtcagcatgctactaacaaccatgtgagtgaactcagaagagtagccttctgccccagtggtgtcaccagataaatacggtcctggtggacatctagactgaaaccttgtgagaggccctgagccagaatcacccagcgaagatgatcccgacttcctgacccactgaaactatgatgtaataatgtgtgttgtattaagccattaagtttgagggtactttgttacacaacaatagaaaactaatacagttaacgttatagaaagtaaaaagtttaggttgactgggactaaagaaatataataatatagcaatagctaacacagactagagaaatgtaaaaagcaattacaaaacgtaacttgttggcatagatacattttgaatatgcaatggaaaagagatgatattamgaactatttctcaattgtaatattgtttttgtagttatatattagaatgtgcatgttttttaatgcaagctgaagcattcaggaactaagtaccgtgaagtttctgcaact

SEQ ID NO: 457893 - DNA, 513 bp, Homo sapiens
aagctgaggtgggaagactgcctgagcccaggagttcaagaatagcctggacaatatagtgagatcccatctctacaaaaaatgttaaaaattatctgggcatggtggcgtgtgcctgaaatcccagccactcaggaggctgagacaagaggattacttgaccccaggaggttgaggctgcagtgagctgtgatcacgccactgacccaagcctgggtgacagagcaagagcctatctcttaaaaaataaaactaaatttaaaaarcaaacaaaaaaccagaatgttctcagcactgtgtttctgcatatgctttcctctctacttggaagcctctttttgtcttggaagacatcaagattcagctcagatgttattcagagcagtcaccccggagcctacagacagaatgagcagcttggccatctcatctaccacagcactttgctcacacctgtcttataacacaatgaattatcattcttctgtttctcaagacactgaattactcagg

SEQ ID NO: 457894 - DNA, 649 bp, Homo sapiens
ctctttttgtcttggaagacatcaagattcagctcagatgttattcagagcagtcaccccggagcctacagacagaatgagcagcttggccatctcatctaccacagcactttgctcacacctgtcttataacacaatgaattatcattcttctgtttctcaagacactgaattactcaggtatcctgacctattgcctcagaatcaccagcaccagatgatgcctagtatatctgaggagtttaatggatttgtttttttaatttttagaaacagggtctcactatgttgcccaagctggacttgaactcctgggctcaagtgatcctcccaccttagcctactaagtagccaggaccacaggtgtatgccaccatgccctaatagatttttaaaactaaatgtccaaagctaaagttatcttccctcctcaaatatcttttaccttggcccccaatcttattgaatggcatcccccagaggcccaaagaagaaatctcgaagtcycctttcactcctctcttttccttacctctacaacccattggccaataattctacttcccggacattttccataaccaccctccccttcgcactcacaccaccaccaccctagctcattcactcccttgtgtaagaaacattt

SEQ ID NO: 457895 - DNA, 514 bp, Homo sapiens
cgtggtgttggccacactgactgacagccaggggacatgcactcaccagcagggtgtgtccctccggtcttcacaatgaatgctggcccagtcgccagcagccttcacgccaatgttctcccgtcagtgaggccaggcccccaggtgccactggagtcaraggagggcagctggcgtgcgccaagcagccactaggagccacttcatgccaatgctccacttcctgcacgccacagtcacgttcagctgcaaaagtagttatgctttgggtttttttggtttttttttttttaagaaaaaaaaaaaggaaaggaagaaagcaattaaaggggcgggggggacttaaagtttgcacctcagcatgagtcaccgaatcaaagttcagcaaccacatgcaaaacaaaccctccgtgagggcagcaagtctccgtgaggacggctgggattggctgcacagcaaagccaggagaggctccatgaggagaacagcattcagagtccaagggggagaacc

SEQ ID NO: 457896 - DNA, 566 bp, Homo sapiens
cctctggcttttcttcttttgtcatgttttagctttgctgccaatctccactgatgggtatggcttttttctcattgttggcagggtagtttgcttgatgtagtagtctgcttcataccaacctcctctatcttcaaggacctccttggaaagaaacagctgtgcttcttctggagcaaagtggttcactactctggcctttccaacggtggtggtctctcacttagatgctgcctgggaagcccttagagtcccagtgccacctctacaaggtactctttcatgtgaagacaggaaaacctcttctgtgtcctcatgacagcagaaaaactcccatacacttatcaggcacaccactggtgtgcaagagcggcttgtacrgactctcaaatgctaactgttaaatttttaggaagttgtgatcttgttgttaacacaatcattactaattatattatgtaagtgattaatcaaaaagattattttagaaactgtactaaatatttaaaatatcactttcttattattttgctgcattttgttattacctgtgctcctgatattgc

SEQ ID NO: 457897 - DNA, 582 bp, Homo sapiens
atgccgtcatcttttccttcaacaactgcagtggtctccttaacattgtctctgcttctggatcttggtctcccacaaaccacttctcacagtcatcaaaacaaacttcttcagatcataattcagattatgtcactcctctgctataagcctgttctgttacatttagaatgaaatccaatcttttaaaaaatagaataaaaawaaatatattttaggaagccatgtcatcagaagtgtaatccagagaataatatactctataggtctaaaaaaagattttctaaattatgcaattatattttgataaatacttataaatattcaaatacagacatcagtaaaatgaaaagtgaaactcatttcacccatttcattcaatttctcccccaagatgactactgttaattgggtctatatagtttaaggcctttcctatgaaattacgtccatgttgtacgtttgctttacatatgttatggactggaaaatgaaagcagttgtgtggaagggttcttatgttacagaaggaagtcacatttttttagtttccttttaactttctttaaatgaaaaggaaag

SEQ ID NO: 457898 - DNA, 582 bp, Homo sapiens
atgccgtcatcttttccttcaacaactgcagtggtctccttaacattgtctctgcttctggatcttggtctcccacaaaccacttctcacagtcatcaaaacaaacttcttcagatcataattcagattatgtcactcctctgctataagcctgttctgttacatttagaatgaaatccaatcttttaaaaaatagaataaaaaaawatatattttaggaagccatgtcatcagaagtgtaatccagagaataatatactctataggtctaaaaaaagattttctaaattatgcaattatattttgataaatacttataaatattcaaatacagacatcagtaaaatgaaaagtgaaactcatttcacccatttcattcaatttctcccccaagatgactactgttaattgggtctatatagtttaaggcctttcctatgaaattacgtccatgttgtacgtttgctttacatatgttatggactggaaaatgaaagcagttgtgtggaagggttcttatgttacagaaggaagtcacatttttttagtttccttttaactttctttaaatgaaaaggaaag

SEQ ID NO: 457899 - DNA, 613 bp, Homo sapiens
aaatgtatactaaatgaaccatcaggtatgtataaaagatacagctttaaaagatgcctaactcattacactatttaaaacagagaaaaattaagtattctcaatattcaataaycagtaatttgcaaaatttcagcaaatcaatttaatgaacaataatgcagtcattaagaataatattattttaaaacattctatggaagatatttacaatatgttaagtaaaatatgcaggttatgaaatattaaacccacttatgaaaaatacatatttgtgttaaataattatatctgtgtaaatgtgtgtatattcacatatgcacacacatacacttgtacatatgactggaaaaatatgtagcaaaatcttaacggtatattatctggtgggctgtaattgtattctaggttttcaaaaaagtttttgcatatgaacagtttctgagagttctataatgaataggcattagatttgcacatttttattaaagagagactacatgaatactatcttacaagaggaaaatcaaatgaataatgataaatagtaaataaacacaagcgtgttttttaaatcttttaaaaataaattctatttgtatttataggatac

SEQ ID NO: 457900 - DNA, 568 bp, Homo sapiens
taactaaatatttcaaaaaacacaatacaaaaattgagtacttcttattccaattcattaaaaaagagaaaggcagagaagacttaaaacaaatgacagtttttactaaaaagaatgggcaaggaaaataacataatctagtatatagatgaatatgtaatgccctatggattttatacattaattattttttatctttaagttacacttctatgaataaggtatttacatgggaaattggatyaatagcaaagaaaataattcatgataaatagatttccatactttcttctaaaactcctttatatatgtatgtgttggtatactttagtacactaacataatatttgtattgtcagttcttatttaaaatctgttgaatgtgccctataaactaaaagcaaaatttcaatttctttgcctagtattcacaactttccatgatcttatcccaaagtaactggtcattttacctcccacttctcttcacaaaccaccttctccagtctgacagacccctcattattttctccacacatcatgccagttttctgtcctcaaactgtct

SEQ ID NO: 457901 - DNA, 608 bp, Homo sapiens
  misc_feature (1)...(608): n = A,T,C or G
tngggtctcagcccatcggggatattttttttctttgttataaaattaatctctctaagtacttctgttgctattacctttgtgctgaaggcaatgccattaccctccttttcatatcgttcatcttttcatttccttttttcaagcctcttctcctaccactatttttttcatctgattaagtggcaacaaatataaccaattattaaaactaaggactcartgatcaaactaggaatcagtttgatttttccccttccttcactttcctcttttaattaactagcaattctcattgtttctattttcaagctctctcctcaatccattcacgtctcttcatatccactagttttaccaaactcctattacctctcaggaggacaaatagaatggaatcctagcaagttttatgatttccacactagcagccctacaatcgtttctgatacatagccaggttaatttttttaaatctttctcatacattgcattgagaataaaatccaaactctttagccccacccctcagcttcaacatgatctggtgcctgccttcctctccaacattatttcttacacctctcttcccttacacaagatgtttc

SEQ ID NO: 457902 - DNA, 573 bp, Homo sapiens
atcttctgtgtttgggatgatggaagggaattttgtttcagacaggcagcttcctccctagtgcctactgggtaaattgccgttatatcaagtcagtaggcagaaagatttagatggctttttggtgctagtgcttkcttcctcctttctggaactgtgcaataaatgcattattattccagagcactcggagaatgtggcagtagtcaggcattattgaaagagggccatttagcggaaacattctatagagatgaattatcaacactatttttctttattatttaacttgcttgaaatgttgaaatagtgtagacaagcttttattttgtgacttttgtcttcctagtgatcaaattgataatgcctacaaatgaatataccttgcccatccggtttccctaataagacagataattattgtagcttaagggtacaactgactgaaaattcctaaatggtctttatagtaaatattatgctatataattaaaatgtgacacaaagcatatttttactccaaagtttattttataataggaaaaaatgactattagaaagccaataaatcat

SEQ ID NO: 457903 - DNA, 508 bp, Homo sapiens
agacattatgaatttatacttagaaggcccagtagcatcaattgtaaaattactagatttagatcattagcaaaatatttgagactgcaaattttcaaaaagaggtgacttttccaaatatcatcaataaattataagaaagtataatgtgggaaaggctagaaataaatataaaccaaaatattagcacttactacttctggtttttgggaatatatgtgatcttttaaataaatttaaaaagccctattgtttacgtagtatttactgtgtgctgtgaactgtgttaagtaatttttgtattttaaaaatarctattggctttacacttcatttgtgttctgaccaaatattttcattagtcccctttgagatccataaagcctttctgagttttgtgaatgtaatgcagctaaagattataattgtaaaactgcattccaaatggcacgtattgtaatttgctgctacttatatctgcttgaagctgtcaatatgtagagaatag

SEQ ID NO: 457904 - DNA, 545 bp, Homo sapiens
aggttgttactaaatgaggcaggcagacgtatgtaacttgcaaaactattagtggaaacctaatctactgttttccattaactgggtgcccatcattaatcacaaaaatgatgtgtgatgaaaactacaggggtttgtccagaaattggaatgtgatartatagcagaaagtgcctttttctcccccaatacatggagaaacaaacacaacttttgcaatgcattttcttcttaacattttccattggtttgaaaaaaaatgtaagaattgacaggcatgagattttctgtttttgtctccttttaaaggggttatattaatgtatattatattgatattttgtcagtagaaagattgttatactccagagattccactggctttggatctgaaaagattggggcttaaaccaagtgaccatttttacttgaataaaaagcctctaaaagattgatcttcaggcacagaggcctgtgtaagaagaacatactcatgaaccatccatgcaaagagtaaaaagaggggatgtccctcctctgtcata

SEQ ID NO: 457905 - DNA, 545 bp, Homo sapiens
aggttgttactaaatgaggcaggcagacgtatgtaacttgcaaaactattagtggaaacctaatctactgttttccattaactgggtgcccatcattaatcacaaaaatgatgtgtgatgaaaactacaggggtttgtccagaaattggaatgtgatagtatagcagaaagtgcctttttctcccccaatacatggagaaacaaacacaacttttgcaatgcattttcttcttaacattttccattggtttgaaaaaaaatgtaagaattgacaggcatgagattttctgtttttgtctccttttaaaggggttatattaatgtatattatattgatattttgtcagtagaaagattgttatactccagagattccactggctttggatctgaaaagattggggcttaaaccaagtgaccrtttttacttgaataaaaagcctctaaaagattgatcttcaggcacagaggcctgtgtaagaagaacatactcatgaaccatccatgcaaagagtaaaaagaggggatgtccctcctctgtcata

SEQ ID NO: 457906 - DNA, 518 bp, Homo sapiens
ataccttctgcaaagaatgccatatttatcttttcatttctaacagtggcatattttatttctctttcatgatmtattgcattagcgtgaacttctaaaactgtaggtttttcttcaattggttaaaggagttaaaagttgtggtgagagaactttgccctttttctacaacaagagtagttaaaaacaaatgcctaccagggccacactgtagcataaatatgtgaacagggatgactgtaagaacacagaaaatggcagagcaagagaaattgagaatgtattgtgttaaaacaccatgccaaacaaacacaacataagtttgcatatgcaagcttgatgcaggtaaaggactgatggaggtgatcccagttgagaaagggtatagtactcctgaagagattgctcattataaccacagcagtgggagaaatatcactgtgctgtaagagctgctaaattatttggtatcaatgggtattgattgcaaaacaacatggaccaatgaaagtacaggg

SEQ ID NO: 457907 - DNA, 590 bp, Homo sapiens
gcttgggagaaactctgcttttgctcatgaaagatttgctcatgaaaatgtggaatacatgaaacagaggataaaagggcatgggattcagctctgttagaaagataaccactgcagttgtctttctgagcaagagttttcggacatggtcttcagggaagacagtactgctattcctgatagatgagaaacaaatgaggtgccccctacgttcatcccaattcacagcctcttggtagtatctgggcctggcagagggagaggaacctaaataggatctagcactttcacttgatgggaggagactgagatcagagctggggaagctgaggcagtgagacattgtagggcaaggaactggagagaaagaagatgcacagaaagaaayacctccagagattaacagagggatcatttcaaattggaatatatatcaggtaaaactttaagaggcaggatagaaatccactgaaaagcagtaggacaaaaaaattctcaaaattcacccagatctgggaactagttggcactcccatcagccaggctagaaaaccttcataatacacaaagtattggatagagtgttcaaa

SEQ ID NO: 457908 - DNA, 487 bp, Homo sapiens
caagctgtaacacattcacagaacaggcatacatgctaaacaatttttccagacatctttttttttttttttaatttaacctcagtagaaatttgggggacttgttctcccagggatttgtatgatttccagctctgttacagtcaacttctaatggctcacrgtctgagcctctacataagtgcttaggctgtatctcagagtgattaatgactgagtaggaaagctaaacacacagcactttgtgaactaaagaccagatcaaaccagtctggattctacccccatccctggcctctttgctcaggaccccatcctggactgttattactgattaaaaatcatctctcttttgatgtctgaatgtgttggagtgtaacaagagcactgacctgaaatgaggaggttggtatttgaaccgaacttgaacattgtctctaatacattttatcttattggatgtgtctcattatcatagcctgttaag

SEQ ID NO: 457909 - DNA, 638 bp, Homo sapiens
tgcttggtctatttaaacagaatgattcctgagatggttttggctgagaaataaattaaaattttctgaatagcattttgaagaaatgtgtactatctgaaaaatttgcaaaaatacattctaaaagttaagactactggatgctgcgtattgtacattmtctaaagacgcatatataattgatgtttctgacattgctagtatctgtattgtatatggaaaatgcttggaattgaatatggtggaattgcagttttaatggaatatgcttactttgtaatacattgactctccttttatattcaatgtgtactaattagttatggtcactgtatgtgtcttcctaatgttaggggttgaagtataatagattgtaaaataccttgacctttgagccagtagaactcagttaaatttttatttgtcactaatttaatgaagcatttggaattctatttaagctatatgtgtcacttttctcatcccagaaaatatgttgatccattttagatactttctaaggtttcctcagtaggaaaatcctaggagaggacttagaatataatcttactgctcaaaatgattatatttatgctgattgcatatttacatttttcttttattttaataacacatgg

SEQ ID NO: 457910 - DNA, 601 bp, Homo sapiens
agtgcctatatgtctcttacccagtttcccctaatattaacatcttaacataactatagcacatttgttaaaattgagagactgttaytgcttcatgactattaatcaattttcacagtttattcaaatttcaccaatttttcctactatgtcttttttctgttccaggatcccacgcaggataccacattacatttagccattaaatctccttattcccctctagtctgtgacagtttctcagtctttatttgtttttgatgacctggatatttttgaatagtgctggtcagttgttttgtataatgtccctaaatttgggtttgtctgatgatgtttttttttttctcatgactagttgtagggttacagacttttaagaggaagaccacagaggtaaaggtagagttctctccttatcacatcatgtcaggaatacatactaccaacatgacttatcagtgttgatgctaaccttgatcgctttgttcaggtagtgtgtgccaggtgtctctgctgtaaagttactattttttccctttacataatctattgtttggaagcaagacactaaattcagcccatactcaaggggtgaagc

SEQ ID NO: 457911 - DNA, 576 bp, Homo sapiens
gagtgcctatatgtctcttacccagtttcccctaatattaacatcttaacataactatagcacatttgttaaaattgagagactgttattgcttcatgactattaatcaattttcacagtttattcaaatttcaccaatttttcctactatgtcttttttctgttccaggatcccacgcaggataccacattacatttagccattaaatctccttattcccctctagtctgtgacagtttctcagtctttatttgtttttgatgacctggatatttttgaatagtgctggtcagwtgttttgtataatgtccctaaatttgggtttgtctgatgatgtttttttttttctcatgactagttgtagggttacagacttttaagaggaagaccacagaggtaaaggtagagttctctccttatcacatcatgtcaggaatacatactaccaacatgacttatcagtgttgatgctaaccttgatcgctttgttcaggtagtgtgtgccaggtgtctctgctgtaaagttactattttttccctttacataatctattgtttggaagcaagacactaaa

SEQ ID NO: 457912 - DNA, 505 bp, Homo sapiens
tctgtgacagtttctcagtctttatttgtttttgatgacctggatatttttgaatagtgctggtcagttgttttgtataatgtccctaaatttgggtttgtctgatgatgtttttttttttytcatgactagttgtagggttacagacttttaagaggaagaccacagaggtaaaggtagagttctctccttatcacatcatgtcaggaatacatactaccaacatgacttatcagtgttgatgctaaccttgatcgctttgttcaggtagtgtgtgccaggtgtctctgctgtaaagttactattttttccctttacataatctattgtttggaagcaagacactaaattcagcccatactcaaggggtgaagctttaagttccatctctggaggggaaactgtctacatgtattatttggaattctttagtaaggaagatttatcttttacccatttatttatttacttaatcatatacttacatatgtatgtcagcatagat

SEQ ID NO: 457913 - DNA, 497 bp, Homo sapiens
ttttaaagcaaactaatataataacttggtgtaaacttttagttacatcacaatccagacaggcttccccagctggatcaccttgattggtgttcaccaattatttggacacttcttgttctggcaaatcttgtatgcaggccatttcttgatcctgggaatctccagacaataggattgaagagatctggctctaagatttcttattgatacattttgttctctcaaaggccattctagactaaccaaaaatgaaaggtgaattctggaatcactccaratgtctggggacaccaaatctaggagtgtacagggcagaacaaatatctaatggcatgagtaagctggcatattgtaacccaacatatttgattattgttccctgcagaatacaactgcattacagtgtcaaaggcttgtcttaaaagacagagcatgttcctccttgtatgaagctagatacaaagagatcttcctcatctctgaaaacagagttc

SEQ ID NO: 457914 - DNA, 562 bp, Homo sapiens
atagcacaaaacaaagacacttttccataatttagacgtgtattcatcttcaacaaatacaggtataccagaacaaaaataaagggaggtacaggggatgactacataaagaagagkatgtttttcacaataaggactattaataacaaagcaaagtaattatgataataatttaattaaaaatgagaggattatctccaataattgtgtttgagaagaaaaacttgtactacaaacttggaataatgtgcttatagcggtttcatcatagtagttctgttgaagctgtctagttggataaaaaagttattgcactgtgaatcagaagaatcggattccaggtattcttgccgctatttaactaagtgagcttgataaagccactaaccttctagctcctagtttaccagaaatagtattcatgctgctggagaaagcactgtaagaagaaaaaggataaatgctttcttgtcacaggagattgaacactagcatcaagaatttattaacattttaaaatactaaaagagtataattggattgtttgtaacacaaaggataa

SEQ ID NO: 457915 - DNA, 562 bp, Homo sapiens
atagcacaaaacaaagacacttttccataatttagacgtgtattcatcttcaacaaatacaggtataccagaacaaaaataaagggaggtacaggggatgactacataaagaagagtatgtttttcacaataaggactattaataacaaagcaaagtaattatgataataatttaattaaaaatgagaggattatctccaataattgtgtttgagaagaaaaacttgtactacaaacttggaataatgtgcttatagcrgtttcatcatagtagttctgttgaagctgtctagttggataaaaaagttattgcactgtgaatcagaagaatcggattccaggtattcttgccgctatttaactaagtgagcttgataaagccactaaccttctagctcctagtttaccagaaatagtattcatgctgctggagaaagcactgtaagaagaaaaaggataaatgctttcttgtcacaggagattgaacactagcatcaagaatttattaacattttaaaatactaaaagagtataattggattgtttgtaacacaaaggataa

SEQ ID NO: 457916 - DNA, 535 bp, Homo sapiens
gactgtttactaacttgttcttaggatttaaacacaacaaattttgaaaaataatgtaatattaaagatacatgctstttcacaagggattaagccataagggatttatgaaaggatatattaaaaaaaagaatcttgagaaagatactgtttcaagataagacaactttggtcaaaggcttaaatttctttacattaaattttctctagagtaatccttcctgattccagcgttttatagcaaaagatctggtaacagcacatgctgtcagtcataccaaatattgctccaggccacagtatttgctgggctctcaggtaatagcttctttagtgactttggtcaggaaccctgagccacatgacaggtttaggtgtcctgtaaggcaagctgataaatcctcgtgatgacagccaggtcttttggcagagtgttgagaactgacaggccaccagtgctcctttcctttgtgtcttctgtttggaaaaatgcaacaaataaaaatcactaaagagcttctggtaaagtcagcct

SEQ ID NO: 457917 - DNA, 554 bp, Homo sapiens
gttacactgttaacttttagcaaacttcacttttgttgaaaaccttgtaartttgggatttcaattatcctttgctattaataagatcttgtttagtctgaattaacttagaattggtatagatggcctctttttctctctgctggtctttccttgcctctgccagccacttatgctgctgttctcttaactgctgttggggggaagggggtctaaaactagctgtaactgtctatgtacggaaactggcctgggtgccttggcttacaggttaccttgtgccatacttttgaaacaagggacctgtccaggcttccttctgatggccaacctacctctaatgctggccagtctatttcacacaaagttctaagttttcctggtgtcacagtaacaccgtaatctcctttaaattctttcttgaaattttttaacatagttcctagtagggtgggcttacttacaccggacctgtttttgtttttgttttttctcctgagacaaaataccatgctcacaccacacacactcaccacaagacaaagaacgggtat

SEQ ID NO: 457918 - DNA, 655 bp, Homo sapiens
ttgtagcaactcttaaccagaaattagaggagagactttataaactagtctcctgatagaccccacatcagcaggacttttactaatgttagagaatataatggaggtttgcctgtgacatctggcagaactttcattcctagggttgatttggctaaatcattccaggctaagggcgccattgaaaaggacaatatttaaagwtagaggaaagaagcattttgatcaaacacatgtataggggaatgttggaaaagaattttgacaggaataatagaaaatcatagtaaatatatgtaacgttgacaaaattacttaacctccttatgctccaatttccttacctacaaaattggaaaggtaatagtaatatttgtctcgtaagattattgtgataattaaatgagttgttatatattagtgaaatatttaggtaagtggaacttattgttaaatgttaaaataatgacaagttccaccatcatacctttctttgtggctgagttacaatacatatgtatatcttctccaaagaagacatgcaaatggccaacagatgtataaaaaattagtaatcatcagagaaatgcaaattaaaatcacagtgtaagatattactttacactgtttagaatgacttatcaaaaagacaaaa

SEQ ID NO: 457919 - DNA, 570 bp, Homo sapiens
tgtaagatattactttacactgtttagaatgacttatcaaaaagacaaaagataggccaggcatggtggctcatgcctgtaatcccagcactttgggaggctgaggcaggcagattacttgaggtcaggagtttgagaccagcctggccaacattgtgaaaccctgtctctactaaaaatacaaaaattagtcaggygtggtggtacatgcctgtgacccagttgcttgggaggctgagacaggagaatcactggaacctgggaggtggaggttgcggtgaatcaagatcatgccactgcactctagcctgggtaacagaatgagactctctctcaaaaaaaaaaaaaaaaaaaagacaaaagataaatattggagaagatgtggagaaaggaaacccctacacactgttggtgggactgcaaattagtatagccattatggaaaacagtacagaggttcctaaaaaaattaaaaatagaattatcatttgatctagaaatcccactactgagtatatagtcaaaggaaatgaaatcagtatgttgaagagatatcttcagttccatgct

SEQ ID NO: 457920 - DNA, 615 bp, Homo sapiens
gaaaggtaatagtaatatttgtctcgtaagattattgtgataattaaatgagttgttatatattagtgaaatatttaggtaagtggaacttattgttaaatgttaaaataatgacaagttccaccatcatacctttctttgtggctgagttacaatacatatgtatatcttctccaaagaagacatgcaaatggccaacagatgtataaaaaattagtaatcatcagagaaatgcaaattaaaatcacagtgtaagatattactttacactgtttagaatgacttatcaaaaagacaaaagataggccaggcatggtggctcatgcctgtaatcccagcactttgggaggctgaggcaggcagattacttgaggtcaggagtttgagaccagcctggccaacattgtgaaaccctgtctctactaaaaatacaaaaattagtcaggcgyggtggtacatgcctgtgacccagttgcttgggaggctgagacaggagaatcactggaacctgggaggtggaggttgcggtgaatcaagatcatgccactgcactctagcctgggtaacagaatgagactctctctcaaaaaaaaaaaaaaaaaaaagacaaaagat

SEQ ID NO: 457921 - DNA, 588 bp, Homo sapiens
gtctctactaaaaatacaaaaattagtcaggcgtggtggtacatgcctgtgacccagttgcttgggaggctgagacaggagaatcactggaacctgggaggtggaggttgcggtgaatcaagatcatgccactgcactctagcctgggtaacagaatgagactctctctcaaaaaaaaaaaaaaaaaaaagacaaaagataaatattggagaagatgtggagaaaggaaacccctacacactgttggtgggactgcaaattagtatagccattatggaaaacagtacagaggttcctaaaaaaattaaaaatagaattatcatttgatctagaaatcccactactgagtatatagtcaaaggaaatgaaatcagtatgttgaagagatatcttcagttccatgcttattgcagaactayttacaatagccaagatttggaagcaacctaagcttccaacaatggataaatgggtaaagaaaatgtggtataaatacttaacgaaatatgattcagccttaacaagaagaaaatcctgtcatttgtgacaacatggatgagcctggaggatattacattaagtgaaata

SEQ ID NO: 457922 - DNA, 562 bp, Homo sapiens
catagtactataatttcacagcaaacaaaaaatatatgtatatatatgtccctggcaaaactttatatgttgctggacaaatggttttaatgacatcagcaaaatgtgcttgtatcaatttcagaccattactagcattttcttaaatttttatcaaatttttatatataaggatgtttacatctttgtttattggcaacttggttaattttttttaagcttattcaggawtttttttttttttttggagaggtagtctcgctctgttacccaggctggaatgcaatggtgtgatcccggctcactgcaacttctgcctccaggttcaagtgattctcctgcctcagcctcccaagtagctgggactacagacacaagccaccatacctggctagtttttgtatttttagtagagacacggttttaccatgttggtcaggctggtcttggacgcctgacctcaagtgatccaccggcttcggcctcccaaagtactaggattacaggtgtaagccaccacacccagcctcaggatttttttttttcaaacaaaatcacagga

SEQ ID NO: 457923 - DNA, 556 bp, Homo sapiens
ccaccatacctggctagtttttgtatttttagtagagacacggttttaccatgttggtcaggctggtcttggacgcctgacctcaagtgatccaccggcttcggcctcccaaagtactaggattacaggtgtaagccaccacacccagcctcaggatttttttttttcaaacaaaatcacaggaagtacttgacaatgatatttgaacatgaaacctagctggctgaccttagagagccagaatttgaaagtataattaaaatggttaattcttatcatttgctatttatctattggaatcatgatgctttctcataaattttaatgaactatttacatattgctattatcttctattcttgacaaagctattatttttcttaggctgtgttatcattatttcagtttagttttgttttgtttgtatggagagataatataggcttttgttgtctatrtattcaaatatattggtcttttaatttcttaaggttttatttcccaacaaaaccaaacacttctaagatcatcttgacctacagtgcatttgccaaca

SEQ ID NO: 457924 - DNA, 607 bp, Homo sapiens
tacattaagtgaaataagccaggtgcagaaacacaaatactaggggctctcacttatatgtggaatttaaaaagttgaattcatagaatgatggttaccaggggctgtgtggaggagggattgcagaaatgttggtcaaaggatacacaatttcagttaggaggaatcaagagatctattgtacagtatgtgattatagtatataacagtgtattgtattcttgagaattgctaagggtagatttttaaatgttctcaccataaaaattgatatgtgaggtaatgtatatgttaattagctcaatttagccattctatagtgtatgcatatttcaaaagaacatgttgtgcatgataaatttatacaaaaagagttataatacataaataacagtgataccctcagacacctatgaaataggtgaaaatatatactcatgctttaartgactctaggtcattgtggtttcttgattttattcgactctcttcagttgtagatgtcattttttgttgctgttagtcggtattctcttcctgcttctgatatactgctgtatgttgcattcattcactctatagaccaacaccatctaatagccaaata

SEQ ID NO: 457925 - DNA, 558 bp, Homo sapiens
accatctaatagccaaatatgtaatttataatttccagtagtcacattaaacaaagtaaagagaaataggtgaaattatctttaataatatattttmtataacacaatgtatccaaaatgctatcatttcaacaggtaatcaatatacaaatattaatgatgtattttatattattttttaaattccaagtctttgaaatctggtgtgtatttaacttttgcaacacaactcaattggaatgctaaatttttgatagatacgtgctatttatttagatttcataaaatttacagttgaaaaagtggattcatgtacccaaattgttttgagactatttaaaagtttctcaacaagtgaattgaatagcagtgtattagtccatttttatactgctatgaaaaaatacccaacactgggtaatttataaagaacatgaggtttaatggactcccagttccacaaagctggggaggcctcacaatcacaatcatggtggaaggtgaaggtggagcaaaggcacgttttatgtggtggcaggaaagagaacgtgtgcaggg

SEQ ID NO: 457926 - DNA, 607 bp, Homo sapiens
ttgcaaccatatctgcattaggaggcaccccaagcccagtaacactgcagctcttgcaaactcatagaggtactgccttggtggtcttagataagatctggaagaattatctggattaccaggtggagacttgttctcttcccttacttcctcccaaagatataaagtctctctctctgtgctaagctgcctggtgctggggaagaggtaacacaagcatatctgtggccaccaccaccaagactgcactgggtcagacctgaagacaacacagcagtggggcttacccaaggcccatggcaaccactgcctggccttgttcgctcaaggttgtagggctctataatcagcaggtagcaaagccaascaggttcatgtccttccattcagggcagtgagttccctctggacccagctgagtccagagatgccattcaggagccagtgcctagagtcagaaaccttaggaatctacttggtgctctgttctactgtggctgagctggcacccaagccacaagataaagtccttcccacacttatcttccctttgcaccagcaagggagtgtcttcccttgaccacgactaccccagaactatgctgag

SEQ ID NO: 457927 - DNA, 559 bp, Homo sapiens
cctaatttattatgtgggcaaataatagtcaatctatttttaattaactggtgtggcatacagtcaaggtaggagaattaaatatttacttttaaatgcaaaattttgtgcatgtaattttcagagaaaaacttattattaaaggaaatcctataataattaaggcagaatttgaaagtgagtaagaatgactagtcttgagacagagaataaaacttttgccayaatcttagtaaaagaagcatgttagttacagaaaatttcttaaaatatatatactgactcaaatttatctgttggtatcctaaaagttatttgataacttaaaaattttttctatgaagtagtcctagcaaattatgtttcaagtcttttttaagtttaaaagcatataattaaatttctttctgagaaaaggaatacgagtaggtgtttgcatgggcatagataaattttcataaatttatttaaactaatttttgacgctacttcaaaacacaatttctgttaaaaaaaactttttaatgctcttcgtagcattaatgcaacacttaggtaa

SEQ ID NO: 457928 - DNA, 559 bp, Homo sapiens
cctaatttattatgtgggcaaataatagtcaatctatttttaattaactggtgtggcatacagtcaaggtaggagaattaaatatttacttttaaatgcaaaattttgtgcatgtaattttcagagaaaaacttattattaaaggaaatcctataataattaaggcagaatttgaaagtgagtaagaatgactagtcttgagacagagaataaaacttttgccacaatcttagtaaaagaagcatgttagttacagaaaatttcttaaaatatatatactgactcaaatttatctgttggtatcctaaaagttatttgataacttaaaaattttttctatgaagtagtcctagcaaattatgtttcaagtcttttttaagtttaaaagcatataattaaatttctttctgagaaaaggaatacgagtaggtgtttgcatgggcatagataaattttcataaatttatttaaactaatttttgacrctacttcaaaacacaatttctgttaaaaaaaactttttaatgctcttcgtagcattaatgcaacacttaggtaa

SEQ ID NO: 457929 - DNA, 612 bp, Homo sapiens
taggcagagaagaaagttagtcctgtgtaaatacaatagcaattaagaataaataacaattaagcttctttwtttatttatttattttttctactttaattttttttttttttaattgatcattcttgggtgtttctcgcaggggggatttggcagggtcataggacaatagtggagggaaggtcagcagataaacaagtgaacaaaggtctctggttttcctaggcagaggaccctgcggccttccgcagtgtttgtgtccctgggtacttgagattagggagtggtgatgactcttaacgagcatgctgccttcaagcatctgtttaacaaagcacatcttgcactgcccttaatccatttaaccctgagtggacacagcacatgtttcagagagcacagggttgggggtaaggtcatagatcaacaggatcccaaggcagaagaatttttcttagtacagaacaaaatgaaaagtctcccatgtctacttctttctacacagacacagcaaccatccgatttctcaatcttttccccacctttcccccttttctattccactaaaccgccattgtcatcatggcccggtctcaatgagctgttgggtac

SEQ ID NO: 457930 - DNA, 578 bp, Homo sapiens
gtctcagcccaaaatctccttaagctgataagcaacttcaccaaagtctcaggatacaaaatcaacgtgcaaaaatcacaagcattcttatacaccaataacagacaaacagagagccaaatcatgagtgaactcccattcacaattgcttcaaagagaataaaatacctaggaatccaacttacaaggaatgtggaagacctcttcaaggagaactacaaatcactgctcaatgaaataaaagaggacacaaacaaatggaaraacattccatgctcatggttaggaagaaccgactttttattttaatgaaaagaataccaaatgtcagggtctgcttgtatatgtacactgtcaaatatactttcccagagaactaggattgtgtcttactgatttctggatatggggttcccagtaccctgctgggtacaatatgtttattgtatcaatgactgtaaatggtaaatttttttctaatttttttgtaggatttctaatgctaatttttattttttacagatatggagtggaagatgttctgtcttcattgtgtgttaagtgttgtgttgaaaatt

SEQ ID NO: 457931 - DNA, 541 bp, Homo sapiens
gtgcagtggcatgatcttggctcactgcaacctctgcctcctgggtttaagcaattcttgtgcctcagcttcctgagtagctgagattacaggcgcccaccaccatgcccagctaatttttgtatttagtagaaatgggatctcaccatgttggtcaggctggtctcaaactcctgacctcaagtgattcacccccctcatcctcccaaagtgttggcattacaggcataagcctccgtgcccagcctgtgtttttattataaatgagaaaccatatcatgtaagaatgtctccctttcctatggataatataatagttgttaaaatatatctcttttcacaaaaattccrttttgaagatactatccctctattgggggaatgagaaaactgaacatttagttataaaaataacattaactaaattttaccaatcgaacaggagaaatagatgtgactgacaatctctagactttgaagggaaatcgaataattaggtaaatccactttttctatatctacaacctaaattttttcagct

SEQ ID NO: 457932 - DNA, 575 bp, Homo sapiens
gtgactgacaatctctagactttgaagggaaatcgaataattaggtaaatccactttttctatatctacaacctaaattttttcagctcatgtatcttctcccaaagtcagaaccattttcattagaaaatggaatttcaggctaggtgtggtggctcatgcctgtaatcccagcactttgggaggcagaggtgggcggatcacttgrggtcaggagttcaagaccagtctggcaaacatggcgaaaccccatctctactgaaaatacaaaaattagcctggcgtggtagcaggtgcctgtaatcccagctacttgtgaggctgaggcaggagaatcgcctgggaggtggaggttgcagtgagacgagatcacgccactgcactcctgcgcgacagagtgagactccatctcaaaaaaagaaaatggaattacaaatcccagaagattggatttgccatctaaaagaagacaaagcaaagagtaatcaactttcccaacctagtctttcttcactgcacttggcctatagatgaccacctttgggtttagcttcatccctagaccatttagctgt

SEQ ID NO: 457933 - DNA, 439 bp, Homo sapiens
ctaactagtttgtgagtaagagaatgcttaacaatgttattttcaaatataagtggactgagcacttacaaaagaagatatctggaaagagtgctacccttaccactggaataaaagctaatagtcattagtgttgggatttcctagtaaaattgggcatataaaggaagactatcactragccaaatcagtcttagaaatgactattataggggtcaaaacaatttgctaataggaaattgaaacataaactttgtaaaaagaccaactcttaaccaaaagcccaggaatattttaaccaagggctccatctgtcagtaggggagctgcagtgtggcgtctcagaggttaggtaattttgctagaacctcactgactgtggcttgtgacaaatgactgacccctaaggccaccaaccctggctgcctggtgctttgct

SEQ ID NO: 457934 - DNA, 576 bp, Homo sapiens
attattaagtacttactatgtgccatgcattgttgtagtctgtgcttgaagtacaatagcaaaaagacagacatggtctctgttctcatgatgctcatggactggtatgggatagagacaaataaacagaaaattgctctctgtgttaatcagagttataatggcagaaagcaaagtgtgctgagaggacagactggtcctgcaggtagtagaaatcatccatgtgtagtctagactagggaaacaagcctggggactctggccttcactctcttactggggtttttggacctggaaacataaaccttcatctgcagtactcctggaaatggccattgctgcagttatctcaggctgccacttagggacttctgtattcttttcagtttaccaagccctaaggtgattttgtctctttggtatatgtgtgtacacatatcacataagctttgctgcaccatttaaaagtaagttgtagagctcattatacttcratatccatcttctaagaataagatttctatacaaatcataacttcatcatttctaaaataattatcaataactgaatgaagt

SEQ ID NO: 457935 - DNA, 656 bp, Homo sapiens
tcatggactggtatgggatagagacaaataaacagaaaattgctctctgtgttaatcagagttataatggcagaaagcaaagtgtgctgagaggacagactggtcctgcaggtagtagaaatcatccatgtgtagtctagactagggaaacaagcctggggactctggccttcactctcttactggggtttttggacctggaaacataaaccttcatctgcagtactcctggaaatggccattgctgcagttatctcaggctgccacttagggacttctgtattcttttcagtttaccaagccctaaggtgattttgtctctttggtatatgtgtgtacacatatcacataagctttgctgcaccatttaaaagtaagttgtagagctcattatacttcgatatccatcttctaagaataagatttctayacaaatcataacttcatcatttctaaaataattatcaataactgaatgaagttatctattgtccagtctattattaaaatttccccagttattctaagaatgtttttatggctattttttttttctggagtgaatattccattaaagtttctgcactaaaattagtttttatacctttctagtcccctcccctgctagaggtaactattattaatgttattatttt

SEQ ID NO: 457936 - DNA, 577 bp, Homo sapiens
tgattgggtcccaccgatttgtttatcatgttcatctgtcctttctattttttattatgagaacaatcagattcaggtttgattttgtttatttgcttgcttgcttgttttggcaagattatttcacaggcggtgttgcctgcttccattcagaggcacataatatgtagttgtcttgcattttgtgctgctagccatcactgatgatcattgcctggattcattatttcactaagggttccaaaacaataatgcttgaattctcaaactctttattcatttatgagatagaatacatctataaagagaggcttcccttcatcaattatttgttgccctgagctatgcatgactgtatcttacgtgactgcccaagtagcctctggtgccagaagtcctgctccatttaatttatcrtatacaatccctagcctaacagtacaaatacattatcatagggatcagtaaatggtgagcatagtatcattataagagtattaataagtaacatttctgagtatatcctatgtcttgagtgctctgctgagcacttgtgaagtaggtgtttttattactc

SEQ ID NO: 457937 - DNA, 426 bp, Homo sapiens
ttttcactgatctaaactggctctgtcttgttgccacaaaaccagtagtgctggttgcagaggctttccaaagagaagacctcaagctctgacactcctctttggttttagctcttgagaacagatttttctctgccagatgttattttaatttcttacctcctcacaaggagtatttttgtgtgagtatgcctgacttgtggacattattttggagcagctgattctgttgacttttctagaagtgctgtgatctcaaatgtaargagacaggattactcaaacccctcactgcaccgaaattgaatacagtgccctgttctttgacaccaaaatgtgtcctgctgttgtaaaggtagggtgtttaataggcagaggccaatagagaaatttccagcttttcatccttctcactcttataaagtc

SEQ ID NO: 457938 - DNA, 464 bp, Homo sapiens
ggtgccaagtggctgcacacttcatggggagtaaactgctccatctccctcagtcctccttcccatgtgccccttgtactcagatggtaaagaggataaaacccctcccagtgagagctgttgtttcacagtggcccattgaactctccagtgagtactattagctcttctgggttctcttgttctcaggtccatygatacccaatgtttccttcttcttcccacccaggtgctgattccatgcagaatttctggcagttggtggtttgccccattaactggtattttggggttcaagaggaaactttgtctcctagtttagttttaaatgttgtcagggatttggggttttgttatctagttgctctatttgtgtagtagtcaaaggattgaaaaactatgctgccgtcatggccagaatctttccagaattccccctaccctcatagtattgtaaattgtgt

SEQ ID NO: 457939 - DNA, 605 bp, Homo sapiens
cttactatatcctgaagtaacaaaatgaatagtttgaagagaattatgaaattctagtccaagggcaggtgrtgtagaaaaaaagggggatatttttctctctgtggaggctgggttcaaggcatcctcttaattgccttcttcattggactgtagacagggagacaaggcaatgacttccttaactttctcagcaaagccacagaagagacagaatttgaactcaccagcctagtgacttttttcttccatgaccagtccaaatacctattttcttaccgtctaaataacccattttgcaaccaccagcctgaaatttcaaaaaaatgtatagcaacatagttcttatgaaccagaagatttaagaacatgagggcaattagggatgttgtgtgagatatcactgcgttaaaataatttagccattgttgccattcctcaccttacacacactctctgtctcattctcaccctgctcttgtgtgtggtgtgtgttcatgtgtgtgtaggagaggggtgtttatctttatttccatatgtttccatggagcctaacctacaaaccttaagacagagtggatgcagttatgttgattactttgtga

SEQ ID NO: 457940 - DNA, 572 bp, Homo sapiens
gccagagtagaaacaagtaatggtttgataaaagataactgatttggctattttctgtgcctctacactagattagttttcagaaatgtgttcatcccagcacacaaaaggaatatttatttagaagacaacactaacttaaactctaggtcccactggattgttagtctgcctcctttcctgccttccttccatccatcctccctgccttcctaccttcctccctcccttccttactttcttccctcctttcctccttccttctttccagcacatacagcttgagtgcctacaatggacaggtrttgctccagatgtgggggatgccaaactgaacaaaacaaagtgtacattgcttcctaaagccctagaagggccattttactcggtcatgaaacgctacagtcactagacataccggttgaggtgccaggcaagcacagggtcgatgctcccattaatccagcctgggcaacggctgttgctgcagccttccagctgtgaggaccattgggaaaaactcattagccataaagtacaatcagcgttaaaaaaaaaagtgaccatcagta

SEQ ID NO: 457941 - DNA, 572 bp, Homo sapiens
gccagagtagaaacaagtaatggtttgataaaagataactgatttggctattttctgtgcctctacactagattagttttcagaaatgtgttcatcccagcacacaaaaggaatatttatttagaagacaacactaacttaaactctaggtcccactggattgttagtctgcctcctttcctgccttccttccatccatcctccctgccttcctaccttcctccctcccttccttactttcttccctcctttcctccttccttctttccagcacatacagcttgagtgcctacaatggacaggtgttgctccagatgtgggggatgccaaactgaacaaaacaaagtgtacattgcttcctaaagccctagaagggccattttactcggtcatgaaacgctacagtcactagacataccggttgaggtgccaggcaagcacagggtcgatgctcccattaatccagcctgggcaackgctgttgctgcagccttccagctgtgaggaccattgggaaaaactcattagccataaagtacaatcagcgttaaaaaaaaaagtgaccatcagta

SEQ ID NO: 457942 - DNA, 630 bp, Homo sapiens
ggccttgggtaattcaactatctgagcttcatttcttcaactgttcagtgaaggtaattcctgcctcagtattgaggtgggcaatacaaatgaaatcaagtgagtgagagcaatttttaaaggatgatggggtaaatgagagtgagatatcctcatcttatcagttgactggtccccaagcaaggtcttgaagtcacagaactggaatgtaggtaggaaagggtctagagaatcaagcatttggtggcacagggcattgggctttaagtaaaaagagggggaaagaaacagtggctttatcatgtgatcagcagccacagtttttccattcataatagattttgtatccaatattttttaaytgacaataaaaaatttgataaactctatggtttcagatgtatcataactctcttccttagggatgcagcttccattgtgagtaacaaatcttggggaaagttcacatgacagttcatctctaggaaagagcatttgaatgatcatggctaatcatgttctgtgtgaattcagttggacagttaagggcaagattccatctattacctatactctgtgaccctctctttcccaaagaggactccaccaaaaccacatgcaaatttagct

SEQ ID NO: 457943 - DNA, 611 bp, Homo sapiens
atataggcattggatattctaattgacaattacagtttgcaagtgaattacataaatactcattgcttactccagattaataatttaatgtcattggccaaattggatccatttatagcaaaatatagcagaacacctagctttagagatatgatcagcaaagtcaaatagaggagatataaggaaaatctcttttgatggttcttttccggaatttgtaggtaaatcatttataagtatgtgactactgggaacaaatgctaaaacaggatttccagcccagatactttcccctagtgatgataatgacaatgrtgatgaggatgatgatgataactggtagtagaagttggagaatgaaggaaagaaggagaagaaagatgaaaacaataataataacttagatttggagagtagtttacagtttttctaaatgctttctgggttgtagggaggcagggtgttgttctgaggaagagatggtctcaactaaattgttacttgcccaagatcacatatcggatcacatgagagccaaattctagctcatctgactccaaatttagtaactgttccattatacaatcttaaaaaaaaaggaaatggcactt

SEQ ID NO: 457944 - DNA, 622 bp, Homo sapiens
tacatattagcaacagcttcagtctcatcccttccctaataccactacccagagctctgaagaaaagaaaaaaaaaactgccagattttaactttacctttctccaatttttagaaaagawaccgataggaataatatagccaaaggcaaataaaaatagaaaaaaaaagtgtggatcattttactattgtaccctcaatctcaagacccagtcaattattgaataaggcaataattggctttcaagtttactgaagtaggtagcagactttgaaatgcagaagctcaaggcacgtcttcttcctccataggatgtacaatagatcattctgacattctgtccactgaccaccctcccttttggctacatggaagtccttgcccagattggcctctgtgactagccactgcacattagcctccctaataccttgggctctcctgcctccctaattttctcaaccatggggaccctcctgccatctgtacacactcactgtgttcattaactacagggctgtactaaaaagattcatgtaatgacaattgtatcccattgcaagtttcttctatattaaattaaattaatgtgacccattcctggaaatctttaattcatctc

SEQ ID NO: 457945 - DNA, 601 bp, Homo sapiens
gaaattggactgggagagagtaggacacctaatactgtttatagataaaactcatcaaagagatttgggatctttccttatactgtaccacaaaaagtaaaaactattaagatttaaagattactgttagtttgatatatgaaactttaaataagtattaggtagaagaaaataaccaacacaaaaaaaaattctggtgagtgataaataaaccttgttgtgggccttagaggtttcaggaagcctcatgcactttctgagttatgttatcccctcacacctgtggtctctgtacagagggcagtaccagcaacaccttacattccttacactacctctcagccagcaagatcttgcattcttgctgcacagcaatttggacamggctgaaaaaaattagttttcccagatcaaggtgtctaattgcagctgtagtctaacttcaggataaaacagaatgggagcatttaggcttaccgaatcaatttgaggtgcttcttcattccaattgtacatttattggtgttactaatgtctcagagttgactctgaaaataattaactgaacctaaattcagtttatctgcagaacattttactg

SEQ ID NO: 457946 - DNA, 688 bp, Homo sapiens
tatttcatctgaaagatgaactagtatgtactacataagtgcaacaagaacaaagtaaataaaagcttttaaatttttaaagtacagtgcaggtgcgtgtaaaagtttgtgttgttctggttgatattaaaatgagagattaaggtatttaaggtagtggaatgggagtctgtgatttgaagattttcattctcttttaccctacatctaaaccatcgccagatcctgttggcactacctttgaagcagacccagggaatctaaccacttctccccacctccatgtctaccactggagtccaaaccactgtgtgtcctccctggagaactgcagcagcctctcaaygaggctccctgcttctgtcctagccccttgtcggtctattttctaaacagctgctgggatgatccttcaaaaaggtaagtaagatcatgtcactcctcacctcaaaatcctataaatggttttatctcattcagggtaaaagccacagccatgataccggcctaatgagcctacacaccctgcagtactcctgtttctcctctgacatcacctctcattgtcctctccatgaggaacttcagcccagtccttctgctgtcctcgctttacttgaacataccactcagtccccttccatagaatgtttgcacctgctgttcccattatggaatatacccctcc

SEQ ID NO: 457947 - DNA, 688 bp, Homo sapiens
tatttcatctgaaagatgaactagtatgtactacataagtgcaacaagaacaaagtaaataaaagcttttaaatttttaaagtacagtgcaggtgcgtgtaaaagtttgtgttgttctggttgatattaaaatgagagattaaggtatttaaggtagtggaatgggagtctgtgatttgaagattttcattctcttttaccctacatctaaaccatcgccagatcctgttggcactacctttgaagcagacccagggaatctaaccacttctccccacctccatgtctaccactggagtccaaaccactgtgtgtcctccctggagaactgcagcagcctctcaatgaggctccctgcttctgtcctagccccttgtcggtctattttctaaacagctgctgggatgatccttcaaaaaggtaagtaagatcatgtcactcctcacctcaaaatcctataaatggttttatctcattcagggtaaaagccacagccaygataccggcctaatgagcctacacaccctgcagtactcctgtttctcctctgacatcacctctcattgtcctctccatgaggaacttcagcccagtccttctgctgtcctcgctttacttgaacataccactcagtccccttccatagaatgtttgcacctgctgttcccattatggaatatacccctcc

SEQ ID NO: 457948 - DNA, 638 bp, Homo sapiens
tgggttacacttccttttgtgctttttwttttttttaattttctttcagaattttctcagcaggctacaatcatgctttaagaagtaatttataaatattttttcccagaaaaaagaactgcaaatataggatttaagcatcatatgatatctgcttaaactgttgacactatctgttttagttaacaaatttgttttatgtcattcttaatcaacagacatatggttttgttacttttgttgattctgcagcaaagccagttaacgttgttattatcttggatacatactcagaacagttacccttacagacatttttaataaaaacaaacaacaactgggtggactcagaaatgagatcagattgctttatcagccaaggaacaaccattgttctatttcacatagttcatattcttctttcaatgtcctctctcttaccaaccattttaaatacaatgatctggtcagatcaaggacagacatggaaaggggaagacaaaaagaagcaacctctgtttaacttttggtaaaaccagcatccaaagaaggaaaaccagaaagtacaaaaagctaggtgcacgggttgagcccaggtaacaggagccataaattcttctatcatgatgcagttgccc

SEQ ID NO: 457949 - DNA, 638 bp, Homo sapiens
tgggttacacttccttttgtgcttttttttttttttaattttctttcagaattttctcagcaggctacaatcatgctttaagaagtaatttataaatattttttcccagaaaaaagaactgcaaatataggatttaagcatcatatgatatctgcttaaactgttgacactatctgttttagttaacaaatttgttttatgtcattcttaatcaacagacatatggttttgttacttttgttgattctgcagcaaagccagttaacgttgttattatcttggatacatactcagaacagttacccttacagacatttttaataaaaacaaacaacaactgggtggactcagaaatgagatcagattgctttatcagccaaggaacaaccattgttctatttcacatagttcatattcttctttcaatgtcctctctcttaccaacsattttaaatacaatgatctggtcagatcaaggacagacatggaaaggggaagacaaaaagaagcaacctctgtttaacttttggtaaaaccagcatccaaagaaggaaaaccagaaagtacaaaaagctaggtgcacgggttgagcccaggtaacaggagccataaattcttctatcatgatgcagttgccc

SEQ ID NO: 457950 - DNA, 602 bp, Homo sapiens
acatgctaatactcaccctaccagaatcaacaaggatctcccggacactgtggcctcagcactgcaaagggacatccaatatctatctttcaacctctatccacatctctagtctcatggacaacccagtttctcagtaccccaatrctgtgtgcagtgcttctgaatgtcaatctcttccatgacagtcagagcagaaagagccatctctatgcaagtaccctattctcttcccctaaggtatagtaattttgtgttgaaaaggaagttttttccacatgtccactaatgaaatgagagctgtgagccactgtggcttctcaaagaaggaggccaaggtctctttcctttattgtcctcttcagctttttttccccagagagctcaaattctgggagctgatcaggctacatgcttaaagaagtgaaatattcccaggtccaaaagccacagtgaccatgtgcacatgagctgggacctcttctctttcactcacttaatctaaacagttatccagccttagagaggagaagtttgctccatgctctctctccctcccctcctcccatttttgcctttttatttggaagttagctggatat

SEQ ID NO: 457951 - DNA, 602 bp, Homo sapiens
acatgctaatactcaccctaccagaatcaacaaggatctcccggacactgtggcctcagcactgcaaagggacatccaatatctatctttcaacctctatccacatctctagtctcatggacaacccagtttctcagtaccccaatactgtgtgcagtgcttctgaatgtcaatctcttccatgacagtcagagcagaaagagccatctctatgcaagtaccctattctcttcccctaaggtatagtaattttgtgttgaaaaggaagttttttccacatgtccactaatgaaatgagagctgtgagccactgtggcttctcraagaaggaggccaaggtctctttcctttattgtcctcttcagctttttttccccagagagctcaaattctgggagctgatcaggctacatgcttaaagaagtgaaatattcccaggtccaaaagccacagtgaccatgtgcacatgagctgggacctcttctctttcactcacttaatctaaacagttatccagccttagagaggagaagtttgctccatgctctctctccctcccctcctcccatttttgcctttttatttggaagttagctggatat

SEQ ID NO: 457952 - DNA, 633 bp, Homo sapiens
aaccgttcgacaacttctttttttttcttgagactcctctctgtatcgcccaggctggagtgcagtggcgctatgtcggctcactgcaagctccatctccagggttcacgccattctcctgcctcagcctccggagtagctgggactacaggtgcccaccaccacgcccggctaattttttgtattttttttttagtagagacgggctttcactgtgttaccgggatggtctcgatctcctgacctcgtgatccacccacctcggcctctcaaagtgctgggattacaggtgtgagccaccgtgcccggccccgtccaacaacttctaaatttgcctacaaccctcagtgatcctgctcttgctgtgcagatttctgcacacagatgagagcaccttcataagccagctttgctgtttactgtgatgaaacagaagatggcattcgtcttcagggatgtcamtctggaagcttttaggaacactagcctgcacttaaagatcaaagacgactgagatgactcttctgaaatagaacctttcctcaggactcaggagaccaaaggccattcttgacccctgcccctccttcatctcttgcatccaatacatatgcatgccctgttcttctattc

SEQ ID NO: 457953 - DNA, 587 bp, Homo sapiens
ccaaggtttggacagtagaagaatataaatggatttataacacatttcaacaaatttatacaatttataaaatcttatgacaaaattataaatggccattgagagcacctaggtgatgtccaccctttgaatgagatttcagaaaagataatgaaacatggacattcacatttgcgtggttcatataacccatgaaccataggctggagttagtgtgccacttctactgcatactactgaggtaatcacacacagcatggtcctatttcttgtgattatttgtgactctcctgggcmtgagtacaataatatgtcagaaaagagaatgctgtggatcagtggcttgggtgaactatttagttttgccctctctggaccacagactgcatgcccagccccaattacctgaatctgtatgcccagttcttgtgttaaaggaggactaggggaagacaagagctgaaactgggttcacatcttatcattatttttacaaagccaactcacatgtacctgccacagtggcagcacagtctaggtgtatgtaaagatattgttgttatgggtactatccataaggatactta

SEQ ID NO: 457954 - DNA, 493 bp, Homo sapiens
cagtccaagaatcattcgcaaattccacagggaagatattgtaattatgcagagaccagatgatctgaattggagaaactagactaagagggtctgaggactattgactgatggccagatcccaaaacttggcctatgtctctccaccttgaaaattggacatagcttctctggctcactttgcttatctgtccctttggcatgccagaaggatgaattggtgcagtcttgtcgggtgcttagatgttaccagagkcatagatgtttccaaagagggcaaaggcctattgagaactcaaggagggattactataggcgttattggtaactttccagtaactatccaagaggtactcgttaatattcaatctaccatcctggttctccagcttttttacttattaaccttggaattggacctttaaagactcaccacaaagcgaaagaaccataacaatttgactaactttaatcctctgaaatccaattttgt

SEQ ID NO: 457955 - DNA, 587 bp, Homo sapiens
ccaaggtttggacagtagaagaatataaatggatttataacacatttcaacaaatttatacaatttataaaatcttatgacaaaattataaatggccattgagagcacctaggtgatgtccaccctttgaatgagatttcagaaaagataatgaaacatggacattcacatttgcgtggttcatataacccatgaaccataggctggagttagtgtgccacttctactgcatactactgaggtaatcacacacagcatggtcctatttcttgtgattatttgtgactctcctgggcctgagtacaataatatgtcagaaaagagaatgctgtggatcagtggcttgggtgaactatttagttttgccctctctggaccacagactgcatgcccagccccaattacctgaatctgtatgcccagttcttgtgttaaaggaggactaggggaagacaagagctgaaactgggttcacatcttatcattatttttacaaagccaactcacatgyacctgccacagtggcagcacagtctaggtgtatgtaaagatattgttgttatgggtactatccataaggatactta

SEQ ID NO: 457956 - DNA, 536 bp, Homo sapiens
tttttgaatttggaaatatttgcatatacatagtgagatatcgtgagaatgggactcaagtctaaacacaaaattcatttatgtttctaatataccttatatgcacggcctaaaggtaattttatacaatattttaaattattttgcaagaaacaaagttttaactgtgctttgactgaaacccattacatgaggtcaggtgtaaattttccacttgtggtgtcatgttggccctcaaaatgtttcagattttggagcattttggatttgggattttcagattaggcatgctccacctgtatttagtaaactgaactgtggtcaaagtaattttttarctgctgtgctgttttatttattgccatcagcgataaaggctagcttccccataagtactttataaatcatatcaccagtttaaggcttataaaaactattttaattctatgtgatttaatgctttcaataatccatcaggatttttctttagatctttaaaaggactgtaaggagttcagagatgatagagattaaat

SEQ ID NO: 457957 - DNA, 476 bp, Homo sapiens
atgcctttcatctctggtagacaggttgcagcaccaataggctaaaatattcatgggcaacagcctgcaaattccaacaagccacattaactgcttagatatactgacgataccaaggttaccaccaaacgccatcaactcatagtaccatatgatctgcttactatgcaaatgtgtacataygtgtgaagtctgattattataaataactcatttcccagctgcgtacacactctacagaaaaaatgacacattgcctgactatcactaaaagatgccaagtgaatgtgatttataaaatcagtcttccaaacctgtttctcctgattttaggttctgtggggaacataaaaggaagtcccaagtgaaatgagagttgtctgacattcaataaacaggtttattggtggacactacaatgctagaaaccaaggctggccttccttggagctagtctgagtggtgacttggtaaac

SEQ ID NO: 457958 - DNA, 659 bp, Homo sapiens
ttgtggctactctgtccccaggctcaccctctggcccacctcagcctggatgtctagtttcttagtacttacctaatttgaactacttatctctttagccccgagttttgtatacaactttgttttcacttttcttcgtgctagcttgtaccccctctgcaggattacatattcctagaagccccaccatcattgcaatgagggacacattcaggctttgaggtatctgaaatgcatgcaattgaaaagggactctttttaagaagatgagtacacaaatataaatgtaaagtaataagyaaaactttggaggggacccatgaaagtgaggtgacctagagcttgagtttcatccatttcttaataaatctgcctctgatgtggacaccgtcattctagtggattgccattaaaggcttttggcccgtcttctgagaaacccatctatttctacagcacttaggactttttccttgagaatttgagattttaataaaacttgaaagtgtttatgcccataagaggtatgcaatcaatatctgcaaatataaataataaaaatgataagatgtgatcacagggaccccaaactctcaatgcataaaatgtgggaaaaagaagctcatgaatcccacctgttatcttggaaactgctactg

SEQ ID NO: 457959 - DNA, 416 bp, Homo sapiens
tctctctttgccagttctgcagctgatcccatgcatgtctgtcttttcctctccaaaaaccatatgggactgaactggtcttcaggttstgtgtaaatggcagacagtatccagtgtggctcagtcttgtaaatatgaagtggtcactcccacctgtggctgtcaccttttagttgactgttctctaagcctccttcccagcattttcagaagagagatgaggctctccttttagatttcatcatcagagtgggtcagatccactgaaacctcatgtttgaaagagaaatgggtaaaatttctctaagcaagcctcatgggagattctccaagaacacctttaacaacagaatttcccctagaaatgccacatcgaaagtcatattcccagtggagatttctatgggaattgggaa

SEQ ID NO: 457960 - DNA, 258 bp, Homo sapiens
atgactcattgtatgtacctgataaacccagtcttcattaatatctacaattaggcttatccctgtggatgagtgaattagctaaataagcagaacaaatgaatccagttttcttgtaagtatacagaarcattctgaacagtttaagatagtctaccaagaagctggcatggttgtacagtaaaacgtttgcagagtcagaaggttcactgacagtgccacctcctcggccaacttcaatgacatgccccatttaga

SEQ ID NO: 457961 - DNA, 580 bp, Homo sapiens
tggattaagcggtctctgactttgtagcacrcaagtagccatagacaacatgtaaatgaatgaagatggctgtatttcaataaaactatgtttattgacataaaaatttgatttctcagaattttcacatatcacaaaatattattctcatttttatttttttaaaccatttaaaaaacataaaaatatttattctctcatgggccctaaaaaccagactctaagccagactttggtgacctctaacctaatagagtgaaggctgagtaacagagcagaagggagggaactggcaaaaagaaaacttggatttctgtctggcagattatgcctaatttgggatgaacatacttctgggagttcataaacatctttcatgtttgtttacacagtggcgtatgtgaacaagtgcaatttactgaggctaggactaacagatttcaccagatcctcaaaggtggacttgacttgaggaactttgagaaatactgacttagaagaactcaagcgttagatcttaagattctattcttgtattctattaactacatgtaatgaacagataaaaatattagctgga

SEQ ID NO: 457962 - DNA, 545 bp, Homo sapiens
acactgtttagttcagctgtcatttttttttaataggaagactatttactgaaggaaacagagtgttgatttacattctgacatacacacctgagtctgtcatggactagtactttgagtagccttgctataaatgacccatattagaacttctattgaaagcaagtttattttattctttaaaccaacataacatatggacatactaaaaaaaatgaatagcatataaagaacrcatagactgaaaagaaaaatgtttcttttctcagaacactcatacactgttggtgggaatgtaaattagttctgccactgtggaaagtagtttggagatttctcaaagaactaagaatagaactaccatttgacccagcaatttcattactggatatatatccaaggaaaataagtcattctactaaaaagacacatgcacctgtgtgttcactgtagcactattcacaatagcaaacgcatggaatcaacctaggtgcccattgatggtggactagaaaaagaaaatgtggtacatatatatatgatgg

SEQ ID NO: 457963 - DNA, 511 bp, Homo sapiens
tgccagagatgatgatgctccacagcaccagagttcaagcaaaacagaatggttgatatttttatgtcacattcctgaagtgagaaactgattggtccagttggtctatggtaaaacacagtatcatgaacatggacatagagtctgtcaccctgcccactgtggcttcaggagtaagagaaaragcgtgagtggtggattacaaatatacttgaaaggccatctattgcagggatttcttgcaatagttgtacataatattgactcatcacctagaattgttctgcctcttatatatattttttaattttttaaattatttaaattttttgtgggtacatagtaagtgtatgtatttatggggtatatgagatgttttgatacaggcatgcaatgtgaaataagcacatcatgaagaatggggtatctattccctcaagcatttatcctttgagttataaacaatccaattacattctttagattattttaaaatatgtaattacattat

SEQ ID NO: 457964 - DNA, 511 bp, Homo sapiens
tgccagagatgatgatgctccacagcaccagagttcaagcaaaacagaatggttgatatttttatgtcacattcctgaagtgagaaactgattggtccagttggtctatggtaaaacacagtatcatgaacatggacatagagtctgtcaccctgcccactgtggcttcaggagtaagagaaagagcgtgagtggtggattacaaatatacttgaaaggccatctattgcagggatttcttgcaatagttgtacataatattgactcatcacctagaattgttctgcctcttatatatattttttaattttttaaattatttaaattttttgtgrgtacatagtaagtgtatgtatttatggggtatatgagatgttttgatacaggcatgcaatgtgaaataagcacatcatgaagaatggggtatctattccctcaagcatttatcctttgagttataaacaatccaattacattctttagattattttaaaatatgtaattacattat

SEQ ID NO: 457965 - DNA, 563 bp, Homo sapiens
  misc_feature (1)...(563): n = A,T,C or G
nnnnnnnnnnnnnnnnnnnaatgctagctattgtaaaggagaacaattttgtatacatatgcttccaaagtgagttcaaatgtacatttcttttttttcaaatcagaagatgatgctatactttagtaacatatgctgcacaacatcaccctcaagatgaagccatttagctataccacaaatatgagccatgctgaggtgagaatraaattcacttttaaatgaacatacttatgccaacagaggtaaactaaattagaagtatgcgatgagaaatttggtctcagaatttggctatgagggatgacctactttgtggggggtgggggggctcatttttgatttccagaatctgtgtgtttccctcattgcatgagtcttccatacccacacatcttgtgggccatatggtgctcttttggaatgactttcatttgattttctccttttcagagattttttttttttaaattttcactctgtcagaaagcacagaggtccttgaggaagggtcttttgtcaaaatgctcttcttagtagtagtgacctttgatgattccact

SEQ ID NO: 457966 - DNA, 592 bp, Homo sapiens
actccctgatatggtctgactctgtgtccccacccaaatctcatcttgaattgtagtaatccccacgagtcatgggagggaccmagtgggaggtaattgaatcatgtgggtgagtctttcccatgctgttctcgtgatagtgaataagtctcatgagatctgatggtttgataaatgggagttcctctgcacatgctttctcatctgccaccacataagatgtgcctttgctcttccttcgctttctgccatgattgtggggcctccccaaccatgtggaactgtgagttcattaaatttctttcctttataaattatccagtctcaggtatgtctttattagcagcacaagaacagactaatacacaccctctgtaaaaaatattttcccctgatttcactcagcaaatctctttgctcctttcgtactctgaatttccaatgacccctccttctggtatgagggaccgtaagaagggaattgtgagctgtggggccaggccaagctcagattctcaggtaaggtaccattccttaggtacattttctcaggtaagtctgaggaaagggcaacatcaggacatttggtcaa

SEQ ID NO: 457967 - DNA, 592 bp, Homo sapiens
actccctgatatggtctgactctgtgtccccacccaaatctcatcttgaattgtagtaatccccacgagtcatgggagggaccaagtgggaggtaattgaatcatgtgggtgagtctttcccatgctgttctcgtgatagtgaataagtctcatgagatctgatggtttgataaatgggagttcctctgcacatgctttctcatctgccaccacataagatgtgcctttgctcttccttcgctttctgccatgattgtggggcctccccaaccatgtggaactgtgagttcattaaatttctttcctttataaattatccagtctcaggtatgtctttattagcagcacaagaacagactaatacacaccctctgtaaaaaatattttcccctgatttcactcagcaaatctctttgctcctttcgtactctgaatttccaatgacccctccttctggtatgagggaccgtaagaagggaattgtgagctgtggggccaggccragctcagattctcaggtaaggtaccattccttaggtacattttctcaggtaagtctgaggaaagggcaacatcaggacatttggtcaa

SEQ ID NO: 457968 - DNA, 594 bp, Homo sapiens
tattgcaaatgcaagatcataaaattttgatcgttcacatttgaggttggctgaagatggttatttattagactcaagtgctacacacacttggagtgtttattctggatttgtttctgtgcattgaaaatgtctggtgcrgctgaagaataagcaaggagagccaagtgggaaaatatcatgaaaaatcttgaatccaggcacaagtcattgaaaaaaaataaaacttggacaaaggaatgtgaccatgggtgagataaaataggaagaatgcaggcaaggccgtctcaacaacagcagatctggacacctggaaacaagctacttctggtgtgttcatgcattgacttagggaccagggctttggaaaatcaggctgcaaattcacccataatttcaaatgaggcagcagttccttttaacaatccagcaattcctcttctggaattaccgatttgaaagaactgaaaacagggtctcagagagattgcggcacccccatgtgcatgttcagccttcttcacaatagctgagaggtagaagcaacccatgtgtccatcaacagatgaatggatgaagaaaatgtggcataat

SEQ ID NO: 457969 - DNA, 560 bp, Homo sapiens
tctttgttacatattacatgatttcaagtctgctctaccatcatagcttttttttttttttttttttttgccaacatagtttagtttatgctctctctactgtcgttggaaggttagaaaatattccaacgatatgcattactctagcttgcacaggcaatagtaagtggaaggtagcaaaaccatctgtttcagcaacctgatgccctggaaataaatattctatcttgaagggatgacattaactctactaggtcttgcacaatagtgtataattatttcccctaatgtgcctgttttaraaaggagtgtgttaaacttgccattctttattagtctgaaagatgaggtaaagcagggctggaaacatttctaattgtagaattttgtccaagaaaatgaaagattaaagagatccataataatcaaacctgattcattctggacaagtgaaagggaatgtgcagtgaacaaatcatttaaactagttgtacacactaatgagcattaaattcgttctatcctcccaggactaagaactaggagttactacaggctgc

SEQ ID NO: 457970 - DNA, 492 bp, Homo sapiens
aattatttcccctaatgtgcctgttttagaaaggagtgtgttaaacttgccattctttattagtctgaaagatgaggtaaagcagggctggaaacatttctaattgtagaattttgtccaagaaaatgaaagattaaagagatccataataatcaaacytgattcattctggacaagtgaaagggaatgtgcagtgaacaaatcatttaaactagttgtacacactaatgagcattaaattcgttctatcctcccaggactaagaactaggagttactacaggctgctcaataaaggcattaatttaatgtgtaacagaagggaaaatgaaggaaagaaacaagacatgtaattcccatagaagaaaagtaaattggtaatgattttattcattcaacaacatttattgaattcctcctatgtatcaggtgtaattcaacctgctagagataacaagtatgaaaaggttgtataccctgctcactagcagga

SEQ ID NO: 457971 - DNA, 641 bp, Homo sapiens
ggggattttatattctcattagggaagcaaatgtacactaacagatatatgcaaattatttaaggaagtcaatgaaatcgttctgggggaagggttgtagggggtgcaggacttggatgaaaataaaaatgcccagctttgatgattcaaattggaacattggttccatagaaatttgtatcctccacgacacctaagcataatgttttgaacaaggtccattctcaacaaatattaaattaattcgtctagtccaaccttaccttttgtacaatggaactgagtcctagagaagttcaattgctcaattagttacttttaccktccatatcctttagttgatattcattagtgacttctttctcccatactgcctcaactcgtctctcatcctgttgatttatcatttgctagaagtggacctcacctggctaaaataaagacatgaatgttattccctctctcaccttccaagggaatcccctctaccttttgtctttggaggaagggatcattcgagacaaggaaaggtcaaagtgtgagaagttaaaggagtgttgagccaaaggatgattcacaccgtatgctgttgatttcacaaatcacatcttgaaaattttctcaggaaattaaactgacca

SEQ ID NO: 457972 - DNA, 529 bp, Homo sapiens
tgcacataacaaaattacacttgtaccccataagtttatacaaatttttctttaaaaatgggcataataacatttacttcaaattctagaacccaaaatgcttattttcattaaagttgacagtgaaaactgatcattgaaaagcttcattttaaaatatacttcaataaacatctagagaagcatcattttagttcttttactcaacaggaaaaaaatgggagaaaamagctataaagtaatttagaatcataataataatggcgatgcagtcaatgatttctgttgcctctccaggggtttaactactggtttttgaggtgagaactctgcaaatctctgaactatgtagaaaagtatcaaaagcacttcagtctggcaatttggctaggcaaataagtatacttgtagtcctcattctaacattcgattctctaaagcactctgatatcaaaccaaagaacatctcactatcctccacaattacatcaatggctaaccatcaagagagaagatctcccacatgtag

SEQ ID NO: 457973 - DNA, 529 bp, Homo sapiens
tgcacataacaaaattacacttgtaccccataagtttatacaaatttttctttaaaaatgggcataataacatttacttcaaattctagaacccaaaatgcttattttcattaaagttgacagtgaaaactgatcattgaaaagcttcattttaaaatatacttcaataaacatctagagaagcatcattttagttcttttactcaacaggaaaaaaatgggagaaaacrgctataaagtaatttagaatcataataataatggcgatgcagtcaatgatttctgttgcctctccaggggtttaactactggtttttgaggtgagaactctgcaaatctctgaactatgtagaaaagtatcaaaagcacttcagtctggcaatttggctaggcaaataagtatacttgtagtcctcattctaacattcgattctctaaagcactctgatatcaaaccaaagaacatctcactatcctccacaattacatcaatggctaaccatcaagagagaagatctcccacatgtag

SEQ ID NO: 457974 - DNA, 529 bp, Homo sapiens
tgcacataacaaaattacacttgtaccccataagtttatacaaatttttctttaaaaatgggcataataacatttacttcaaattctagaacccaaaatgcttattttcattaaagttgacagtgaaaactgatcattgaaaagcttcattttaaaatatacttcaataaacatctagagaagcatcattttagttcttttactcaacaggaaaaaaatgggagaaaacagctataaagtaatttagaatcataataataatggcgatgcagtcaatgatttctgttgcctctccaggggtttaactactggyttttgaggtgagaactctgcaaatctctgaactatgtagaaaagtatcaaaagcacttcagtctggcaatttggctaggcaaataagtatacttgtagtcctcattctaacattcgattctctaaagcactctgatatcaaaccaaagaacatctcactatcctccacaattacatcaatggctaaccatcaagagagaagatctcccacatgtag

SEQ ID NO: 457975 - DNA, 500 bp, Homo sapiens
gacagtgagcaagagtttctcacaggttgagggggatacatttaggaacactcacactgtcacattttgcctactctgaacrgttttcaagcttggggtaaaaatgaaggccagaactagattctgggttatgggtttgaagaaaaagaggccttaaggattatattcagggcacaattgttggagggagttaagtgtacagggagacctggtggaaagcttcataattgcgatttgatttcaatgcatgtgatctcaaatgactgacccttcctcctcaagttctattttgtaagagcttatgtagcaaagtatttcaaggaagtgatgattgagcttgcaaacaaaatattatattttcataggggctgcaaaaaacataatttttgtcttttacatgcagtaagtatttgcagtgataagccaggatttctaaggaaaagacacctcagcttcaatgacaaaatttttctttataaattaggggctatcttctctta

SEQ ID NO: 457976 - DNA, 500 bp, Homo sapiens
gacagtgagcaagagtttctcacaggttgagggggatacatttaggaacactcacactgtcacattttgcctactctgaacagttttcaagcttggggtaaaaatgaaggccagaactagattctgggttatgggtttgaagaaaaagaggccttaaggattatattcagggcacaattgttggagggagttaagtgtacagggagacctggtggaaagcttcataattgcgatttgatttcaatgcatgtgatctcaaatgactgacccttcctcctcaagttctattttgtaagagcttatgtagcaaagtatttcaaggaagtgatkattgagcttgcaaacaaaatattatattttcataggggctgcaaaaaacataatttttgtcttttacatgcagtaagtatttgcagtgataagccaggatttctaaggaaaagacacctcagcttcaatgacaaaatttttctttataaattaggggctatcttctctta

SEQ ID NO: 457977 - DNA, 618 bp, Homo sapiens
tgaggtattattaactgtattttccaataccacaaaccaattttaggcctgaaacttttgaattattgtagaacacaaaacaaaacaaagcaaaacaaatgcacccccagtggcagatactcctgctcgcagtgggactgacaatctgatgatcctttcgggctcttcattacctaacaaaagaggattgtttttctttgttggacggtcrgtattttattcttgaattaccactttcatacactagctgcaatcagagtaatgtttttacctatctcagcaggctttaaatactttctgcttcatctttgtgtctccagctcaccatgaatctgttcccgtaactgccgatttcttttagcattggtacagtgacattaattttctgactgcttgtttctatttctattttacataatctttaaaaaaagtggttttattttggattgaaggagactagtttcatcttgaattggttttgaacgtttaggaagttggatatttgcgatgctgattgatcatgctatttttcccattgatctgggcctcatcatttcattagacagaattactcttttattttaggaaacagtttcattatctagactagctgttgct

SEQ ID NO: 457978 - DNA, 618 bp, Homo sapiens
tgaggtattattaactgtattttccaataccacaaaccaattttaggcctgaaacttttgaattattgtagaacacaaaacaaaacaaagcaaaacaaatgcacccccagtggcagatactcctgctcgcagtgggactgacaatctgatgatcctttcgggctcttcattacctaacaaaagaggattgtttttctttgttggacggtcagtattttattcttgaattaccactttcatacactagctgcaatcagagtaatgtttytacctatctcagcaggctttaaatactttctgcttcatctttgtgtctccagctcaccatgaatctgttcccgtaactgccgatttcttttagcattggtacagtgacattaattttctgactgcttgtttctatttctattttacataatctttaaaaaaagtggttttattttggattgaaggagactagtttcatcttgaattggttttgaacgtttaggaagttggatatttgcgatgctgattgatcatgctatttttcccattgatctgggcctcatcatttcattagacagaattactcttttattttaggaaacagtttcattatctagactagctgttgct

SEQ ID NO: 457979 - DNA, 618 bp, Homo sapiens
tgaggtattattaactgtattttccaataccacaaaccaattttaggcctgaaacttttgaattattgtagaacacaaaacaaaacaaagcaaaacaaatgcacccccagtggcagatactcctgctcgcagtgggactgacaatctgatgatcctttcgggctcttcattacctaacaaaagaggattgtttttctttgttggacggtcagtattttattcttgaattaccactttcatacactagctgcaatcagagtaatgtttttacctatctcagcaggctttaaatactttctgcttcatctttgtgtctccagctcaccatgaatctgttcccrtaactgccgatttcttttagcattggtacagtgacattaattttctgactgcttgtttctatttctattttacataatctttaaaaaaagtggttttattttggattgaaggagactagtttcatcttgaattggttttgaacgtttaggaagttggatatttgcgatgctgattgatcatgctatttttcccattgatctgggcctcatcatttcattagacagaattactcttttattttaggaaacagtttcattatctagactagctgttgct

SEQ ID NO: 457980 - DNA, 493 bp, Homo sapiens
aacacatattaataccttccattcacctggatttaccaaaaagttaatattcttttctgtctctttatacacacatggaatgttttctctgaactctgaaattaagttccagacattgtgaaaatacagtccaaaatattgcagaatgcatctcctaagaacaacattctcctgtataaccaaagtaccaccctcacttctaagaaagttaatggtgattttatcaaaattactgtccatattcagttgtcacaatgattttttttatagatctatcccttttgattccagaacacagggtcatacattgccattatttattccatctctctctcttttatttatttttttagagacaaggtctcactctgtcacccaggctggagtacagtggtgtgatcayggctcactgcagcaaaaaactcctgggctcaggcagtcctccggaatagctagaactgcaggtgtgcaccaccacagctggctaattttt

SEQ ID NO: 457981 - DNA, 365 bp, Homo sapiens
tgctcactgatgagctagggacagagaactttcttctcctttttctgtgccctccttataaaagcactctgtaaatgaccctgtaatgagatgacctcacagagagggaagacacatgtaaacattcttatgttaatggcaccttaattttcaacaattttaatcaaactaagattattctatcctgctgtttcttaaataataataacaatctcatagtataattaaaatatcttttctggtagattagtttttcasaataaacataatctgatgaatacatacctatggaaactgactaaacattgtttggccttgttcatcttgtgaataatcctagctaagtttcagacaacagcttttga

SEQ ID NO: 457982 - DNA, 586 bp, Homo sapiens
ggttttccttcctggaatttaatggatgttatctcttcatttatttatttaccaatatttcctgagcactttcagcatgccaacccaacacatgttgaagtgagcgcagaaagtgggaggggaagaaacgtcagggacaccatggcgttgactaatctgacctgccctggtgtaacttacatacagaaacagaaatttacactccatctctttttttctttagtcaagccccracaatctgccaggtcatgttagataagtgttgatgatccttctctcatcatctaaaattcaggttaatgtcggcagcagaaggcatctgctatagagaatatcttctgtggtgtctgatgtgtattttgaccagctccatttgggcatatagtacatgcagatccatagagccatgcggaagacttttaattcaggcatttttcataacctacggcttgtatcatttcaggaagaagttagctctttcttgtgatctcctcccttttagtgctataatctgaggaaactgtaaatccactgacctctcccaccagtgcctgggctgtgcaggctgattcttggcccgagtcct

SEQ ID NO: 457983 - DNA, 586 bp, Homo sapiens
ggttttccttcctggaatttaatggatgttatctcttcatttatttatttaccaatatttcctgagcactttcagcatgccaacccaacacatgttgaagtgagcgcagaaagtgggaggggaagaaacgtcagggacaccatggcgttgactaatctgacctgccctggtgtaacttacatacagaaacagaaatttacactccatctctttttttctttagtcaagccccgmcaatctgccaggtcatgttagataagtgttgatgatccttctctcatcatctaaaattcaggttaatgtcggcagcagaaggcatctgctatagagaatatcttctgtggtgtctgatgtgtattttgaccagctccatttgggcatatagtacatgcagatccatagagccatgcggaagacttttaattcaggcatttttcataacctacggcttgtatcatttcaggaagaagttagctctttcttgtgatctcctcccttttagtgctataatctgaggaaactgtaaatccactgacctctcccaccagtgcctgggctgtgcaggctgattcttggcccgagtcct

SEQ ID NO: 457984 - DNA, 586 bp, Homo sapiens
ggttttccttcctggaatttaatggatgttatctcttcatttatttatttaccaatatttcctgagcactttcagcatgccaacccaacacatgttgaagtgagcgcagaaagtgggaggggaagaaacgtcagggacaccatggcgttgactaatctgacctgccctggtgtaacttacatacagaaacagaaatttacactccatctctttttttctttagtcaagccccgacaatctgccaggtcatgttagataagtgttgatgatccttctctcatcatctaaaattcaggttaatgtcggcagcagaaggcatctgctatagagaatatcttctgtggtgtctgatgtgtattttgaccagctccatttgggcatatagtayatgcagatccatagagccatgcggaagacttttaattcaggcatttttcataacctacggcttgtatcatttcaggaagaagttagctctttcttgtgatctcctcccttttagtgctataatctgaggaaactgtaaatccactgacctctcccaccagtgcctgggctgtgcaggctgattcttggcccgagtcct

SEQ ID NO: 457985 - DNA, 486 bp, Homo sapiens
gagggctcagtgtacaaaaaggacaggtayggtgtgatgaggaaagtaatctaaaagaaatcaaaagcaaagctacttgaatcctgcagttaggagttctcatttcatttgaaaaacattttggagccgctgcggtgattgagaaagtgagctagatgatagtaatgactttcaaacaagttgattcaagttgctagtctgatgtcaaaaagaatattatttcttacactgatggtgcgaatccattgttcctatgatatgtcttacaaaatggcatgtgtgtaacaaactgactggttgaaatgaaattgtcttgcagtgatcattttgtattatcttagtatgcaattatgtatttgtgaccttaagactgagacattcagcgacattttttatcatctcttggccttcttctaaatgaggaaagttgtagatttgggatatataatcatctttgctacatcccactttttttttttttttaag

SEQ ID NO: 457986 - DNA, 510 bp, Homo sapiens
aaatgctttttctgatgatggttaattggggctttttttccttgcagctaaaaacattccaaactattaatggtacaaacttctcactagaaagtaacttcaggaatttataggttaaacacatccttttaaaggaagttctgttttttgtttgtcttagttagaatctttggaggactgtgatctatcactttactgttcactatgccctttcttcccttttaatgaaaaataaggtgttggagaataaagtggaaagggctgcatttttctgctgtgttgactgagcagctttttggatctctgtaactccaatttaacatctttcaacatctttctccactttttccactttggaaagctctgttctaaataatcagtgaaaacataccactgtcagacatgaggatgttttggactttgattgtctgtaaggtgtttatgttagtyacccatgaagagcttactaattagatagaaaagacaacatgcttggaaaactatgttcta

SEQ ID NO: 457987 - DNA, 577 bp, Homo sapiens
ctgcatcccctttatttttagatataatgtcaatacactaataagtcttttttgtcctttgaggtatccatcttagtgccttaatttgagacagtaattaggggaccactgttaatgtttgataccaaaagtctgctgctctctgttgagtttaaacaggttaaacttgtattttgctaggaaatatcaagtgattcttgttcttggaggggccaagactatttaatgatcaygtgtccatcacttgaatgtgcacagcttcattgttttgtgcatttatttgatcctctcttcctcttccatccctctgtgtcctcttcttttcatatacatgccacctgtgtgacttggctttgaaaatatcccttgaaagcatcttatctatgggagtttcaggggttgacttaaggaagctgaagcggcttttactgttcagaagttctgcagagtcctggaaagagatgtagccttcagtaaaaatttgtgagaacttgaaatgtgataggacttggagagtaaattatgtattgcttttctatttatttgtctttctttccgtctgttaattcgtccattc

SEQ ID NO: 457988 - DNA, 562 bp, Homo sapiens
atggaacatatcttcttcatccctgactcgccctttggctagtcagcttgtattaggggctcagtttaaatgttattttctcaagaaagttctcttagccttcctacacttccccctgactgggttccatgttcccacagtatcctgacaaactgtgttaatgatacctaacatgtagtgccagagggcaagtgggggatggagaggatatgttmcatcttggtaaaggtatggaccaaccatagtgggctgtttccagtggtacactggatccactttctgtgactcatgaacaattttttgcaattgcttgtctgttgcatggactagagttcaaggacctaacaatagggacagtgtcatggccagtatggtgactggaatgtagtaagtgagaaggagaagtgacaatagagatggaggcaatggtttcagacctagatttctgaagcctgaatcagttctttgaactgaggtacttgagattggtgtgaaccctggcagctccagagagttatacatataaaagataagcttgttcttggtgcctcagaaatgcccg

SEQ ID NO: 457989 - DNA, 562 bp, Homo sapiens
atggaacatatcttcttcatccctgactcgccctttggctagtcagcttgtattaggggctcagtttaaatgttattttctcaagaaagttctcttagccttcctacacttccccctgactgggttccatgttcccacagtatcctgacaaactgtgttaatgatacctaacatgtagtgccagagggcaagtgggggatggagaggatatgttccatcttggtaaaggtatggaccaaccatagtgggctgtttccagtggtacactggatccactttctgtgactcatgaacaattttttgcaattgcttgtctgttgcatggactagagttcaaggacctaacaatagggacagtgtcatggccagtatggtgaytggaatgtagtaagtgagaaggagaagtgacaatagagatggaggcaatggtttcagacctagatttctgaagcctgaatcagttctttgaactgaggtacttgagattggtgtgaaccctggcagctccagagagttatacatataaaagataagcttgttcttggtgcctcagaaatgcccg

SEQ ID NO: 457990 - DNA, 594 bp, Homo sapiens
atttataacactcaacaaaaggcagtctcatytggggaataaattaattaacaaatttatttcggaggcattggaggcacctgtaagggatgaggtttggaaaggagcttctgcttaggatgtagttggaataaaagccgagttgtggcctacaacaccctgaatgatttgaccatgcctccgcttctaactttctgccttctgtgccattctctccctgttctctaagctccaacaatacccatcctacccatcctctttctctttctttgatacgctgaactctttcctgccttaccatctttgcatttgctgtgtcctctaccaggacacttgtccctaggctcttgggcagaccaactccttctcacatttcacgtttgcagagactggagtcttttttctgaccatctcatctaaagtggtgtactcagatccctcagcattcaccatcatatcacagtgtttaaaacacaaagagcctttaaaacacagggagctctctgaatggtcttgtttatttggtggtttatcttctgtgtctcgcctttaggacagggacctcatctgccttgcgcacagccataccctagc

SEQ ID NO: 457991 - DNA, 594 bp, Homo sapiens
atttataacactcaacaaaaggcagtctcatttggggaataaattaattaacaaatttatttcggaggcattggargcacctgtaagggatgaggtttggaaaggagcttctgcttaggatgtagttggaataaaagccgagttgtggcctacaacaccctgaatgatttgaccatgcctccgcttctaactttctgccttctgtgccattctctccctgttctctaagctccaacaatacccatcctacccatcctctttctctttctttgatacgctgaactctttcctgccttaccatctttgcatttgctgtgtcctctaccaggacacttgtccctaggctcttgggcagaccaactccttctcacatttcacgtttgcagagactggagtcttttttctgaccatctcatctaaagtggtgtactcagatccctcagcattcaccatcatatcacagtgtttaaaacacaaagagcctttaaaacacagggagctctctgaatggtcttgtttatttggtggtttatcttctgtgtctcgcctttaggacagggacctcatctgccttgcgcacagccataccctagc

SEQ ID NO: 457992 - DNA, 576 bp, Homo sapiens
ggtactcttgactcatcatcctagttagcacagtagaactttttgtgatgaatattgkgtggcctatttaatatgcattatttaaaggcagacagtaataaatggattcatttttgatgcactacctcggatttcatgaacgctctctgggtggtttttctgaaggaaaaaaaattcatatttgtcgatcagcagagtgaaaattagctgagttcggttatgcgtgtggggcatatctgccaaaagctatgaagtagctaggatagtaattgtgaaaaatgattttaagccccatggctttttctcagccaactggatggtgttcagtactccaagagtttgagacatcactgtctctgcggttggcacacatttttctaatgatttatactgtcatttgactcataaaatctggtggagtttgtggcattattgtcctggcagcttggaaatcgaccttttaagacaccccatttagctgttttaattgaaaatgcaacatggtagaaatctgcaaccatgtggcacattctgaggcaagcaggagacctcctgagaaaggacagatgccagtga

SEQ ID NO: 457993 - DNA, 576 bp, Homo sapiens
ggtactcttgactcatcatcctagttagcacagtagaactttttgtgatgaatattgtgtggcctatttaatatgcattatttaaaggcagacagtaataaatggattcatttttgatgcactacctcggatttcatgaacgctctctgggtggtttttctgaaggaaaaaaaattcatatttgtcgatcagcagagtgaaaattagctgagttcggttatgcgtgtggggcatatctgccaaaagctatgaastagctaggatagtaattgtgaaaaatgattttaagccccatggctttttctcagccaactggatggtgttcagtactccaagagtttgagacatcactgtctctgcggttggcacacatttttctaatgatttatactgtcatttgactcataaaatctggtggagtttgtggcattattgtcctggcagcttggaaatcgaccttttaagacaccccatttagctgttttaattgaaaatgcaacatggtagaaatctgcaaccatgtggcacattctgaggcaagcaggagacctcctgagaaaggacagatgccagtga

SEQ ID NO: 457994 - DNA, 630 bp, Homo sapiens
ctacaaatgatgcgaaccacagggttgttaaatatccagctcagatacttacagtggaatgcattgttgattaatgtaatgttgcagctggagtaaaaataataacgatttgcccacatcttcgtgggatttttgttagggttttaatagaagactgtgctaagctgtcttctaattattcagaaatagactggaggataaaattatatacttattttgtaggtacttcctagctgaatgatagttcaggtttggttaaaacrttcactttttttagctctttgtcaattttcagcttcctatattagagtcttttaaaccttaggtaatgttttaactcattgtctagaagttttctttcaaggtgccttaacagcaaatgaatatattctatgtaatctggtgatttcattactgaagccacagactacaaattgctatgatctctatgttttcaatagaatgatcattcaaattcagtaaaccaaacactgttcatatttaatcataaaattatatgtatatggctcttataataaagagcaatctggcctttctcattaatctgaaaatacttaaattagtaatacacataacctcatgaatgcgcatatatatatataaagaatg

SEQ ID NO: 457995 - DNA, 558 bp, Homo sapiens
gtgttggtgctagtaattgattgtggttatttcagagagcatatgaaatatacatttattttcttagctgctttgagtgaggaattgagaaacctagtctgcctgcccctctttccagccagtgtgagatgcccccacaaaatgggaaaactgtgcaggggctcaaagcatggaggatgtaggaaggagtgaccggaagttaatcacctgagtcctgctgaggcctctgtgaacagatgagatgaggtctgagaaaaaacagaattgaccagtatgaattgacatygagggactattaaagcagctaattatttgggaattgttgatttggcaaatgagataaggcagaagagaaggttgttttattttgtttttttaattttctcgaatccactattgttaagcattaagcatgttttcctaaagaagttgttaagcatttttaggaacacttggtgtcagtactagtcaggggaaatcagcactggatgaggcaagactgggtgcattctggtcccagcctagcctctaactggctctggtaacatcatttcctta

SEQ ID NO: 457996 - DNA, 581 bp, Homo sapiens
tgcccttaattccttcctttatctttggccttctatctgggattaatagctttctacttgcagaacaccagaattctctggtgatgaactgtgcctttctttttggtcyaaaatgtccttaattaaccttgaattcttgaaacatacttttccccctgggtttagaattcttggttcacagctattttgttgtattatcttcttattttcattatacatattgaaaagtcagctctcagtccaagtgcttgaagatagctttttagatgttttgtttatctttggttttcaggaattttactatgatgggtcatgttgtggatttatttatattatttataatatttatatttatttctattatttatttatttactatgatgggcctggttgtggatttatttatttatttatatttattctgcttagagttcaaagggcttttggaacatgatgtccttcatcagtgtgggaaatttctcaccacatttcttcaactattgcttctgcccaattgtctctctccttcctttctgggactccaactgtacttgtgatagactttatcataagatccttaa

SEQ ID NO: 457997 - DNA, 595 bp, Homo sapiens
aggctttctttttttatggctaaataatattccattgtgtatgtttatcatgagcagactcataaggaaaagaaacccccacagaaatgggagagttttcgaaaagtctcttctcaaaactattcttttgagatcagactagatcaggtgcattcagggtggcatggtggtagatgcaaatctattattcagccttcaacttgtgtggcttcaggcatgttacccaacctaagtattggttggataaaattagagaaaattagggaaatacaaacaatatcatccatctctggaagatacagggcagctcttcaactaatgtgttcccctaaagtctggtgtgctctgttggctccaacttgagagaagcccccaggaaagaatctgggaggggctttgaccatggacaatactgtggagaagagggagatgtacgtgcgaaagggtaagcttgagctggatgcttggtggtgtttacctgcttttcctcctgctgatgctggtatatgtcagtattagatgataaatcargtggttggatatccaagtctagagtggtctacactaggattctggtaggcagaaagctgcagga

SEQ ID NO: 457998 - DNA, 543 bp, Homo sapiens
atttgtagacagaaaagacttcatgcatttttggttgggtaagtatacatcttgggtttctctagtcctagtgaatcaggtcaattctggtataattattctggtagagtagagtgcgaatcactctaaaaattgtgctggttttgaagatctatgattacttttattaggtgatgcccacaaaagcatttcaaaatatggactaggcaccttycattctaggtcttatctataagagaataaaacacaaagcaggcagaaaaatctatggaaggcaccaatggaatgtctggtattcaagcgaagatacccagttaacaaatctccactggggaatgggggctaggtagagatttcttaggtgtttctgcttgctggcatagtttactctggttgcttttcaatactcaactggtgcacgccctatggtgtactggagaatgctcatcttgatggtcaggggctgggcaacatctgttgttaaatattttgaatgttacctgttactgaacctctctaacctgcgttagcatatcaatagat

SEQ ID NO: 457999 - DNA, 636 bp, Homo sapiens
ttcaccctttttcccaggtggccatccagtccggtttgagcacttaataccctatatcccaggaaactccttagtgccaagcaaacgagaacagctggtctacctatctttaacctggctatctattggttattcttcagatctcagcttaagtgtcctccagggccttgctactcaaaatatgattcctatactacygctccaatcctatttaactgactctctgtttaacacaatccactggtgattcagatgaatgataaagtttggataccttcagggaacctgtcctgacctctcagaccagatcacatacaactgtcttctccattagactacaaattcatgagggaagggacatctctgtctcattcttaataggctgtgaacactaagtatggtacctgacaaagtgtaaaggctgaataaatacttgcgtgggtgaatggacaaacctagattacatgaggttaaatcaggcagactgtggtggatgtggttgctactctagcccatagccccatgacccatctgagttcacctgaagttgcccctctcaggacagtctcagctaaacacttcaattcctggtaactcttcttttatgcctaaggcctttctaagagtttgaaaact

SEQ ID NO: 458000 - DNA, 619 bp, Homo sapiens
caaagatagtgcccactatgggaagtccaagccccaaagatatcccccactatggaagtccaagatggcaactgtgcagacaaatttggggggaacctgggctgggcatgggatatgctatatacttgctgagaaatccaacacaatgaatgtggctgctttacccctcccaaggaaaacctccaaatgaaaggcttctaggcagctgctggaggaccaaggagccacagagcagtatagaaagggagcagcttgctgacatgcatgtggcatacacatcaccctgcaagcacactgaaaccttgactgagaaagagagggaaggaaggaagagagcaagtgagcawgcaacccagtaaagggcaggtgaagaacgtactgtggaagaaaacataacccaagagaaagatccaaattccctgcaatgaccacagatgaactttgaaaaaatgttaacaagcttgaagatgcagtgataaaaataacataactgatctgaaatgtaagaactaaggagataaatgttccactcttagagaaataaatcagttaagaacagcaaagaccaaattactgacaaagaaaaaaggttgagattttcacagtgaaaatataatac

SEQ ID NO: 458001 - DNA, 595 bp, Homo sapiens
agaggtggttcagagaggcttcagggagaacaggtattctatgtggtctgaggagctgagaaccgagggatgggacagagccagccacattaacatgggggacagaagctagcagtgggaactgcaagaacaaagatcctgaaaaggagacaaagctggcatttgcagggaggagaaagatggtatggtggatacaggtcattggttggctgccctgtactgagcccatctcctagttttggagaatgttccattgacaagaggcagagcccacttttcactaagaaaggagatacagtctgatgcttgctctctcctcatcttagccgccagaattgagcatgtggcctagggcctccagccagctggatgttacccatgggattttgagctttgagcaagttattcaaagcagagagattaggacycccctagcctgtagttagtgaacacacgttgaatacaatcacactgaaaacttctgcctttaatagccagacaggaataagaatgccagacatctgtggttgggccagaagaggaaggtttcttcctcagatcagatcttcatcctctcagacatgagactggctct

SEQ ID NO: 458002 - DNA, 568 bp, Homo sapiens
agtttatgtgcaaggtgtataagaaaagtaaaatatacctttagtaaaaaaattataaagggacataaaaatgtggatttttacctacattaaaagttaaaaaaattattgttttaaaaatttaagcaagttttaaaacgttaattgtaaagaaaattctgtgtgtaaacatattagctaaagttaaaaagatatcacccagtttttctgtgaactggacattaaagtaaaaatgcaacaggtttttcttaaagcatcaacctgctctttaacaaaaattataaaaagttaaaaaaagtctataaaatcttaccttatggtcaaacataaaaaattagataaatatgtctacaaggttttattaaaattaagtttaacattaataacacactaatataaaagtaaaatttaacttatctactataaaaatcatacaagaaacattattaaatataaaatagtatttagctttctttagtctaaaaactaataaaaataggtgttaaaggaaacrttcattttactaaaggatcatagaagttaaagacttaaaacaaactttggcaat

SEQ ID NO: 458003 - DNA, 541 bp, Homo sapiens
cctcctgcacgagtgagaactgtaaccctttagaattagtcatcacaaacccctcagacccaaaataaaattaaaaaaacaatatgtatcattaggcattgatagaaaaagactagaccctagcataaacagcctaataagaaaggaggttcaaagacgctctccagaaccagtatttcagactttctaggatgaactaaatgtgccagtacctaagattccaggaaagactaaaaatttgttttttgcaattagctgggcatgtaacccagtctctaaatatcacttcatgttatgtttgtrgaaaaactgtaataagagatcaatggccataagaagcccgagaattagtgcctacagacccagttcctgatggattctcagcccaaaagaatcaccctgatcatttctaagttctaaaagtctcaattattgcatagctaaacaacaacaacaacaacaacaaaaacaggaaaagaattcactcattctgtaagatgacttagttgtctaaagcaaaaactgtataacgataccgcaa

SEQ ID NO: 458004 - DNA, 541 bp, Homo sapiens
cctcctgcacgagtgagaactgtaaccctttagaattagtcatcacaaacccctcagacccaaaataaaattaaaaaaacaatatgtatcattaggcattgatagaaaaagactagaccctagcataaacagcctaataagaaaggaggttcaaagacgctctccagaaccagtatttcagactttctaggatgaactaaatgtgccagtacctaagattccaggaaagactaaaaatttgttttttgcaattagctgggcatgtaacccagtctctaaatatcacttcatgttatgtttgtagaaaaactgtaataagagatcaatggccataagaagcccgagaattagtgcctacagacccagttcctgatggattctcagcccaaaagaatcaccctgatcatttctaagttctaaaagtctcaattattgcatagctaaamaacaacaacaacaacaacaaaaacaggaaaagaattcactcattctgtaagatgacttagttgtctaaagcaaaaactgtataacgataccgcaa

SEQ ID NO: 458005 - DNA, 493 bp, Homo sapiens
tcggactagttgaattctccccactgtcctctgccctaatccctcctggctgaggaaacaaaagaacacaaagaattccacagtttatgtatatatttttcatacagtgaactcaatcagccatacttatgggaggggaccattagaacagataatccaaaaatccattcgcttttctttagaaatagatcacatgattgtttcttggagccttggtaattaagtttggctcaagctaatgctttagctttaattaatttgcataaaaattggtctggggrcatcagtctagaatgaagcatttctaggggataaacctgaactcactttgtaaatggactgtttctgaacaatagcaacaacaatataattttattgcttgcagattattagatgctcaagttttcttaagaacaaagactgtttctttgatgcttgtgttgaagaaatcatgtaaattgtgtctttttgttaaacttgaaagttgattgct

SEQ ID NO: 458006 - DNA, 493 bp, Homo sapiens
tcggactagttgaattctccccactgtcctctgccctaatccctcctggctgaggaaacaaaagaacacaaagaattccacagtttatgtatatatttttcatacagtgaactcaatcagccatacttatgggaggggaccattagaacagataatccaaaaatccattcgcttttctttagaaatagatcacatgattgtttcttggagccttggtaattaagtttggctcaagctaatgctttagctttaattaatttgcataaaaattggtctggggacatcagtctagaatgaagcatttctaggggataaacctgaactcactttgtaaatggactgtttctgaacaatagcaacaacaatataattttattgcttgyagattattagatgctcaagttttcttaagaacaaagactgtttctttgatgcttgtgttgaagaaatcatgtaaattgtgtctttttgttaaacttgaaagttgattgct

SEQ ID NO: 458007 - DNA, 594 bp, Homo sapiens
gctcctctgcccagatgcaggggaacttcacctccagcctggtggaccccaasggaacctggaaggagagggaggtggtggtggtggaggaggaggggtgtatttgcaacaagcagagcatttggcacattaggcttgaagcctaatgtgttgaacacagaaccctgagttggaacatatgatttggaacaatggagggaaaatgggatgtaggccctggaacacaagaaaacaactttataaactgtagagtgtgtgtatatgacagagattaacctagcttccaagtggctgaggctacagacccatgaggctacaggctgaggcccgtggccctcagtcccctccctcttgctgcatccccaggccacaggcccatacttgctcctggaagatgctgatgagccaccggtgactcagctagagctgcaaccgtgttctcaaagctgtctgtttctataaaaatgaaaatgagtgtcaaggtagacagcatttgctaagtgtctactgggtaccaggctgtaaaatgttactgttttaggctgggtttgccccaaagctgacgctgaacaaggatgtgggtgcaagaagttt

SEQ ID NO: 458008 - DNA, 469 bp, Homo sapiens
ccaaatgcaatgtatggaccttgtttggattctgatttgaacaaatgaattgtttaaaaaaaaaatatatatatatataatatataatatatttattttatatatatatatatttggtcaatagttggggaaaactgaacatgaattgagttagcacataaattaaggaatgaagccaggagtgatggagtgctcctgwggtcccagcttctcaagaggctgaggcagaaggaccacttgagcccttttatttcgaggctgcagtgagctatgaccacagcactgtagtccatcctgggtgacagagagagaccttgtctctaaaaaaatttttttaaattaagcacttattataccatgataaaggtattgaggttatatacagttttatgtgtttctctgttagagacacattctgacatatttatgggtgaaataatatggcatctgagataggctttagatttct

SEQ ID NO: 458009 - DNA, 610 bp, Homo sapiens
  misc_feature (1)...(610): n = A,T,C or G
cctgttggcctcaacctcatgtctccaagttccttgaagccagggacaagcacagtgcttgtcacttatagggaactccataaatatgtgttaaatcaacgaataaatgcatgtaggttttggcctcaccaagctgttttccagcttgagaatgttatgraggaattctgcaaaatctttcttgagatcacatcaaaataattttgtaaatatggtactcctgtccatttactcaagatgaatgacatttgggaggcttaaaagagctttcgggttgcatttagttgattctttgtgaactgactatgggaaagatgatggggatcagtaaaggttttgagtgattattttaagaacttacaataaagggttacttccctgatctcaaaagcaccactacatcagtgctctccctgagtttcagtatcattccagccctgggtagatccactgatacaggggctagagaagncaggccagggctgtggctctcagaagggataggagttggatgtttgcagaggtggctttttatgtcctaaagccattagtttcatgacactttattatctcattctcagatttcattatttgttgactatattgtctt

SEQ ID NO: 458010 - DNA, 610 bp, Homo sapiens
  misc_feature (1)...(610): n = A,T,C or G
cctgttggcctcaacctcatgtctccaagttccttgaagccagggacaagcacagtgcttgtcacttatagggaactccataaatatgtgttaaatcaacgaataaatgcatgtaggttttggcctcaccaagctgttttccagcttgagaatgttatgaaggaattctgcaaaatctttcttgagatcacatcaaaataattttgtaaatatggtactcctgtccatttactcaagatgaatgacatttgggaggcttaaaagagctttcgggttgcatttagttgattctttgtgaactgactatgggaaagatgatggggatcagtaaaggttttgagtgattattttaagaacttacaataaagggttacttccctgatctcaraagcaccactacatcagtgctctccctgagtttcagtatcattccagccctgggtagatccactgatacaggggctagagaagncaggccagggctgtggctctcagaagggataggagttggatgtttgcagaggtggctttttatgtcctaaagccattagtttcatgacactttattatctcattctcagatttcattatttgttgactatattgtctt

SEQ ID NO: 458011 - DNA, 524 bp, Homo sapiens
cttgaatcacgtgaattgtaaaaggaaaattttttaaaagaaatagaattgaatagaataatagaatagagtggagtccatcatgtgcagtaaggatggtatcactccaagaacattccatgtcaattatgtatgtctgtgtgtactgggcaccatgtaacatgaatgtctttctgtaagccatggtcaaaaatgtttgcaaacccactgctgaccgggtgtggtggctcacctctgtattcccagcattttgggaggccaaggtgggaggatcacttaagtccaggaatgcaaggctgcagtgagctatgatttcaccattgcactccagtctgggtgacagagtaagactctgtctaaaaagtaataatagtaaagagaagccactgcttttgcagtttcaggacacstaagagagccattagcacaggtcaccaaaacgaaaacacagccctgaaaacagtataaaaactcagaacaagaaatgagcccaagaaaatggaagtcaacatagggtaatgcaa

SEQ ID NO: 458012 - DNA, 596 bp, Homo sapiens
cagaaaaaagaaagataaatactgcatgttctcggctgggcacagtggcttatgcctgtaatcccagcactttgaggggcagaggcgggccgatcaagaggtcaggagatcaygaccatcctggctaactcggtgaaacctcatctctactaaaaatacaaaaaattagccaagtgtggtggcacgtgcctgtaatcccagctacctgggaggctaaggcaggagaattgcttgaacccaggaggcagaggttgcagtgaactgagatcctgccactgtactccagcctgggtgtcagagcaagactctgtctcaaaaaaaaaaaaatatactgcatgttgtcatgtataagtgggagctaaataatgtctacacatggaaatagagtctggaatgacagacacttaggccaggaaaggtgggagggtgagaggaggtgggagataaaaaattacataatggctataatgtacattattcaggtgatggatacaccaaaagcccacacttcaccactacacaatatgtccatgtaacaaaactacacttataccccttaaatttacacactaaaacataaaataattcactaatgc

SEQ ID NO: 458013 - DNA, 542 bp, Homo sapiens
acaaaaaataaaataaaataaattagcccaagcatggtggtgcactgtagttccagctacttcaaaggctgaaatgggaggatcacttgagcctaggagrttgaggccgtaagtgagtcgtgattgtgccactgcactccagcctgggcaacagaccctgtctctaaagacaaaacaaaataaaacaaagtattcacttggcatttatcttgggatactccacattgttatttaatccattagcatatgtggtcttcctaattaaaattataaatctctctgctacaaagaggattttttatgctttctcagcagatcttataccctgccccactgatgataagtactcaataaatgttcattgataatagtaatgataatgctgacaacaatgagagatgaaccaagaaaatttccccttcatcctctgctggaaaaaactgctccaaatgcataccctgctgttcaaggcatttcttatgaaagcacaatggataaaaaataataataaacatttgtgcttgctttacagtttatacaca

SEQ ID NO: 458014 - DNA, 580 bp, Homo sapiens
ttgtaacaaggtacatcatttcacccaagttatctatagtcttatgtagaatcctcagtttgttctgtctacattagataactacttaagattataggaagcaagtgagaatcaaagaaatatacacacgtttttagtagaaaattccccttgcagtataccagccaaaaatgatggattatctagtaaatcaaaaattaattagatagtttcaaattactcagtaggtcttttccatgtcttcatataygttcacccctgaataaaaatgtcacccttttattcaaatgataatgatgtgttgaatgataatgatgtgttttgtgagttcaacacaaaagtgatccaccacttaggtgtaaaatcccaagacagattatgctctttaggcttaggttaagtttgaattaatcaaaatcttaggcatgttctgtgtaataatatatatatatatatatatatttaatgtaaatgactcaaggggaccttaatctatggattcttagtctttccaggtctcaagttctgtccatcattttttcttcatgttggtatattattgtatgaatttgattcaaag

SEQ ID NO: 458015 - DNA, 580 bp, Homo sapiens
ttgtaacaaggtacatcatttcacccaagttatctatagtcttatgtagaatcctcagtttgttctgtctacattagataactacttaagattataggaagcaagtgagaatcaaagaaatatacacacgtttttagtagaaaattccccttgcagtataccagccaaaaatgatggattatctagtaaatcaaaaattaattagatagtttcaaattactcagtaggtcttttccatgtcttcatatatgttcacccctgaataaaaatgtcacccttttattcaaatgataatgatgtgttgaatgataatgatgtgttttgtgagttcaacacaaaagtgatccaccactyaggtgtaaaatcccaagacagattatgctctttaggcttaggttaagtttgaattaatcaaaatcttaggcatgttctgtgtaataatatatatatatatatatatatttaatgtaaatgactcaaggggaccttaatctatggattcttagtctttccaggtctcaagttctgtccatcattttttcttcatgttggtatattattgtatgaatttgattcaaag

SEQ ID NO: 458016 - DNA, 535 bp, Homo sapiens
ggctatggctcagagggctgggcagggccttccctaactcctgcccctcactgagggccctggacagctgtcccatattctctttgcacagttcacagtgtcagcccctgccattcctagccaatatgcatctcagggcctggttgtttagttactataactctctccttctcaggggctttcagatagtgcaagaagcccagattctgcaggtaccacagtgggataggaactgatgctggacatacaggaaagatttgtatacatgccaaggttggtgtctgcgaggaaggcgaaaagtcagaatgaatctacttttcatgccagacatggcaatattcaatggcaggaaaggaaggcctctcttcttgtatgcttattttcatcattcaggaaacctttcccagatctctagaatgaytagtggtcagcctgtttttgtctttagacccacactcgaggctcctacctcccttttaggtactcaatcccgcttatcttctctttctactcagatccatgggcctctcggtag

SEQ ID NO: 458017 - DNA, 618 bp, Homo sapiens
ctaatgggtatggatttctttttgaggtgatgaaaatattctaaaatttattgcggtgatggttatacaactccttgtgaacatactaaaaatcagtgaaatgtatactttaaaagggtgagtgttatggtatgttaattatataattatatcttttattcttttwaaaaaaaagttaaacagagttaccatatgacctagcaattccattcctaggtatatacccaagataaatgaaaacctttgtccacgtgaaaatttacacacagaagttcataacagagaaaattggatatgactgatgaatgaacaaccaaaatgtggcatatccatacaatggaatattgttcagcaatagaaagaaatgaggccgggtatggtggctcacacctgtaatcccagcactttgggaggccaaggtgggtggatcacttgaggtcaggagttcaagaccagcctggccaacatggtgaatgaaaccccatctctactaaaaaatacaaaaattagccaggcatggtggcacatgcttgtaaccccagctatgggaggctgaggcagtagaactgcctgaacctggaaggtggaggttgcagtgagccaagatcatgccactgc

SEQ ID NO: 458018 - DNA, 591 bp, Homo sapiens
tataaatcattatcctgatttttttccagcaagtagaaaccagtccagagacgagcaggtcttctgacgcttttaccactcagcatgctctccgtcaagcgcagatgtctaaggagctggttgagttgaataaagcgcttgcactgaaagaggccctggctaggaagatgactcagaatgacagccaactgcagccyattcagtaccaataccaggtaaactatttcctagggcagtatttgttcatgtctacagtctcttaaactgaatgggaagaaaacaacaagcatataatttttgatgatgaaaagacaacaaaatgtatatagtataatgggagttgtactgttggtttaaaaagaggatacattcaggacagggagcatgtaattttgttccatttaatctaatgccttaccttatgccacaggtatttaataaatagtttgataacattataataaatgtggtccctacttatagagaaattatattctaataactatgcttggattctgagaaaaaacacatcttttggtaaatagtctgggttatagtatgaattatgaagacactagtggatgtcacatg

SEQ ID NO: 458019 - DNA, 607 bp, Homo sapiens
gggtgctaaataaatggtgactgtggataggaggaagaaaagaggtaaacagcattgcccaaggagagacttcagaggccctaatttgccagagaatctacccagtaggggagaaacaaacaaacctaaaagtttggatggccacttatctacaactgtaggtagtctttcatcaggcgagggtcctcagaactcccagttcctttgaccaagaaaggcttgagcaaggctgttgtaaggcatcacgacagcacacaggaaggggcttgcaactggctaaggaaaataataacttctcacttcaaggcagaaaaggataagaccaatatcccccccagaggagtggctataccccacaattctagaggaagtgtcaatgccaaagagcccagagcatccgggaagtgaccaataccaatgctgaaataccagagtgcccaagatcctgtgaacaagggtatccacatcaaatgttgacaaccccagggcattggggtgggtggccaacagtgaattcaagaccaacwcggtgtcacagaacaatatgattttagcatcccagagtcaacacaacaggggaccttttacaaccaagtgttctgtctta

SEQ ID NO: 458020 - DNA, 464 bp, Homo sapiens
aaaaacttggttgaactgtgtacttgctcttctgttgccttatttccttgtgtaaaatgcatgatgatgcacatatcccatatagctttcatgagaattatatatcataaagcayataaactacctagaatagtgtctgagtacattattattgtttaagaaaatactgttacaatttaattacataaatattataatatacaaatatatttataatgcaatattaaattataatacaattgtacattagatgtattttattgatattccttaatgatacggtatgtaaaatcttatttgtatgagtaccaatatatacatattattctatataattgaaggaaaataatgcctccgagacaaaactcttcatatttaaaagattctttatgatatgtggaaatgtgcttgtctttattttgcattctagatatttataaagtgaagtttaaactttttttgag

SEQ ID NO: 458021 - DNA, 607 bp, Homo sapiens
atagtttatttgtaactactaccaacatatgttcaaaattttgaattacaaacaagattttgcttttagtttgattatcatagaaatagtttatcaataaactacacttctgctgtggtatttaaaagcacattttattgtgtctgagtkttgtgcagttataaataacacaagcagaacttgacataaagaaacatgttccagtcctacatgtgtaacaaatcaatgcaatatttaattcgacaagcatttattagataacttctctatattatatacctcccaatgtgccagggacagagatttgacaaggaacccttagatttcaaagtctagtaataaaaaccagagtaaagagtctagtattgtttatagaattgtttatagaatacagtgataaaaggccttattaattatatctatcttagggtatattttggacctataagcaattttgtgttgctgaatgataaaatataactaatagcattcataacattctttaaggcgtcatagaatttgcagaatccattgaaagtggtcttctggccagaagcggtagaattagaagaagataagcaatatggaaatagcctaagaaaaaaaa

SEQ ID NO: 458022 - DNA, 594 bp, Homo sapiens
taacacaagcagaacttgacataaagaaacatgttccagtcctacatgtgtaacaaatcaatgcaatatttaattcgacaagcatttattagataacttctctatattatatacctyccaatgtgccagggacagagatttgacaaggaacccttagatttcaaagtctagtaataaaaaccagagtaaagagtctagtattgtttatagaattgtttatagaatacagtgataaaaggccttattaattatatctatcttagggtatattttggacctataagcaattttgtgttgctgaatgataaaatataactaatagcattcataacattctttaaggcgtcatagaatttgcagaatccattgaaagtggtcttctggccagaagcggtagaattagaagaagataagcaatatggaaatagcctaagaaaaaaaatgtactcgttttggagacaatgcttttatctaataaataatataaaaggaaagcaaaagatatcatgtgaactatggcttcatataaatttagagaaaatgattaagaaactgacaagatttaattatgattccaaaaaaagagccaagaag

SEQ ID NO: 458023 - DNA, 594 bp, Homo sapiens
taacacaagcagaacttgacataaagaaacatgttccagtcctacatgtgtaacaaatcaatgcaatatttaattcgacaagcatttattagataacttctctatattatatacctcccaatgtgccagggacagagatttgacaaggaacccttagatttcaaagtctagtaataaaaaccagagtaaagagtctagtattgtttatagaattgtttatagaatacagtgataaaaggccttattaattatatctatcttagggtatattttggacctataagcaattttgtgttgctgaatgataaaatataactaatagcattcataacattctttaaggcgtcatagaatttgcagaatccattgaaagtggtcttctggccagaagcgrtagaattagaagaagataagcaatatggaaatagcctaagaaaaaaaatgtactcgttttggagacaatgcttttatctaataaataatataaaaggaaagcaaaagatatcatgtgaactatggcttcatataaatttagagaaaatgattaagaaactgacaagatttaattatgattccaaaaaaagagccaagaag

SEQ ID NO: 458024 - DNA, 594 bp, Homo sapiens
taacacaagcagaacttgacataaagaaacatgttccagtcctacatgtgtaacaaatcaatgcaatatttaattcgacaagcatttattagataacttctctatattatatacctcccaatgtgccagggacagagatttgacaaggaacccttagatttcaaagtctagtaataaaaaccagagtaaagagtctagtattgtttatagaattgtttatagaatacagtgataaaaggccttattaattatatctatcttagggtatattttggacctataagcaattttgtgttgctgaatgataaaatataactaatagcattcataacattctttaaggcgtcatagaatttgcagaatccattgaaagtggtcttctggccagaagcggtagaattagaagaagataagcaatatggaaatagcctaagaaaaaaaatgtactcgttttggagacaatgcttttatctaatamataatataaaaggaaagcaaaagatatcatgtgaactatggcttcatataaatttagagaaaatgattaagaaactgacaagatttaattatgattccaaaaaaagagccaagaag

SEQ ID NO: 458025 - DNA, 655 bp, Homo sapiens
aacattttgtatagtcatggtatgtttgttaaagctaagaaattaatattgatacaatactcttaacttcaggctttgctagaatttcagttattcsactaatattctatttttgttacagaattcagtccagggtacaatattgaatttgtcattatgtttcttgcgtctctttttatctgtgagtttctccatcttgctttgtatttcatgaacttagccgttttgaagagtactagacaggtattttatagaatgtccctttatctttttctgatattttttatgattagaaggtggttattgcatttgaggaagaattccacagagataaagtatcctttatatcacattaaatcaggggtacctgatatcaacatgacctttcactggtgatactgacctctgtcacttggattgggtgccaggtttctctgctatgaagaaactgctttccttttcaggctctattaattggaaacaagccattaagttcaaagtacaatcaagaaaagaggacttaagctccacctcctagagatgggagtaactatataatttattcctaataaaaatgtgatatgttttggtccaatatatcagctaggcccagagtttctgagaaggagaaatatgccgtatctcacagtgacat

SEQ ID NO: 458026 - DNA, 655 bp, Homo sapiens
aacattttgtatagtcatggtatgtttgttaaagctaagaaattaatattgatacaatactcttaacttcaggctttgctagaatttcagttattcgactaatattctatttttgttacagaattcagtccagggtacaatattgaatttgtcattatgtttcttgcgtctctttttatctgtgagtttctccatcttgctttgtatttcatgaacttagccgttttgaagagtactagacaggtattttatagaatgtccctttatctttttctgatattttttatgattagaaggtggttattgcatttgaggaagaattccacagagataaagtatcctttatatcacattaaatcaggggtacctgatatcaacatgacctttcactggtgatrctgacctctgtcacttggattgggtgccaggtttctctgctatgaagaaactgctttccttttcaggctctattaattggaaacaagccattaagttcaaagtacaatcaagaaaagaggacttaagctccacctcctagagatgggagtaactatataatttattcctaataaaaatgtgatatgttttggtccaatatatcagctaggcccagagtttctgagaaggagaaatatgccgtatctcacagtgacat

SEQ ID NO: 458027 - DNA, 638 bp, Homo sapiens
tcaccacatgcttcttccttctgacaaaatagtgaaattatgataagcatagtccagggacacacaaaactaccaaagatgtagtttacttaatcttggtaattatgtcctaagtgcattctttccacatttccatttgaatttagacatttttttctgtgtctttgaatactgtgaatggaaaatgttacctttaaacctagagataatgtttcatgggcagatgtctgttcttcaaatattttagaaactttgggaatattatatcactcatggtacattctaggcagggaatcaagctgaatagtcttttccggatcatgaacctacattggtgaattgtttgagtatgtttgtgaggtcarttggtggctcataaagagacattcctatgtccaaagatccaaataaaatataattccacggacttaaccacattaacaccatgtttctatgggggtgatgacacactgtctagaaacagatcagtgggaaaaatccatgaactgtgactcatcaatacagtttggacttctgaataaacgtcatatatattagttttctagtgcaaatagatatggctgtcaagagacttacaatgttgtccaaactgtaacaaggaccagctatgtgactga

SEQ ID NO: 458028 - DNA, 638 bp, Homo sapiens
tcaccacatgcttcttccttctgacaaaatagtgaaattatgataagcatagtccagggacacacaaaactaccaaagatgtagtttacttaatcttggtaattatgtcctaagtgcattctttccacatttccatttgaatttagacatttttttctgtgtctttgaatactgtgaatggaaaatgttacctttaaacctagagataatgtttcatgggcagatgtctgttcttcaaatattttagaaactttgggaatattatatcactcatggtacattctaggcagggaatcaagctgaatagtcttttccggatcatgaacctacattggtgaattgtttgagtatgtttgtgaggtcagttggtggctcmtaaagagacattcctatgtccaaagatccaaataaaatataattccacggacttaaccacattaacaccatgtttctatgggggtgatgacacactgtctagaaacagatcagtgggaaaaatccatgaactgtgactcatcaatacagtttggacttctgaataaacgtcatatatattagttttctagtgcaaatagatatggctgtcaagagacttacaatgttgtccaaactgtaacaaggaccagctatgtgactga

SEQ ID NO: 458029 - DNA, 587 bp, Homo sapiens
aactactggcaaggactatatttagaaagtagaaattatccttcatgctttagaacagatgatgggatttagggtcagtgtaataatctgtacaccaaaacaaagccaacttgaatggtgtccaccattaaatggaagtataacataatgatatataggatagactccaggaacagactttctgggtttataggcttgctatgccatggtctgattatgtgatcttgtgaaagtttttcctcagttttcttcttaaaaaggagaccataatagtatcttctagcactgtattttaatgtaytaattatatcaggatatccagaatattagtggtatttcctccacataaaaatttttagtctgacatatatttttctataaaagtgattgaacaatttaaaattatctaagtaatttacttgtaggaaatattgtactctctgatactgtataatttgggtattataattctttcatagaaagaacctttaaattagaaagaaatgcaatacatataatatatatatttatgattgtatatgttatatatgtttatatatataaaatcttgtaattgcccttgttgt

SEQ ID NO: 458030 - DNA, 581 bp, Homo sapiens
ctttattttatatagatttaaaagatatagtctcagctatcatttcttttccatggttttcaactacttggctcaaaatattggatatcatattgatcttagcattttaacttgtttggctaatttgcatgtaatttaaattaatatcatctgaatttaaactaagtttctctatgtagagaatttgggagggataaattttccattatacatttctttatttatatgtcttttataaataaataatatattattcactaaagcataaattaaattgtatctaaaatgagtgatagaaagctattaagcctgaaagatatcagcaaggcagtataatatagtagaagagccatgatacttggagccacaataaaagcaagatccatgggarccatgatgtatattaatattgtaattttgccccaactatttgacttcttgatttcatttcactcatgtggaaagcacaccaacaaacagctacttccctctgaagactgaggctctaatgagtgtatgaatgtgaagacaatactttgtagccacaaattattgtttcctagttataaaaatcaaaattt

SEQ ID NO: 458031 - DNA, 477 bp, Homo sapiens
aaggattcattcccatgacccaaacacctcccactaggccacacttccaacaatggaaatcaaatttcaacttgagatttgatatttggagacaaatattcaaactttatcagtgtgtcttataaataatgccatctataatttgctagtttagaacatatactacaacatttgaaagagtactcaaacttatgcgatataggtttctggctggtattttacttttttttctaaaatagtataccaatattttagaaggtcatctacttctcartaaatcaactgcatcaaaaataaaggagaggaaaaaatcatgttatatcagtaaatgctgaaaaggcagttgataaaattcaacagagctgcctgttaaaaagctgtgaagtatcattggactagaaggcaattagataaatataataaaggctatctatcaatatctagtaggaaatattatataaaatggtgacaatgaat

SEQ ID NO: 458032 - DNA, 588 bp, Homo sapiens
taatgtgcataacaatagctgagccagctttgcaaatgttatatgaatatacattatgtgattaacaacaaataaaatatttacttttgaaaaaagttttatctctggacaagcacacacacaaaaaacctagaaattattaaggtgtaaaattagatgaataaatgctggacccaagtaaaagctaaactcaattgacatatcaattaaaatgtaagtataatgagaaccctagctatctcaatgaattacaatggttatatatatatatatatgtgtatatatatatgtatatatatatacacatatatatatacatgtaaaccataatttatgattacatcatttctaaacacagtagaccttttgaagcattgaakgaataaatagaaaaaagaagacaatttcattaatcacatatgcatttatgtacctcataataagcataataaagtataattaaaatgatgggttatttagaaaattataatatgtatgaccaaaaatagtgacagtttataaattaaatggtgctttcaaatcataaagggaaaaagaagcattccaataaaaaatgcatccataaac

SEQ ID NO: 458033 - DNA, 588 bp, Homo sapiens
taatgtgcataacaatagctgagccagctttgcaaatgttatatgaatatacattatgtgattaacaacaaataaaatatttacttttgaaaaaagttttatctctggacaagcacacacacaaaaaacctagaaattattaaggtgtaaaattagatgaataaatgctggacccaagtaaaagctaaactcaattgacatatcaattaaaatgtaagtataatgagaaccctagctatctcaatgaattacaatggttatatatatatatatatgtgtatatatatatgtatatatatatacacatatatatatacatgtaaaccataatttatgattacatcatttctaaacacagtagaccttttgaagcattgaatgaataaatagaaaaaagaagacaatttcattaatcacatatgcatttatgtacctcataataarcataataaagtataattaaaatgatgggttatttagaaaattataatatgtatgaccaaaaatagtgacagtttataaattaaatggtgctttcaaatcataaagggaaaaagaagcattccaataaaaaatgcatccataaac

SEQ ID NO: 458034 - DNA, 619 bp, Homo sapiens
ccccctttgccttgtattaaactttggttagccttctcttctccccacagggccttgtgttagtcctgttctcagtcctgagcaagcactaaaatgcatactttactctctttaacagctaaaaagagaattggcctatcagactcctctgtcatgccttctattcactccccattgcctgcccaatttcctcttaaaaatttttgctctccctggttaccttttcctataagagaaaagacattttctgtttgattttgagacgctagcaaatttctgagattggagcactctcaatattacaataattttgaataaagtctttcttatctaagtctgaattagtttttctttggcagattctggtgctgagtcaggttgattgctgatwgtgccttgatctataccatcttcacccaggttttgatgctggcttctctgaccctgtgcatccttcctagctgggcaaatcagaatccatggtggtgagtagcaaaccttaattcagtattcctgatatttgtcttttgtagtgggataagaagttattttgatactgttaaatgaggctcttcccagttcatttctgttgagcaagacctttcctaggtagaggtct

SEQ ID NO: 458035 - DNA, 641 bp, Homo sapiens
gattctgggacctccctagccatgtggaactgtaagtccaattaaacctctttttctttacagtcttgggtatatcagcaatgtgaaaatggactaatacatacaccctacggtgaaatagaaaattgtaacttattctttctatctatctgtaattttacacccattgaccaaactctccctttcccccatctcctttctactccctgaagtaagccttttgttattcattcaatcatttgtttatatcagtatggactcatgaatgtttatttttactttgggttataacccaatacttctttatttatkttgttgcttaaatgatttgaacttgaacaaaaatttcaaaatgtaatttcattttttataattcaaaacaaaacttaaaaataaattgcaaaactgccaatttgtcttacaaattgcctatgctgtttgattgtcctaccagtaatgcataagagtttcagttgttccacctcctttttagcacttgttaatatcaattttatgttatgctatttttagcaattctaataagtacgcagtggtatgtcattgtgacttcaacttgcatttcccccgtaattattgatgctgaacatcttttcataagtctatctgccacccatgaaata

SEQ ID NO: 458036 - DNA, 634 bp, Homo sapiens
tcagagaaataagaaaaaaaaattatggtaaggcatcttgaaaaataaaataataagatgaagaatatatagtactccatgaattaaatgaccagatataagatatttctgatctctaaactgtcacagctaggatacttcacaaagcctttcattatttagggcctatttggccaaaaacatcggttcattagattgaaaattattttgagtcatgaatcttatcatatttatctttgtatccacagtgatttgcattcccctgataatgtagtgatgttgaacatttttcrtatacctattgccatttgtgtgtcttatttttgaaaaatgtctattcagctaatttgcccatttaatcagattattgtttgtttgtaaatatttgttagatccatttggtctatggtgccattgagagctaatgtttctttactggttttctgtctagatgatctttccaatgctgaaaatggggtgttgaagtccttaaatgtgattttattggaatctctttctccctttagatctaataatatttttttctttgtatatccagatgctccagtgttgggcacatatatatttataattgttatatcatttttactgaatcaagtttttttatataata

SEQ ID NO: 458037 - DNA, 588 bp, Homo sapiens
tcttttcatagcatttttattcatyatttctccaaattggaaataatcgagatattcttgacccaaatgtccttaaaccaaattgtggtatattcattccacagaatactgttcagcaataaaaaggaatgaaccaacttgaattaatacaacttgacaacacaacttgaacacaaataaacacaatttgaatgaatctcaaggtgttatgcggaatgaaagaaggcagttttaaagaattacctctttatgagttcagttatatggcatttgctaagcaataaactgtagtgatgaagggcagtgacaaccagaggttaggtattgaggaatggtgtgactatacaggagagtaggagggaatgtttggagtgatgcgactgccctgtatatggtggtggctgcccaaatttagatgcatgttaaaatatatagaactgtatacacaaagaaaaaggtcaaattactacacaatgatataaaacatgtacatatatacaagcatatacacacatacatgtaaatatctgtaattgtctttgattttttgatgctctgtcctcatttaatcaacctctgaagcccaac

SEQ ID NO: 458038 - DNA, 492 bp, Homo sapiens
attctaggccctctgtatctgtggtttctctatccctggattcaactaacaatggatagaaaacaagggaaaaaaaaaaaaaaaaaaaaaaaaaaaaaaaaaactmagtcagtactgaacatgtatagacttttttctctttatttcctgaacaatactgtatagcaactatgaataccaaggaatgatgtatataaattatatatgtgtgtctcaaaaagcaacttgtaaaattatagactttttaattacataagaaattccttaccccaaattcttataaggaaaatgcatatattatttacataacaaaaaatgtgcaacattctataatttgtctttaaaatctttccaatgatgaataccttacttattcaagcaaattcttcctgttacattatgtcagttggtttcagtatattatgtggtaagaatagggctctagagttctcagttctagaggttgacaacgtcaggaaagagtaaaatatt

SEQ ID NO: 458039 - DNA, 558 bp, Homo sapiens
gtgtaaaagtcaaatatcttgcacaaaaattgtcaacctagattcgttttgagtagattttatatattctaggccctctgtatctgtggtttctctatccctggattcaactaacaatggatagaaaacaagggaaaaaaaaaaaaaaaaaaaaaaaaaaaaaaaaaactaagtcagtactgaacatgtatagacttttttctctttatttcctgaacaatactgtatagcaactatgaataccaaggaatgatgtatataaattatatatgtgtgtctcaaaaagcaacttgtaaaattatagactttttaattacataagaaattccttaccccaaattcttataaggaaaatgcatatattatttacataacaaaaaatgtgcaacattctataatttgtctttaaaatctttccaatgatgaataccttacttattcmagcaaattcttcctgttacattatgtcagttggtttcagtatattatgtggtaagaatagggctctagagttctcagttctagaggttgacaacgtcaggaaagagtaaaatatta

SEQ ID NO: 458040 - DNA, 601 bp, Homo sapiens
tatacattattaccaagaatagtatttattgtcacattttataaatatttcattgcctgccacaagcttttaaggttggcatgatttccgaggacttcagttcaaaatttaggtagggctccaaaattcagagaaaatgtctgtaattrtacagctcatggtcatatttctttcataaaaaataaagttaactcttacttctttttagtgacacttatctgcaattagtacatagacactaaatagtttatgttgctttatgtagtaagtaaggtctgtacaacaaaatacagtggcaataacagattcggtaactaggtaaacctgaattagcagcccatatctaccacttactagctgtattcccttgggagtgttacttttagttttctcatttgtaaaatggagataacattgtatatcctctggaattattaagattaatgacatgtcgaatgcttagcacagtacatgccacacagttctcagttattattcttaaaagtcaattctgtttctgcatactattcatgcttatgattccaaataaataatagttcatacgtgcattccactgcaattctttgtttgtttcttaagg

SEQ ID NO: 458041 - DNA, 576 bp, Homo sapiens
agtccatgggtgagaagactacagtggcaggggcccacacccttctgtcttcctcccctgccattgcccagggtgtcagacacacctgtgctgctgaagctggaagcccccatgattgggttccaataacatagggtaggaaaaggtacaccagagaaaacatttatgtccataaaactaggaagttacctccatcgttttcactcacaccccttcttgccctaacttattcacatcttctcagcaaggtgcagtggagtctgggaaataaaatatctggtggacagccacattctcagccaaatcctgatcaggaaataagaaatgaatgttggattactgaaaataaaatatgagaatgggtattgttggatattcgaccgtctctactgtgactatggtctgggagactatgctagaaattttcccctgggaaatttagttgcagtcctaggaatatctgcttgcagaatatcaagttgccttagtctggaatgttgaaggtggcaaactyttggattaatgagctgacaaactataggggtttgatatgcttcttaccaagtttcctcttac

SEQ ID NO: 458042 - DNA, 419 bp, Homo sapiens
cttaggaagtttaagatcaaggcactggcacgtttggtgtctggtggggccgctctatcaatggtgtccttgtggcaacttccccacatgtggaagagatggaagggcaaaagtgatgaacaccgtgtcctaacatggcagaagagataaaatggggctaaactcatcccctcaaactcttttgtaaatcactaatcccatccatgaggacagagccctggtctcctaattacctcctgaagaccccacttcttaataccgttacattggacattaagtttaamatgacttttggagacaacacaaacattcaaaccacagcactaagtatctaccattatctcatttaatctccaggaaaatctgattaaatatattcttacctctatttaataattgatgagaagaagtttgcacag

SEQ ID NO: 458043 - DNA, 619 bp, Homo sapiens
tcctatacatatatttttaccattttctttctcctatgttcctccattgtcacctttgctgtccatataactttcctcattgtaactgcagactttcctaatgaatccttgtagtatttccttctcctcttcacgaaagcttctttaataattattccatctctgtactctataggaaccccagaatctatggatattctttcactccacgtgtagcacaacttgaaaaccttacttttaattgctgattatatactcttttttcctttggaagcctttagtttattcctaattcctataccagtattaggcttatgggcatttgttatgtgttgaattttattctgttccaaaaattcacatgctgaagttctaactcycagcattttagaatatgattgtacatgaagatattatagaatttttacagaattaagtgaaaataaagttgtgaaaatggacccaaatacactgtgactggtatctttgtaagagagggaagttggacagggatatgtgcagaggaaagactatgtgaagatacaaggagaagatggcatctataaacctagaagagaggcctggaacagatatttctttcatggtcctgagaagaaac

SEQ ID NO: 458044 - DNA, 400 bp, Homo sapiens
  misc_feature (1)...(400): n = A,T,C or G
tctgaagcaaagaaaggcaaaggaccgaggcttataatttttaatcaataaaatttaattaagatattcatccaacatatactctggaaagagatggaaacatgaataaaatttagtcccagattattggtcttctagggcagccatcacaaagtaccacaaactgggtggcttaaacagcaaaaatgtcttttctcttagttctggaggccagaagtctgagatcagaaagtyggcaggattggtttcttctgaggcctctttccttggcttgaggatcaccctcttctctctgcatctccacatagtcttttctttgttcatgcctatgtccttacctncttttcttacgaagacaccactcacgttggattaaggcccaccccaatgactcatataa

SEQ ID NO: 458045 - DNA, 400 bp, Homo sapiens
  misc_feature (1)...(400): n = A,T,C or G
tctgaagcaaagaaaggcaaaggaccgaggcttataatttttaatcaataaaatttaattaagatattcatccaacatatactctggaaagagatggaaacatgaataaaatttagtcccagattattggtcttctagggcagccatcacaaagtaccacaaactgggtggcttaaacagcaaaaatgtcttttctcttagttctggaggccagaagtctgagatcagaaagttggcaggattggtttmttctgaggcctctttccttggcttgaggatcaccctcttctctctgcatctccacatagtcttttctttgttcatgcctatgtccttacctncttttcttacgaagacaccactcacgttggattaaggcccaccccaatgactcatataa

SEQ ID NO: 458046 - DNA, 552 bp, Homo sapiens
gacaatgacatgggagaggaagtcagctgagagtttatcagactttttaaaagaaacataagaaagggacatttctctcttctgcctttgaatggtgtcttcaacatttagccactatgaagtgtttaaggaatccaacctaaggaaaaaaaaaaaggcatacatcccggaggatggcagagaggaaagacaaaaggacatttgtccttgatgatgttactgaattgctgaattatgcaacttagacactttctgctgaactcagccccattccagtctctctctgctcttcccattattggggtaggctggggtgcagtctccactattacactgtaatcttcytgaggacttagactctgtatttattcatatttattattcaccattcctcgcacagtgacctgcccagagcaggggcaatttattcatggatattttgaaaccaaaccagaggcatgatgcacactttcctttctccactatttggaaggacttgaggtttcctttcacattttcagattcaccagtagtgaaaacaaattagcaact

SEQ ID NO: 458047 - DNA, 543 bp, Homo sapiens
atgttactgaattgctgaattatgcaacttagacactttctgctgaactcagccccattccagtctctctctgctcttcccattattggggtaggctggggtgcagtctccactattacactgtaatcttcttgaggacttagactctgtatttattcatatttattattcaccattcctygcacagtgacctgcccagagcaggggcaatttattcatggatattttgaaaccaaaccagaggcatgatgcacactttcctttctccactatttggaaggacttgaggtttcctttcacattttcagattcaccagtagtgaaaacaaattagcaactccaatcctgcctaagcccatgtaaagtagatgtcagtgaagtcttttatctgtacgttgttgtgctttttttttggacgtaagcaatggcaatggcgatttttgaggcaaaactgaaaatctatgtataaaattctgaattgctgaaccaggcttaacacaattgatggctctttaaacaatccagctttccctttaatgggtc

SEQ ID NO: 458048 - DNA, 569 bp, Homo sapiens
aagtagtttaatcatatccttcaacatcaatagcctgtaatgatttggcttatatgttattaaaaaacatgaaaatttccttttttctctcttccatttttgtaacttttaaattctgaggttctagctcctttgtagtgtgttatagagctgctgagttttcatatcaacaaggyttaatctctccttttacatacagggggatatggcctagctaagggaaggaacttaatgaatccaggattagaaattaaaaatttacctttgatttcccaacccactctcttctgcttccctatccataaagaaacatgttactgatatcaactacgtttctttatccttacaccattttttgcctgttgaatgctgttatggtttggctgtgtcctcacccaaatctcatctcaaattgtagctcccataattcccatgtgttgtggaagggacctggtggaagataattgaatcacgagggtggcttcccccatactattcttgtgacagtaaataagtttcacaagatctgatggttttataaggaaagacccctttcacttggctctcat

SEQ ID NO: 458049 - DNA, 582 bp, Homo sapiens
aattacatgcatttctggttttattgctgccttcagcttaaattagaagaatgagataccacatagcaaggggatcttccaaacctagtaaatgtagaggctgatttcttactataaaaattataaatcatgatggtttaatttaaactgaaagattaaattgaaaaaaattggttacttgggtcttgacaataaaaagtattacttataaatatgtatgaattattttatttatttattttttgtgtgtgtgagatggagtctcgctctgttgccaggctggagtgcagtggggcgatctcagctcaccggaacctccgcctcccaggttcaagcatttctcctgcctcagcctcccaagtagctgggactacaggygcacaccaccacagccagataatttttgtatgttcagtagagatggggttttaccatgttggccagaattgtctcaatctctagacctcgtgatccgcctgcctctgcatcccaaaattctgggattacaggcatgagtcaccgtgcccagcccatatgcattcttaattattggcatgcatgtttatttgaatttctttttaa

SEQ ID NO: 458050 - DNA, 590 bp, Homo sapiens
aaccatttcaaactcaaattggctgcaaatattaaaaggagacaaatgaaacaagagaatcagagaaacaaagacatggtcatctaatgcaggtccttaaggatgcaacctgcagttgcctgtgaggcttatgggaggtagagaggcttgtactgaaaatccaagaccaaaatattaatatctatgcattacacagtccattctaatgcagtttgagacataatttcatgtcatacctgaaacagtcaatggagtaaaggtggggcagacttgggtggaggataagactggacacattttttgcagcctttttrctatatttccaaggacatcctttcctgtcctaagtcattcaaccattgaaacatcttaggctgatacacattattaatctctttagaatcagttttcatactggtagcattgtgtgcctatgtgttttcatctagacagacctattttaaaatcttgaaaaccgtcatttactaggtaccatattagttatttaatccctctttatttttaaaacagaagcaaaaatatgcccctcaaagtgtgctaggaaggttaatttggagaatgtttataaa

SEQ ID NO: 458051 - DNA, 368 bp, Homo sapiens
gagattaaaacctcacatatcaatattaaactcaactataaatgagctaaatgccaccacttaaaagcacaaagtggcaacttagcaaatagaattattaaaaaaaaaaagacccatccaatacgggtcttcaagagaaccctctcacacgtagcaacccccataggctcaaagcaaaggatcagagaagatcactcaaatggaatacaaaaaagaactggggcttctattcttacatcagataaaacgaactttaaaccaacaacagtaccaaaggacaaaaaagaacattacacaacaagaagacttaactatcctaartatatatacacccaacattggagaaaattaataaagcaagtacttcc

SEQ ID NO: 458052 - DNA, 707 bp, Homo sapiens
atggcaatagctgaacaataaccagactttctaatgggcaacatatatttataaaatttatagaccacagtcactctccaaatacaagtgcagtgaatgttttgaagatcattgatgaactgaaaatgcaggtgaaaaatacaagaaatctcccttgttaaattagtcaatgatgcgtgagttctgctccttcacacatagcacatgtttgctatgcatttaagttttacatcatttgcaatactgaagtagaaattgtatagacctttagaragtcctaattcattttatgcattgttttctgcaaatgtgactccatgaaagtgtattatcacaatgttggctttgtgtgcaagcattgtgcatgtacataaaaatgtctaaacttcctcaaaaaatgaagaggtgtcctctttgtacatctgaatttgtgaaagataaaatttctcaagatttcaactctttgggtggctgcataagcagtggtgagccactgtagttttggatcaatatcatcgaaagacttaggttgtccatcacggtatttcagatgacctcagttataaagctgggtgcacacaattaccaaacatagtgatacttatttatagctttcactttttgacctatttctcttagaatgtgactcctctgctcatgaatattatacccatataactgtcattagtgtactgaatgtttatgat

SEQ ID NO: 458053 - DNA, 707 bp, Homo sapiens
atggcaatagctgaacaataaccagactttctaatgggcaacatatatttataaaatttatagaccacagtcactctccaaatacaagtgcagtgaatgttttgaagatcattgatgaactgaaaatgcaggtgaaaaatacaagaaatctcccttgttaaattagtcaatgatgcgtgagttctgctccttcacacatagcacatgtttgctatgcatttaagttttacatcatttgcaatactgaagtagaaattgtatagacctttagagagtcctaattcattttatgcattgttttctgcaaatgtgactccatgaaagtgtattatcacaatgttggctttgtgtgcragcattgtgcatgtacataaaaatgtctaaacttcctcaaaaaatgaagaggtgtcctctttgtacatctgaatttgtgaaagataaaatttctcaagatttcaactctttgggtggctgcataagcagtggtgagccactgtagttttggatcaatatcatcgaaagacttaggttgtccatcacggtatttcagatgacctcagttataaagctgggtgcacacaattaccaaacatagtgatacttatttatagctttcactttttgacctatttctcttagaatgtgactcctctgctcatgaatattatacccatataactgtcattagtgtactgaatgtttatgat

SEQ ID NO: 458054 - DNA, 554 bp, Homo sapiens
ggatgtgaatatgaggaagtgcagaaaatgtaggtcagttttgcaatcagtctacaaaaaaatgcaataaagacatgtaaacccaatctatacattcttacttgtattagcatctttgtaacaaaaaggactggacaatgatactcttttctaaaacatattttggcgcagtgggsaactggtgattgcagcagatatcctggacttagattgatttgaatcctagctgtaaaatgtaatatctgtgtgtcttattatttaatacctcagtagtcttatctataaaatgggaatgataataataccttcattaaagtattgatgggagcattaaataatatatataaagcttttagaacagagcctgacacacagtcatttgataaatttatattttatttttagcactgataggaatatatcaacaaatatgcaaattataagaatgtagaaattcagtggatttccagctggacttgtgataaggctaagcatcaatagtttatagtaaaatatagcaccaagtacatacctattatgtagcctaggtttta

SEQ ID NO: 458055 - DNA, 554 bp, Homo sapiens
ggatgtgaatatgaggaagtgcagaaaatgtaggtcagttttgcaatcagtctacaaaaaaatgcaataaagacatgtaaacccaatctatacattcttacttgtattagcatctttgtaacaaaaaggactggacaatgatactcttttctaaaacatattttggcgcagtgggcaactggtgattgcagcagatatcctggacttagattgatttgaatcctagctgtaaaatgtaatatctgtgtgtcttattatttaatacctcagtagtcttatctataaaatgggaatgataataataccttcattaaagtattgatgggagcattaaataatatatataaagcttttagaacagagcctgacacayagtcatttgataaatttatattttatttttagcactgataggaatatatcaacaaatatgcaaattataagaatgtagaaattcagtggatttccagctggacttgtgataaggctaagcatcaatagtttatagtaaaatatagcaccaagtacatacctattatgtagcctaggtttta

SEQ ID NO: 458056 - DNA, 569 bp, Homo sapiens
attgcatcaaaagttatgcaatctcaaattcatgtatcataaaaagaacatatactacccatgggtagaaaaaggaggaaaagccagccaactaaccacaggtcacagctggggatatgtatcaagcacctattacttgaaggaagaatggcagtgctyctattagaagagaagaaaggagaattctggaaaaagaagagtgccaagtcaccagagaaaccaattatgtttccaagcagccaaaatatatgcatatgtctgggtacccagagcttaaaagaaatcagagagggttgaaagaaaatcaggcttcagatctaaaggaaatcatcttctttgtatatcctgcctgaagttttgatttttttaaatttcaataggatttgcatgaaccgtttcaattcattctctttgcacagatacagcacatttaacaacatgctgacattctagtggaagagctggaatttgatacatgcctttaagtgtccttcatataatggaactttctcacaaactttgcttttgagtttccaggaggaagaaactaatatttattgatcacttga

SEQ ID NO: 458057 - DNA, 554 bp, Homo sapiens
tgttcctttcatgtccttcattaaaggatttttgcatgatagcaactccagcttcatttctcttttttctcttttggccagtatcttatctggcagctttatcagttaaatattcattggtcaaattagaattcagccaaatgccttcctatttaaaatggctgggtgaatatagtgatcatttgtcaatgtccccttctgaattgttagtgagatagacctgaacacattatgtgagacagaaaatgaatagtttttgctgctatggttacagctagggtaggggtagttgtttacaagttatctttgttttcagaccccatacrtgcacatacacgcttgggtattgaagtcctaaatattctagtaaagtatccatttcaaagattctatcccaatgtctctattaatcctcatatcattgttagattatttaacataattttctcttcagcagttataatttcatataactctcaaatgtgatatcacagatatcatatggctactctcctcaagcggtctgtgaattaacagatttttgcttatgttga

SEQ ID NO: 458058 - DNA, 554 bp, Homo sapiens
tgttcctttcatgtccttcattaaaggatttttgcatgatagcaactccagcttcatttctcttttttctcttttggccagtatcttatctggcagctttatcagttaaatattcattggtcaaattagaattcagccaaatgccttcctatttaaaatggctgggtgaatatagtgatcatttgtcaatgtccccttctgaattgttagtgagatagacctgaacacattatgtgagacagaaaatgaatagtttttgctgctatggttacagctagggtaggggtagttgtttacaagttatctttgttttcagaccccatacgtgcacatacacgcttgggtattgaagtcctaaatattctagtaaagtatccatttcaaagattctatcccaatgtctctattaatcctcatatcattgttagattatttaacataattttctcttcarcagttataatttcatataactctcaaatgtgatatcacagatatcatatggctactctcctcaagcggtctgtgaattaacagatttttgcttatgttga

SEQ ID NO: 458059 - DNA, 586 bp, Homo sapiens
ttgtgtgcattgaggtattcataacagtctctgagggtttttttttttttttttggtgcatttcggtagggtttgtggtaatgtctcctttgttatttctgattgtgtttatttggatcttctctcctttttctttattggtctagctagtagtctaacagtcttctttattgttttagcaaccaactgtattagttcattctcatgcatctaataaagacatacttgagattgggcaatttataaaggaaagaggtttaattgactcacagtcacacagggcagtgaggcctcaggaaacttacaatcgtggtggaaagggaagcaaacgtgtccttcttcacatgatggcagcaaagagaagtgccgagcaaaaggggcaaatcactttataaaaccatcagatctcatgagaactctctttcacaagaacagcagcatggtgataaccamccccatgattcaattaccttccaccttgtccccccccataacatgtgaggattatgggaactacaattcaagatgagatttgggtcgtgacacagccaaaccatatcatcaactttgttttgttgatcttttg

SEQ ID NO: 458060 - DNA, 570 bp, Homo sapiens
  misc_feature (1)...(570): n = A,T,C or G
nnnnnnnnnnnnnnnnnnnnnnnnaactaaatccctcttttttgttgcaattgtttttggggacttagccataagggtttcccaggccagtgtccaaaatggtgtttcctacatttgcttccaggattcctatagtttgaggtcttacatttaaatctttaatctgtcttgagttaatttttgtatatggtaaaagtcaaagtccaatttcattcttctgcatatagctagccagctatccaagcatcatttactgaataggagtctctttctccattgggtggtatcgtcgactttgttgaagatcatttctggattctctaatctgttccattggtctgtgtgtttgtttttgtaccaataccatgctgttttggctactgtagccttacagtatagtttgaagtcaggtaatgtgatggctccagctttgttctgtttgcttaggattgctttgactatgtggccttttttttcattccatataaatcttagaatatatttttttctaaatctgtgaaaaatgagatttgttttgcrggtttttttgtttttttgttgttgtgtgtt

SEQ ID NO: 458061 - DNA, 583 bp, Homo sapiens
ggccctgcagaaggaggcatgcccrgctacagcatctgtccatgagcctgtgatctcattcctctgttttctgagagtgggggttcctccccaactagagcactggctacctctgcttgacactctggtgctgcacactttagccctgggacattgggactggactgcaactccatcctccagcccctgggctttggcactggctgctctgggggatctaaagtgctcccagaccaccagcaaagcactcgccctgggcagcagaggctgcgctatgcacaggctcctgcaggaggatccaaaaggggacttgggaggggctgtcaggcaggagggcctgtagaacagacagggcctattcccttgggaaagtcggccctgctgtctcttggccctgcagtcagctgaagttagagcaactcagagcaacatagggagccttggggactgaaccccttttgctgcatcctactgtatctgccctgtgcacaaaaccccctggtttccgcacagccctgggttctgtctcctcctactctctgggcatatcctcctgtcagttcacacgtttgggggctggggg

SEQ ID NO: 458062 - DNA, 513 bp, Homo sapiens
aaggttaatattgatatatcaggattttatcttgtcatcttgttagctgattgttatatagacttaattgtatagttgctttatagcatcagtgggctatgtacttaagtacgtagtgtgaaaaatatgtttttgttctggcagataaggttcttttgtttccatgtgtagcactcccttaaggatctcttgtaaggcaggtctggtgctaatgaattcccttagcctttgctttcctgaaaagaattttatttgtcatttgttatgaagctgagtttggctggaaaagawattcttggttggaatttcttttttctaaggatgctgaatgtaggtctctgatgtcttctggcttttaaggtttctgctgaaatgttcactcttagcctgatgagtttccctttgtacatgacctggcccttctctctaactgactttaatattgtttctttcacactgaccttggaaaatcttacgactgtatgtcttggagatggttgtcttatatagtgt

SEQ ID NO: 458063 - DNA, 457 bp, Homo sapiens
ggatacattctagattgtgtgcagaggagccaatttgcaggcagaagtccagaaattggttgggacatcatctttttttttttaattgctgatttatgwtgatttagttactcaataatctactcctcttcagttttctcaaactacaactaggtagccgctagttttattcaaatgtttacccaccatattattacagaccaaagattagcaaatataccctttgaattttcttaaaccaaggaccagttatttctacaagctcaattataggagagttatataacaattccaattctaaagttcaatcaagtaagtcccttggtctatatagccagtgtagtcaataatcaatgaattttagctaccatgtagatagacttcctctaatcagggttatgaaattattcaagagctgttgtacacaaactaaaatgtgcatttcctagtgaactga

SEQ ID NO: 458064 - DNA, 579 bp, Homo sapiens
ttttttctctggcccctcaaggttaatcatctattgtgcttgaggggctgaggtgttccctatctgctgacaacaacattcagatgaggaatctggttaaatcacttccgtgggaaggaggtaggcggtggagggccccargtgaccactgctaagtcacacaggtgtgtgtgtgcacctgtggcagtgactggcagtttccgcatgcactggcaaaacaggatgggagactgaatgagtgcacactggcaggagagggctgtaagtgggtgcttgccagtcagggcccatctccagaagttctccaattgttagatggagcttgccagtgaaagaactctcatggtggctgttggcaagcaccttggctggtcagctgagcctgtgctgcaagtgggtgggaccaggcagggactggagatgggctggcagacaggagggtactcacatcagactggctgcatcccacaggccaagatggccctgttctgtccaggtatagcagccaagaaaggctaaagcttcctacaggatcatggcagtccttgggggatgggcacctatggctgtgctccactt

SEQ ID NO: 458065 - DNA, 579 bp, Homo sapiens
ttttttctctggcccctcaaggttaatcatctattgtgcttgaggggctgaggtgttccctatctgctgacaacaacattcagatgaggaatctggttaaatcacttccgtgggaaggaggtaggcggtggagggccccaggtgaccactgctaagtcacacaggtgtgtgtgtgcacctgtggcagtgactggcagtttccgcatgcactggcaaaacagkatgggagactgaatgagtgcacactggcaggagagggctgtaagtgggtgcttgccagtcagggcccatctccagaagttctccaattgttagatggagcttgccagtgaaagaactctcatggtggctgttggcaagcaccttggctggtcagctgagcctgtgctgcaagtgggtgggaccaggcagggactggagatgggctggcagacaggagggtactcacatcagactggctgcatcccacaggccaagatggccctgttctgtccaggtatagcagccaagaaaggctaaagcttcctacaggatcatggcagtccttgggggatgggcacctatggctgtgctccactt

SEQ ID NO: 458066 - DNA, 590 bp, Homo sapiens
tgcattccagcctgggtgacagattgagaccctgtcacagggtctcaatagcaagagaactagaattagaaatggagcctgaaaaatgtgactgaatttgaaagaaaattgctaagacagtagatttttaactgttcttactataaaaaaaagataagcatatgaggtaatgcatattttaattaggtcagtttagccactctacaatgtatacatgtttcaaaacatcatgttgtacagaatatatgcaattatttatcaattaaatatatatgttatatgttatatatgtcayctagaatttttcctgacagatgatagacatttagcaatgtttttaaatggatgatattctcctgtatatttttctcctccttccttgatacctgactgtgagtttcttaaaggcaaggagcatggatatagttctagctttgtatcttctatgtctagcatgcttcttgacacacaataggtgttcaaaaataaaaggttgttcattgcatttaattgattttacattttaaaattgataatacattttaaagacaaaaaataagtcataaaaataagaccatcacaatgaaaaa

SEQ ID NO: 458067 - DNA, 597 bp, Homo sapiens
caccattgtgaagtgggatgggtagaaagtaggttttgtcatgtttcattcttccttcagtatttaagaaagcctgtttttaatagatgttatttcctcttccttaaccatagctcccaaatgagatgtttaaatgcatgctcagtataataataatgaaattaaaaaaagtatgggcatgtaaacataggtcaaggggcaaaaacttgaggaagtgttgctgcattttacaccagttcaaattctttaacttccatttctggcaagaagtcacttttttggtgaactgtgagatttgctaaattgatctaagttcctagtttagaaataacaccaaatctccattgccccaggtagctcttctcttcagatgtgaaatggrcaccttccctgtagaaagctgatttgggtacagagaaattgggaatagagcaaggacctaggatgatgagccatgatgcacagtttgaaaagcaacattcaggcacctctgtggtatgcaaaaatctctaggaaattcaggaattgaatttccaagcttaaatttgaggacatttgttgatatttcactggggtggatcaataaagagtataatt

SEQ ID NO: 458068 - DNA, 597 bp, Homo sapiens
caccattgtgaagtgggatgggtagaaagtaggttttgtcatgtttcattcttccttcagtatttaagaaagcctgtttttaatagatgttatttcctcttccttaaccatagctcccaaatgagatgtttaaatgcatgctcagtataataataatgaaattaaaaaaagtatgggcatgtaaacataggtcaaggggcaaaaacttgaggaagtgttgctgcattttacaccagttcaaattctttaacttccatttctggcaagaagtcacttttttggtgaactgtgagatttgctaaattgatctaagttcctagtttagaaataacaccaaatctccattgccccaggtagctcttctcttcagatgtgaaatggacaccttccctgtagaaagctgatttgggtacagagaaattgggaatagagcaaggacctaggatgatgagccatgatgcacagtttgaaaagcaacattcaggcacctctgtggtatgcaaaaatctctaggaaattcaggaattgaatttccaagcttaaatttgaggacatttgttgatatttcaytggggtggatcaataaagagtataatt

SEQ ID NO: 458069 - DNA, 536 bp, Homo sapiens
tccaaaacgaggccatctaagaattggtacaactggccaacgaaacttgttggagtgttgtcagtaaatcacctagccttgtgtctttaaatgggaaaagccatttgaaataagtaagtaccagcatgaagtgggttgaaatgaatagggtagacctgtcgtatgaatattttaagaggataaaaatgtatatatgaagagtgtgtttgtgggtttacttggatatgcgttgtattggtgtactggaaagggaactgatgagtttaggagctgagggattggatactattctcagttttttcatttgtgaccttgggcaagtacttaaactcaawgcttgtaaattcctcatgtaagaaatggagatgatactttcttcttcgcaatgttgatgtcaggctcaaagaagagcaagacgtggaagccctttggacattacaaagtcatatgtttttaaaatgaggtgttggtaatcagatggtagctggctttgaaatgatgcctaactacttggcagttagactagtgctgatatt

SEQ ID NO: 458070 - DNA, 634 bp, Homo sapiens
cttgtgtgcccctgtgtgtacatgccttcaaacttgtgtggggagtggggagaaagggagagagaaagacagggaaagagagaggtaatctctcctagtactctgaagaaaaggggtatttaggctctttgcctatcatgaaacaagaggcttatgtcttattgctgatgaattgcaagtgtaattacagagcattgctaaaccacattaagtcccaagggctgaataaaaaaatatacaccatctacaaaagccatttaaattatctctgaaaaacctagtagtcaagtatgaaatcagtctgtgagcagatataaaccattgctggttatccattaaaattagctccacaatgctaagggccagtctcyaaaagaaaaatgaatggcctgtggctatatctaatgtgctactcacaagtttctgtactgttacagaaatgaacaacaacagttgaactttaaagataaacagttttttttatcggattcctagagaataatggtgcttatgtacaattcttgaaatagagcctacagccgcccaaaataaaatagtctctttcaagatcttggaaataatgacatcataggcagattgaaccagcaatccattaatagtatcctttatagaa

SEQ ID NO: 458071 - DNA, 585 bp, Homo sapiens
gtcacataagctgagtcctttgcagaatgtctgtgatactgaccatggcaaatgtgtgttattgaatttttggtcagggatttttagtgcaatatagaagagtttagtttgagttttagatcccaagtattcctttcttcccaaccyatattatacttggtcaaataaagtcagggtaatcaggcagcctgaaaggaagcagggcatctacctgcctctctggtcagatggagtaattaggaacaaaaaaggccactctgttgttagccacacctatttatcaagaacaaaggagcatagcattttaaattcatttgagctgaaaccctggctggctcagactcttacttgtcttatcacgcaagatcagctttgtatatcattttaaagaggtcgtgtggcgtgttttcctgacttctgtcatctcaagttaaatatgtcatcagaaaatatatatcatccagaaaatggtggctctctcttcctgtgagacactctttttagaaatttgtcttctaggtatttctattttaaaatgttcagtttctctgcaataactttcaaatttcattatttttaccaagc

SEQ ID NO: 458072 - DNA, 581 bp, Homo sapiens
agaaggaggagacagaatctcctgggagtaaacaggaggctgtggaagagaaagctgaagcagggaggtgtgacatggggggttgttgaactcaggtagagctggaaggctgctcctagccaggcaagcagcgtgagcaggagcatggaggctgcggtgagggccacacagagctgccatgggagctcagataccacattgtgcacaggaaattaccaccccagcacttccttgttgccctacagcctttagtccattatyggtaggaagatgattctttccctgggtgcatgaaggctctagatcggggtgaatgaatgcctagaggtctgaaaattttaacttggttctgtcaggggaacctgtctccctgagttttcacggcctaaggagactaacaatgaggatgggtctggttcagtggagctgcggccttggccttcagaatgaggccaactctggctggaaactcaaggccaatcctgagctgctgtgacctactctgatctcctgcaccctctccttcccacccacaactctcagctttgcatctcccaaccttggcaggcaaaatgcttccc

SEQ ID NO: 458073 - DNA, 581 bp, Homo sapiens
agaaggaggagacagaatctcctgggagtaaacaggaggctgtggaagagaaagctgaagcagggaggtgtgacatggggggttgttgaactcaggtagagctggaaggctgctcctagccaggcaagcagcgtgagcaggagcatggaggctgcggtgagggccacacagagctgccatgggagctcagataccacattgtgcacaggaaattaccaccccagcacttccttgttgccctacagcctttagtccattatcggtaggaagatgattctttccctgggtgcatgaaggctctagatcggggtgaatgaatgcctagaggtctgaaaattttaacttggttctgtcaggggaacctgtctccctgagttttcacggcctaaggagactaacaatgaggatgggtctggttcagtggagctgcggccttggccttcagaatgaggccaactctggctggaaactcaaggccaatcctgagctgctgtgacctactctgatctcctgcaccctctccttcccaccyacaactctcagctttgcatctcccaaccttggcaggcaaaatgcttccc

SEQ ID NO: 458074 - DNA, 534 bp, Homo sapiens
gaggtggccaacttctgacagggaatagaagggggcccagcagtggctgtggagcctgtgaggggcctcgcagagactcagggtttgtcagagcccattccccactgagccagctgccctcggtagmaccaactccaggcagctctaagggaagttgagctgggtgtagacatttctccataagtcctgtgccccccaccatcttcctgtaatttttaaattgtgtgataggcagaggtcggtggtgagaggctcactgagcaggactggagaggagtagagaacgcaggggtgagttcagtcagaggatgagacaggcagagagaagagagagaagggatgagagagggaggggaaggacagagagaaggagaaagacaaggaggatagagagagaggggttgaaacagtgagagaaagagagaagggagagagagagaaggtggaaggtgaggagagagagagagagagatggagatgggaggatggagtcatggagagaagttgatttgggcccagggggagaaaaggaaa

SEQ ID NO: 458075 - DNA, 643 bp, Homo sapiens
tgttgctaattcacactgctttaagcactctgtgtgtgttaattcactgaatctccatgccaattctataagataaatactattttaaaattcagattaaaatttaggacaaaacccagaaatattacataattttcccatgatcccaaggacaaaacccagaaatattacataattttcccatgatcccaaagtcagtaagtagcaaaggyaagatgtatatctaggccctctacctccagagcccacatgtccaaccactgggctgcttttacacctcaacacatgcacgactatttcactctgcatcatcctaatgaatgttgcattaaaccctgtgtgaagaactgtcctgtcgcttacttttttttttttaaatatgaactatgtaattagcttaactagttcccaccccaaaaaatccctttggtattttgatttacataaacatgtaaatttgttcagggagaatggactacttcatagtattgaatatgttaatatttctatttctaaatttattttaaaatcaggattttttttcctcagtgtcaagtttcatttgatatactttctttatgtgagacaaatttggatccaaaaagtgtttactaatttacattcccagcaactgtgtatgagt

SEQ ID NO: 458076 - DNA, 586 bp, Homo sapiens
tcttcttcactttatttcattaattttttatagttcttattgtaggtatctttcacctccttggttaaatttcttcctaatattttgtagctattataaatgggatagccttcctgatttctcttccagatatttcactattggtgtatagaaatgctatcaatttttgtatgttgattttgtatcctgcaactttactaaattcacatgagaaaacagtattaaagttcctgcaaaaaataaaaacagaactaccwtatgacccccaaaatttactactgggtatacagcaaaaggaattgaaattactgtgtcaaagagctatgcttatgcgtatgtttattgcagcactattctcaatagctaagagacaaaatcaacataaatgtccattgacagatgaatgcataaagaaaacatggtatacacacaatagaatacaattataaataagaatgaagtcctgtcatttgtggcaacatagatgaacctggaggacataacgttaagtgaaataggccaggcacaaaaagacaaataccacatgatctcgcttatatgtgaaatctaaaaagttgaactcgta

SEQ ID NO: 458077 - DNA, 586 bp, Homo sapiens
tcttcttcactttatttcattaattttttatagttcttattgtaggtatctttcacctccttggttaaatttcttcctaatattttgtagctattataaatgggatagccttcctgatttctcttccagatatttcactattggtgtatagaaatgctatcaatttttgtatgttgattttgtatcctgcaactttactaaattcacatgagaaaacagtattaaagttcctgcaaaaaataaaaacagaactaccttatgacccccaaaatttactactgggtatasagcaaaaggaattgaaattactgtgtcaaagagctatgcttatgcgtatgtttattgcagcactattctcaatagctaagagacaaaatcaacataaatgtccattgacagatgaatgcataaagaaaacatggtatacacacaatagaatacaattataaataagaatgaagtcctgtcatttgtggcaacatagatgaacctggaggacataacgttaagtgaaataggccaggcacaaaaagacaaataccacatgatctcgcttatatgtgaaatctaaaaagttgaactcgta

SEQ ID NO: 458078 - DNA, 586 bp, Homo sapiens
tcttcttcactttatttcattaattttttatagttcttattgtaggtatctttcacctccttggttaaatttcttcctaatattttgtagctattataaatgggatagccttcctgatttctcttccagatatttcactattggtgtatagaaatgctatcaatttttgtatgttgattttgtatcctgcaactttactaaattcacatgagaaaacagtattaaagttcctgcaaaaaataaaaacagaactaccttatgacccccaaaatttactactgggtatacagcaaaaggaattgaaattactgtgtcaaagagctatgcttatgcgtatgtttattgcagcactattctcaatagctaagagacaaaatcaacataaatgtccattgacagatgaatgcataaagaaaacatggtatacacacaatagaatacaattataaataagaatgaagtcctgtcatttgtggcaacatagatraacctggaggacataacgttaagtgaaataggccaggcacaaaaagacaaataccacatgatctcgcttatatgtgaaatctaaaaagttgaactcgta

SEQ ID NO: 458079 - DNA, 558 bp, Homo sapiens
ttcctctgcttctactttctaaaaaagattgtgaaaaattagtattctttcctttttaaatatttggtagaatttaccacggtacctatctggttctggggcttcctgtttgggaaaggttaagtactgactcaatttccttaatctatataatcatattcagtttgactatttcttcttgtctgaactttgacatattatgtcttttatgaaagtggtccatttaatctaagttatcgaatttgtgggtatagagttgagtgttcctttattattcttttaacgtccatggaataagtattgatgattmctctcttatttctgatattgatcatttgtgttatctctattttttatttggttagcctggctggaggcttataaatcttattgaacttttcacagaactagctcttggtcttttttttttttctgttttccttttgcaatttcattgatttctggtgtaattattatccttattttgcttgccatacgcccaattttctctcctttctctagctccctaatatgagtgctgagattaatttcatgttt

SEQ ID NO: 458080 - DNA, 558 bp, Homo sapiens
cttataaatcttattgaacttttcacagaactagctcttggtcttttttttttttctgttttccttttgcaatttcattgatttctggtgtaattattatccttattttgcttgccatacgcccaattttctctcctttctctagctccctaatatgagtgctgagattaatttcatgtttttagatcttcctttttaatatatgtatataatgctatatattttcctctaagcagtgtttttgctaattcccacacacttttgataagctgtattttcattttcatttagttcaaaatatttttaatcttccttgtagcttctcctttactcatggtttatttaraagtgtactttttaatttccaaatatttggaggttttcaactatctttcattattgatttctagtttaatttcattgtagtctgagaacacatacaagtaatttttactgttttaaatgtgtgaaggtgtgttttattgcccagaatagggtcttctttggtgaaaacagaagttccatatgagctcgaggagtatattctgtagtaggttg

SEQ ID NO: 458081 - DNA, 577 bp, Homo sapiens
gccatgcattgcaatttttcattgaaagccagcacataccaggtaataaaaactaaaataaacacaccttgaatgtaaggatttatgttaatctgctaagatttgggctgtgagatctttatctgcagctgtaggtgccagagcatcttagtttttgtcttctcttgactttggcctttcctaagtattcctccttagagcgagtctatctcacagctctttccactaagattcactcttaccacactagagcactgatggtaaggtgtggggaaaagggagcattctgcaatcaactgactgtcactcttttagtgggcctgtgattctcggctgtgaatgtcacagttcaaagtggtgcagcagacctctatrtccttttctaactacactacttccaatctatttccttcaaggcctgacttttattgacctcacatctccatcttccctgccaacatcaccagcactttaagtgaaattgaaaggctgaaagagacttcagtggtgaaatttcatttagactttgttatggagaagcctctttgtgtattttacaaagattattctttctttt

SEQ ID NO: 458082 - DNA, 577 bp, Homo sapiens
gccatgcattgcaatttttcattgaaagccagcacataccaggtaataaaaactaaaataaacacaccttgaatgtaaggatttatgttaatctgctaagatttgggctgtgagatctttatctgcagctgtaggtgccagagcatcttagtttttgtcttctcttgactttggcctttcctaagtattcctccttagagcgagtctatctcacagctctttccactaagattcactcttaccacactagagcactgatggtaaggtgtggggaaaagggagcattctgcaatcaactgactgtcactcttttagtgggcctgtgattctcggctgtgaatgtcacagttcaaagtggtgcagcagacctctatatccttttctaactacactacttccaatctatttccttcaaggcctgacttttattgacctcacatctccatcttccctgccaacatcaccagcactttaagtgaaattgaaaggctgaaagagacttcagtggtgaaatttcatttagmctttgttatggagaagcctctttgtgtattttacaaagattattctttctttt

SEQ ID NO: 458083 - DNA, 560 bp, Homo sapiens
accactctggcttgacagtcttggaagatgcagtccttcaactgtctccacacacaattctaggagtgtccaagatatatctcaggtgtgtctgagtttgactaatccctggtagctgtctttttttttttccttattctctgtgttgctgaggctatgtcaatgatgattgatgatcattcccaccctaagagctgattagagcactcatcaccataatgaatcatgaaggtgctgatttcaccataatgcagacagatcatcaagaagatcatcatgcaacaaaaactacagataacttctctagtttccaatatcaatgctttccccaaatgaaggaaggtgcaaacaaagcagtccatttagattttactcactcttttattccaaggccctctccagtagactgccatgagtgctatagaagcgtgctggcaaaccatcttcaaaatatacctcytgtgttgaaaacaccccttcccttgaaagtagggccttgtcatctggagatcatataatatgtcaatctattcccttagaatgaaaaagccactcaaagt

SEQ ID NO: 458084 - DNA, 617 bp, Homo sapiens
acctaattactacgtaagtgtcaaaacttcactgtgtaccccgtaaatatgtacaattgtatgtcgattagaaaaaataaaagaaaaaagaacaaaaaaaatcagagtatttttaggtaatgccagacatgtaaagaagtgatgtaacatatttatttttaaatgcaaatrttagcagaacattgaaaattacatgtttacaactatttaaatttacaataggaaagttgaaatgtcaacttggaatgaggggcacagattttttcaaaatgctttttaagaaacatgtggtttcaaaaaagttggaaaactactcccttaaaggtaacattaatatttaaaggaggaccaatcaaccaatagatttctgagaaacacattcaagtatcccaatcattgactggcaaaccactttcttataacatttattttacttgtaattgttcattcattgttcatatacctagggctccaagaagttgggaaccctgggttacctgttccccactcaagagcccctgtatttagcacagtgtctccattaaaagcactcaattgtgaagtgcttttattttctattgtatttcagcaaataaaatagtaagtgttctactttc

SEQ ID NO: 458085 - DNA, 623 bp, Homo sapiens
gttagattttaaatggggcacgactcacattcataatgcccattgaataaatgcctattaggtacagtttaatggcttaatgcttgattcatgttttttttttcctctctgtaatttctattgcacatttagggcaattagaaaatttggttttctttcttgtatatacatataatctctgtattcagaaaactcagcacagaaaaataacaatataaaggtaaaaattatgcctgtcacgtaacaaacctgcacatgtatcccctgcatctaaaagttaaaactgtttttttaattaaaaaggttaaaaaataacccccccaaaaaagagggccrcatctctgatagtaacggtactcaaaattttggttaaaatcatttggttaacaacgtaaactcttgtgtagcattagtgagtaacaaatcataattattatcatgtgcctcagaagattattcctccaacactttagaaaggtcacagcatttcttgtctaaaaaagtccaaactcaaattggcaaactgcgttgataaattagtggagaaaagtttccactgagaataaattaaaagcagccttgaaaatattcaattatatattcctcttatagcaagcaacagt

SEQ ID NO: 458086 - DNA, 623 bp, Homo sapiens
gttagattttaaatggggcacgactcacattcataatgcccattgaataaatgcctattaggtacagtttaatggcttaatgcttgattcatgttttttttttcctctctgtaatttctattgcacatttagggcaattagaaaatttggttttctttcttgtatatacatataatctctgtattcagaaaactcagcacagaaaaataacaatataaaggtaaaaattatgcctgtcacgtaacaaacctgcacatgtatcccctgcatctaaaagttaaaactgtttttttaattaaaaaggttaaaaaataacccccccaaaaaagagggccgcatctctgatagtaacggtactcaaaattttggttaaawtcatttggttaacaacgtaaactcttgtgtagcattagtgagtaacaaatcataattattatcatgtgcctcagaagattattcctccaacactttagaaaggtcacagcatttcttgtctaaaaaagtccaaactcaaattggcaaactgcgttgataaattagtggagaaaagtttccactgagaataaattaaaagcagccttgaaaatattcaattatatattcctcttatagcaagcaacagt

SEQ ID NO: 458087 - DNA, 624 bp, Homo sapiens
aggcacttagaatataaaattagcaggacataatcactgatattatttgagaagaattacagatctatgtcataagaactgagacagggactaggagtgaagaacatttggtagagtgatagagactgggaaaagagttccatcaggcagatttgaatgctaaaagctaaaagaaaccaacaccacccagaaagaggtgagccatgcaggaaacacacacagccgtcactctgcrgagtatctgcttagaaagagaaataaagtaaattacagcctatcatttggtttcagcaaacatggcagagaactaagaaatgtctgctaataatattaatcatccacactcaaaattggaacagaggctaatataaaatgaggttgaaataaaaaataataggaactgcaccagaataaaagatatttctctgagatatatctgccaaagtgtgtcaacaactccgtagtgaagaaatattagatgctaatactagtaacattttgcacatcatttcaagtttgctgaatttcctatttgtgcatgcacgtgtgtatccatgctctagttacctacagaatgtatgattgaaaattcaagtaatattttgttatctatcagtttttaca

SEQ ID NO: 458088 - DNA, 581 bp, Homo sapiens
agttttcaatcgatgatggctctgaaaaggtaacatgcagatgtttaataaggatttttttttcaggttcrtggtaaagtgttagtttattttcttaacctaacgttttaacatctacttaggctgtcttccctttatcactgtaaccttggtaacttcacaaatcaaaggaactggaagggagtaatggttttttatcctatgttgtatcttagaactaatttgcagtcatttaaaaagaaggactagtccacctctaaagaatcctgatgtgactcatcactgattcatttctttttacccagcaggatgcaccaaatagagagtaaatatcagcttcatgaatgaataatgaaaatggagagataactgaatgaatcatactactcatcattagaagagttatattcaccagaaacccactaagaccccacgtaagataaatgtcacattctgacaaaagcaccaagaaatagaagaagaaaaacaatgtatgtgaataaagtgaacaaccagaaactaaataagtatcgtctagggtgtggtggccagaatactactttccccaagatgcccaaggt

SEQ ID NO: 458089 - DNA, 542 bp, Homo sapiens
acgtttgctctcatgtactgtactttggagccattataacataattgttagagataaatatttgtcccccaagtgctaatttattgatggactcctaacttgctctcatcatgacaaagcaccagctcaatcactgaatgaatatttatctatgatgaatattcatttaatccatgtctttacaaggagtttcaccactgrcaaggcaataaacaagcttttttatgtccgttttattctgggttcacttgctctctccattgctatggctttagcaaggtaaattctgtatgtttgtggcttaatctgggaaatgttagtctaatctgtgtcctacattagctctcttaaacacaatatataacctcaagagcagtgattaattagttcacagatttgccatctgcttcactcaagcccaacaaggtgagaagagacaaatttggactaaagaaaatgaatgttaatgaggttgtgattctaccctttgaaacaaaaacagagggtaagccttccatatgagtaagtggtgtgctggtaaa

SEQ ID NO: 458090 - DNA, 570 bp, Homo sapiens
ttgccatacttaaattagaaaaaattgatttcaaaataaaaactacaaaaaagaggcaaagaaggtaattatataatgataatggggtcaatttagcaagagtatataacacttgtaaatatatatgtacctaaccctggagtgcttatatctataaaacaagtattattcaagcaaaagagagagataaacctcaatacaataatggttggagggtcaataccccactttcagcattggacagatcatccagatagaaaatcatcaaataaatgtcagacttaatctgctctatagccccaatggacctgatggatatttagacaacatttcatccaatggctgcagaatatacatacttctcctcatcgcataatttattctcaatgaaagaccatgttagcccacaaaacaagtctttaaaatgtttttcaaatagaaagcatatcaactgtattctctgaccacagtggaataaaattagaaatcagtaataagaattttggaagctatacaaagacatggaaattacgmaatatactactgaaaaccagaaatcaattttaaaaa

SEQ ID NO: 458091 - DNA, 586 bp, Homo sapiens
aactattctgaaacacagaggaagargtaatactttcaaactcattctaaaaagccagtattaccctaataccaaaaccagatgaagacacatcaaaaaaaaaaaaacaaaaaactacagtccgatacccctgatgaacatagatgtaaaatccataacaaaaatactaccaaactgaattcaataacacattaaaaagattattaatcatgaccaagtgggatttatcccagggatgcaaggatggttcaacatatgcaaattaattaatgtgatacatcataacagaatgaaggacaaaagccatgtgatcatttcaattaatgctgaaagaacatttgataaaattaaacatcccttcataataaaaaccctcagaaaactgggagtagaaaaaatatacctcacacaataaaagtcatatgtgagagacacacagctaatatcatactcaatggggaagaactgaaagcctttccactaatatttggaacatggcaagcatgcccactgtcagcactgttatccaatatagtaatggaagtctagcaagagtaacaagacaagagaaaaacataaaaggcat

SEQ ID NO: 458092 - DNA, 586 bp, Homo sapiens
aactattctgaaacacagaggaagaggtaatacttycaaactcattctaaaaagccagtattaccctaataccaaaaccagatgaagacacatcaaaaaaaaaaaaacaaaaaactacagtccgatacccctgatgaacatagatgtaaaatccataacaaaaatactaccaaactgaattcaataacacattaaaaagattattaatcatgaccaagtgggatttatcccagggatgcaaggatggttcaacatatgcaaattaattaatgtgatacatcataacagaatgaaggacaaaagccatgtgatcatttcaattaatgctgaaagaacatttgataaaattaaacatcccttcataataaaaaccctcagaaaactgggagtagaaaaaatatacctcacacaataaaagtcatatgtgagagacacacagctaatatcatactcaatggggaagaactgaaagcctttccactaatatttggaacatggcaagcatgcccactgtcagcactgttatccaatatagtaatggaagtctagcaagagtaacaagacaagagaaaaacataaaaggcat

SEQ ID NO: 458093 - DNA, 575 bp, Homo sapiens
aattagataggaagaagtcatattatccttgtttgtagaagatataatcttgtatttagaataacctaaagattcagtaaagttgcaggatacaaaatcaacacaaaaaaaccagtaacatctctatataccaacagtaaacaatatgaaaatgaaatcaagaaagtaatcccatttacaatatctacacataaaatacctagtaattaactaaagaagtgaattatctctataataaaaactataaaacattaataaaggaaattgaaaaggatgcataaaaatggaaagatattccrtgttcatggattggaagaatcaatactgttaaaatgttcatattaccctcaaagcaatctacagattcaatgtagtccccataaaataccaatgatattcttcacagaaacagaaaaaaaaaatcctaaaatttatatggaaccacgaagaccaagaatagccaaaactatcctgagtaaaaagaacaaaattagaggaatcacattatctgacttcaaattattctgcaaagctatagggaccaaaacagcatgacactgtcataaatacagata

SEQ ID NO: 458094 - DNA, 586 bp, Homo sapiens
ggatgaaatatttaaatctaaaacctcaagctataaaactattaaaagaaaacactgggtaagccctccagaacactggactggacaaggatctcttgagtaataccctacaagcacagatgcttgtagataccctaaaacatcaaagcaaaaatgaacaaataggatcatattatgttaagaaccttctgcacagcaaaggaaacaatgaaagtgaagagataacccacagaatatgagaaaatatttgtaaattatccatctgacaagagataaataaccagaataaagagttcaaacaactctatagggaaaacaatctaataatatgattttaagatgggtaaaaatccgaatatacatttctaaaaagaaggcatacacgtggcaaacaggtatataaaaagatgttcagtatcacttattatcagaaaaatacaaactaaaactgtaatgagatttcatctcatcccagttaaaatggcttgtacctaaaaaacaggcagtaacaaaygctagcaaggatgtggagaaaagggaaccctcaggcactgttggtgggaatgtacattagtacaaccgctat

SEQ ID NO: 458095 - DNA, 559 bp, Homo sapiens
tggactcccatgtttatttccatgctattcacaatagtcaagatttggaagcaacctaagtgtccattgactcatgaatgaataaagaaaatgtggtacatacacacaatagagtactattcagccataaaaaaagactgagatcctgycattaccaacaacatggatggaactggagatcattctcttaggtgaaataaggcaggcaaacatcatatgttttctttatttatttttattatactttaagttctagggtacaaaaaaatcacttatttttcacttacttacgttttcacttatttatgtttatttttcacttatttatgttttcacttatttataggagataaaaattaaaacaattgaactcctggagatagagagtagaatgatagttaccagagtgtgggatgggtagttggggggtggagttgtgatgggtaatgggtataaaaatataattaaataaaataaataagacctagtattttatagcacaacagggtgactacagtcaacaataatttagtgtacatttaaaaataactaaaagggt

SEQ ID NO: 458096 - DNA, 674 bp, Homo sapiens
aaataaatggaaagatatcctctgttcataaatgggaaaaaataatattgttaaaatacccatactacccaaagcgatttacagatttgatataactcctatcaaaattctagtggcattttttcacagaaataaaagaaaataactctaaaatatgcatggaatcacaaaagacctcaaataaccaaaataatcttgagaaagaacaaagctagaggcaatacacttcctaatttcaaactacattacaaaggtatagtatcaaaacaatatggtaatggcataaaaataaacacagactaacagaacagagtagagatcccaaaaatatacccaggcatataaggtgtactaatttttgacaagggcaccatgaatacacaatggagaaagataatctttttattaaatggtkgtgggaagattagatatacacacacatacgaataaaactggacccttttcttatatcatacacaaaaattaatcagaaatggattaaagccttaaatgtaagacctgaaaccacaaaattcttggaaggaaccaaggaaagagctcacacaactcaacagaaaaatatacaaaataacataattttgttctgaatgttgtccaaaattcatgtgttgaaatttaatcacaaatataataatataaacaggttggacctt

SEQ ID NO: 458097 - DNA, 674 bp, Homo sapiens
aaataaatggaaagatatcctctgttcataaatgggaaaaaataatattgttaaaatacccatactacccaaagcgatttacagatttgatataactcctatcaaaattctagtggcattttttcacagaaataaaagaaaataactctaaaatatgcatggaatcacaaaagacctcaaataaccaaaataatcttgagaaagaacaaagctagaggcaatacacttcctaatttcaaactacattacaaaggtatagtatcaaaacaatatggtaatggcataaaaataaacacagactaacagaacagagtagagatcccaaaaatatacccaggcatataaggtgtactaatttttgacaagggcaccatgaatacacaatggagaaagataatctttttattaaatggtggtgggaagaytagatatacacacacatacgaataaaactggacccttttcttatatcatacacaaaaattaatcagaaatggattaaagccttaaatgtaagacctgaaaccacaaaattcttggaaggaaccaaggaaagagctcacacaactcaacagaaaaatatacaaaataacataattttgttctgaatgttgtccaaaattcatgtgttgaaatttaatcacaaatataataatataaacaggttggacctt

SEQ ID NO: 458098 - DNA, 640 bp, Homo sapiens
ctgctcccatatttcttcttagtcactcttcctctcaagggcaactagcttcaccaccagtcaccgtagatttattttccctgtttttgtgtttarttttaaaaatatatacaagatatacttttttctacctacttctttccctcgatcttacatttctgagacacattagtaggagaaggtattgcaatagttgttcattatcagtgctgtaaaatatttttttgtatgaatagatcaaaacttatttgcccattttactgtttatgggaagttggataattttcaacttgaatggtgccactaaaaacataacatgatttttggtgaacatgaacatatttatcttgtatatatacaaataaggagctgccaggtcataggatgtgcatatattcagctgtaggaaagggagcaaaacagttttccaacatgactatgacaatttacaacactgtatgagagttctattttttcacatcttttctaacatttggtatattcttttttccattctgttttagctcattgcagttttaatctttattttcctaatggctgatgaagtcacatatcttttcatatattaattggccatgtggatccaattaatggatacaaatccattatacaaacatac

SEQ ID NO: 458099 - DNA, 607 bp, Homo sapiens
ggtacagttaatgaacatttgccaaaagcttaaaaattcttaaagataatttatggctccaaaagcccttttattttattctatgatagtaaactgatctagtttgtctgtttgcactgagaaatgaaaggacataaagaatggaagcatataaaagacatcatgaatgctgcaaattttggaagcatttagtgttcagattttagagatattcattgtaacacaaattttggaagcatgtttaaagcaaggatgatttctgaattatggaacaatttcctcgaattacacctcagatgctagcacaaaagttacctattttcttacatgaagatttttgaaaccatattgaataaagaagctgcttctccctgggctcatttaatagttaatttaattctaaacatgcacatcagtgcagtgcttttattaaaaaataataaccttcagtgagggaatcagatggttcttttctaatttaacactataaaatctgtaaattacctgataaagtttaagtgcatatacatatatcttaatatatayatcctatatatctgatatataaggcccacatatatatacttaaaatgcctttattaaaatt

SEQ ID NO: 458100 - DNA, 388 bp, Homo sapiens
tggtagaagcttctcattgaacagatgaataaaggctcagagggtaatggctaggcactaagcaagtaaatggcatagttggcactggaatccaattatcctaactttctgtttaaggtyctttgctagggacggtgtgtaaaacactgaggtgtgaaatacggagggagttgtcttttgtcgccctcactttgagtcattgcctccttacctcctatccagattatttaaaaactgtaggtcctttctcctggacttccattaggtgacatttagcatggtattctaggggtagctgaggttttcaaggacttctgcactacttgctgttcctaatggttaggtttctcttttaaaaaagtcagaagatatgttaattgtcaaaagg

SEQ ID NO: 458101 - DNA, 529 bp, Homo sapiens
atctgaacgtatcaatctgcagaattcttgggggtgggtgtggtatgcagagaagaagcaagggccagaagtcagggaagaaacatgaagagcgcctggctggtcccaacttccctctggtcacactccctcaccctttgccgcctcatccctgctacctatccttgttgaggaagaagagatgggagagaagagagtagaaagagagaaggaagtgaaaagagtgttaaagaaagacataaagaaaatggaaaggaacttcaaagggtctttgcattgttctgaaggtgagaaggtaaaattaaacctccaaaagaaaactttkcactgttaacaacaacaagttttataatacttgctttccttgaagaaaagaaaataggcagagggaaatgagtggatatttcaaggaatgttatataatgtcataatgtaatgagggtttgtgtgctctatgatgctatgacaatttgcaagattaatccattcagtctcccatttttccaggcagggattctcatcaggaatt

SEQ ID NO: 458102 - DNA, 565 bp, Homo sapiens
tcatgcagccgaggcattctggtgagaaccaccgacatcgggcctggaggccccagcagcgtctcctcactcacatccctactgagcgacccaaggatcctcggaagcaaaaagaccctcacggtcacatgaaggtcactggcagtccattctagactcccaggctccagacccctggaactgtacactctgggaaagcttctctgtccctctcagtcagtccctcccgtcctgttattcgggtcagtgcttctgatcccaggagagacattatttttattttccaagccattattcacagtaagccctgacttcagaatgacttttgagacataacaatttaagatttagaacaatattgatagagtctatacaatgatatttccaggtcccattgtggaaacaatgtttccaccatttccactctaaatatttcacttttggaacaycactccaacaagaaaacattaggctcgttgtgtgaataggtgcgcctgaacacacttggacaatctgagtatctctcctcagggactccacgggccaacagggtgtgatttgggag

SEQ ID NO: 458103 - DNA, 633 bp, Homo sapiens
gctcatttgatgcagaaatccacttgcctgtattcattattttggacactccttgcagcaaccaatccaagctccgtcttcttccgtcagttgacttaataccagaacttcttcccaaacagactgagaagctaagtgcccttgcttttgagttggagcgagcaagggccaatcctcatatcatagggccagaagccacaatacaaggacatcatcatttccaatgagcacttggtcctggaattctcagcactaatcaagtggaacaaagaaggccccttccctttcagtgcctccatgagtggagacttatctctacaaagtccaaagtatggagaaataagsgtaggtcattttattatgacattctttgtactgtgcccttttggaaggatgagtgattaggagttgttagaacttggcctgacaggtaggttggattaagggagccatcactgtccaaaagttttgaggacactcagccaagaagggacattttatccttagggccaccctcaggtaggcgttgggatgaagaaataagggagtttagaaagagatttttcccaggggttcagaactcatcggggttctgctactaactgaggctgcccactcaacctcaggcagcca

SEQ ID NO: 458104 - DNA, 563 bp, Homo sapiens
caggtttatggagccaaaaaggcataggatccaccctgcctgccattttctcaccctacaaagcagagtcaaatttgatcttgtttaaaaaacacttttgacagaattattgctcctattgccaagaaagaagccgtgagaatgtctgattaacttcttcccccattgstctccccagcagccattcccctccactccagtgttgtttcacagctcactgatgcactgttcactttctggccataccttttctctttccttttgctgtatctttaggttcattgatttttttttcttctgcagtgtctaatctgctgttaatcccatccagcatatttttaatctcagacattgtatgttttatctttagaagttcaggtgagtcttttgaatatcttccatgtctctactaatagaaaatatatttttcttctatcaccttaaatataaggaatacagttataaaaactattttaatgtccctgtctactaattgaagagtctcatctgcctcacttccagatttctttctactgattgacttttctcccattatgagttgc

SEQ ID NO: 458105 - DNA, 545 bp, Homo sapiens
ttgcaaacatcactgaattaagaatcagaatgcctgggcagggtgcagtggctcacgtctgtaattctagcacttcgggaggccaaggtgggaggatcacttgaacccaggagttcgaagccagcctgggcaatgtaagcagaccccgtttytacaaaaaaatttaaaaatatatcagggcatagttgggcactcctgcaatcccagctacacaagaggctgaggtgggaggattgcttgcactaaggtggttgaggttgcagtgagccatgatcacaccaatgtactccagcctgggcaacaaactgagaccctgtctaagaaaaaaaaaaaaaagaatgaggctgcctggatttgatctctgccataatcactggcatcttatgtgactgtgagcaagaaaaaaagaagtaatgatagtcatatctcagagcacaatagtgtacctgaaaccttactgtaaatgcaaaagtgtcgtgcactgggggaacctttttcatgaaatcctatgtccaaacttgatacatggcccctcttgcagggga

SEQ ID NO: 458106 - DNA, 545 bp, Homo sapiens
ttgcaaacatcactgaattaagaatcagaatgcctgggcagggtgcagtggctcacgtctgtaattctagcacttcgggaggccaaggtgggaggatcacttgaacccaggagttcgaagccagcctgggcaatgtaagcagaccccgtttctacaaaaaaatttaaaaatatatcagggcatagttgggcactcctgcaatcccagctacacaagaggctgaggtgggaggattgcttgcactaaggtggttgaggttgcagtgagccatgatcacaccaatgtactccagcctgggcaacaaactgagaccctgtctaagaaaaaaaaaaaaaagaatgaggctgcctggatttgatctctgccataatcactggcawcttatgtgactgtgagcaagaaaaaaagaagtaatgatagtcatatctcagagcacaatagtgtacctgaaaccttactgtaaatgcaaaagtgtcgtgcactgggggaacctttttcatgaaatcctatgtccaaacttgatacatggcccctcttgcagggga

SEQ ID NO: 458107 - DNA, 510 bp, Homo sapiens
acacaggccaactcctccattgtacagatgatgacactgaggcctggagctttgatgacagttcaaggtcactcttctctcacggtagggcaagaattaaaatacctctgctgccttgtagtctaaattactttctacttcccaaagattcaggaatctgtgacctaatgtcactgctatttttgtactaaagataatacatgccagagacaaatgtctgaaaattccatatttgggtcaacagttttcatccaattgtcccattctcctctgcctacttaataatggtttttctatttgcttccatgacccattcacccttggatattttttactgccttttattctcattccatcrtaaaagtatctcccatccatttctcaatgtgtcttctgtcttaatgtgtctgacagcatctattcctggccatcctgtgacctgagaggccccagtgcctcctctagacagtagcatgcaccaggagggtatgtgacatccacttttatagt

SEQ ID NO: 458108 - DNA, 613 bp, Homo sapiens
ttggcattgaatgtgaagagttctcaggacaacccataacaaaggctgagagacaggaatggaaacatggaaggctctggggaactccttccccaaccctttaacaataataatagctcctgtttattcagggtttactctatgagctttgcatggataatctcataatccccacaagaagagaggttcattgtgatttccattttaaaggtgaagaagccaagtctcagagagtagtctgcggtaacttttctagcaagaggaggaattggtatctgaacccaggcagccagattctggggctggatgctttgaataaccacaccaccccctttgtgggtcctccccatcacctcctctccatgttcgtctcttctaaagtgtgctgcttgccttggagaagcaatgtccagtgtatggtgaaacctggtgcctgcttctccatrcttcccaaacgctgacacttggggcatcccagccccggggagctgatcctgtcttgctcaggctgacatcagagggctgagaaagaggtaagccacatattatgacaggcatccaaagaagggcagaattagagtcaagttctcttttgtttgtttgtttttaaaac

SEQ ID NO: 458109 - DNA, 648 bp, Homo sapiens
ggtgcggtcagaagggatatggaaatctctgaacctttcatagcattttgcttgctaagaatttcaaagtgctctaaaaaacaaagtctcttaataaagaaaaaacagaatttttcctggaatatgcagtgtagggatgaatcttctctatgagaaagatcataaatgaaacatagtaaggactggacttccaggtgtgccacgtgtgtactcttgttgagcaaatagctcatgccttcgtttctttatttactaaataaagttgttatcacctcaccagctcattgctgtttcttcttataggcaaaaaaataaaaataaaaaagattgttatagctttgtagaaagtaaattgtgttgaaaatctcagaagtaagcagcatgtaaaaagatactgttaccctgacacatgcagccagacctagcttgttctaaggtcagaaccayggacactatcaaagaaaatgactatgacccaaccaaaattgcctttggaccccacattacccctataaagggcacagactcatagcttccattcagaaaagttacaatttcacacaatgatttgcctaaggaaaccccatggatgggatagaggaaatataactaggtaaactaatgaatcctgccatatagataccaggc

SEQ ID NO: 458110 - DNA, 630 bp, Homo sapiens
tttttgtagacagtaattttctggaagagagaagattgactgtgaagaaagaatttgcccctaaacctttctaccaaggtgcccaccaaggttgttcactcccctccccaaacacatttctaagttgatgtcttagcagaggaaaaaagcttttgattttcatgacttacatgaaatttaacaaatgtctctgcctccagactgtgcccatctctgacctgactgtgcatgtggctggttctggctgtgtggtgaggagtggggttcaccaaggaacackcatctccactgccctggagacggactacttggaagagtttatttgcccacatggctgagttgcctggtctctcttcttcttcctcgtctcctcacatgctttctttttattttaattgataattgatcatcccttacctgccaatcagcagaaacattttatgattattccaaccacaacctcacagcaccaagtggtttcttttaatgaattccttcaatgtgaatcttttatgtccaggcaaagtcggggacagaaccccacccgaacttggagatattagccaaggaattccacagggtgtgttcgactaaagggttgtattacagccttctgtgaacttcattagt

SEQ ID NO: 458111 - DNA, 574 bp, Homo sapiens
taaggcatgactgcagcactgcactccagcttgggcaacagaatgagaccctgtctctaaaattaatttwaaaaaaaaatgctaagactttcgatccaagcagagtgttttagagcgcctggccctgaagtgaatttggtaaccaggcaaaggcaaacccctacctagagccatggaaagttattaaggttaaggccaagattatttttagcctcagattttaaaatattcgtcaagattattattagcctttaagcttagtagcctgaggccaaggttgaggtgggagggtatgtgactgacagagatcatcaaccatgtgaggtaggttaaggcttagcctttggaatcagactcactcagattacagtcctgactcaactttgagcaaatcacctggcctctctgagagcagtttcctcatctgcagaatagcgattgtaattgcactgacctctcagtatgcgtgtgatgctcctgtgagattatgtttgtgaggttctgagcacagctccctgagaatcctaatgctcattcagtgaggactgaaggatatgatgatgaaacacgcatg

SEQ ID NO: 458112 - DNA, 572 bp, Homo sapiens
gtcatccctgaacctgaaatgagcctttgtcatccctgaaactgaaatgacaagggcaggtagtgaatcttttctaycagaatcctgagacacaggtgggtctcccaggttgggggtggaggatctacagcctttgcatgagtcactaatacccttcaacccagctccttccatcttctgacttcctgcttataaatgccattgaagaaaatcatttcaaggcaagggaacatattgaagaagcccccagagttcagccttcatgggcacagagcaaggggcagtgggtcagagggcaaatggaaaatgcccagcacaggtatcaattaccacagggatgaagctgttcattgctacaggacagagatccagggtgactggggttgcagattgagtcaagagaatctacagatgcagagctgacctgtaggtttagttatcatggttacagacatttaaggagcatggggttaagatacttgttgctatagctgaaatagggggcacaattcatggtgctgagattccacaggaccctgaggtatgtttggaaggctgagaaactcaaatgc

SEQ ID NO: 458113 - DNA, 572 bp, Homo sapiens
gtcatccctgaacctgaaatgagcctttgtcatccctgaaactgaaatgacaagggcaggtagtgaatcttttctaccagaatcctgagacacaggtgggtctcccaggttgggggtggaggatctacagcctttgcatgagtcactaatacccttcaacccagctccttccatcttctgacttcctgcttataaatgccattgaagaaaatcatttcaaggcaagggaacatattgaagaagcccccagagttcagccttcatgggcacagagcaaggggcagtgggtcagagggcaaatggaaaatgcccagcacaggtatcaattaccacagggatgaagctgttcattgctacaggacagagatccagggtgactggggttgcagattgagtcaagagaatctayagatgcagagctgacctgtaggtttagttatcatggttacagacatttaaggagcatggggttaagatacttgttgctatagctgaaatagggggcacaattcatggtgctgagattccacaggaccctgaggtatgtttggaaggctgagaaactcaaatgc

SEQ ID NO: 458114 - DNA, 581 bp, Homo sapiens
cactcaactcacacagagcctcagaatggccttattgcaaaggaatgaactcggtcatcgtgtctgtgttcgtttcctggggctgccattacaaatgactgcaaactgggtggcttcaaacaacaggaatttcttgtctcccagctctggaaggcagaagtctgcaaccaaggtgtgagcagacccacgctctctctgaaggcttcaggggagaatccacttctgcctttctcttagcttccggtggttgctggcaatccctggcctatagacacatcacactaacctctaccacctggcattcttccctgtgagctttcatggcgtcttccctycgtgcatgtctgtctgtgtcttctattctaatgtggacaccagtcctattggactagagctcaccctgatggcctcatcttagcttgattacatctcacaaagactctatctctggatatcattgggggttaggatttcaacataccgtttgagggggacacaattcaacccatgacaatgtccaaacagcctcatcttctccatcccttgccccttaactcttagtgaggacccaaggccacagc

SEQ ID NO: 458115 - DNA, 465 bp, Homo sapiens
caccaaatatttattgcttttagatatcttgcaaattcctattctaagctcatggagagaaatgtgtaagctctttcctttcttgcaggtttccattggaaggagaagactgtctttagcccactgcatcccctcaagccatcccaagctttctctgtgccagggactggacgcacgctaaaatacgaacctgtgtggacttctttcttaggagcctttgcaccagcacagttgagttgttacaccattcacttctgtctctaacttaacaacccaccttgggaggtttaactcaatatatctttgttactatttataaartagtgtgtctgttccccatttcctcttcctaaatgcattgacttgctcttctactcttatttcaaaacataaaaggagagctctcaagaagctgttggctcctgcatcccatcagtcagcaccaaaaccttactaagaaagatg

SEQ ID NO: 458116 - DNA, 571 bp, Homo sapiens
ccctactctactgttgaccattagaaattatttattctaactgtatgtctgtacccattaacccatcttccttcctccccactcccacccacacatttttcccaggctctggtatctgtcattttattctctaccttcgcgagatcaacttttttaactcccacatacgagtgaaaacatatggtatttgattttctgtacctggcttatttcagttaacacaatagcctccattttcarccatgttgttgcaaatcatttcattcatttttatgactgaatagtattccaatgtgtgtatataccacattttccttatttattcatctgttgatgggtatttaggttgattccatatctttgctattgtgaatatgctgtgataaacatgtgagtgcaggtgtccctttgatatactgatttcctttggaaaatactcaatagtgggatttctggatcacatggtaattctatttttagttggtttgagaaatcttcatactgttttccatagtgggtgtactcatttacattcccacctatagtgtataagagttccctttacaccctc

SEQ ID NO: 458117 - DNA, 577 bp, Homo sapiens
cactttccactgcctttggactagccaccagagtcactgttgctctgccccttggcttgccttgaaacgctctctgagatactcgcacttctggtgagaaggtgagtgtggtgtccaggtgctcactgtgaagatgggcaggcattatttggaagaagtggaagaaatgggaacttggaagtgactggggaggccagaagaggggagagggaagggggtcccagggtgggaagtcactgttgacagcttgagggttctgtgtccattccagagcaacagggtgtgagggagcgcctctcttgtgacattgaacagggaacgggagagcatggacttgttctctaggcctctgcatttctttgtcctctgcagatagggcacaagctgtgttggcaaaagctggtaaaacactgctaacaggcagagaaaccatacattcaacaataagtatatctagcaaggcattaaaaaatggagagtaggtttttgtgactaaaaaagtctacctaatgttaaaataataggckgtgttagtcaaactggtaaaaagaaaaatgaagcaatcaggcaagtctgc

SEQ ID NO: 458118 - DNA, 581 bp, Homo sapiens
tgatatacagtgttcacaataaaattctttcaactttaccatatgtttgaaaatcttcttcctaaacaaagcaaacaaccagtagaaaaatagtaataagccataaaagtgtatttcataggaaaggaaatatgaatgataaataaacatataaaatatggccacctcatttataatcaaggaaaagtaaacaaagaacttatgagatacattttgatgaactgtattatcaaaaatcaatacatctgaaaataccaagtcttggagaagatttaaatactctatagttgagagwataattggtacagtcactttgggaaacaatttggcattatcttgtaaatttgaggacatgataaatatcctcttcaacccatcagttctacttctagggtatgtatatgtgaatcgtagagacacttttgcccatgtgcactggaaaacaggtacaagtatgtcctgaaagttttatttgttaaagcaaaaacctggaaacaacctaatgttcattattgggactgggtaaataaacgtgttgtattcacacacaatggcatattaaatagctagcaatatgaatg

SEQ ID NO: 458119 - DNA, 505 bp, Homo sapiens
cttgccgccagcactgggcctaccatgcttccctcatataggcacctgttggcttttgtgatttcttcatagcagcwggaggtggagcacagagtgcagaagtagcttcttccccaagctatctttccacatccctctggggctacagacaacctggggccttctgagccctctcctagtacagggaagtgtggtgggcccagtgccgatggcaagctaatgctccctgattctggggagaagggactttctgggtggggacttgctgagaggctcttgggggtgaaacaatggattcatgtccacctgtgatatcatgaggtacagtatctaacaaacaataattacaacagaactagctgcaacatactcctgtaaccaagcaaaacaaccaggatggcaaatcacccaagaatagcttcatattttatttgttggtttacttgtattttatttgttgcctatatgttattttcacttgactgaggcaaatgtatattcgtat

SEQ ID NO: 458120 - DNA, 476 bp, Homo sapiens
aatcaagtaatcgagtcatgaacagtttcatgatttgaacctcttttaggagtgaaaagtgatgcttacatgagggtgcctacagtgagcacagagtggatcctgatttagattaagggccagtttagggcacaaagtgcctacatttagtatagatcacagcataaagagaaggactgtgtattttgaaattatttttgcaacataatgcaaaattttgcatcccaatgttrcattctaattttgcatcccaatgttaccttctacttttgcattctaagtttcttcatgatcaatctctgcattcagttcttataacatttacttcgttattcactatatagacaatggcttttaaagtcagccacttgcatacatataaagtaatggtttctgtcatctctggttgaacaaatttgaaacttttacaaaattccaggaaatagcaatataatatgccaaaaaactggtggaaa

SEQ ID NO: 458121 - DNA, 476 bp, Homo sapiens
aatcaagtaatcgagtcatgaacagtttcatgatttgaacctcttttaggagtgaaaagtgatgcttacatgagggtgcctacagtgagcacagagtggatcctgatttagattaagggccagtttagggcacaaagtgcctacatttagtatagatcacagcataaagagaaggactgtgtattttgaaattatttttgcaacataatgcaaaattttgcatcccaatgttgcattctaattttgyatcccaatgttaccttctacttttgcattctaagtttcttcatgatcaatctctgcattcagttcttataacatttacttcgttattcactatatagacaatggcttttaaagtcagccacttgcatacatataaagtaatggtttctgtcatctctggttgaacaaatttgaaacttttacaaaattccaggaaatagcaatataatatgccaaaaaactggtggaaa

SEQ ID NO: 458122 - DNA, 552 bp, Homo sapiens
tttgatccttccccttgcatatcaaccatctcacttgctctgctgctttactgttcagcttcactcccagaaattccagattgctatcatagaattcttttgcagggttagtgatgagtttttactttatactgaaacacactgcttgaaaataaacagagtagtcattttttccaccactttgtcttcttggaaaatgtatgtgagcatgtgttggtgcatgtatgtgcatgtgcaagcatgtgtgccctgaacgtttaagcacatatgtgtgttttgcactagtagagaggatatgaccagactctatcatacagctcatgcaaagccgttaggtcagtgtttgacacataatacataattttaaaataaggagcagaagaggtaatgatcytattagcactagaacttagttaaaggaaaacagatattcctaaacttgaagtgatttttcaagtatagtagccatgtttagctctcagtaattttgacctcaagattttaatctaaggagtatttctcaaagtaggtccacctgatgttaataaattt

SEQ ID NO: 458123 - DNA, 525 bp, Homo sapiens
  misc_feature (1)...(525): n = A,T,C or G
nnnnnnnttcactccaagctgggcgacatagcaagactctgcctccaaataataaaaactaacaaaaagaaagaagaaagaaaaaaaagagaaggagtgaactttggaatgtcacagggatatcccacctatatcacctactgaatgtgtgactttgaacatgttaactagcccttttgagtcaagcatatcttcttactgaaagaacaaatttataagcattgatgcagactaagcattcacaaatatgagyttccatcctctttctatcaatcaactcatctgtcaatgaaaagctgatacatttgtttggagaaaagcactttttaaatttcaaatatggttgaatatttttaaaattttatgattttaccataaacattttaaatgcaactaattcatgagtgaatttaaagaattaaatgctatattttctacaggacataaaatccaaagtgcaagactctttattcaaataacagtatctatctccaaagaatatcattgcttatggtgtcttgcttt

SEQ ID NO: 458124 - DNA, 495 bp, Homo sapiens
aaccagagtcactcgaggggagatatgtctaaacagaattaacctcagtgtattaccaatgttttctaagattttgtttacatataccaaaaaaaacagattaaattggtcaaagtatgagtcacataatcagtgtattgggggagtttttgaaatctgttatttggcatactggaaaaaaaagtatatttctagctaccctattaaaagtttttgttcaattattgttatattgcatagatataatatcaaaaagtatcaaattyatgagggaaaagcctggtgaaaaagaatcctagaaattttttttttcagaaatcttatatgttatcaaacatatgaaagagaagcctttgggaatataattggaaattgaaactcaaagtacatcacaaaattcatgagaatgaagtgtaattttatcaattttttttttatcctggaagtttgagtctttccttttctaacctgacagacattcaccgttttgacacc

SEQ ID NO: 458125 - DNA, 489 bp, Homo sapiens
agatgatagatagacataaatgataggtaaatagagatagatgatagatagatatcaatagacagataataagtaaatagaggtagatgatagataataggtaaatagggttagattagatagataataaatagtaacagatgattgatagatgaatggatagagatatatagatgataggtaaatggaaatagatacatagaaagatagctgggtaataggtaaatagagatagatgattaatacatgataggtaattgataataggtaaacagagataratgatagtgatagactagatagataaatacatagataggtaatagattagatagatgataggtagatagattgatacatagataatagatagatagatagtgatagatgttagatagatacatagatacatagatagatagatgataggtaaataaagatagttgatagaaagttaaatagacagctagaatctgcaccttaaataga

SEQ ID NO: 458126 - DNA, 459 bp, Homo sapiens
acactatgtagaaattatcagaaaaatatctattttattctattggcatgtagtcactacacaaggtgttttaaaaccaaatgaaggttgggaatgaaagaagctctataacaaccaatttccgtgcacactgaacaattttaaagctatatatgggaaatcatataatatattaaatatataagatatrcaaaatattttaacctgctgggtgagtggttattaataagaaatattaaatcttgaccaaaataattagactagatcattgctgtaacatggattattattgcatcaacaaattcatactacaggtcaaatcatacagcctgaagaataacaacgatgaataaaggaacaaactataatgatgctgagttatgaaatgaaaattctaccaacatcatggtgtaaatgtcttttaaacaagtatttgctaatggaattcaacaagggaat

SEQ ID NO: 458127 - DNA, 622 bp, Homo sapiens
tgcaaaatattttaacctgctgggtgagtggttattaataagaaatattaaatcttgaccaaaataattagactagatcattgctgtaacatggattattattgcatcaacaaattcatactacaggtcaaatcatacagcctgaagaataacaacgatgaataaaggaacaaactataatgatgctgagttatgaaatgaaaattctaccaacatcatggtgtaaatgtcttttaaacaagtatttgctaatggaattcaacragggaatactaggggaagtaagttggacatgtccagtgtcctcagggaagacagagtagaaggactgtgaatgaatgtgcagggcttctgcccgaagaagaaatagacccctaggcccaaggctgaagactgttaccttgcaaagctttctgggcctctggactgttgaatgctaagtgtggtgctagacacagcaataccttcaacacactttctgttggctctgtgctgcatagttgtccccaaagttttttctgtggaaaactgattttgtgagggtcttcttgaaaagaggctacatggtcaaacaagtctaaggtgtatggcagtgctcttagcctatgtggcacagtgagaa

SEQ ID NO: 458128 - DNA, 571 bp, Homo sapiens
aatttactgggctgttttaccaaaagctaacacctttctagaggtgacaaatattatcagattcttgtttaccatttcagagctattttatccatagacaagaagacaattattttctcctctcttgcacaatgatggtatactatatttgctattttgcataatgcttctttcttaacagtataaaataagagataattttatatttctaccaaattataaatagtttaaacattctttatagctacaaagtatttgcaattttcataatttctttaactaccaacctagtcataaacatttagattattctcagtcttttgctatcaccaagaatgttacaataaataatcttctagataatttatttcaaatgtgtatgaattacatctattgggtaaattcttaaaagaaaaaatactaggtaaaatggcacaatatttgtgacttttatgccattatgaaattttatttctagacgtgagtctatttgcactctattggtgaygtaagagagtttctatttcctctatgtatagtaaactctttgttctttaccaatatgattaat

SEQ ID NO: 458129 - DNA, 474 bp, Homo sapiens
ttgcgcaaaggcatggaggcatgtcttgaagtgtctggtgcaggtgtggggaaagaacttgagtcctggtgatctgagtgcaggaaagtggtgayttggccctgctgcttctctgttttcgccaccaccactcataaaagattctaagagctcctaggaacagtttgcaggtgtgtagctgtgtcatagtgctttcatgtgaactgaactgtccttttttcctccccctttctgtctctctcttcctcattcattccctgagcttatgcactcatctcattgatgtcagagaaaagaaaaaagatttgaggcttgctcaatttgttctgacataaagagatgtttagctctgtgcaaggtggtagaggcgagccaagtgcctgactgccatttcaagaatgtgcctatgaggacagctcatttcatgccccttagctgtgccacatcctggtccttccagagagccctcctcta

SEQ ID NO: 458130 - DNA, 474 bp, Homo sapiens
ttgcgcaaaggcatggaggcatgtcttgaagtgtctggtgcaggtgtggggaaagaacttgagtcctggtgatctgagtgcaggaaagtggtgatttggccctgctgcttctctgttttcgccaccaccactcataaaagattctaagagctcctaggaacagtttgcaggtgtgtagctgtgtcatagtgctttcatgtgaactgaactgtccttttttcctccccctttctgtctctctcttcctcattcattccctgagcttatgcacycatctcattgatgtcagagaaaagaaaaaagatttgaggcttgctcaatttgttctgacataaagagatgtttagctctgtgcaaggtggtagaggcgagccaagtgcctgactgccatttcaagaatgtgcctatgaggacagctcatttcatgccccttagctgtgccacatcctggtccttccagagagccctcctcta

SEQ ID NO: 458131 - DNA, 576 bp, Homo sapiens
tgagtgttgtatatatgtgtgtatatacacaaatttccccttataatgtttaaaaataattttaaatgtttgagggaaacttgcttttgatgttttgatttcttcaaatgatatgtcattttaatttatgacaatgcatgtatacttggaaggtaacttactgaggcaaaacaatgaaagaaaaggtacagttttaaagaaattggcttcyttctggtcagttaaagtccatttcagtatactggcaaagatctatatgtgcatttgaatgtagctataaaccacgcaacactaacaattagaaatacaacctatggctatatggaattctttcaaacaatatagaaaaggaaaacacttggttttggcatttaaaaaattttaaatacctattaaattgccaaaacttacagggagcctacttcagattagattaaattctaaaagaagaactgaaaagtacatttatattttaattataaaaaacagtctttgtcatatatattcctctgtgacttctcatttttctttgagtgaaacaaaatttcatatatacttttcatcattttggttgga

SEQ ID NO: 458132 - DNA, 576 bp, Homo sapiens
tgagtgttgtatatatgtgtgtatatacacaaatttccccttataatgtttaaaaataattttaaatgtttgagggaaacttgcttttgatgttttgatttcttcaaatgatatgtcattttaatttatgacaatgcatgtatacttggaaggtaacttactgaggcaaaacaatgaaagaaaaggtacagttttaaagaaattggcttccttctggtcagttaaagtccatttcagtatactggcaaagatctatatgtgcatttgaatgtagctataaaccacgcaacactaacaattagaaatacaacctatggctatatggaattctttcaaacaatatagaaaaggaaaacacttggttttggcatttaaaaaattttaaatacctattaaattgccaaaacttacagggagcctacttcagattagattaaattctaaaagaagaactgaaaagtacatttatattttaattataaaaaayagtctttgtcatatatattcctctgtgacttctcatttttctttgagtgaaacaaaatttcatatatacttttcatcattttggttgga

SEQ ID NO: 458133 - DNA, 570 bp, Homo sapiens
caaaaccccatctacaaaaaatacaaaaattagccggtggagtgacacctgcctgtagtctcagctgcttgggaggctgaagtgagaggattgcttaaacctgggaggttgagactgctgtgagacatgagcatgccactgtactgcagcctggatgacagagcttgtctcaataaatacatacgtaaatacatatataaataaattttagattcattgatgctctctcattgagacttacccaagactctcgttcagacaggacttttattcagccagcctttttacatggattttgtcttgtccttccaagtaacccaagttcagaagtgtagcacctcatgttatctatgagctctgccttagctttacagtaatataatagcaaccaaacatcaagaattctacattttcttatcagcacgaatccaaaaacttttggarcatatttggatgtttctccaaattccatcaaagagacccctccctgaaaggagtctcaattcaatctgtcagggccagtatagaaagaattccacactggaacggaggttaagtatgtctctaaga

SEQ ID NO: 458134 - DNA, 521 bp, Homo sapiens
acagctttctttcctcatctgtaaaatggagataacactcatcttacaaggttgtcttgagaaccagtagggttgtaatttttttccctcagagaaaagaaaaagaacaaactttccrtatatctttttgggacatataaaattatatcagtatttcttaagaacattattttgagaattcaccatacactgtgagatgtggtggcagaagagagaatcatccaagcatctatgccagcatcttcaacgatctaggttggtgtaaatacactttaggatgttctcataaggaaattgcctaacagtaactttcccagaacatatccttgttgataaataacacatggctgtatacatgcaatgcttaatgctttgtgagtccccatgctaaccaccttttcacactggtgaaatcttcatgatcttgacttcatggtatctagaatcagatactcatgattctattatttaaactaatgccataaacatatatttcagacatagaaactcataagatcagg

SEQ ID NO: 458135 - DNA, 577 bp, Homo sapiens
ctcataaggaaattgcctaacagtaactttcccaraacatatccttgttgataaataacacatggctgtatacatgcaatgcttaatgctttgtgagtccccatgctaaccaccttttcacactggtgaaatcttcatgatcttgacttcatggtatctagaatcagatactcatgattctattatttaaactaatgccataaacatatatttcagacatagaaactcataagatcaggttcataacattagtaaacagagatgatgtgtttatttgatgtgatgctttgtaattcattcatttacttattcaacaaacgtctcttaagtgacacatttattaagtagctgacatgaactcagcataacatgaagtactggggatacaaagtcaaatatgatctatagtctagccctcaaggaaaatgttaattaaaaaactttttattttgagataattatagactcacatgaagttgtatgaaatcataaaatcctgtttacccagtttccttcagttgtaactatttgcataactattgtataatattacaaccaggtaattgcagttcatgga

SEQ ID NO: 458136 - DNA, 516 bp, Homo sapiens
gttataatccttatggttacaaagtatatacaattcaaactgttattaatttgattttgttaacycagtttacacagctctgaattttaactacacaaagataagcaaatattttgggataaattcatgagcactgagtgcgctgatataagcaagaggttctcagtgtgaaaaccactcccatttattcaacgaatatttactgagaacctgtgattcagacagcaggctggttggagtgtcctcttatccacattttattaaagctttgttcccaaaggttgtggattgagatgaattcctctaacaaatgtctcctgccttgaggaagtaacaatttttagggttgaggggattaaaccctcgagtcttcggtatgttttgtaaagatagaataacagtgtgaaaaaatttcctaatacatgtctcaaaacattttataggttagacattaatagctctgcaatagttatttactgagcaataattagaatagagcaattggaattctatgca

SEQ ID NO: 458137 - DNA, 554 bp, Homo sapiens
tgacctgttggtcgtagtttgggtaacttctaaatcaagacaccctatttttcttccttgcaggcaacattgatgaaaaagatttttatrccaaaggatttcctaggcagttttgtgtacatatcatttataaaattgaaacccaatctctatcataatgactttttttagtctattatttcccttttcagaatatttttacttcttcagaattttctagtctcttttctctgtttggatatttcaagcctgtttgaactacacatctgtgagcactataatatatatgcgtgaatatatgtgtgtgtgtgagtgtgtgtgtgtgttggctagctaattagaaaacagaatcaatgtaaattaagacaaagtaacagagtggctgatgaaaaaagatctttgggttgtgcaaaatcagagtgattattttcagagattgtatttcatggttgatctttgatcaaggaaagaaaaatagaataaaatgtaatgatcctcactagatttttgtccttcaaatattagaaactccagtttgcagaaaaaagaatctc

SEQ ID NO: 458138 - DNA, 585 bp, Homo sapiens
gctctgtttggtttctgtggaattaaaccagccaccaaccatactggtacagagacaagttaagggatttctttttgaggtgttgagagattccgttctctaaaagcaaccctatcctatcccacagctgcccttacaccataagtctgacaacagcaaaagacaatgccaagatccaccctgaacctatcactctcaggctcctatgtcaggcatcaaaatttcctttctgactggcaacaatagcaacagcaacagctacacaaagtgctctttcagaagatggaatgttcatttttatttmtattctaaacaacattcaattaattacttttaaaagattagagttaggcagcatgcctcatatttaagagcacagactttggatccagattgcctgggttcaaatcctggctctagtgcttgttagctatatgattctgggtatgttaccttattctctctctgccttaaatctctaatcacagaatggtagttcataatgtaaagcacatcaaagagtacctgtgagtcttagtgtttgttattctcctgttcttaggtattgatatctaagtatttgtg

SEQ ID NO: 458139 - DNA, 566 bp, Homo sapiens
tgctacacctgaatgagatattgacgagacattgctacytaaacagagttgagaaactggataaataaataaattaattaaattgtcacagggctgagagaataattttgaaaatgcaacttacacttccagtgcagaaacagatcaagggaagtactgcttgcttggtgtgagagggtataccatttggtggtgtgaatattttttttttattctgccttaaaattgtggatttggaaagggagggcagatggagggagagaggtactggcagattaacctgtgttagaaccttttggccagttacttgtttaatgtgagtaggctttgccctattatctactcaacaaaagctccccaaaacaaaacgatgtggaataaagttacaaggctttggagtgggaataaaactcttaacagtgggtaatttttactggggagaaaaacaaggatcagagaaaatcaagtaaaaaaaagacataaagtaggaatagtttttaaataggaatggctggcagagctattaatcacacgaagggctcggagctgcagggattgtgtgagta

SEQ ID NO: 458140 - DNA, 546 bp, Homo sapiens
agggggcaattccacagatacatataataaagtgtgttaagtgctaagagagggactcacctgaaaggtaagtacgggatgaactagttacatccacaaagacccctaactcagtcttgggagccctgggatcatctcactgaagaaatgatagaagcagcacatagagaggagcaataggaaaggatgctgctttctaggaacttcaggtaatgccatgtgggtttcagacaagggggtgagcttgagatggggtagaagtcgacctgggactgtggcaagagataaggctgggataagrtttttgaagagctttgcaaatgttttgtcctctgttctaatcagatcatacccagcgataggcactgtgtgtgctccaaggtagagacaggaagtgttcatgagatgtggttgatgcctcacaaactcacttctcagacatttcggtacttttaagaacaactatcttcctttccttctcaatatctgtaaaacatagctaaatattctgcctagaagtgttgcaaggacaaaatctttcagtgt

SEQ ID NO: 458141 - DNA, 576 bp, Homo sapiens
agactgaagtgactatggcaggttgtcaggcagctctgttcctcacagttatttaggagatccagcctgatggtagttttgtcatcttcaacccatgactttgaaggtctcattggtcttggtcattctaaccaaggaaaggggcagagagcaaagttcaggtcaggacattttctgttgagtaagtgaagtggaaattgcacttttgctcataattcattggtaggagcttagtcacrttgcccacctggctggtacagtgggaagtgcagccttgccttgggtccaggaaacagggtggaacagattttgatggacgagtagcagtgcctgccaaagagctggaatacagatcttacacttccaagtctggtggcctttctcctatatgaggctttatcttttatatttctaccagtgaaagaaaatgtgagattgtgaagaatactgcatctaaaagtttatctagttcagccttgctacagttccagaaaaggcacttaatctccagaccttagctttctcctttgtgaaatgaaaatattagattccaaaatctaatcagttacaggcata

SEQ ID NO: 458142 - DNA, 576 bp, Homo sapiens
agactgaagtgactatggcaggttgtcaggcagctctgttcctcacagttatttaggagatccagcctgatggtagttttgtcatcttcaacccatgactttgaaggtctcattggtcttggtcattctaaccaaggaaaggggcagagagcaaagttcaggtcaggacattttctgttgagtaagtgaagtggaaattgcacttttgctcataattcattggtaggagcttagtcacattgcccacctggctggtacagtgggaagtgcagccttgccttgggtccaggaaacagggtggaacagattttgatggacgagtagcagtgcctgccaaagagctggaatacagatcttacacttccaagtctggtggcctttctcctatatgaggctttatcttttatatttctaccagtgaaagaaaatgtgagattgtgaagaatactgcatctaaaagtttatctagttyagccttgctacagttccagaaaaggcacttaatctccagaccttagctttctcctttgtgaaatgaaaatattagattccaaaatctaatcagttacaggcata

SEQ ID NO: 458143 - DNA, 571 bp, Homo sapiens
tgacaccaaataacatatggccaatagacccctggatgaacttgactcctaggcaggcatttaagagctgggggcggggaatagttttaaatagtctacacccttatgctacaaaaattagccagggagcatgtgctttcgtaatggtcctgtgacagggctgcttcattgtgttcagtgcggcggaaatctgagcctccctccaccagctgcgctgaaccgaacacaaatgtctcgggttcagttggcagataaagcactgytgtgtcgcaactgcagtatgtgggggctaccaggtgcagccaagccagggaggcctgagcccgggtggtctttttcccagggcaggtggcacagagccccaaaaggagagagaaaaatctgggccactattctggaaattttctggattaggtgtgtagcatatcccactccacaaagcccttccagataatgccaaaccaacaatttagagggcagtgttgtctgtgggttagagctcagcctcctcagttggctcccagctgtgtggccatttacttaatgtctctgtacctcagttaccttattt

SEQ ID NO: 458144 - DNA, 626 bp, Homo sapiens
atgctaagcgtatattaatattgtgaccagttttctctttgataatttattttcaggtttctctttcattctcctccctctttttttcccctcacactccctctcccacttatcctctgatacaccttactggttaggtagtgtgaactcaaatgggatttgtaaaaccaaagggttcaaaatcagtataactactgccgttgagagcaaaggagtttgttttttgttttttctaaataataaagtttctgtttttcttagtgatttattgaaaattatggtgcctcctaaagagacttcatagccaacaacaacatgttatggcctgaaaatacactccagacacttttattaaataktatatgaaaatatatctaatacatttaagaaagaaaacccaaaatgtagaattgaggaaatgagctcaactgattttctcacatcaatgccatttcccagtgtaaatagcttcccaatataattgtctccccttcttgcctgcactaacccatttttttagttgattttttagcctataaatggtaagaactgatcaaaagaaaatttctataggagttagcactcttaggtaacttatgagtttaatccaaaaatcatttgttaca

SEQ ID NO: 458145 - DNA, 535 bp, Homo sapiens
ctggattttttacaaaaatacttaactcttttacatctcagtttcccaatctgttaaatgggaataatagcccttccaagtgcttgaatattctaggtttaaaaggccaagtgagcttagaatgaaaacatctattttctttcagtgctgtggctaaggacgccttgaagtaaccaagccacagagcaaggatgatggcctttatcgtgtagaragtggacgaccagatggcagagcccattctacataatgactctcactctggtggtttgtaatttatgaagtagccttctaatcaaaggcgctgttggctgccagagagctcagccacagcatggaaatagcttcttccaaaaagaaaaaaatatatatatcagctgaatattcttccatctaatacgataaacagtctaaaacacaagaaaggttatcaccaatgattctgatttttattttgtaaaccttgaggaaagaagcgaagggacaggttatctagggaggccttttcccttgactttatcagggaagaaacagg

SEQ ID NO: 458146 - DNA, 541 bp, Homo sapiens
tctggtgccacaaaatgtccatttccattccgtctgggtagcatggattaactagtgtgatacttgtaacctgttctgagcaagtgtggatctaggctatacattgacaagtgaattgagagtccactgcttatgagggattccagctttaccctctgcttccaaagcttcttattttctaaactttatttgtaaatcaataattacatcccaatatagtcctatctgaatgccctacattttaagagtaataactctatttcaatagtatcttttattaaagttcatgttacygacatcatagaattaacctttatacaatcacctttctagttcatttgcaagaaactaaagcaaaatggagttgatagaataagcaacattataggcaaaatgagggaggaaacctactggattttattaattatatcttagcctcctgagcactgttgttttttgaattatgccacatactgttttcatagattaataatattttaaggtttgaatagactttgtataaattagtccttttttctca

SEQ ID NO: 458147 - DNA, 607 bp, Homo sapiens
atcacatgtatacagagcattacaaatggatgtcctttaaatataagatggtgggaatagctgaggcaaaaatcctggaaatargaatgcatttggtgtgttcaggttacgtgaaggctgtgatacccaggctctgtgaagcagacttgtgggaaacttgccaggaaagagggtttgggtcaggttatgaatagacttgaattttcaggttaaaagaatcttgattttgttctgtaacagtggaaaatgtggggtaaaagtacttgagaatggcatatagaatgaattagaaagaagcagaaaaacagagggagagagaccaatgaaaccaccagtgaggaaattcaggcagttggaatttaactttgagaatgtagagatgatttagagtgagaaccaataggacttagaagttgacaagtgtattccaagcacccatgtacgaaagtgtggtattttttgacatcaagagggttgcatgaattcatctgtttcataatagtaagaattcaaagcttagacagcaattgcccagctaggcttgcattcattcatttattcattaaacagcctgttcaataacatccagtctgtcaggccctaagct

SEQ ID NO: 458148 - DNA, 607 bp, Homo sapiens
atcacatgtatacagagcattacaaatggatgtcctttaaatataagatggtgggaatagctgaggcaaaaatcctggaaataagaatgcatttggtgtgttcaggttacgtgaaggctgtgatacccaggctctgtgaagcagacttgtgggaaacttgccaggaaagagggtttgggtcaggttatgaatagacttgaattttcaggttaaaagaatcttgattttgttctgtaacagtggaaaatgtggggtaaaagtacttgagaatggcatatagaatgaattagaaagaagcagaaaaacagagggagagagaccaatgaaaccaccagtgaggaaattcaggcagttggaatttaactttgagaatgtagagatgatttagagtgagaaccaataggacttaraagttgacaagtgtattccaagcacccatgtacgaaagtgtggtattttttgacatcaagagggttgcatgaattcatctgtttcataatagtaagaattcaaagcttagacagcaattgcccagctaggcttgcattcattcatttattcattaaacagcctgttcaataacatccagtctgtcaggccctaagct

SEQ ID NO: 458149 - DNA, 530 bp, Homo sapiens
atgtcaatatgtatatataatcccattttgataaatgtgacatggtaaattcaaagccactccaataaatgtcaagcttaatacaggggcacctctgcctgcaaataatctctaggagtgaggaaaacactacaaataaaaaaatggaacactttaagttcttgataattttttagttcctctgtcggtgatatagaaaggtgtgtagaaagcattatttctccacaagcatctaaggcagggttacaatttctttctttttttctttctttcttctttttttttttaatgttaagcacgttcctttgcagggcttaraaatctctctcgtccaaaattgaacaaaaaaggcctccccttgtgctttttttgtcaggctgatgaagctgtatagaaatgtaaatgcaatataagagatggtagtgggaagcttgtgttgtgctctcctcttctctggggctctcttgtaaaattattctctgattttgctgtgtgtgtgtgcacctcttgtgtaagggcatttaattagc

SEQ ID NO: 458150 - DNA, 513 bp, Homo sapiens
ttgataagcattttatggttcacttttttctccttagttgcttggcagtataggacttattttagtaaagtttcataaactgatggatccctggaaatttggtttctcagcattgtgtcactacaaaagctggagtccacagatggtcttcactttaccctaagccccttcctcagcagttaacttcacctttttccttctttttaatgttggctgcagtttgaaaccccagtagatcttatcccaaaaataccactgtatggaccccaccctcagagattttcactgggtgagacccaggcagctgtacttttaaaaagtctccaggtgattccaaagtggaaccagattatctcatcctatgatcactgttgagctttggggtattagcatgmccaaaaaaaaaaaaaaaaaaaaagtgatgtctcatctgcagaactagtgaaggtctggaagtcacttgcatttagtgattggcatctaacacaagccactgatagtttttgtgggctg

SEQ ID NO: 458151 - DNA, 579 bp, Homo sapiens
ctgctgacttaatagtaaaattgccaggttgatgttgaaattcaaccaattggagcctaatcctcaagaagaaatttgctgtctctcctactgattgtcatccgtcttcttcatratgaatatgcagaaagtttattttattttttgcaagtgcgcgtacttacataaatgaccaataggagaggttagagttaatgagtgattttttttgagcattgttatgtttccctaaaatcagaagtcattacatttatattgaaaatattgagtggtttgtatgagctttatgccaaactaagattagtgtgctgtagcccattacaaatgtggacgatagaccattttttatgagttagaataaaaaatatggtaataatgtcttctcatcatcataaagagatgataacgactaaatgaaatatttatattatctcatcttatttgataggtcctatcttctcccataccaaacatttcctcaagagcaaccatcatctcttatttaaaaaggaaatctttgtagaattcacattcttcatatttgtgctaaatccagtaatccagtattttactcattgt

SEQ ID NO: 458152 - DNA, 574 bp, Homo sapiens
cagtacaggattctgcaccggtgcaaaatcggaatgcattctttgagtacattaagatgcattgagtacattaaataatttatattttttaaagaaatatccatagccaaaccaagaaggaaagtttctttcttttttgtgtgtgtgtgtatcttttttaaagtatgtgcaattgaatctattaaytaccctgagaattttagtttattcagaaatcacgatagtaatcatatgaatcaaaggatgtttttctgtctttgtaatgcagtattagcttccatatttctttgagtgtattttagaaaaatcatgtttcttttgcaaaatgcctgttttatttattttttaattgtaaaatgattacgtgtcttattttagattgaatagacaattttttttttctctcagtgtctgcagaatgcttggattttcttctacatctcaaagctcttttaattcactgctcacaaccaaatttacatcttaattgcagagttcacatttaacaatatagacagcataatgctactggtaattaagcttttactacctgcttttatacagtattctgagg

SEQ ID NO: 458153 - DNA, 547 bp, Homo sapiens
catagttatatatattagttaaatatacatgtatatatatcatagttatatatatcatagagttatatatatacatgtgtatatcatacacacacacacacacacatccatttttgtttaagaattagctctactttccaaaaagcaatacttggaaggcagattttatatataaactatataccatatagaatatcatggagatatatatattatatatataatttataatatatataatatatatattctgccytctattacttgaccaccacattctgtataccactgtctttttatcagatatattttgaggctttccagctgttctctaacattgtgtctcctccccttgtgtactgtcttgccatcttcccagctggatactttctggacttttacattttctttgagacttaacatacagaaacactgacatatatgccactgtgaaatcatgtaaggattaatttataatgctgcatgctctgaacatagataagcaggttgtaagcaagagcaaaaggaatagatggcatagaaaaaa

SEQ ID NO: 458154 - DNA, 576 bp, Homo sapiens
agatttcctgcccttctcccgctcagctctatatctaaagggagatgacaacttgtaaatatatttaaatatttaaagtttaaaagttttctcatttaagcctcacattccctctggggcaggtactattacatttcctactttataggagaggaaatcaaagctccttgagtctatacaatttccctacgggcacacatggatggaggagctgagattcaaatccccaggatttcgctttacagcccatgctgtcaactgccatgctagaccgcctcctgttggtgggagggtcttggggtcccaaggtcctgtgttcccctcctaatcacaaagtattgcaatttctgcttataagttcatttcctccatagattgtgagcccctggagkaattttaagcattagctctccagcgtctgacaccttaaaagtgttagattaaatgtttgttgaatgaattaaaaaactaactaatgaggcacagaatgtcagcacatttaagggaaggcaagtaaagaataaaattcagaggagaaaaaattaagtctctggttgaaaaaaaaaaagagataga

SEQ ID NO: 458155 - DNA, 576 bp, Homo sapiens
agatttcctgcccttctcccgctcagctctatatctaaagggagatgacaacttgtaaatatatttaaatatttaaagtttaaaagttttctcatttaagcctcacattccctctggggcaggtactattacatttcctactttataggagaggaaatcaaagctccttgagtctatacaatttccctacgggcacacatggatggaggagctgagattcaaatccccaggatttcgctttacagcccatgctgtcaactgccatgctagaccgcctcctgttggtgggagggtcttggggtcccaaggtcctgtgttcccctcctaatcacaaagtattgcaatttctgcttataagttcatttcctccatagattgtgagcccctggagtaattttaagcattagctctccagcgtctgacaccttaaaagtgttagattmaatgtttgttgaatgaattaaaaaactaactaatgaggcacagaatgtcagcacatttaagggaaggcaagtaaagaataaaattcagaggagaaaaaattaagtctctggttgaaaaaaaaaaagagataga

SEQ ID NO: 458156 - DNA, 576 bp, Homo sapiens
agatttcctgcccttctcccgctcagctctatatctaaagggagatgacaacttgtaaatatatttaaatatttaaagtttaaaagttttctcatttaagcctcacattccctctggggcaggtactattacatttcctactttataggagaggaaatcaaagctccttgagtctatacaatttccctacgggcacacatggatggaggagctgagattcaaatccccaggatttcgctttacagcccatgctgtcaactgccatgctagaccgcctcctgttggtgggagggtcttggggtcccaaggtcctgtgttcccctcctaatcacaaagtattgcaatttctgcttataagttcatttcctccatagattgtgagcccctggagtaattttaagcattagctctccagcgtctgacaccttaaaagtgttagattaaatgtttgttgaatgaattaaaaaactaactaatgaggcacrgaatgtcagcacatttaagggaaggcaagtaaagaataaaattcagaggagaaaaaattaagtctctggttgaaaaaaaaaaagagataga

SEQ ID NO: 458157 - DNA, 553 bp, Homo sapiens
aatgaagtaatatttttaaagagcagaaagaaaaacagttaacatagcattctagagccagcaaaaatatatttcaaaaatgaaggcaaaatacttttctagacatacaaaacttgagagaatttgtcactgaaaggcttgtgttacaagagatgtgagaggaaattcttcattgtaagaatctatatcaatgaataaagaacactggaaataagtgggtaaatataaagtaaattgtttctcattttaagttcctttaaaagataaatacctgtttaaaatgaaaacaataaaaaggtatcaggaggttgataacatatgcagaaacaaaatctatgataacagtagcacaaaaaatggaaaaggggaaaaaagaattttcttataaggttctaatattggtacatgaaatgataaggcataatttaaagttaggctgtgataacccagagataaatratgtaaaccacagccccctaaaaaataaagtgcaataactcctcactttatgtcatggataggttcttggaaactgtgactttaagtgaaatga

SEQ ID NO: 458158 - DNA, 580 bp, Homo sapiens
taacattttgcaatttttaattttgatataactgaaattccagaaaaaatacaagaattgttcatgaaacttctatataacttttacccagatccacctgtttttactttgctgtattattctttgcatatattttacatagatatgcatattttgttttcctgacccaattaagttggagaccttgtgcccacataaccctaaatattgcagtatgcatttcctaatatattctcctatataatctcaakagttatcaaaaatcagaaaatttaacattttcataacaatactatctaactcacagtccatattcaaatttcatcaattgtcctaataatgttctatatagctattttttttcccctggttcaggatgcaacctgaaagtacacattgcaattaattgtctttaatccagagcctttagtctcttttaatctggagcaattcctttgtctttctttgtgtttcctgaacttgataatttttaaagaacacaggccagttttctgtgacatgttcttaatgttttctcatgattgtgttcaagttacacatttttggcaggaagaccaga

SEQ ID NO: 458159 - DNA, 406 bp, Homo sapiens
ctgtcttgggcagctataaacagaagtgtcccacaaagatcaacagcactgtctttggggttacataggctagagttcaagttctggtactagcatagataatgrtcttggaggaagtcccttaacctctttgagtttcagtttccacgtctgtaaaggaggacaatgatagtatctccttccacagagttgtagcataggtgtagacatgacctaatgtagacagtgtctggaccatagaagtgtccaccatagctgtgtgattatcatgaaagggagaagcaacccaaaacatcagggctgaaacgactttataattagccaataagttcatgccagttcttgagtgtctaggatgccactgggagggtgtgaaaaatggtggggaagcacatgggtgaataag

SEQ ID NO: 458160 - DNA, 530 bp, Homo sapiens
tgtagggaagatttgtaagagtaaaacagagagacccatctctggtactaacttgcccaatagcctcacatgaagccacttcgtttctcaatgcagcaaatgaagatgacaattgctgacgtacttacttctcaaggtatgtgtgatgatcctaaactcctgatgacatttgtcactgtcacctgggctgctcyatggtctcccagtggtcctttcctttccactctaccttctgtctgatccattctccatgctgcagtgaagcccaatttttcataaagtaaatctgacagtcatttcctgcaaacagtttcccttactctgagaataaagacaacactcattttctggcctgcaaagtccaacagaatctttcccctatttgctgtccatcatcctctcactccttgctctccatccctttctaggtttcagccccacgagttgccttttggaacccggggctcaccacattctctcctgccacagggactttgcacaggctgttacggctgcctgggaagctcctt

SEQ ID NO: 458161 - DNA, 633 bp, Homo sapiens
gatgcctctgttctttttgcttaggcttgctttggctattcaggcttatttttttgtttcaaatgaattttagaatttttttctaattttgtgaaaaatgtcattggtagtttgaaaaggatagcattgaatctgtaaattgctttgggcagtatggccattttcatgatattgattctttctatccatgaccatggaatgtttttccatttgtttgtgtcatctctgatctcctttagctgtgttttgtaattctcactgtasggatctttcacctccctggttagctgaattcctaggtattttatgaatgggattatggtcctgatttgactctcagcttggatgttggtgatgtatagaaatgtggctcatttttgtacattgattttgtatcctgaaactttgctgaggtcatttatcagatctaggagctttttagcaaagactggggttttctaggtgtaaaattatattgtctgcaaacagagatagtttgacttttcttctttctctttggatgtattttatttttttcttttgcctgattgctctggctaggacttctagtactatgttgaataggagtagtgagagtgagcatccttgtctttgaacatttattaattaaac

SEQ ID NO: 458162 - DNA, 608 bp, Homo sapiens
atgttaactgcatatgacttcaggtaatgccaaggcaggagaacacagagagcacagaaggcatgaccaaagaggtgataaaagcagccaaaagacaccaaagggacagttggaaggcaggagggagatcagggcaccctggttgttcagaagaaaaggaagaaaataatttctagaaggcaatactcaacaataatgaattgggcagagtttatgcggacaacgactgaagaaatgttgctaagagatgatcaawggccttcagacagtgggtttcagtcatgttgagtgatgcaaactagaacatatggattaaggatgagtagttattgaggcagtgggttctaaatattcctttaatgtgaattgatggtttttaaagtaagagcacatattacacatcttagaagattcaactgaaatgttattgccctggtaagtttttgctaatctcccagacagaaataaatttccatttctctatactatcataatactttgtccatatagcacctatcatattttgcttcatactacaattttcttattttaggtgcagtgctcctccaatgcctacccaaaagagttggttattcatgaaatatttg

SEQ ID NO: 458163 - DNA, 608 bp, Homo sapiens
atgttaactgcatatgacttcaggtaatgccaaggcaggagaacacagagagcacagaaggcatgaccaaagaggtgataaaagcagccaaaagacaccaaagggacagttggaaggcaggagggagatcagggcaccctggttgttcagaagaaaaggaagaaaataatttctagaaggcaatactcaacaataatgaattgggcagagtttatgcggacaacgactgaagaaatgttgctaagagatgatcaatggccttcagacagtgsgtttcagtcatgttgagtgatgcaaactagaacatatggattaaggatgagtagttattgaggcagtgggttctaaatattcctttaatgtgaattgatggtttttaaagtaagagcacatattacacatcttagaagattcaactgaaatgttattgccctggtaagtttttgctaatctcccagacagaaataaatttccatttctctatactatcataatactttgtccatatagcacctatcatattttgcttcatactacaattttcttattttaggtgcagtgctcctccaatgcctacccaaaagagttggttattcatgaaatatttg

SEQ ID NO: 458164 - DNA, 523 bp, Homo sapiens
attgagtttgcctgagcccttcatgtgaatgtcaatttagttggatataaaatttttagctcacacatctttccttaattatcttaaatatattattctatttccttacagtataaagcaatgttgtaggaaagtctactgaaagcctgatattgtctattataagtgatttgatctttttgcctggatgcctaaatttttgtttttcttcaaagtctaatagttttattaactttctctcagtgttggttattttgggtcagtttccttagttatgtggtgtgtaatttcaatatgtaatttaaacaattgttttgggaaacttttgaaattatagttttgggtatttttttgttccctcattttgattttctttggagcccttattataygtatgttggatctcctttgactgccttctaaatttgtcactttccctcaaatccttaaaaaaatttccatttttatcctttctgagtgatataacttcatttataaatcttcctaatttggaattatgtat

SEQ ID NO: 458165 - DNA, 572 bp, Homo sapiens
tgtcctgacttgcactggtgctggtggctgtcaactggatataaaggaattctyctggatatacctacctcctctcatttccctgctggcagctgggatattgcaaaattgatcaagtaggtctcagagctactgtcactttctattccattctaagagaatcatgatttaggtcttaattaaaaacaaatccaagcaaaaatctcattttaccttttttttttttttctggcttataatctgtggtatattgacctccagaaaaagagctagtcgtctttttgaaaggctttcttttgttttcctttgaagtaaaactttaaagaaaatttgtgatcacttagcataatttctctcaaattttaaggctgtgaaaagcagtgccttgaaggaaagaaacagatggtcaaagagaggtttcgtcaatcacagctcccctccccactcctgaaaagacgaagccatcattaatttccaaataatagtaaatcctagcaggggatgatgccaaccgtctgcataacccgtgccaggcactggtgctgttttggctttaaaagaagggggatggc

SEQ ID NO: 458166 - DNA, 547 bp, Homo sapiens
tcatgatatgtggggattataggagctacaattcaagatgagatttgggtggggacacagccaaaccatatcaagtatcttcctttctcatcatgctacagaaaccagcaccaccgctggcctcaaacaggcatatgaatgcctgctgaaggaatgaatctgggcagggacargatgaagctacatcagagggagacataaaacccaaggatcagtcattcacagttccaggccccacaaacagtagcagctcgtctggaagggcaactctcagtgggtaccaataacaggcctggctgtatgctgatgtccagattgtcatcattggggacacagtgatgtaggccacctttgcatgggtatacatagccaggtgcatattaatagccaatattgaactgctatacaaacaattacaattaccagttataaatacatgaactgttatcctgatattcacctgcctacataattggaactttggtccaggtctgtagataagaaattgttagtagtaaatttattagtgccacatttgcactatagt

SEQ ID NO: 458167 - DNA, 578 bp, Homo sapiens
ttataatccttatctctataaaagaaaatgcatataaatttaaaaagtatttgtgaagggcaggcagatttttccaaaggttatagctgcccagaaggcatagggttttacttactgaaatggagatggggtatgctggaaaaaaacatctcccctggttcttatatttccacgtggagggacctccaggcctcttgggccagtctcccccatgccacaccraggagtagcgagtaagtcacctaactggtgggtgacagtgtggtttctggttctggtttctcaatggaatggagctgatgtactaatagaaaaatcttgaggtattcctgaaaggttctctttttttcctttgctgtgatgggtcagcacgaaggagggatctgggtaaccacggctactcggcatagcagccgagatcctaattttcctttgcttgacctccccaagttctagagcagggtagtggtgggggcataggggagcagagataatgtacaagcattcagttgcatagcaacatgttctctaaaacagacactgtgatgtcctgcgaggctcttgtgttcaattctcat

SEQ ID NO: 458168 - DNA, 576 bp, Homo sapiens
gtgtagggcatccatttgcaaactgtgttctgcataactgtgttttgtagaggtatttcaaagattctgaaaacactgattcaaattttctttgaaaatatatttaaaagtcatcacatacactcaactatggtacacatcacttacgaacactagtgtacagcttgtgcttctagaacaagtttttttccagaccaggaataaaacttcttatgccacctccacgtatatattcaagtttcttcttagtaagttatrgttttaaatgactgtagctttatacaggtctttgaattcaagctctgtgcttgactgcacaagtgtagaaatgagtgggtccctggagcttaatttcaagtgaccagacacctctgctcagggagagctcccaccctgtcctgtggctaaccaagtatggaatatcaatgggacagtattgcatataaaggatgacatttcctataaggtttgggtaccctatcattcaaaattcctcatgttgcaagtgacagaagcccaactcaatctagttgaagtgaaatggggattttcttgcctactccacagagtgtttct

SEQ ID NO: 458169 - DNA, 576 bp, Homo sapiens
gtgtagggcatccatttgcaaactgtgttctgcataactgtgttttgtagaggtatttcaaagattctgaaaacactgattcaaattttctttgaaaatatatttaaaagtcatcacatacactcaactatggtacacatcacttacgaacactagtgtacagcttgtgcttctagaacaagtttttttccagaccaggaataaaacttcttatgccacctccacgtatatattcaagtttcttcttagtaagttatggttttaaatgaytgtagctttatacaggtctttgaattcaagctctgtgcttgactgcacaagtgtagaaatgagtgggtccctggagcttaatttcaagtgaccagacacctctgctcagggagagctcccaccctgtcctgtggctaaccaagtatggaatatcaatgggacagtattgcatataaaggatgacatttcctataaggtttgggtaccctatcattcaaaattcctcatgttgcaagtgacagaagcccaactcaatctagttgaagtgaaatggggattttcttgcctactccacagagtgtttct

SEQ ID NO: 458170 - DNA, 576 bp, Homo sapiens
gtgtagggcatccatttgcaaactgtgttctgcataactgtgttttgtagaggtatttcaaagattctgaaaacactgattcaaattttctttgaaaatatatttaaaagtcatcacatacactcaactatggtacacatcacttacgaacactagtgtacagcttgtgcttctagaacaagtttttttccagaccaggaataaaacttcttatgccacctccacgtatatattcaagtttcttcttagtaagttatggttttaaatgactgtagctttatacaggtctttgaattcaagctctgtgcttgactgcacaagtgtagaaatgagtgggtccctggagcttaatttcaagtgaccagacacctctgctcagggagagctcccaccctgtcctgtggctaaccaagtatggaatatcaatgggacagtattgcatataaaggatgacatttcctataaggtttgggtaccctatcattcaaaattcctyatgttgcaagtgacagaagcccaactcaatctagttgaagtgaaatggggattttcttgcctactccacagagtgtttct

SEQ ID NO: 458171 - DNA, 565 bp, Homo sapiens
gtttcattgacgcatagttccgcatggctggggaggcctcaggaaacttaaaatcatggcagaaggcacctcttcactgggtggcaggagagagaatgagtgccagcaggggaaatgccagatgcttataaaaccatcagatctcctgagactcactcattatcataagaacwgcatggaggtaaccgcccccatgattaaattacctcccacagagtccctcctatgacacgtggagattatggaaactacaattcaagatatttgtgtggggacacagccaaatgctatcaaaaatgaacaatttttttccatatttgataaaaactataaacctataagaatctcaataaactgtaagcaggatgaacacagagaaggctgcaacaaggcatattataatcaaattactaaaaaaaaaaaaaacacacacacacacagtgaaaatgagaaaatcttaaaatcaaccagctcccctgtaactgttctctcctgcaagtttttcttgcctagtcatgtagagttttatcctgcccagacacaggatcatagaaaaaaggcatgt

SEQ ID NO: 458172 - DNA, 515 bp, Homo sapiens
tggctgtgtggcctctttttcaattgggattggtagactggtaggactgtggagcagctggtgggctttgtagtcatcacttgaggaactcttgcctgagaataaaaccaattgagtaaatggaggtaagtggagctgagagacagggaaagtggtccttgaagacatcattgcagcacaggattcagccacagacttctcagttaagtaggtcagtaaatgcccttcttttctttagcccatctgagttaggtttctatcatttgcaatcaggaagtcttgattactataaagatgcttgtactctttcttcactgcaacagttattggtgtggttatttcttgaatgtctgtctccctctgttgcacattaaagataatcttaaattttttgctactcctccccttgagaaataaggtcaraatcccctcctcgtgagtctggctggccttagtgacaaggttgtccccacagtaagtggcagaagtggtgccctgggatttctaaggctagg

SEQ ID NO: 458173 - DNA, 575 bp, Homo sapiens
cttacctacctgagtttaggaaattgagtcataaaaaccagtttatttggttggttgttttgaatgtgaaatgatgttcaatttatgccatgttattttggtctacaaatttaaagmaacttgtatttctgtagtaggcttatttatacgaagggctcatttcaatttcactgtacattaatgagtatttaggttacagataagtggtacattcatgagttggcagaggaaaaaaatgacacgctttgacattttgtgtcattagcaaaaatagaagatacacatacaatttcttaatgttttcagaagagaaataacagcttaccgtactttgcttctgtcttatggatcagatgaagtatagcccatgaaataataataatatgaccctaaactctttttatgtagatgagtccagatgtcactgagatgggctattatacatttttatagaaaaatataccagatgagtcatatcatggggcacagccttgccacaagaagctccatggattttatgatcttgtcatttatatggtccatagatatgaactaatgaccaaatttatctctgc

SEQ ID NO: 458174 - DNA, 575 bp, Homo sapiens
cttacctacctgagtttaggaaattgagtcataaaaaccagtttatttggttggttgttttgaatgtgaaatgatgttcaatttatgccatgttattttggtctacaaatttaaagcaacttgtatttctgtagtaggcttatttatacgaagggctcatttcaatttcactgtacattaatgagtatttaggttacagataagtggtacattcatgagttggcagaggaaaaaaatgacacgctttgacattttgtgtcattagcaaaaatagaagatacacatacaatttcttaatgttttcagaagagaaataacagcttaccgtactttgcttctgtcttatggatcagatgaagtatagcccatgaaataataataatatgaccctaaactctttttatgtagatgagtccagatgtcactgagatgggctattatacrtttttatagaaaaatataccagatgagtcatatcatggggcacagccttgccacaagaagctccatggattttatgatcttgtcatttatatggtccatagatatgaactaatgaccaaatttatctctgc

SEQ ID NO: 458175 - DNA, 623 bp, Homo sapiens
aacccttagaaccacggattcaaaatcaatttaccacccttttaaacagatagatttgcaagagaaccagagttacatttgtkaataaaaccaccatgtgtggctagaagtcccagccacgtggtgcctgaattgggctctgactgagcctgtggggtttgagagctgatgaactgcaaagccaggaggggccagagtgagttgtgaggcaggcatgtggttcagatccacaccttggaggatcaatgtggctccatttttagaaagccaagcccatgttcagaaagaagcttggggaaggtccagcctgccacagcctgtggaagagagtgcgcctctttaagagatgtggctgagggcctgagcttttggggtcagatttcctgagtttgaaccctgcctccatctgctattagctgtgtctaatagctgttgggaagtgacttcatcttcttgggtatcacttttctctctgtcacatggagacaaagccatatttacttgatagttatgagtattaacctaagtaatataactgaagtactcaaaacagtgcctggcccagagttactcagtgatgacacccagctatcattatcccgatcattacttatggccattgc

SEQ ID NO: 458176 - DNA, 623 bp, Homo sapiens
aacccttagaaccacggattcaaaatcaatttaccacccttttaaacagatagatttgcaagagaaccagagttacatttgtgaataaaaccaccatgtgtggctagaagtcccagccacrtggtgcctgaattgggctctgactgagcctgtggggtttgagagctgatgaactgcaaagccaggaggggccagagtgagttgtgaggcaggcatgtggttcagatccacaccttggaggatcaatgtggctccatttttagaaagccaagcccatgttcagaaagaagcttggggaaggtccagcctgccacagcctgtggaagagagtgcgcctctttaagagatgtggctgagggcctgagcttttggggtcagatttcctgagtttgaaccctgcctccatctgctattagctgtgtctaatagctgttgggaagtgacttcatcttcttgggtatcacttttctctctgtcacatggagacaaagccatatttacttgatagttatgagtattaacctaagtaatataactgaagtactcaaaacagtgcctggcccagagttactcagtgatgacacccagctatcattatcccgatcattacttatggccattgc

SEQ ID NO: 458177 - DNA, 589 bp, Homo sapiens
taggatcgaaaaaacacacaggagcactccatcatgaaaacagactttgttttagtcgaccttcagctgtcgtccctccttcccagccaaggctgtgactggggccctttgccacagcctggctgcaccttctccgtagtccccgccccacctcccaggaagtagctaggttccatgtctctgtgctccagtttgtgggctcctcccaggcctgactgtcaccaayctcctcctcgtcctcctttaaacagaagtcctcaggaagaggtctgctggcctctgtgtggggagagatcaggaatgttccagtttcagagactttgtctccacctccagcagactcgcctcccgagccttcacctggttctgaagcctccatatccttgtccggcttgctatcttgcagcagctcgtggatggtccatagcttcatgttcagaagctcctgctgggctccagccagagtagtcacactgaagaaatgtccactcagtggctcccaacctatgtccccattcctccctcctgccacaaattccccaaaaattcacagaatcattgctctcctcaccgctcaaaaagggggtcc

SEQ ID NO: 458178 - DNA, 559 bp, Homo sapiens
gacaggcaggacaaattagatggggattaaaatgaaagtggtgacaagcaaaactgttgccaagactgcaggtgacaactgagagagtgaaggccaggcacggtggctcatgcctgtaatcccagcactttgggaggccagagtgggagagagtgagtggagatggaccgctgccatagtgatggggtaaggagaaggcctctaggggtatacgatgactaagtgcagataaggctactgatgtcaaaacaggggtataggtgggactcatagcggacagasggaggtcagattggaggacttgatgaaggaaccaggctggcaggttgtggaggtgatggcagttatagaggtcaaggggagagtagctcaggactgtgagcttgcagccccagggggaatgcagtggctctgagtgcagatcccaggggtgttctagcagcagcaacagcagctgaggagctgggctctggccctccaccccggtgcccacctctgcactgttgatgccgcagcccctcttggcccctcatccccagctaggcacccccagaaagag

SEQ ID NO: 458179 - DNA, 565 bp, Homo sapiens
aatctttctcagttccaaactcagcaggtttctatgtaagttaacaatcaaaaygatttttttaatgtaggatttacagtaggtgaaataaagatctaggatagagtctaaaatctctattgaatacttttttaaaggcactatgtgatctgaatcaatttaatcttttcattattttactctaacacctagaacttttctgaaaatttccaaaatacattacattttaataattaacaattgcatgggttagtcattgtcaagcttatataaagaagaacattaaagggcaacaaaaatttactgtagaatttaactgttttcttacacattttggaagtttaaatttaaaaagcatgaaccatggccgcataattccgttgttaactttcataaggaaaccccacagatgatattacatccatgaaaaagaaagtatgacatcagttatttacagcattatcacctcatccagcttgtgaattatttgaaatgtaaaacatatatgccatgttagactactgctgatagattgctgatttcaataatgttatgaatttgaata

SEQ ID NO: 458180 - DNA, 609 bp, Homo sapiens
ataagctataccacacagcctaggtgtttagcaggctatactatctagctctgtgtaggtacattctatgatgtttgcacaatgaggaagtcgcttaactaggcatttctcagcaagcatacctgtcattaagcaagacataactgtattataaaaattataaatgtataactcagaaaatattataaagtagcctatgaatgtttcaataagacagtttgagatataattttaaaatgaggtgtaaagtagacagcattactaaatctcacaaaaaatacttaatttgaatcctaattaaggctttacaccttatttctgsgctacagcaaaaacacggcagagaggaaaaaaactaaatgacactcccgcacttttcaattacactttcccaattttagcactgaaattccaggtcctggaagccccagtgccaggcaaactagaatggttgaccacactagataagggttcaggccaacctatcagattgtctcattttaatagcactttgaaattttctccatcatccacatactaggttttgaatctcaaatcaagaatcttgcagatttcagtttctgatgaccacaccaaatgaaaatttaa

SEQ ID NO: 458181 - DNA, 609 bp, Homo sapiens
ataagctataccacacagcctaggtgtttagcaggctatactatctagctctgtgtaggtacattctatgatgtttgcacaatgaggaagtcgcttaactaggcatttctcagcaagcatacctgtcattaagcaagacataactgtattataaaaattataaatgtataactcagaaaatattataaagtagcctatgaatgtttcaataagacagtttgagatataattttaaaatgaggtgtaaagtagacagcattactaaatctcacaaaaaatacttaatttgaatcctaattaaggctttacaccttatttctgggctacagcaaaaacayggcagagaggaaaaaaactaaatgacactcccgcacttttcaattacactttcccaattttagcactgaaattccaggtcctggaagccccagtgccaggcaaactagaatggttgaccacactagataagggttcaggccaacctatcagattgtctcattttaatagcactttgaaattttctccatcatccacatactaggttttgaatctcaaatcaagaatcttgcagatttcagtttctgatgaccacaccaaatgaaaatttaa

SEQ ID NO: 458182 - DNA, 609 bp, Homo sapiens
ataagctataccacacagcctaggtgtttagcaggctatactatctagctctgtgtaggtacattctatgatgtttgcacaatgaggaagtcgcttaactaggcatttctcagcaagcatacctgtcattaagcaagacataactgtattataaaaattataaatgtataactcagaaaatattataaagtagcctatgaatgtttcaataagacagtttgagatataattttaaaatgaggtgtaaagtagacagcattactaaatctcacaaaaaatacttaatttgaatcctaattaaggctttacaccttatttctgggctacagcaaaaacacggcagagaggaaaaaaactaaatgacactcccgcacttttcaattacactttcccaattttagcactgaaattccaggtcctggaagccccagtrccaggcaaactagaatggttgaccacactagataagggttcaggccaacctatcagattgtctcattttaatagcactttgaaattttctccatcatccacatactaggttttgaatctcaaatcaagaatcttgcagatttcagtttctgatgaccacaccaaatgaaaatttaa

SEQ ID NO: 458183 - DNA, 603 bp, Homo sapiens
ttgagatataattttaaaatgaggtgtaaagtagacagcattactaaatctcacaaaaaatacttaatttgaatcctaattaaggctttacaccttatttctgggctacagcaaaaacacggcagagaggaaaaaaactaaatgacactcccgcacttttcaattacactttcccaattttagcactgaaattccaggtcctggaagccccagtgccaggcaaactagaatggttgaccacactagataagggttcaggccaacctatcagattgtctcattttaatagcactttgaaattttctccatcatccacatactaggttttgaatctcaaatcaagaatcttgcrgatttcagtttctgatgaccacaccaaatgaaaatttaatgtcttcattctgatttgtgggagggtcattgcagaggaagcttatgtactacataagacctcaaagtattagtctgtcagaaatcactatcaatacttcatatattaagctaagaagatattttcataatcttccaaactattaagcctcataaataatgaatctggtatgcattatgaaagaaggcatagacaaaaactatgattatggc

SEQ ID NO: 458184 - DNA, 583 bp, Homo sapiens
tttcacagcaagattctaaaccaaagataacaatatcttagagtctaggaatttcattattatttttactgatttagcaaaaacagaaaataaggaaatggcaccatcagtccataaagttccacagttatatccaggatacacaagccaacgaactgaacttatcaagaggagmagaatgagagtagataaacataaatgatctttcagctgttgctgagtgcacaaagtagcaagttcagaaaaattaactgagaaaggcggtagcagttagatctcgcacatgtagcaagtcaactcaaagtcaggtagtaagacaagccttagtttcagaggtgttgattatatcatgaaactagtacaatgttgtaaaggtaaattctgccttaaattcaggcagcaacatggaggctaaaacgcagggaagagaagtaagaggatagtgggctgacaccttattaacatgtgcttgctcttttcaaagataaaatgagattaaatggtgtaatggaaaatgtgccacatagccaatatcattctaaagatctaccactataatcatattatatattcacacaaatgt

SEQ ID NO: 458185 - DNA, 593 bp, Homo sapiens
tccactttgtcaatgagagaagtgaggctacgcaaaattcagccatttgcaggcaaggtttatctacatcaaaatcaacattaaaccctccagtaccctcaggtgaacatattctccatatcagtggttctcagaccagcaagagaattcttacctaagctcttgtaagtaatgmaaattctcagaatcacccccaaaatcctactgaattaaaagtgctagagttagaggtggaaatcagcaatttgtgttttaacaagccttccaagtgattttgctgcacgctcaagttttaaaccattgaactagttaaaattatttgctctaaaaatgcagcttcaagacaagttcctgactcctattcaaaccaagactgcttttccaaacttttctgaagaaagtttggaactctctggaagagttctacctcttccgctccctagtctgctaaacccaaagtctatccttttctcataatctctgcctcctgatttgttttgcatcttttctccttatttaaccccagaatcactttttcctcatgatgctctcctgttaagatctaccttgccactgctgaatctgccattgct

SEQ ID NO: 458186 - DNA, 593 bp, Homo sapiens
tccactttgtcaatgagagaagtgaggctacgcaaaattcagccatttgcaggcaaggtttatctacatcaaaatcaacattaaaccctccagtaccctcaggtgaacatattctccatatcagtggttctcagaccagcaagagaattcttacctaagctcttgtaagtaatgaaaattctcagmatcacccccaaaatcctactgaattaaaagtgctagagttagaggtggaaatcagcaatttgtgttttaacaagccttccaagtgattttgctgcacgctcaagttttaaaccattgaactagttaaaattatttgctctaaaaatgcagcttcaagacaagttcctgactcctattcaaaccaagactgcttttccaaacttttctgaagaaagtttggaactctctggaagagttctacctcttccgctccctagtctgctaaacccaaagtctatccttttctcataatctctgcctcctgatttgttttgcatcttttctccttatttaaccccagaatcactttttcctcatgatgctctcctgttaagatctaccttgccactgctgaatctgccattgct

SEQ ID NO: 458187 - DNA, 593 bp, Homo sapiens
tccactttgtcaatgagagaagtgaggctacgcaaaattcagccatttgcaggcaaggtttatctacatcaaaatcaacattaaaccctccagtaccctcaggtgaacatattctccatatcagtggttctcagaccagcaagagaattcttacctaagctcttgtaagtaatgaaaattctcagaatcacccccaaaatcctactgaattaaaagtgctagagttagaggtggaaatcagcaatttgtgttttaacaagccttccaagtgattttgctgcacgctcaagttttaaaccattgaactagttaaaattatttgctctaaaaatgcagcttcaagacaagttcctgactcctattcaaaccaagactgcttttccaaacttttctgaagaaagtttggaactctcyggaagagttctacctcttccgctccctagtctgctaaacccaaagtctatccttttctcataatctctgcctcctgatttgttttgcatcttttctccttatttaaccccagaatcactttttcctcatgatgctctcctgttaagatctaccttgccactgctgaatctgccattgct

SEQ ID NO: 458188 - DNA, 521 bp, Homo sapiens
acaaagaactactgctccaggagggaccagctgcaactgtgaatgatggatttcraatttaagagtcgatacagatattagagattatctattccatactttttattttacagataagaagcctgatgtccaatgagataagttagttgtctaataccatataactaacagacagtggaactatattagaattcccagatatctgactccatccagttcaattcacatacaaaaaaaaggataagaaataatgtatttttgatcatagccatcttagataaaaattattaaagcctgaaagaatcaaatattgcaacaatgttgggttttgaacagatgctacattacatgaacaactgaaatggtgaaagctcctgtttttatggatagctacctgtataacaattggcaatattagctctgtattattttgatattatattatctgtaatctacatatggctccatgtgctcctcacctctgccactcctgccttatttcttttcttctcctattagat

SEQ ID NO: 458189 - DNA, 521 bp, Homo sapiens
acaaagaactactgctccaggagggaccagctgcaactgtgaatgatggatttcgaatttaagagtcgatacagatattagagattatctattccatactttttattttacagataagaagcctgatgtccaatgagataagttagttgtctaataccayataactaacagacagtggaactatattagaattcccagatatctgactccatccagttcaattcacatacaaaaaaaaggataagaaataatgtatttttgatcatagccatcttagataaaaattattaaagcctgaaagaatcaaatattgcaacaatgttgggttttgaacagatgctacattacatgaacaactgaaatggtgaaagctcctgtttttatggatagctacctgtataacaattggcaatattagctctgtattattttgatattatattatctgtaatctacatatggctccatgtgctcctcacctctgccactcctgccttatttcttttcttctcctattagat

SEQ ID NO: 458190 - DNA, 628 bp, Homo sapiens
tatgggtgctcttctagttacataactctgttgagtgaacttttgattccggccacacaagccaactagaacctaatctcatgattctttctttcttaatggtagattcattccttattgagccccaaggagtgttttcaatgttttttgagataaaactttctggttaccagaatttgcatacttcctagagttgccattatttcaagccctcatttattatccttatttactaaagctaaatattgaaaacctcctaatcatcattaataacagatgagttaaatacatttacatatttccatataatagagtagtatctagacattaatgttatattgtagaatagttaatatttcacaatataaaggtggctcatgtttgtaatctcagcactttgggaggtcaaggcaggtagatcacctgagtcagaagttcgagactagcctggccgacatggcaaaaccctgtctctactaaaaatawaaaaaaaaattagccaggcatggtggcaggtcctataatcccagttactcagaaggctgagtcaggagaatcgcttgaacccgggaggcagaggttgcagtgagcagagatcagctgctacactccagcctgggcgacagag

SEQ ID NO: 458191 - DNA, 606 bp, Homo sapiens
attagtgatgttgggcatttttggtataactgttggcctttgtatgtcctcttttgagaaatgtttattcagatcttttgcccattttaaaattgtattttttcttttgagttgtttgaactatactgattattaatctcttatcaggtggatagtttgcaaatattttctcccattctgtgggttgtctcttcactctgttgattgtttcctttgtagtgcacaagttttttggcttgatatgattttatttggcatgattgggttgaatctgtagattgctttgggaagtatgaacatttagaactacaataagatccagtaattccactactggaaatttatctaaaggaaagggaatcagtacatcgaagagacatctgcactgtcatgtttattgctgcactattcacaataaccatgatatggaatcaacctaartgttaaacaacacatggatggttaaagaaaatgtggtacgtatacacaatggaatgctattcagtcagaaaaaaaaatgaaatcttgtcattcacagtgacatagatgaaacttgaatacattatggtaagtaaaataagccagaaacagaaagttaaacaccac

SEQ ID NO: 458192 - DNA, 508 bp, Homo sapiens
gggcatttacccaattcatgtacctctgttgtatcgtggaactaaatagtttgtttttgattttacaggctcataggcagaagggacttgcattgtcttatatgagggtttggacttggacttctcagttaatgctggaatgagttaaaacactaggggactattagaaaggcaagattgtgtttttaaatgtgagaagaacgtgagatttgggaggggccaggggtggaattatatggtttacctctrtgtcaccacccaaacttcatgtcaaattataatttccaatgttggggaggagccagtgggaggtgattgaatcatggaggtggatttccctcttgctgttcttatgatagtgagtgagttctcatgatatctggctgtttaaaagtatgtagcacttgcccctttgctctgtctctctgcaattccaccatgtgaagaaggtgcttgcttcctcttttcccttctgccatgattgtaagttttcagaggcccccgcccc

SEQ ID NO: 458193 - DNA, 633 bp, Homo sapiens
tctgtacagccctgggatgaatgccacttgactatggaaaatgacctttctaatgtgctatttaatttgttttgctagtattttgttaaaaatttttacatgtatgttcatcaaggatattggcctttagttatttttttcttttgtatcctcaactggttttggtaacagggtagtgttggcctcctagaatgagtttggaagtatttgcttctcttcacttttttggaacagwttgagaagaattggtatcagttctttgaatgtttggtagaactcagtagtgcagccatcagatcctgaactcttctttgatgaaagactttttattactgatttagttttcttagttatttgttcagattttccatttcttcataattcaatcttggtagattttatgtgtccagtaatgtatccatttcttctaggttattcaattcgttggcatgtaattgtcattactagtcttttataatcctttgtagttctgtggtaacaaatgtaatgtctactttttcatttctaattataggtatttgaatgttttttctttttcttagcttagctaaaagtttgttaattttgtttatttttcaaaaaacaactttttatttgttgatattttgtagt

SEQ ID NO: 458194 - DNA, 610 bp, Homo sapiens
atagtcacattcatttaataataaaacacattctattttatgcatgctttctctgcgamcaaggagaaactttcccgagggagagataaaagtaaaggtaaaaaaggtagacaaagctcattttttttttgcatttatatttcttaaaaacacaaaaactgaaatatgcaaaacatattccaaatcaaccagaaatctgaggaagtattattttgcatttatatttcttaaaaacacaaaaactgaaatatgcaaaacatattccaaatcaaccagaaatctgaggaagtattaatagaacacgatttcatttagaacaaaatcttgaattgtgaacttttaaaaaaaaattacaaaactatttttaatgaagccaatgaaatgtagatttatacaaatccattatataaaaaaagtcttattttaattcattttgattgtaatgtttttaggattcaattgacttggtaggaaattttgaacttagattatttttaactgtaaacactgatgtttcttaaaaaaagactattttccttggagcaaaataaaatttggctttgttgttaactgtttattaattttggggtagaagaattgttataaattt

SEQ ID NO: 458195 - DNA, 492 bp, Homo sapiens
atgtccccttggttttttacccatctcattggtcacttaatctcagttccttttgctaatacctcatcagcctgacctctgtccattgccactcctcatggatcactttctctatttgcattcctttccctggtgaactcatttaatcctatggttcttaataacatttttatttgaacaattttygatataatatctgtacatgtatctctctaagatttttacttgaatatttaataagcatctcaatttgaaagggaacaaaacttaatcacttaaactaacctcaaattaacacctcctgagtcttcctgaccacaatagctactctttctatttctcagacacaaaatcttggaatgattttcctttgttttcttttaatcttcatatttaatccgtcagcaatttccatcaaatttactcaaaatacattcagaaactgaccattttcaccacttgtactgctactgctgtcgtttttcttctgga

SEQ ID NO: 458196 - DNA, 492 bp, Homo sapiens
atgtccccttggttttttacccatctcattggtcacttaatctcagttccttttgctaatacctcatcagcctgacctctgtccattgccactcctcatggatcactttctctatttgcattcctttccctggtgaactcatttaatcctatggttcttaataacatttttatttgaacaatttttgatataatatctgtacatgtatctctctaagatttttacttgaatatttaataagcatctcaatttgaaagggaacaaaacttaatcacttaaactaacctcaaattaacacctcctgagtcttcctraccacaatagctactctttctatttctcagacacaaaatcttggaatgattttcctttgttttcttttaatcttcatatttaatccgtcagcaatttccatcaaatttactcaaaatacattcagaaactgaccattttcaccacttgtactgctactgctgtcgtttttcttctgga

SEQ ID NO: 458197 - DNA, 515 bp, Homo sapiens
gcctgactctcagctttcattcctgcctctccctactctgtatgcactacacccataatctactaaaatttctgtcatacatcaaatgtgccctgtttgctcatactatgctgttctctgtaatgcccttctctccattgttcatctttgccttccaactcttgcttattttccaaaactctactcagatagctcttctctataaaacctttcatgtcctcttatttttctgaattcattttatttcctctgttctcccaaaccccttaacatctttaactatagcatttaaaacactcttcacgaagaactaagagaaggcaggatcttattcaattggctgcattcccatagcccataacatatgacaaagtagatatttaacaaatatttgcaacactaaactgaataaaccaaattgaatattttatcaagactgttcttaagtaacacctactaagggaaacaaacaaaaagygatagaaactgagaaaaataataatctactaaaactg

SEQ ID NO: 458198 - DNA, 559 bp, Homo sapiens
taccccagaatttggcatttatttagcccccaataatgaaacaataagccagccagtctatggcagtaaagtggcatttgagaatctgttctgactttgagattttgtttttagtttgctcactaatttatttaaaaatatttattgagcaccaactatggaccaggcatgatactagtggaatacaatagcaagtaaatgcaattgcattccatttcatctcctatagcagagaaagaaggttgatatcaacaaataattacatcaaaagtttaggattagtacttcatttattaattcactttttatagtattttaagtatctttcatgattcagggagaatccagggtataggaaatacaaaatgagaagggcaggcacytacctgcctccctggagtatggcattctatgggtaagggatagaattggggagggggaaggcagaattgagcagactatgaacagttaaggtcagcttctaaaattataggaaagatattttgatttgtgataaatcctgagaaaaagactgagtagtataatggaaagtaacaag

SEQ ID NO: 458199 - DNA, 604 bp, Homo sapiens
tacctgttaaaatggctatgtccaaaaaaattatatagataagtgttggctgggatgtgaagaaaagggaatctttgtatactgttgtttgaaaygctaattagtatacccattatgaaaaacactatagaaactcccctaaaaattaaaaatagaactatcatataatccaataatcttatccctaggtgtatatctaaagaaaatgaaatccataatggataaagaaaatgtgatagatagataaaagattggtggatagatgcacaaacagacaggcaatgtagtcctatttagattttcaaaggaaaatcttgtcatttgtgaaaacatgaatgaacctagaggtcattgtgctaagtcaaataagccaggcaaagaacgatgcatattgcatgatctcacttatatgtggaatctacaaaatatgagtttctatgtgaactcatagaaagagtatgaagcggtggtttccaggagttgggagaggtaataataggaaggaatgggtaaaatgttggtcaaagggtgcaaagttttgattagacatcagaaataagttccagagatgtgttatacagcatggagagtatagttaataata

SEQ ID NO: 458200 - DNA, 535 bp, Homo sapiens
agaatgctcactatcactaatcatcagggaaattataattaaaaccataatgaaatatgccctcatacctgttaaaatggctatgtccaaaaaaattatatagataagtgttggctgggatgtgaagaaaagggaatctttgtatactgttgtttgaaatgctaattagtayacccattatgaaaaacactatagaaactcccctaaaaattaaaaatagaactatcatataatccaataatcttatccctaggtgtatatctaaagaaaatgaaatccataatggataaagaaaatgtgatagatagataaaagattggtggatagatgcacaaacagacaggcaatgtagtcctatttagattttcaaaggaaaatcttgtcatttgtgaaaacatgaatgaacctagaggtcattgtgctaagtcaaataagccaggcaaagaacgatgcatattgcatgatctcacttatatgtggaatctacaaaatatgagtttctatgtgaactcatagaaagagtatgaagcggtgg

SEQ ID NO: 458201 - DNA, 604 bp, Homo sapiens
tacctgttaaaatggctatgtccaaaaaaattatatagataagtgttggctgggatgtgaagaaaagggaatctttgtatactgttgtttgaaatgctaattagtatacccattatgaaaaacactatagaaactcccctaaaaattaaaaatagaactatcatataatccaataatcttatccctaggtgtatatctaaagaaaatgaaatccataatggataaagaaaatgtgatagatagataaaagattggtggatagatgcacaaacagacaggcaatgtagtcctatttagattttcaaaggaaaatcttgtcatttgtgaaaacatgaatgaacctagaggtcattgtgctaagtcaaataagccaggcaaagaacgatgcatattgcatgatctcacttatatgtggaatctacaaaatatgagtttctatgtgaactcatagaaagagtatgragcggtggtttccaggagttgggagaggtaataataggaaggaatgggtaaaatgttggtcaaagggtgcaaagttttgattagacatcagaaataagttccagagatgtgttatacagcatggagagtatagttaataata

SEQ ID NO: 458202 - DNA, 604 bp, Homo sapiens
tacctgttaaaatggctatgtccaaaaaaattatatagataagtgttggctgggatgtgaagaaaagggaatctttgtatactgttgtttgaaatgctaattagtatacccattatgaaaaacactatagaaactcccctaaaaattaaaaatagaactatcatataatccaataatcttatccctaggtgtatatctaaagaaaatgaaatccataatggataaagaaaatgtgatagatagataaaagattggtggatagatgcacaaacagacaggcaatgtagtcctatttagattttcaaaggaaaatcttgtcatttgtgaaaacatgaatgaacctagaggtcattgtgctaagtcaaataagccaggcaaagaacgatgcatattgcatgatctcacttatatgtggaatctacaaaatatgagtttctatgtgaactcatagaaagagtatgaagcggtggtttccaggagttgggagaggtaataataggaaggaatgggtaaaatgttggtcaaagggtrcaaagttttgattagacatcagaaataagttccagagatgtgttatacagcatggagagtatagttaataata

SEQ ID NO: 458203 - DNA, 442 bp, Homo sapiens
cctcatagctgatcagtcatataccagtgaactattaacatatctaggcagttgcagcaggtgtatgcaggcatggcttgcaggctcagcattcatgtggacctacttagctattaagttgtctagacacacactatttggaaaattcaatcatttaaccaatatttctgagcatggatctcacctgtacttgtaaggagatatttctgtaaaatgaawtatttaaaactatcttaagattatgatcagatgtatgtctcagctgcctactgtttccagctgcacacacctgagcagtctccaaatacttaaacttttcagtatgcttagttttaattaatttaatcatgtgatagattattgataatatccatcgataaattctgtttgtaacatgtatttatttggattcgtatttatttattttagaactttaatgtgt

SEQ ID NO: 458204 - DNA, 471 bp, Homo sapiens
ttttttctcagctttttcacaggcatgtacgtacacataaaaaaaaatgccttcactctcaaataggaagaagtagctgagaaaactrtgacttagattacattgctggtgggggagtaaaatagcatagcaccttggaaaacaatctaacagttcctcaaaagctgaaacatagtttccatacaacccagcaatcccactcctaggtctatacacaccctgcgctgccctacaaaatgacaataaatgcctacacagaaacttgcacatgaatatttataacagcattattcataataaccaaaaagtagaagtgggtcaaatgtccatcaaatgatgagtggtaaaacaaaatgtggtatattcatacaatggaatattattcaacaatttaaaagaatgaagtactgatatgtactacaatatgaatgaactttgtaaaaatttctctgtgtaaaatagacacaaaag

SEQ ID NO: 458205 - DNA, 595 bp, Homo sapiens
ctatgaaaaatcaactaaaaataatttagcatctgacaaacaaaacctaaaactattaatataaaactactggcagaaaacaggcagggtgaaatatccatgacattagtctaggcaatgatttttttgttatatgaccacaaaagcataggaaacaaaagtaaaaatacataaatggaattacatcaaactaaaagccttttgagtgacagagaaaacaatctgttaatttaagcattaattttttggtaaaagaaagcacaatgttcattctaaatatatatatatatatatatatatatataaagatattatcttaattgagaagacattttggccgatatttttttttcagccagagcacttgagcrtatttatcctatttccttagtattattttccatatttattctatttttcagacaaaaggtgaaagaattaatgtatattttatgtaacataatataatcaagtattagaatctgttgtttgggacaaggctaaaatgtgggtgtgaacttcatgtattcttaacaactagaccagggattgcagaaggacaggtagtaaacattttagagtttgcaagcatgtt

SEQ ID NO: 458206 - DNA, 607 bp, Homo sapiens
ttatttttaataagtgattaggcacggaaaattcattttcaattcttatggaactgtgggtaggtgtattcatttcaataaagtaggaaaggaagcatgtgagagagggtaaatttcttttttggtcttcttatcagctggatctctgccctcctcttagtctactagggaacataatgaatcagtttctgatcactggaaaggctatcaggtcaaactcccattcacaattgctacaaagaaaataaaatatctaggaacacaacttacaagggatgtgaaagacctcctcaaggagaactacaaaccactgctcaaggaaataagagaggacacaaacaaatagaaaaactttccatgatcatggatagaaataatcaatatcatgaaaatggcaatactgccaaaggtgatttatagattctagctagaggattgtaaacacaccaatcagcactatgtaaaaatggaccaatcagcactctgtaaaatggaccaatcagcaggacgtgrgtggggccaaataaaagaataaaagctggccacctgagcaagcagaggcaactctctcaggtccccttccatgctgtggaaacttttttctttg

SEQ ID NO: 458207 - DNA, 607 bp, Homo sapiens
ttatttttaataagtgattaggcacggaaaattcattttcaattcttatggaactgtgggtaggtgtattcatttcaataaagtaggaaaggaagcatgtgagagagggtaaatttcttttttggtcttcttatcagctggatctctgccctcctcttagtctactagggaacataatgaatcagtttctgatcactggaaaggctatcaggtcaaactcccattcacaattgctacaaagaaaataaaatatctaggaacacaacttacaagggatgtgaaagacctcctcaaggagaactacaaaccactgctcaaggaaataagagaggacacaaacaaatagaaaaactttccatgatcatggatagaaataatcaatatcatgaaaatggcaatactgccaaaggtgatttatagattctagctagaggattgtaaacacaccaatcagcactatgtaaaaatggaccaatcagcactctgtaaaatggaccaatcagcaggacgtggrtggggccaaataaaagaataaaagctggccacctgagcaagcagaggcaactctctcaggtccccttccatgctgtggaaacttttttctttg

SEQ ID NO: 458208 - DNA, 553 bp, Homo sapiens
tgtttttttcttgtgttgtttgtgtttttgagaattaattcacaaaatgtcttcccggaccaatgtcttgaagcatttctcctatgttttcttctagtagtttcatagttcaggtcttacagttaagtctccaatccattttgatttttgtatrtgatgagagatacgagtctagttttattcttcttgcatgtggatatccaatcttcccagaactatttactgaaaagactatcctttccccagtacgtttccttggcccctttgtcaaaaattagttgactgtagatacgtggattaatttctgggttctctgtactgttccattagtctatgagtctgtatgtcagtaacatgctgttttggtaactcaaattttgtagtatagtttaagtaaggtagtgtgatgcgtccagctttgttctttttactcaagattgcttttgctattgatggttttttgtggttctatataaattttagaattgtttttctatttctgagaagaatgtcactggttattttgatagggattacattgaatctgtaagtc

SEQ ID NO: 458209 - DNA, 587 bp, Homo sapiens
tgtttccttcactgcacagaagctttttaattttgatataaccccatatgtttttttcttgtgttgtttgtgtttttgagaattaattcacaaaatgtcttcccggaccaatgtcttgaagcatttctcctatgttttcttctagtagtttcatagttcaggtcttacagttaagtctccaatccattttgatttttgtatatgatgagagatacgagtctagttttattcttcttgcatgtggatatccaatcttcccagaactatttactgaaaagactatcctttccccagtacgtttycttggcccctttgtcaaaaattagttgactgtagatacgtggattaatttctgggttctctgtactgttccattagtctatgagtctgtatgtcagtaacatgctgttttggtaactcaaattttgtagtatagtttaagtaaggtagtgtgatgcgtccagctttgttctttttactcaagattgcttttgctattgatggttttttgtggttctatataaattttagaattgtttttctatttctgagaagaatgtcactggttattttgatagggattacat

SEQ ID NO: 458210 - DNA, 581 bp, Homo sapiens
ggcctgggcccagcctggctctgcacaattaagttcattcctgggccaggctcataagaaaggtaacattccactggaaatattgagtatgtggatgtagattccaactttcctatcttctatttatattttattctgttctcaagttcgtagatgactgtacttgttcccaatttgaaatattttagcwcttccacttttcttctcaaaaatctcacttagattggttgacttctctgtgatatttaggacgaatgtcccatatgtgtataaaatatgactgtgtgaagaagcagtgccaaccagtacttagaaggcataatctggaatcaagctgttcaagctcagatttcacattttcatttacaggctgtgtcatcacggacaacttaatcaatccctctgtgtcttgttttccttattcgtaaaattggataacagtatctgtctaaaaaaattgcactaaataacacctataatatgtttaaatgagtgtctggcttacagtaggtattcaacatatattagctactattactttgcagctttgggagagggacacaaaaggaacacagcagtta

SEQ ID NO: 458211 - DNA, 530 bp, Homo sapiens
tgaggttctaaaactgaattagcttctgagtttgtgaatataggaaacagttaaacttcaaaaccatttctcatagcatagtattgattttgctcccaagttaatcctaagtttaggctgaatgtaatgctaatggtgaagactgtccatccacatttctaaatgtgtttgtccatcagttaatgacaaaagcaagaccttgagcatcttttcattattgagtccagcaaagaatatcaatataatacagccttcagaattatttctaccatttggtgaaaatagaaaagttaattataaaaaaagaaatcacaaaggggattacaaattygacttcaaaaggtaaaatttcatgttatttttacccattggataggaaaaaaattatctagtagataatttgctcacaagttaaaccaattatctagtggtttcgaattttctatttgatcccacttcaatagtttgtctctgggaaagattccaattcagtctggagcactgttttttccatgggaaaatatgtaaaa

SEQ ID NO: 458212 - DNA, 524 bp, Homo sapiens
gcaatgaatgacccattattcatgaatttcttttcttattctattatactttaagctttagggtacatgtgcacaacgtgcaggttagttacatatgtatacatgtgccatgttggtgtgctgcacccatcaactcgtcatttaacattaggtatatctcctaatgctatggaatttttatattgttggagatgtaactttggyatacattcctagaagtggtattgcttcatcaaaagataagtgcatttacagttttgttaagcattgacaaatttctttccagaaggacctcaccaatgcattcccaccagcaaacctccaggtgtttctgaatcacaaccatagttttattctaaaacctagacctgataccaagagcgggacgatgcagagacataaaatagcagcaagcatagatttagaggaccattcaggtagcaccttcatctgcagagcgagcattgaaggaataaactgctatcaaaaactgtcaagttccagcattttaaattttgtaagcg

SEQ ID NO: 458213 - DNA, 565 bp, Homo sapiens
tttttaaaaaaacataaatggatggatcatagttatttccccttttaatgcttttagtgtgtttctcctctcagaaatgaactcaatagttcaagtgaagtctgaccagtatagtgaggattggagccttccttgttcaagatagaatatcacacttcttagaatgcagctagagattacatcagcatgttttcttccagctatacccactatttactcatgtcaaatgaattttaagttaaaatccaattcatttttttcatattatatcaaatcatatattcatagtatatattagtgcagaagcattttttatccaaatayacaaaaattgatgtcactcatggtaaatttattcttactggatctatcaaaccatgctttaagaacattctggattctgacattatcgtcgtttatgtttgttatctctcctattcttgtttgctagttgtgagctagtcctcataatcctctttccaatatattgataaaagcatgtttatttatttacttattcagtgactatttattctgtatctatgacatgtaagcacttttctag

SEQ ID NO: 458214 - DNA, 608 bp, Homo sapiens
ttactcatgtcaaatgaattttaagttaaaatccaattcatttttttcatattatatcaaatcatatattcatagtatatattagtgcagaagcattttttatccaaatatacaaaaattgatgtcactcatggtaaatttattcttactggatctatcaaaccatgctttaagaacattctggattctgmcattatcgtcgtttatgtttgttatctctcctattcttgtttgctagttgtgagctagtcctcataatcctctttccaatatattgataaaagcatgtttatttatttacttattcagtgactatttattctgtatctatgacatgtaagcacttttctaggcactggggaattcattggtgagtaagagacatgacctcaggcctcatgccacttatattctaggccagtggttttctaactttaacatgcatcagatcaacctagaagacttgttaaaatacatatcactaacctggccccaccaccaaagtttctgatttaataggtctggtttccagggtcttgggggaggtgagattttatatttccagcaagttcctagatgctgttgatgtcgatagttcagggaccaca

SEQ ID NO: 458215 - DNA, 608 bp, Homo sapiens
ttactcatgtcaaatgaattttaagttaaaatccaattcatttttttcatattatatcaaatcatatattcatagtatatattagtgcagaagcattttttatccaaatatacaaaaattgatgtcactcatggtaaatttattcttactggatctatcaaaccatgctttaagaacattctggattctgacattatcgtcgtttatgtttgttatctctcctattcttgtttgctagttgtgagctagtcctcataatcctctttccaatatattgataaaagcatgtttatttatttacttattcagtgactatttattctgtatctatgacatgtaagcacttttctaggyactggggaattcattggtgagtaagagacatgacctcaggcctcatgccacttatattctaggccagtggttttctaactttaacatgcatcagatcaacctagaagacttgttaaaatacatatcactaacctggccccaccaccaaagtttctgatttaataggtctggtttccagggtcttgggggaggtgagattttatatttccagcaagttcctagatgctgttgatgtcgatagttcagggaccaca

SEQ ID NO: 458216 - DNA, 608 bp, Homo sapiens
ttactcatgtcaaatgaattttaagttaaaatccaattcatttttttcatattatatcaaatcatatattcatagtatatattagtgcagaagcattttttatccaaatatacaaaaattgatgtcactcatggtaaatttattcttactggatctatcaaaccatgctttaagaacattctggattctgacattatcgtcgtttatgtttgttatctctcctattcttgtttgctagttgtgagctagtcctcataatcctctttccaatatattgataaaagcatgtttatttatttacttattcagtgactatttattctgtatctatgacatgtaagcacttttctaggcactggggaattcattggtgagtaagagacatgacctcaggcctcatgccacttatattctaggccagtggttttctaactttaacatgcatcagatcaacctagaagacttgttaaaatacatatcactaacctggccccaccaccaaagtttctgatttaataggtctggtttccagggkcttgggggaggtgagattttatatttccagcaagttcctagatgctgttgatgtcgatagttcagggaccaca

SEQ ID NO: 458217 - DNA, 571 bp, Homo sapiens
gaatctgaacttgaactcaaatcttcacaagagagcagagtcaatagtacattaagaaaagtaaaagcttatttcaaagtcactatctatctcctaggtagatatgagttactaaaagtttgagcacttattttcacaactgctcttaagtttaggcaccctgtgagacatgaacaatggtgcatctgaatgtcttggaaaaaatccctaatctcagatcattarctattgcttggatgaaagccaaagaattgtacaaccagtactggcagctgtgatgtggcagataggcttctaggaaaattcacgggctgacccagccagctagggcctatttggtctgttgacatgtgcgctctccacactgactgctgagctggaagtggacactgaagagatgggtgggtgggttttaaaggttctaacttagggccctttctgtagcctgtaggcaggtgttccgcttccagagtgataagtacaccatagacctaccacaatggtttgtttgaaccactctttgtgctattctggggatgagcctaataaattataaatcacacttactagt

SEQ ID NO: 458218 - DNA, 483 bp, Homo sapiens
ctgagtacttatatgtgctagtaagaaattgatatatactaatwaatctaatagtgcaaatacatgttaagagataggtaagattgggaaactgaaacacaaagaggttcagttaccagttgatggtcacacagttcataatttagttgagttaacatacaaacccaggaaatttaacttcacgtctcatacccttaatctccatgacgtattgcttcttgccagtagtaactgattcactgaataaaaaatgagactgatcatctatacctattcaacaaagtaacccgatgaagcaactccaagaatgttattagcaactattactgaattccataaactcaaaaaatcctccttgtttaggcaactttactgtgaacacttgaaataagaagacttggagagcaagagacagagagtgagaaggacgagtctggattacacatttcttatccagacccagtatagattaataaatcacaa

SEQ ID NO: 458219 - DNA, 648 bp, Homo sapiens
  misc_feature (1)...(648): n = A,T,C or G
tgaagaattagttcttcatgctccttaaaatccagcttcttcaaaaagaccatccttgactttaattatttaaataacacccacatgccactaaaaaacttcttacaagccactnnnnnnnnnnnnnnnnnnnnnnnnnnnnnnnnnnnnnnnnnnnnnnnnnnnnnnnnnnnnnnnnnnnnnnnnnnnnnnnnnnnnnnnnnnnnnnnnnnnnaacttgattggattgaaggatgcaaagtattgtttctaggtatgtctgtgagggtgctgccaaaggagattaacatttgagtcaggtaacagagagaggcagacccaccctctatctgagtgggcaccatccaatcagctactagcattctaggataaaaacaggcagaggaacctggaaggactggattggcctgagtcttctggcctccatctttctcttgtactggatgcttcctgccctcaaacatcgaattccatgttctttagcttttggactcttggacttactccagtggattgccagggactcttgagccttcagccatggactgaaggctgcactcttggcttccctacttctgaggttttgggtctcaraatgacttccttgctcctcagcttgcaggcagcctattgtgaggcttcaccttg

SEQ ID NO: 458220 - DNA, 504 bp, Homo sapiens
tgtgtggtttatttctgggttctctattctgctccactggcctatatatatatgtgtatatatatatatatatattttttttttttgtagcagtaccatgctgtttyggttactctacccttgtagtgttgtttgaagtcgagtaatgtgatgtctccagctttttttttttaggattactttgactgttcaggctcctttttgattctatatgaattttggaagagctttttctagctttgcgaaaaacgatattggtagcttaatagaaatagcgttgagtctatagattgctttggacagtatggcacttttaaaaatattgattctttcaatccatgaatatggaatatttctctattttttgtgttacctataatttctttaaacagtgttgtgtagttcttgtagagatccttcacttccttggctagatgtattcctgtttttttgtggctattataaatgtgattgtgtccttcatttggctctgatattgaatgt

SEQ ID NO: 458221 - DNA, 532 bp, Homo sapiens
aagcttacggggttgatctttatgcactatcttgctattttcaagtgactgaagcacactaaaagccattaatcattttttccatcttggggaaaaraatgaatctattattattatttttagtggcacaagaattcaggtttaacttatctttgccctttctacttaggctcttttctgccttagttttaaaaacagctgcaaacttcagaagaagttcttggctacgtaaaatatttttttctctaagatatttacccacttaattttcaaacttaggacagcattttttaacttaacctaaaataggtcatgtagacctaaagtgtctacgtttttctactcaaattttaaaaacttttcctcttctatgatatatgtgttatttcaactgccatttgctttattgttgtatctgtaaggtcctatgtgcctattagttcagttctctttttcgcaattatatttcccactattactattgttctaactccaattttaagtaaaatacaataatggtaaaagtaagtgt

SEQ ID NO: 458222 - DNA, 532 bp, Homo sapiens
aagcttacggggttgatctttatgcactatcttgctattttcaagtgactgaagcacactaaaagccattaatcattttttccatcttggggaaaaaaatgaatctattattattatttttagtggcacaagaattcaggtttaacttatctttgccctttctacttaggctcttttctgccttagttttaaaaacagctgcaaacttcagaagaagttcttggctacgtaaaatawttttttctctaagatatttacccacttaattttcaaacttaggacagcattttttaacttaacctaaaataggtcatgtagacctaaagtgtctacgtttttctactcaaattttaaaaacttttcctcttctatgatatatgtgttatttcaactgccatttgctttattgttgtatctgtaaggtcctatgtgcctattagttcagttctctttttcgcaattatatttcccactattactattgttctaactccaattttaagtaaaatacaataatggtaaaagtaagtgt

SEQ ID NO: 458223 - DNA, 603 bp, Homo sapiens
tccagtgaattctcattttccttcttgaattaaagcttacggggttgatctttatgcactatcttgctattttcaagtgactgaagcacactaaaagccattaatcattttttccatcttggggaaaaaaatgaatctattattattatttttagtggcacaagaattcaggtttaacttatctttgccctttctacttaggctcttttctgccttagttttaaaaacagctgcaaacttcagaagaagttcttggctacgtaaaatatttttttctctaagatatttacccacttaattttyaaacttaggacagcattttttaacttaacctaaaataggtcatgtagacctaaagtgtctacgtttttctactcaaattttaaaaacttttcctcttctatgatatatgtgttatttcaactgccatttgctttattgttgtatctgtaaggtcctatgtgcctattagttcagttctctttttcgcaattatatttcccactattactattgttctaactccaattttaagtaaaatacaataatggtaaaagtaagtgtgctaatctattatggatcatttttaccagctaccataaa

SEQ ID NO: 458224 - DNA, 565 bp, Homo sapiens
taactccaattttaagtaaaatacaataatggtaaaagtaagtgtgctaatctattatggatcatttttaccagctaccataaatctaaaccattctcttaaaaaattcagtttgaagtattaaaaacatggtaaaaattagagtaggaatgtgttattaaaattctcattagtgtaatttagwtttaagagagttttatactttttggctgtttactgttcttccttgacgcaaatttcttacttaaatatttttagaacagaaaatactttctgaagttctgtaagatctcagagagggctaatatttatctgtttctattgatttgttaattaaggttcaaccagacaaagccactaatatccatgaagatggggacacttttatgaacaaagctttgcttttggtcaaaaatacagtgtacacctctctgtgcactgtagatgtacagaggacatctacagtctagatgtaccagtgtatatcctctctggatgaggaccctgggaaaggagggtgcatcactctgctgaagatcttttagtttcataattagtagaatgt

SEQ ID NO: 458225 - DNA, 526 bp, Homo sapiens
cttactcactatcatgagaatagcatgggggaaaccactcctatgattcaattacctcccatagggtccctttcatgacaggtggggattatgggaactacaattcaagatgagatttgggtgggaacacagcccaaaccatatcagtgttattttaaacaactaacagtgtcaattcagtatgtggccctcatgatctgagaccaaaaaaaatacaaaaagtataaataaaaatgaatgtgggtggagtcctaaacaatattatatttgtgaccattgtataaaccagcttaggaaaaaaatatttttctttatcattttgtaraagatgaaaaattcagagtcatggcatagtatcataggagaataggagaatgatagctgtgtgctaataagaataatcaaataaacaactttatttttactagcttttattatattgttacccatcttcaaatctgttaatttttttttatttgacagaggaaataatacaaacttatagaaatatacgttaattataatt

SEQ ID NO: 458226 - DNA, 604 bp, Homo sapiens
cttgaaaaaaaagaaaatatgaaaactcctatttctatgtatttctaaatctcattatttcttcactttttatttttatatatcgtaatacttatgatatagtagagcataatacatttctaattcataagtaatgtgcaatactttgccatttatcactgtgagtgatgaatcaaaagcatttagagatcaccggtgcagataaataggcagtgctcaggtgtctctgtgtatgtgaytgaatataggaattcagcatttagtactttctctacaggaagagatctcccagaaaattttaacttcatatttatttatgcagagaacatgttttagtgactggttaccttagtgattggtatctgctccttcccgatggcactttctgttctctctcagtgctcagtgttctggggctaaaaagcacttgggaggccacagaatctgtagacacttttatttgacatatgagtaagcagacccctgttgctaagagtggcaagtgcagagtaattcttcctaaagggtgagaagagagaaaggaaattattttgcaaagtgttatttacttaattttattttatctttttattttttgagacag

SEQ ID NO: 458227 - DNA, 598 bp, Homo sapiens
aatttatttaaccatccaaatacatcatcatggaattctgatcagtgaaattgagtatatttggttaaataatgaaattttcttcatcacacatgtagttttgaaygcttaccaggtcagtcaggcttcctgcttagtaccctgtgctccctcctatagaggtacaatacaatttgggactttcccaggtaaaatttttcctcttctggcatatttacctttactacatttttatagtttttcacagtgttataatcatttgccatcacattttttacttgggaagcacacatttgtatgtctcatattaaggattcagtcttcttggaattacattttcaaagtcattattggaaatgtaatttttagtaagcaaactatttgctttcctgtataactgaaattatgactcattcagtggagtgctcagagcttgctcaatttaagagaattttattatgaaaacataaatctctttaaaaaaccatggcatgtttctcccctaacccccaagcagttagttcaagtagagaccctctagaaaacagcaccttgtgttgactaagagttttgcaaccatgtcaaaggccaggtatta

SEQ ID NO: 458228 - DNA, 598 bp, Homo sapiens
aatttatttaaccatccaaatacatcatcatggaattctgatcagtgaaattgagtatatttggttaaataatgaaattttcttcatcacacatgtagttttgaatgcttaccaggtcagtcaggcttcctgcttagtaccctgtgctccctcmtatagaggtacaatacaatttgggactttcccaggtaaaatttttcctcttctggcatatttacctttactacatttttatagtttttcacagtgttataatcatttgccatcacattttttacttgggaagcacacatttgtatgtctcatattaaggattcagtcttcttggaattacattttcaaagtcattattggaaatgtaatttttagtaagcaaactatttgctttcctgtataactgaaattatgactcattcagtggagtgctcagagcttgctcaatttaagagaattttattatgaaaacataaatctctttaaaaaaccatggcatgtttctcccctaacccccaagcagttagttcaagtagagaccctctagaaaacagcaccttgtgttgactaagagttttgcaaccatgtcaaaggccaggtatta

SEQ ID NO: 458229 - DNA, 598 bp, Homo sapiens
aatttatttaaccatccaaatacatcatcatggaattctgatcagtgaaattgagtatatttggttaaataatgaaattttcttcatcacacatgtagttttgaatgcttaccaggtcagtcaggcttcctgcttagtaccctgtgctccctcctatagaggtayaatacaatttgggactttcccaggtaaaatttttcctcttctggcatatttacctttactacatttttatagtttttcacagtgttataatcatttgccatcacattttttacttgggaagcacacatttgtatgtctcatattaaggattcagtcttcttggaattacattttcaaagtcattattggaaatgtaatttttagtaagcaaactatttgctttcctgtataactgaaattatgactcattcagtggagtgctcagagcttgctcaatttaagagaattttattatgaaaacataaatctctttaaaaaaccatggcatgtttctcccctaacccccaagcagttagttcaagtagagaccctctagaaaacagcaccttgtgttgactaagagttttgcaaccatgtcaaaggccaggtatta

SEQ ID NO: 458230 - DNA, 498 bp, Homo sapiens
tggtgagactatcatgtaacaggtttacacacatatttcttaagtcagttctgtgaagttttagagccrtatcctccatgggccaactcttaaccatcacgagatgcatttataattattcccagaaataagcttttaatgttgcaaaaagtaaaaattttataatatttgaaagtaatattattcactttgtaaaatgtgttctaaaattatttttgtcccaaaagaaagctgaacgatgcctattcaaattatttacctgacagaaaaatgctttttattgaccctttattatttgaaaatgtcattatgagcaacttaaaatttaatttctctacaataatgttatactcagtattttatacttgatttaatatatacttgcaatgcatacttgatttttaatatatacctgcaatttattagcaaaattaaatttctctacaataatgttatactcagtattttatacttgattttaatatatacttgcaattt

SEQ ID NO: 458231 - DNA, 595 bp, Homo sapiens
ttgtgtccctacttatgagtgatcttcatgactctcaactgaaagtatgaggtgtagcattgtgttttcatgctagttaaacattgcagggttttttggttttgttttttgttttttcttaccacacatcttttggcatgtacctaatattctgggtagcatgtactttctggtgattgcatctgtcgaaagctcccatgagtcaaggctatgaccagagctttaagtgaaccctccaaagtttcagctgctctggacrggggagccagttgaaatggagctttcaattggagtagatatgtgtattttctgatttataatgtaatttagggaactgcaaaatggggtcatgaattcaacagagaatgtgaagaaagacagggaaaggccccttataattttcaaaatattatcatggccaaagtttttataaacaaaatactgttaaaatttctaaagcaatggaaaacgattattagacaattttagttttgaaataactcactaaagggtataaatcaataaaagccaactaaatatattctagttgtcatctctgtgtaaatgaacaaatgccaggtgactgctcaataga

SEQ ID NO: 458232 - DNA, 569 bp, Homo sapiens
tgcagtgagcacacgagatgtttttactcaactaattcttctctgaggaaaatagaaattatattcacttaaacaacacatttaactcaaaggataaatgcttgaggggatggatactcccttctccatgatgtgtttatttcacattgcctgcctgtatcaaaacatctcatgtatcccataaatatacacacctatgtacccacaaaaattwaaaaaaataaagaaccaaacaacacattaatgtgattttccacacaattgaacagaataaagcatttatatagtagaaaaatagtagcgaattatcacttttctgcttagattatttcttgctttgagatgagttttctgttgttatcatcgctgctcaacgctaacagaagctcctgtgttggtgtttgttaatctcccgcattatgtgtatcgctaatgtcctaccttgaaaattttcccatcacttttctgttcaatgaaaatatttttttccatgaatctcaaccaacttgtgataaattttgcaatggaacttttccattgttaaacattgaataattctaaacacattt

SEQ ID NO: 458233 - DNA, 622 bp, Homo sapiens
gtctccatggtcgatagtgcagaaaccacattggttatatatgagaagcattgtaaaactggatgtatttatagaaatgcttatataacatgcagttatttttaacaagaaagagttgaagttgtttagtgcagatgcataaattgtcttacaaataaaatgattgattgcaacagaattcacactttctgatatcatccaatagctatacagtcaagtgtttaccatacatggcagactggacatcagacaaaaagatctaataagcaaggatcttgatgtcagaaaaagtgcatgctgtcaaagaagaaggagaggttcatgcttgtagataaatcaaatgagcttgagaaattggccacattacttttatggccatcagtgtgcagcagagaacctactagataaagaatttgcttttttkgggttctagtgatgggtacaaccgaattcttcagtggtacctcattgtgtcttctatactaatgaaagctctcaactgataaatgaaaaagaacaggacaaccaggttcttcatcctaattgtttacaaaatttgtaagttctgaaacataggtgatgttaaaaagaaaacctcccattcaaggtgttatattattat

SEQ ID NO: 458234 - DNA, 621 bp, Homo sapiens
ctggtcaaactctgggcaccttgagaatttccatagcatgaagaagatggcctaatttcaccctcaaggaaaacacatgctaataaaaacatttcattttgatttagggccaattgctaaaatcgtatgtttgaacacatgcatgtcctttttacaaacaaagcacaaaaccagagactgaagaacacttttggaagcayaaaatctgtgattattatctagctttccagaaacatctggaattttgagttcctgttcttattaccctggaaagcaataagcttcctcctgtcattcaccttcttttgaccttattgtaacaaggcttaaaaggagacttagatttgtctgtagtagtaacatctaagacattaaatcatcttatgatccatattgtccaaaatcattctaccttggaagtgatatgggaatgactgttaagatataattagattttgctgacataaatgtttgtttcgctttttgtgctagcatttaacgtattttcttaggcctaagctcctcaaaatttccaagtagcttataaatattaatgttgaaatcatttaacccattgcggctatcaagtaactcaacgtaaagaagtaaaaagatcttgtt

SEQ ID NO: 458235 - DNA, 621 bp, Homo sapiens
ctggtcaaactctgggcaccttgagaatttccatagcatgaagaagatggcctaatttcaccctcaaggaaaacacatgctaataaaaacatttcattttgatttagggccaattgctaaaatcgtatgtttgaacacatgcatgtcctttttacaaacaaagcacaaaaccagagactgaagaacacttttggaagcacaaaatctgtgattattatctagctttccagaaacatctggaattttgagttcctgttcttattaccctggaaagcaataagcttcctcctgtcattcaccttcttttgaccttattgtaacaaggcttaaaaggagacttagatttgtctgtagtagtaacatctaagacattaaatcatcttatgatccatattgtccaaaatcattctaccttggaagtgatatgggaatgactgttaagatataattagattttgctgacataaatgtttgtttcgctttttgtgctagcatttaacgtattttcttaggcctaagctmctcaaaatttccaagtagcttataaatattaatgttgaaatcatttaacccattgcggctatcaagtaactcaacgtaaagaagtaaaaagatcttgtt

SEQ ID NO: 458236 - DNA, 565 bp, Homo sapiens
aattactgtgtacattttctttatggtaaacaattttcatcagcaaggcatgtatatgtgtgtatattttttatctctgccaaactatttcttttggttttattaatcttaacatatgttcccatgacatctcttcttgaaaaagagaaacacaactaactcatgcatgaaactggaaaaacatcaatgaaatcatgcctgaaaactgtagtggactctgttgctgcctgagccagattgcctttactgagttggaagccctatcatcagctgctcttagtgttagatgctaacagtttacagctgctgcattttctgaagcacactcctctgcagacttgaagccgcttcagtcccaccccaacackggtgacccacagccaataactgccataaggatgacaaaaagcagacttacactccagagctccccatgaggccaggctgaggctagactctagctgagataacatctttgcttagagcctctctctgtcctctcctgttgccttcatactctttcttcagagtgcacacacccaaatatcacatgcacctgaatccc

SEQ ID NO: 458237 - DNA, 648 bp, Homo sapiens
tttattttgacctggccttactcctgatcccatgtagactcatatctaccatctatgactaaaagcatatttgtgacaaaggaattaacttggtatggcttgagggagaaagtgagtgataaaaatgtaagggtaagttgaagttaggttgcggacactctgagtttgaggtcctttggctttcattctatttatacagtcatggagtattaataatggtttcagtaaaaaaaaaaaaaaaatcatcataccatgggcaagaaattatcattgcacctcactgtagaagtaaaagtagaaatgatgtctcccaytctttgaaagaatattaagtatgaaataaaatgtgcatcctttcattacttactattttttttaagtgcatcggggtgaatatctctgcgtgattctttgcagggtttcacttctgctaccaagaataatctctgcaggtaaacctagtttacttagttctgttatccaatttcaataaaagaaatatttaccttccagatcccaaggaactagattattaggtaagaaaaaacattaaacgtatcaggactgaccaaaaggcaaggaagtctctggcatagcctacggctgatgctgaacataaagcaaaggtacagggaatcttccattatg

SEQ ID NO: 458238 - DNA, 610 bp, Homo sapiens
taaaataaacagatatggaaatatgcrtatgcatgagtataaaatatattccttagctctgtcaactaagagtgtgtaagagcagtgatacccccattagccataaacactcatatattttctctaaatattattgtcctttatccactaaaagaaatcatggcaccttggagaaatggaggattcagggctaaggtagagaaactgtaagttgagtctggaacatctaatgtgctgcagtataaggaattgctcaaggaataatggggatatgccaaaaattcagagaagtttcaaggggctcccagtggccaagccttagacaacttgaagatcaaaataaatgattgtaacagattataacccattggattacggcagaaacccatgagtctgtattcacataaataaacaaacaataaattgacagtttgatgatgaaagggataaacataaaatctcaaaatgcctttccaaaaaaaatatgcattaaatagacagagaaaagaggagatttccaatggaaaaggctagcagacagcaccttctgtcatctggttaataacatgagtcatgggatgaatcaaaattctgcatcacctgatggatg

SEQ ID NO: 458239 - DNA, 555 bp, Homo sapiens
ccaaaaaacaaccgggtaaaacacctctcatacctgttcaataatctgcttaggctagtcaagtgatagttyattttaattaatactaatcagaagaaaaatatttgtgtaacacacatttttgaacatcatagaagatgcaatgtataacagaaactttgattttcagatcaatattattttatttccaatatgttgaattatactgattcagaattattaaggccaaaagaagctactgaaatcttgctaaagagaagtagactggaaaatgggttagatgccaactgttttgttactgtatattctaccacactttcttcctgtgaccatggcttgggactctaagagtttcaattcaatttcaggagcttttaagggtttgcttcagatttccttgattttaaatgaagacacagataaacttggtctttgcctacataggtaaactttagggattttgaaaaggtgaataactgaggaacctaatcataccaatagaaaatgcaagcaagagaaatttcagatagtttgtgatacaaaaggggagaaact

SEQ ID NO: 458240 - DNA, 482 bp, Homo sapiens
gtgtgcatgtaaaagaatttgactgcctcctgatttgcttcctgggattatatttattaggtatttactttttatgaggtgagaaattaggggcagatgtttgacagatttatgttttctctagcagtgaacttcatctagaatcgtggtaagctggattactttcaagttctagacactgtttttttagtttgtttctttgttttttaaaataaaacaccagatatctgatcatggtctttgtggccttatcgctacaaatgttagccatatacatataattttaagtattctattagttacatgaaaaataaagtaaaaattaatggtaaaattaattttagtgatatatttatctaacccaataaayccaaaatagtatcattcaacatgtaaccaatgcaaaaatttttgataacattttaacttatgtgtacaggtttttgaattctcatgtgttttgtacagttaaagaacatttc

SEQ ID NO: 458241 - DNA, 482 bp, Homo sapiens
gtgtgcatgtaaaagaatttgactgcctcctgatttgcttcctgggattatatttattaggtatttactttttatgaggtgagaaattaggggcagatgtttgacagatttatgttttctctagcagtgaacttcatctagaatcgtggtaagctggattactttcaagttctagacactgtttttttagtttgtttctttgttttttaaaataaaacaccagatatctgatcatggtctttgtggccttatcgctacaaatgttagccatatacatataattttaagtattctattagttacatgaaaaataaagtaaaaattaatggtaaaattaattttagtgatatatttatctaacccaataaatccaaaatagtatcattcaacatgtaaccaatgcaaaaatttttgataacattttaacttatgtgtacaggtttttgaattctcatgwgttttgtacagttaaagaacatttc

SEQ ID NO: 458242 - DNA, 516 bp, Homo sapiens
agtttggaacttcttcgagacttcttgaatggctttgaccaaaatgctgatagtgatatggaaaatgaagtccaggctgcggtattctcagagggagatgaggaacttggtgggaactggagcaaaggtcactcttgctatgctttagcaaagagattggagacgttttgctcctgccctagagatctgtggaactttgaaattcagagaggtgctgtatggtatcaggcagaagaagtttcaaagcagcaaagtgttcaagatataacctgggtgctcttaaaagcattccgttttatatattcacagagaaggtttgaaattggaacttatgtttaaaagggaaacagagcataaaartttggaaaatttgccgcctaaggatgcaaaagagaagcaaaacccattttctagagagaaattgaagtcagccccagaaattagcataagtaacaatgagccaattgtaaatcacaagacaatggagaaaatgttcccagggcatgtcagagacct

SEQ ID NO: 458243 - DNA, 565 bp, Homo sapiens
accccagcactttgggaggctgaggcgggcggatcgcgaggtcaggataccgagaccacggtgaaaccccgtctctactaaaaatacaaaaaattagctgggtgtggtggcgggcgcctgtagttccagctactcgggaggctgaggcaggagaatggcgtgaacctgggaggtggagcttgcagtgagccgagatcgcaccactgcactccagcctgggtgacagagcgagactcggtctcaaaaaaaaaaaaaaaaaaaatacacacatgcatatattcattgcagtactatyacaatagcaaagacatggaatcaacttaagtgcccatcaacagtagactagataaataaaatgtggtacctatacaccatggaatactatgaaaatcataaaatgaatgagatcctgtcctttgcagcaacatggatagatctggaggccaatatactaagcaaactatcacaggaacaaaaaccaaatattgcatgttctcacctataagtggtagctaaatattgaatatacatggatacaaagaagggaacaacagacaatgggccc

SEQ ID NO: 458244 - DNA, 554 bp, Homo sapiens
aaaaaaattcatagaggaactrgataatggaaattaggagaaaatattttcaaaccatacatctgataaaaagctaatatccaaaatacataaggaatttaactgaatagcaagaaaaagaaatctcaatataaaaaatgggcaaaggaactaaattcttctcaaaagagtacatttaggtggtcaacagataaatgaaaaatgttcatcatccctaaccagagaaatgcaaattaaaaccacaataaaaactcccatgtgttaaagtggctatttttaaaaatacaagagataacaagtgttgcgtagtgtgtggaggaaagggaattattgggtaatgttggtgggaatgcaaattaacatagccatgatgaaaaagggtatgtatgttccttagaaaactaaacatgtatttaccataggattcagcaatcccacttctgggcatataaagcaaaggaactgaaatcagtatgtggtggagctacctgtacttctatgtttactgcagcattatttataatagctaagctagaaaccacctaggtgcccat

SEQ ID NO: 458245 - DNA, 463 bp, Homo sapiens
aattctgtctcttgtttgactgcactctaacttatgatttataaaagggtaataagaaatttttgataatgtactctgaataagttaatattattagatttcatgtatcaatggaacaagggaatacaagctacagtgttctcaacataatttttatgcctaatcaattgaatataaaatagactgatggtttagcaaaattgtacaaaatgaattttaaaaggaggtattagattcttgaatttttttaacaactcgtattttaataagaattcctaattagatataaatgctctcaaaagaagggttataggtactcaattgtccttaaatattctgctttgaggttagggggctataytaatatctcatcttttccctttcatctatctgttcccttgtgtagataatgatctgccttatttttgtcctagaaaacacaaattcttctttacaccttact

SEQ ID NO: 458246 - DNA, 454 bp, Homo sapiens
catttaatatatttaatataaagtttcaaaattatttaaatcatggtaataaatctttagaaattaagatatttgaacaaatgtctacaaattaccctgaaaattataatacctctttcaaagttaagttatgttattgaaatctagtgcaataaaatgtaatttattatagtgttcccttttgcgggcttaaccaactaaaagaaaccagaaggcttatcatttaaaactgaatatatgtccttcagaaaatgtgttttttctctattcatttcttaccwatattaaaatatttaatgctatacataaaggtttatttttgtttgtattgttagtttcttaggaaaatttaattaaaatttgcatgcttaacatacatttttatttgtttatggataaaggtatacacacatacccaaatatgttgacaatgttcatatgtcatcttccacac

SEQ ID NO: 458247 - DNA, 454 bp, Homo sapiens
catttaatatatttaatataaagtttcaaaattatttaaatcatggtaataaatctttagaaattaagatatttgaacaaatgtctacaaattaccctgaaaattataatacctctttcaaagttaagttatgttattgaaatctagtgcaataaaatgtaatttattatagtgttcccttttgcgggcttaaccaactaaaagaaaccagaaggcttatcatttaaaactgaatatatgtccttcagaaaatgtgttttttctctattcatttcttaccaataktaaaatatttaatgctatacataaaggtttatttttgtttgtattgttagtttcttaggaaaatttaattaaaatttgcatgcttaacatacatttttatttgtttatggataaaggtatacacacatacccaaatatgttgacaatgttcatatgtcatcttccacac

SEQ ID NO: 458248 - DNA, 576 bp, Homo sapiens
ttgtgtgtgtgtgtctgtgtatatgccagtgttcttttatctttttttttgttttgtttattttgagacagagttttaggctgttgcccaggctgtagtctagtcatggaaccacagctcactgcaaacttgacctcccaggctcaagtgatcctcccacctcagcctcccaagtagctgggactacaggtgtgtgccaccatgcttagcaattttttttttttttttttttttttttttgtagaaaggaggtctcattatgttgccagggttgttctcaagcaatcytcccgcttatctctcaaagtgctgggattgcagtaataagccatgtgcccatccctctctttattttgaaatcaacttaggcctaaagtgaaagcccatttcactgttatttcagcctaaattaaataacatgccctatgtacttagtcaatgtacatggcaagggtactttataggatattgtacaattgtgtcttcttggccaactaaataccagaaaacaacaacaacaaagttttaaatagatgttaatatttcctcaatagaatattaaaagtagatatgaaa

SEQ ID NO: 458249 - DNA, 588 bp, Homo sapiens
ctaacttcccctattgttgacattactatggtacttttgtcccaattcatgaaccaatattgatacacttattaactaaaatccacacttaattcagattttcttaatttttatctgtctgctttctgtaccaggatcccactcaggataccacattgcatttacttctcatgtttccctagactcctgtagactgttacagcttttcagatattccttatttttgatgaccttgacggttttgaggaatgctggtcagatatttcatataatgtttttcaatttgggtttgtctgatattttctcatgagtawcaggacttatggatttgggggatgaaaatagtctgttctacccatgtctcatatcaagagcacatactatcaatgtgacttatcagtattgatgttaaccttgatcacctggctgagatagtatgtgtcagatttctccactgtagcaaattacttttgtccctacccccttccatactttggaaggaattcaccatgcacatccccctcttaaggaatggggagtcatgctccaccttcatggggtgggggtgggggagtatcaatttaagtt

SEQ ID NO: 458250 - DNA, 583 bp, Homo sapiens
tgtgttttgttttagaattttcatgtctgaatctgtttctcttttatcctcatgctaaataataatagttgggcatgtaagggcttctagatcaaaactcactatttccttcacatcttgaaggtattgctctattatcttttcattttgattgccttttttttttttttgagacagagtctagctctttcgcccaggctggagtgcagtggcacgatcttggctcactgcaacctctgtctcccaggttcacgcgattctcctgcctcagcctcctgagtagctgggattacaggtgtgcgccacaacrcctggctaatttttgtatttttagtagaggcttggtttcaccatgttggtcaggctagtcttgaactcctgacctcgtgatccacctgcctcagcctcccaagtgctgggattacaggcatgagccaccacgcccagcctagactctccattctttataggaaagcctatttttttctcattctggaagtttctggcatcttttaattctccctaaaattctgaaattttactgtgaaatttcatacaatgtcttaataggaatctattttac

SEQ ID NO: 458251 - DNA, 583 bp, Homo sapiens
tgtgttttgttttagaattttcatgtctgaatctgtttctcttttatcctcatgctaaataataatagttgggcatgtaagggcttctagatcaaaactcactatttccttcacatcttgaaggtattgctctattatcttttcattttgattgccttttttttttttttgagacagagtctagctctttcgcccaggctggagtgcagtggcacgatcttggctcactgcaacctctgtctcccaggttcacgcgattctcctgcctcagcctcctgagtagctgggattacaggtgtgcgccacaacacctggctaatttttgtatttttagtagaggcttggtttcaccatgttggtcaggctagtcttgaactcctgacctcgtgatccacctgcctcagcctcccaagtgctgggattacaggcatgagccaccacgcccagcctagactctccattctttataggaaagcctatttttttctcwttctggaagtttctggcatcttttaattctccctaaaattctgaaattttactgtgaaatttcatacaatgtcttaataggaatctattttac

SEQ ID NO: 458252 - DNA, 583 bp, Homo sapiens
tgtgttttgttttagaattttcatgtctgaatctgtttctcttttatcctcatgctaaataataatagttgggcatgtaagggcttctagatcaaaactcactatttccttcacatcttgaaggtattgctctattatcttttcattttgattgccttttttttttttttgagacagagtctagctctttcgcccaggctggagtgcagtggcacgatcttggctcactgcaacctctgtctcccaggttcacgcgattctcctgcctcagcctcctgagtagctgggattacaggtgtgcgccacaacacctggctaatttttgtatttttagtagaggcttggtttcaccatgttggtcaggctagtcttgaactcctgacctcgtgatccacctgcctcagcctcccaagtgctgggattacaggcatgagccaccacgcccagcctagactctccattctttataggaaagcctatttttttctcaytctggaagtttctggcatcttttaattctccctaaaattctgaaattttactgtgaaatttcatacaatgtcttaataggaatctattttac

SEQ ID NO: 458253 - DNA, 639 bp, Homo sapiens
tgcctgtgaggtcagtaaggaagatgaaggaggtaggggagagtcaaggatgagaggatgggatccatctacagagcacatggccagatggggcaatttataatcataatcctaaacatagaggcatgaagtcttagaaacaaacattggggccaacattaaaagacaaaagatactataggaatagagggggaaaaagcgatagaaaaaattcaattcttatttggaagtgaagtcataattcattaacttttgccagaaagtttttagaaaatggatcccgttattcctcagtaggtcaaagacagggactttaaaygaggctggggctagttttcagaagaatgtggtactggaggcactggggtaatccgtaaagtggactcacttctttagcttgtccccagaacttactctggcttcttggggttccacttccctcattggaaatggaccggggggggctctactgtcttcatcccaatcaagaccttaactctaagtgtctctttgccttgttcctgatcttaggttggaaattttcaatctgtcatcattatgtatgaggttaaccatgaatgttttgtagatgccttttatcaggttgaggaagttcccttctattcctagtttattgag

SEQ ID NO: 458254 - DNA, 639 bp, Homo sapiens
tgcctgtgaggtcagtaaggaagatgaaggaggtaggggagagtcaaggatgagaggatgggatccatctacagagcacatggccagatggggcaatttataatcataatcctaaacatagaggcatgaagtcttagaaacaaacattggggccaacattaaaagacaaaagatactataggaatagagggggaaaaagcgatagaaaaaattcaattcttatttggaagtgaagtcataattcattaacttttgccagaaagtttttagaaaatggatcccgttattcctcagtaggtcaaagacagggactttaaatgaggctggggctagttttcagaagaakgtggtactggaggcactggggtaatccgtaaagtggactcacttctttagcttgtccccagaacttactctggcttcttggggttccacttccctcattggaaatggaccggggggggctctactgtcttcatcccaatcaagaccttaactctaagtgtctctttgccttgttcctgatcttaggttggaaattttcaatctgtcatcattatgtatgaggttaaccatgaatgttttgtagatgccttttatcaggttgaggaagttcccttctattcctagtttattgag

SEQ ID NO: 458255 - DNA, 639 bp, Homo sapiens
tgcctgtgaggtcagtaaggaagatgaaggaggtaggggagagtcaaggatgagaggatgggatccatctacagagcacatggccagatggggcaatttataatcataatcctaaacatagaggcatgaagtcttagaaacaaacattggggccaacattaaaagacaaaagatactataggaatagagggggaaaaagcgatagaaaaaattcaattcttatttggaagtgaagtcataattcattaacttttgccagaaagtttttagaaaatggatcccgttattcctcagtaggtcaaagacagggactttaaatgaggctggggctagttttcagaagaatgtggtactggaggcactggggtaatccgtaaagtggactcacttctttagcttgtccccagaacttactctggcttcttggggttccacttccctcattggaaatggaccggggggggctctactgtcttcatcccaatcaagaccttaactctaagtgtctctttgccttgttcctgatcttaggttggaaattttcaatctgtcatcattatgtatgaggttaacyatgaatgttttgtagatgccttttatcaggttgaggaagttcccttctattcctagtttattgag

SEQ ID NO: 458256 - DNA, 610 bp, Homo sapiens
aacatgtgtatcacccacatgaataaggacatcatctgaacaggcagggagaacagctgaatgagggtgtgtgacatctaagtcagtggatctcaaacttgagcatggccagaatcatctgcacaayttgcacagattgctgggacctcaccccagagtttctgattcagcagattaagggtgaggttagaatttgcatttctaatgagcttccaggtgatgctgcgcctggtggtctggaaagtgcattttgagaaccactgtcctaagtatgtgtaacacctgcatgtagcacccaagtgaactgattaacatctaagtcagatctaagtgaacatgttaacatttaagggacaaatgtatcacccaaacaagtattgtgccatctacaggagcacatgtaacatttgaatgatgtgcttagaatataagtgaacctgtgttacatctcaatacctctgtcaaacatgtgaacaagcatgtttaaaatctgagggtatgtggaatatctgagtgagtgctagtaccatctgagtagatttaaccctagaaggtatgtatgtgttttacacctgaaagtattcattgtctgtatcataagacaaacata

SEQ ID NO: 458257 - DNA, 610 bp, Homo sapiens
aacatgtgtatcacccacatgaataaggacatcatctgaacaggcagggagaacagctgaatgagggtgtgtgacatctaagtcagtggatctcaaacttgagcatggccagaatcatctgcacaacttgcacagattgctgggacctcaccccagagtttctgattcagcagattaagggtgaggttagaatttgcatttctaatgagcttccaggtgatgctgcgcctggtggtctggaaagtgcattttgagaaccactgtcctaagtatgtgtaacacctgcatgtagcacccaagtgaactgattaacatctaagtcagatctaartgaacatgttaacatttaagggacaaatgtatcacccaaacaagtattgtgccatctacaggagcacatgtaacatttgaatgatgtgcttagaatataagtgaacctgtgttacatctcaatacctctgtcaaacatgtgaacaagcatgtttaaaatctgagggtatgtggaatatctgagtgagtgctagtaccatctgagtagatttaaccctagaaggtatgtatgtgttttacacctgaaagtattcattgtctgtatcataagacaaacata

SEQ ID NO: 458258 - DNA, 477 bp, Homo sapiens
ctgcaacatgtacctatatgaacatgactttgtgaaccacctggaccttgaacatctgcaaagatgaagatgctggtgacattcaatagsgatttgatgaattaataaatatatattataaattctcttacgtttgtctttttatgtcagtgatatagtttggctgtgtccccacccaaatctcaaattgaattctcaggtgttgtgggagggacctggtgggaggtaattgaatcatgggggtggatctttcccatgctgttctcatgatagggaataagcctcacaaaatctgatggtactataagggggagtttccctgcacaagctctttcttttgcctgctgccatccatgtaactaagatgtgacttgctcctccttgccttctgccgtgattgtgaggcctccccagccacatgaaactgttaagtccaataaacttctttcttttgtaaattgcccagtctcgggtatg

SEQ ID NO: 458259 - DNA, 575 bp, Homo sapiens
tgccaattttacagactgagcatttgttgaactgaacataagagtcagtctagggaatccaatgagccaataaattttaacccaaagaaaagtaaatgtgatctgaaatgtattctattttgaaccatgattcccttgttgtagtatgctgaaaacatgtcctcctctgcaaaaattaatttacttattaatgcctggaacctatgagtattatcttattaagcaaatgcattttactttctgtggcaaaatatatgattaagttaagggtcttaaaagtcagagttyatcctggattaactgggtaaaccctaaatgcaatgacatatttttataaaagacagactgaaagagatttgagacaaactgtaaaggagaagagacacatatgtcaaacatatgtgcccaaaaagctatttcagaatgagacaatagaatggagatcgattaataaaagaaagataaaagagcactttatgtagctgaacaaaaccaaaacttttaagtagaaaagtgtccccaggatttttaaaaaccatactaaatttcaggacaatagttaaaagaaaatccta

SEQ ID NO: 458260 - DNA, 501 bp, Homo sapiens
actaatcatgggagagatttggtctcaaattattcctacaaacaaaatgaaattattacaataaragtaaaagtaatcaagagataagacaatgcagatgaaaagcagcagaaatgataaacaatagaaactgacttataggacccccagtagtgcagtgttaatacctagactttaaactaagtatgcccaatatattcaagggtgtaaaatgtaagactagaaatttcagtagagaattgaaaactaaaaaaataatcaaatacaaatctgaaaatgaaaaaatagccaaaattaacaacttaatagatggaattaactgcagattagaaacaattgaagaaagaattagtgattgaaagacagattagaaaaaaaaacccaaaatgagacacaaggagacaaaatgatagaaaatacagaagaatgcataagcgatatgcaggacacagttagaagatctgatatatgtggaattgaaccaacaggaaggaagaagaa

SEQ ID NO: 458261 - DNA, 596 bp, Homo sapiens
tttttctaattgtctcggttatttgggttccctcaaataaccttgagatttcatatgaattttaaaatggatttttctatttctgcaaaaaagatgttggaattttgatagggattgcattgaatttgtaactcagagtgaaatttgagtgaaatttttagataagctgaatttcataacttggrctgaatgtggaaaaatgctcagacagcagctcaacttgtgtgaattcaactcagaagtgttgctcctatactggggcctgtataagaatatatttgttttattgaggttgagtttatctttagaggcagttttcctaaggtgctagttataattagaatatatttacctgccccattttaataggagtatcatgctcacactattgtttttattttcctttacaatattcctctcactgaacttttagggctacaaaagttggttttaggttaaaaatagtatagttgcccttgcttccactattccatgtggaaaacacagccaattgccttacaaaaaggaaaaaaataattttccgaatacattcttaagatagtgtgaaagccacactcgctgatgaagagccccta

SEQ ID NO: 458262 - DNA, 620 bp, Homo sapiens
actacataggcaaagtgctttgttcaccaatgtatcagaagcacttagaacaatactggactctcgataaatatttgttaaatgaatgaattttatactttctatgtttcaaacactattttaaaaactagggatacagcagataagaaaccaaatactctgactgctctgaaggaacttactttccagagaaaaaaacaaggagaaaaaaaaawatatatatatatatcaggatatgataactgttatatagaaagatagcaaggctggctagaaagagggtaatagagtgaggatcgagtgatttttttttttaatggggagtttagagaaggccattctgataaggtggcatttaagcagagacttaaggaagattaaaaaaaaaacaaagccagtatgagattacaggtataataatccaggctggtaaggatatggaaatatattaactgtggttcttcaaaatttttaaaaattaagttatttaacatatacttattaaaaatctaccatgtctgggccagtcacagtggctcactcctgtaatcccagcactctgggaggccgaggcgggtggatcacctgaggtcaggagtttaagaccatcctgacgaata

SEQ ID NO: 458263 - DNA, 637 bp, Homo sapiens
ttagcagactggggattgaaaacagctattattactatgctaagggctctaatggataaagcagacagcatgtaagaagagatgggcaatgtaagcagagacatagaaatcctaagaaagaatcaaaaagaaatgctagacataaaaaccactgtaaaataaataaagaacaatggtcttattactagactggacacagctgaggaaagaatctctgagcttaagggaatatcaatagaaacttcccaaactgaaaagcaaagagaacaaagactgaaaaaaacagaacagcatatccaagaactgtggtagaactacaaaaggtgtaatatatgtgcagtgggactgccagaaagagaagaaagagagaaatgaacaacaacaaaaaatacttgaaaaaataatggctgagaagttcactaaataatgtcagatgacaaaccacagtcccaggaagttcagagaacaccatgtataatgaatgcccaaaaaagtatacctaggcatatcattttcaaactacagaaaatcaaaaagaaagaacaaattctgaaagaagccagaggragaaacaccttacctacagaggaacaaagataagaactacatcagcctactcagaaactatgcaagcaag

SEQ ID NO: 458264 - DNA, 555 bp, Homo sapiens
tgacaaaccacagtcccaggaagttcagagaacaccatgtataatgaatgcccaaaaaagtatacctaggcatatcattttcaaactacagaaaatcaaaaagaaagaacaaattctgaaagaagccagaggaagaaacaccttacctacagaggaacaaagataagaactacatcagcctwctcagaaactatgcaagcaagaagaggatggattgaaacgtttaaagttttgggagaaaataccaccaacttagaattctgtaaactgcaaaattattcctaaaagtgaaggagaaataaagactttcccaaactaaaattgaggaaatttgttgccagtgggcttgccttgcaaaaaatgttaaaatacattttttagagagaaagaaaataatatgtcagaaactcagatctacataaagaaagaaagagcatcaatgaagggatatgtgaaggtaaaatcaaaactctaaacaaattcttaattgatataacagttaacaatttgttcaaaacaataatagcaataaggtatttatgtttgcttatgtat

SEQ ID NO: 458265 - DNA, 563 bp, Homo sapiens
gcagaacgaacctaacatttggataaattgtaaagaactattataatattgtttatgtatatatacataactatatacatatataattaaaatatatctaaggaatgataaacattagttcaagaacatggctgcctctggtaagctaggaagagagatcaaggaaggaaggtgggcaattcaaccatgtccatagcaaaatgttcagatctgtcaacaataagtgttattcattcaatacatgaatgttgtttataatgttctctctcaccatgtttaaatattcttcatttaaaattctaaacacttaattttattgattaataatattttcacatggcacaaaactcaaaagataatrataagttatgtggcaaaaattctatcttccaaccctatcccctgggaagccatttacttccctgaaggcaaccaattttaccagtttcttatgtatctttcctgtgttattctgtgcatattcaataaaggtctttgttctttcttattttataatttacaaaatttgtagcatattatgaacattattttgcattttcttt

SEQ ID NO: 458266 - DNA, 308 bp, Homo sapiens
tatcaacctcccccaccagaatggtacatttgttgcaattgctgaatctacattgatgcatcatcacccaaagtttatagtttacattggggctcactcttggtgtatattctattggttttgaaaaatgtgtaatgataggtttgttagtccattttgcattgctgtaaaggaatatctgagactggtaatttataaagaaaagaggtctatttggctcactgttttcaggctgtacaagaagcacrgcaccatcctctgcttctggtcaggacctcaggaagattttactcatggcagaaggcaaa

SEQ ID NO: 458267 - DNA, 426 bp, Homo sapiens
acatttaaaactgtatttatagcttatatatttcatattctagcgtcatgataaatgcaagtcataatcacatctaaaggaatcaataatccaggcaatattacaagctagctgtgtaaatctatttctaatatatccacttgcatattttcatttagtactcaataaattgtgaatcattataactcttttaagtatatttccatattcttatgaacrcaaaactacatttcctaaaattaagaaatcatatttaatgtattttaagtatgctttacaaaattatccttgagaaccagaacacttttcatgaccaaatgaaaagatatgttagcagaaaacagatcaaaatggtatgatagtttcatttacatatacagttatttgtgccataaatattttaaagtatatacttagtaactttga

SEQ ID NO: 458268 - DNA, 466 bp, Homo sapiens
gaatgataataacattgacattggtatcatatcccagctctgtcctttttgacatcagctctctgaacttcagaaagaattttcagggaatcttggcagttcatcctcaggtgctcaatgatttttttgagtttcaaccacagcacttttgcttatataaaaccatcttgtttaattctgtgttgcttactgccaccaactaaaatgtaagttccatgaggaggattattgtttgtcttattaaagcgctgttttttgactggcatgtacttastatttaaaggaaattctaaacttactaaaggaagctatcatctatttttctttcacccatagaatccattataggtaagttatttattgaagaagacctagacaatgcttactttggattagttagaaatgtcttggatttccttaaatgtttctaataatggattttgagtgtcataaggctgaatgaaag

SEQ ID NO: 458269 - DNA, 593 bp, Homo sapiens
ctgctcaagataaattggttaatattgtgaattcgatagaatggtgaacaatgtaacttattttcccctttttttcctccttagaagaaatataactttctctttagccatcttctctattatttcttttttttttcttttagatggagtttcactcttgttccccaggctgcagtgaagtgaacgcctgacctcaagtgaggcgttcaagaccagcctgaccaagggatccacctgcagaggcaggtggagccactgcgcccagccacrgggaaaaaaaaaagactacaatttatagaccagactaaatctctggccgattccctagtatattttaagagagtaagatgtggttgccttgccatttttaaaaataagttaagaatgctaactacagcagaattatttcagagttaccttgagaattctgagtgcaacaaagcactttctcagaaagattttaaagattttatttttttaagcaattttttttaaaatttttattttttatttattattatactttaagttttagggtacatgtgcacaatgtgcaggttagttacaatagcaaagacttggaaccaatggaa

SEQ ID NO: 458270 - DNA, 575 bp, Homo sapiens
atgaatccttaagtcgtgagttcccatgtccagaatagtattgcccagattgtcttccagggtttttatagtattgggtcttatgcttcagtgttcatcttgagttgatttttgtatgtggtgtaaggsatgggtccagtttcaatcttttgcgtatggctagccaggtatcctagaagaatttgtaaaatagggagttctttccacattgcttgcttttgtcagccttgttgaagatcagatggtcatgggtgtgcagccttatttctgggctctctattctgttccatttgtctatgtgtctgtttttgtaccagtaccatgctattttgctactttagcctgcagcatagtttgaagttgggtaacatgataccttcagttttgttcttttggcttatggttgccttggctatttgcactcttttttggttctatataaattttaaaacagatctttttctagttttgtgaagaatgtcattggtagtttgacaggaatagtgttgaatctgtaaattgcttttagcagtgtagccattttaatgatgttgattcttcccatccgtaggcat

SEQ ID NO: 458271 - DNA, 555 bp, Homo sapiens
tttaaaacaatcagtttttcatagaacttgactctacactccctactttctatatctgatttatttacacctaatgaaaacaaatagcctatgtatatgaattgttatgacacatattgccatcttttggttgtttctaaattttttcccccagcctccttcacacccatttcttctaaaaccttttcaattttggagggacatgtcaatcccatataatgatccttcctgctcttggtctatcacagtgacattcctgatacactggactattagtggcagtgtcaatagattgttgacaaagatgactgcaataatttgtttcattgtcacagggaaagagactttactgcttcttaatcaagataggaagcccattttccctccctttaaatctgaccagtttgtgacatgctttgggtaacagaatatgaaaaaatggcactgtgcaagttccagacccaggctaygttgcaggttccaccttggacttcttagaacttgagtccactattctgtgaaaaagccagtgtggcctactgatgagtgaaagcc

SEQ ID NO: 458272 - DNA, 599 bp, Homo sapiens
tttttctatttgtttgcgtcctctcttatttctgtgagcagtggtttgtagttctccttgaagacgtcctttacgtcccttgtaagttgtatttctagatattttattctgaacaatgagaacacatggacgcagggaggggaacatcacacaccggggcctgtcagggggtgaagtgcaaggggagggagagcattargacaaatacctaatgcatgcagggctaaaagcctacatgattggtttatgggtgcgtgcggcaagtgactatggcacatttatatctatgtaacaaagctgcacattctgcacatgtatcccagaacttaaagtattataataataataatgattgaaaacagagcatgcaagagaaatagagaaagaaagagagaaagcgaaggggagatcttaattctccagatattttccataaactttaaacatgtttctgtcttctttcagttttttgccatagtaaagtctgaaaggtaacctggacatgtaatctataagacaaagctcttatttaaccacccatcccacagctgctggcctgtgtctgatgaagaaacttaattcttatattatcatcctta

SEQ ID NO: 458273 - DNA, 599 bp, Homo sapiens
tttttctatttgtttgcgtcctctcttatttctgtgagcagtggtttgtagttctccttgaagacgtcctttacgtcccttgtaagttgtatttctagatattttattctgaacaatgagaacacatggacgcagggaggggaacatcacacaccggggcctgtcagggggtgaagtgcaaggggagggagagcattaggacaaatacctaatgcatgcagggctaaaagcctacatgattggtttatgggtgcgtgcggcaagtgactatggcacatttatatctatgtaacaaagctgcacattctgcacatgtatcccagaacttaaagtattatawtaataataatgattgaaaacagagcatgcaagagaaatagagaaagaaagagagaaagcgaaggggagatcttaattctccagatattttccataaactttaaacatgtttctgtcttctttcagttttttgccatagtaaagtctgaaaggtaacctggacatgtaatctataagacaaagctcttatttaaccacccatcccacagctgctggcctgtgtctgatgaagaaacttaattcttatattatcatcctta

SEQ ID NO: 458274 - DNA, 599 bp, Homo sapiens
tttttctatttgtttgcgtcctctcttatttctgtgagcagtggtttgtagttctccttgaagacgtcctttacgtcccttgtaagttgtatttctagatattttattctgaacaatgagaacacatggacgcagggaggggaacatcacacaccggggcctgtcagggggtgaagtgcaaggggagggagagcattaggacaaatacctaatgcatgcagggctaaaagcctacatgattggtttatgggtgcgtgcggcaagtgactatggcacatttatatctatgtaacaaagctgcacattctgcacatgtatcccagaacttaaagtattataataataataatgattgaaaacagagcatgcaagagaaatagagaaagaaagagagaaagcgaaggggagatcttaattctccagatattttccataaactttaaacatgtttctgtcwtctttcagttttttgccatagtaaagtctgaaaggtaacctggacatgtaatctataagacaaagctcttatttaaccacccatcccacagctgctggcctgtgtctgatgaagaaacttaattcttatattatcatcctta

SEQ ID NO: 458275 - DNA, 599 bp, Homo sapiens
tttttctatttgtttgcgtcctctcttatttctgtgagcagtggtttgtagttctccttgaagacgtcctttacgtcccttgtaagttgtatttctagatattttattctgaacaatgagaacacatggacgcagggaggggaacatcacacaccggggcctgtcagggggtgaagtgcaaggggagggagagcattaggacaaatacctaatgcatgcagggctaaaagcctacatgattggtttatgggtgcgtgcggcaagtgactatggcacatttatatctatgtaacaaagctgcacattctgcacatgtatcccagaacttaaagtattataataataataatgattgaaaacagagcatgcaagagaaatagagaaagaaagagagaaagcgaaggggagatcttaattctccagatattttccataaactttaaacatgtttctgtcttytttcagttttttgccatagtaaagtctgaaaggtaacctggacatgtaatctataagacaaagctcttatttaaccacccatcccacagctgctggcctgtgtctgatgaagaaacttaattcttatattatcatcctta

SEQ ID NO: 458276 - DNA, 551 bp, Homo sapiens
gtttgagaaacaagaaataattcatcaaatgttcgccatattcaagttattccttgtgagacagagaacacagtgtgactaaagcaaacaagaatcccttcccttatgatttggtttggctgtttccccacccaaacttcatcttgaattggaggtcctataatccccacttgttagggtagggacttcctgggaggtgattagattgtaggaatggcttccccatgctcttctcatgttaatgagtgagttctcacaagatctgatggttttatgaggggctcccygccacgccacctttcttctgcacttctctctcttgctgccttgtgaagaaacacgtttccttcctcttccgccatgattgtaagttttctgaggcctactccaccatgcataactctgagccaatgaaacctctctcctttagaaattacccagtctcagacaattctttatagccgcataagaatggactaatgcaccttatgaagtttgcattctactgagggaagttagacaatacatatgtgaaaaaacaaaaagataac

SEQ ID NO: 458277 - DNA, 551 bp, Homo sapiens
gtttgagaaacaagaaataattcatcaaatgttcgccatattcaagttattccttgtgagacagagaacacagtgtgactaaagcaaacaagaatcccttcccttatgatttggtttggctgtttccccacccaaacttcatcttgaattggaggtcctataatccccacttgttagggtagggacttcctgggaggtgattagattgtaggaatggcttccccatgctcttctcatgttaatgagtgagttctcacaagatctgatggttttatgaggggctccctgccacgccacctttcttctgcacttctctctcttgctgccttgtgaagaaacacgtttccttcctcttccrccatgattgtaagttttctgaggcctactccaccatgcataactctgagccaatgaaacctctctcctttagaaattacccagtctcagacaattctttatagccgcataagaatggactaatgcaccttatgaagtttgcattctactgagggaagttagacaatacatatgtgaaaaaacaaaaagataac

SEQ ID NO: 458278 - DNA, 424 bp, Homo sapiens
gctcttctttatacatctggtagaattcggactgtgaattcatctgttccagagcttttccttcttggtaggtgttttataactgrttgaattttggaacttattcttggtctgctcagtatttttatgtcttcctggtccaatcttgagcagttgtatgtttccaggaatttatcatttttttccgggttttctagttgttgtccagagtgttcataaaagcctctcagggatttttgtatttctgtggcatcagtggtaatgtcacttgtgtcatttctcattatgtttatttggatcttctttttttctttattaatctggtggtggtctataaatctgatctattctttcataaaaacaacttttatttttgttgatttttccctatggatttttgcactacaatttctttcaggtcagc

SEQ ID NO: 458279 - DNA, 575 bp, Homo sapiens
acattaatttaatgtcagaaataatattttaaggacataattgaattaaccaacagtgataggtaaagtttattttttaattcaagatgcctacaggttatgccctatgatagctaaattttcatacccatatttctactcaaacactggtggatacttcactaatctaaatcatttggcaagaatgcagaatttatatttaatatgatcctgttgttgtatcactaatagtagggtgtggtatcatttctctctcattaaatggatattgagtggattaatagtatwtttaaagccaaaactcaagctaccaattttcagcttctatttttaaaggtatttaaaatttatttgttttaagaaaaaatgtttgtgaaatatttaaattttaaataaaggtatttaaaaattatttaataatggcctactatataccaagcactggttacagaggataatttatacaatgtcctactggttacagaggataatttatgcaatgcccatactttcatagagcttaccttctaatgtaggaagatatgtgtatgtttttatatctgtatgtttgtgtt

SEQ ID NO: 458280 - DNA, 582 bp, Homo sapiens
tctaaaagagaatctgtttccttgactttttcagtttcgggaagctgtcttcattcctttgctcgtgctcccaaactatgttacatatatggatttttcctcttcagtcttcaaatctccctctgccttcmtcttataaggacagtgattccatttaggacccatcctgataattcagaatgatatacctataccaagatccttaacataattacatatgcaagtcctagcaactatatatagtgactttcacaggttccaggaattacaacctggatatcttttggggccagtatttaatctaccacaatcatcttcttgaggagggagaaatatgaactagaatatacaacattaccaatacacttgaaaaaccatctaccaactgtgtctagtgatttaattcaaatttaacataatttagtaattatgaaaaatagaaatataaattattttcccatataattacttttccagcaatttatacaaggtaattgctcattttcccacaatttgaaatgccattactaacataaacaagtatatagtaagtccttatttaacattatcgataggtttttg

SEQ ID NO: 458281 - DNA, 582 bp, Homo sapiens
tctaaaagagaatctgtttccttgactttttcagtttcgggaagctgtcttcattcctttgctcgtgctcccaaactatgttacatatatggatttttcctcttcagtcttcaaatctccctctgccttcatcttataaggacagtgattccatttaggacccatcctgataattcagaatgatatacctataccaagatccttaacataattacatatgcaagtcctagcaactatatatagtgactttcacaggttccaggaattacaacctggatatcttttggggccagtatttaatctaccacaatcatcttcttgaggagggagaaatatgaactagaatatacaacattaccaatacacttgaaaaaccatctaccaactgygtctagtgatttaattcaaatttaacataatttagtaattatgaaaaatagaaatataaattattttcccatataattacttttccagcaatttatacaaggtaattgctcattttcccacaatttgaaatgccattactaacataaacaagtatatagtaagtccttatttaacattatcgataggtttttg

SEQ ID NO: 458282 - DNA, 582 bp, Homo sapiens
tctaaaagagaatctgtttccttgactttttcagtttcgggaagctgtcttcattcctttgctcgtgctcccaaactatgttacatatatggatttttcctcttcagtcttcaaatctccctctgccttcatcttataaggacagtgattccatttaggacccatcctgataattcagaatgatatacctataccaagatccttaacataattacatatgcaagtcctagcaactatatatagtgactttcacaggttccaggaattacaacctggatatcttttggggccagtatttaatctaccacaatcatcttcttgaggagggagaaatatgaactagaatatacaacattaccaatacacttgaaaaaccatctaccaactgtgtctagtgatttaattcaaatttaacataatttagtaattatgaaaaatagaaatataarttattttcccatataattacttttccagcaatttatacaaggtaattgctcattttcccacaatttgaaatgccattactaacataaacaagtatatagtaagtccttatttaacattatcgataggtttttg

SEQ ID NO: 458283 - DNA, 319 bp, Homo sapiens
tacttttaaacttaacttcctcttaaagcaaccttttttgattacctgctacaccctgactcattcagattacatactccacactgactcattccgattacctcctctgtcataaccatttttcccgccaaaccactcatcctgtcactcactttaaattagccaatyggaattagtttagcctgtgcatctaacactatccagtaggggaaagacacagcagcaagggccatgcgcatcagggataagaaccccttctccctagtccaagtgtgccctcaccgttgctccatctgtaagggcacacccttctatagaa

SEQ ID NO: 458284 - DNA, 319 bp, Homo sapiens
tacttttaaacttaacttcctcttaaagcaaccttttttgattacctgctacaccctgactcattcagattacatactccacactgactcattccgattacctcctctgtcataaccatttttcccgccaaaccactcatcctgtcactcactttaaattagccaatcggaattagtttagcctgtgcatctaacactatccagtaggggaaagacacagcagcaagggccatgygcatcagggataagaaccccttctccctagtccaagtgtgccctcaccgttgctccatctgtaagggcacacccttctatagaa

SEQ ID NO: 458285 - DNA, 587 bp, Homo sapiens
aaccttgaaaaactcacagctcttttctttttttttttttttttttctwaaggagtctcactctttcgcccaggctggagtgcagtggcgctatctcggctcactgcaagctctgcctcccgggttcacaccattctcctgccgcagcctccggagtagctgggactacagactcctgccactgcgcctggctaatttttttttttttttttttttttttggatttttagtagagacggggtttcaccatgttagccaggatggtctcgatctcctgacctcgtgatccacccgccttggcctcccaaagtgctaggattacaggcgtgagccaccgtgcctggccagctcttttcaaatgtacaaaagaagacaacatcgcagaagagtaagcaaagaaaaatgaaacagtcatcaagagtattctctagaaaatttttctattttatgttcaggtcacgatatataaatttagtgccttttgggaagattgatattaatagtagtataggatttcagactctcttagatgcaaatttaattaaaacttcagttcattataaggttattactatatgaagtccaag

SEQ ID NO: 458286 - DNA, 587 bp, Homo sapiens
aaccttgaaaaactcacagctcttttctttttttttttttttttttcttaaggagtctcactctttcgcccaggctggagtgcagtggcgctatctcggctcactgcaagctctgcctcccgggttcacaccattctcctgccgcagcctccggagtagctgggactacagactcctgccactgcgcctggctaatttttttttttttttttttttttttggatttttagtagagacggggtttcaccatgttagccaggatggtctcgatctcctgacctcrtgatccacccgccttggcctcccaaagtgctaggattacaggcgtgagccaccgtgcctggccagctcttttcaaatgtacaaaagaagacaacatcgcagaagagtaagcaaagaaaaatgaaacagtcatcaagagtattctctagaaaatttttctattttatgttcaggtcacgatatataaatttagtgccttttgggaagattgatattaatagtagtataggatttcagactctcttagatgcaaatttaattaaaacttcagttcattataaggttattactatatgaagtccaag

SEQ ID NO: 458287 - DNA, 587 bp, Homo sapiens
aaccttgaaaaactcacagctcttttctttttttttttttttttttcttaaggagtctcactctttcgcccaggctggagtgcagtggcgctatctcggctcactgcaagctctgcctcccgggttcacaccattctcctgccgcagcctccggagtagctgggactacagactcctgccactgcgcctggctaatttttttttttttttttttttttttggatttttagtagagacggggtttcaccatgttagccaggatggtctcgatctcctgacctcgtgatccacccgccttggcmtcccaaagtgctaggattacaggcgtgagccaccgtgcctggccagctcttttcaaatgtacaaaagaagacaacatcgcagaagagtaagcaaagaaaaatgaaacagtcatcaagagtattctctagaaaatttttctattttatgttcaggtcacgatatataaatttagtgccttttgggaagattgatattaatagtagtataggatttcagactctcttagatgcaaatttaattaaaacttcagttcattataaggttattactatatgaagtccaag

SEQ ID NO: 458288 - DNA, 587 bp, Homo sapiens
aaccttgaaaaactcacagctcttttctttttttttttttttttttcttaaggagtctcactctttcgcccaggctggagtgcagtggcgctatctcggctcactgcaagctctgcctcccgggttcacaccattctcctgccgcagcctccggagtagctgggactacagactcctgccactgcgcctggctaatttttttttttttttttttttttttggatttttagtagagacggggtttcaccatgttagccaggatggtctcgatctcctgacctcgtgatccacccgccttggcctcccaaagtgctaggattacaggcgtgagccaccgtgcctggccagctcttttcaaatgtacaaaagaagacaacatcgcagaagagtaagcaaagaaaaatgaaacagtcatcaagagtattctctagaaaatttttctattttatgttcaggtcacgatatataaatttagtgccttttgggaagattgatattaatagtagtatagkatttcagactctcttagatgcaaatttaattaaaacttcagttcattataaggttattactatatgaagtccaag

SEQ ID NO: 458289 - DNA, 336 bp, Homo sapiens
ggacatattttttcaaagttttttatataaattgtttaggtgatattgcctctcaatttcctatttttttttctgttcatttcaacctcttctgccaatgtggcctttctccaatatgtttccawaatttcctggctcaatgatttttttaaaagctataaaaataaacattttgcaaggactaaataaccagatatttgaataaagtgtgcacctgaaaagaatgcggcagaaaagtggtgaatttagaaaggctttatttcctgtaatgtattaatatagcacccataatagtgaaagttcacaatttacaagcaacttatttaccactcttag

SEQ ID NO: 458290 - DNA, 589 bp, Homo sapiens
  misc_feature (1)...(589): n = A,T,C or G
nnnnnnnnnnnnnnnnnntcgtactacattcttatttctcaggaatttaaatttagtatgtgcctttttcatagtttttacctaaattctagtgaaaaataatgtataaatgtaaaaactgaaatctcaaaccaatgtattcattatacaacataacaccaaggcaaggaaaattctatgagcatagtaaaagtttcatgaatgctaactgatttagttctgtattcaaggaaaataaatgactggaagggaaggtactctatatatatcaactaaaatatatccttatttctcttttattactttttttgaaaagacattttatttatgagataatgacatgttgtttatgaaagaattttgattttatatttacctagttgcaactaactagaaaaaaaaggttaatctttttagtattccttctaaggccaaagatcatgtcgaggcctgaagagaactagttaacaaygttttagaggctactgataccagtctctgaaatgtagactgtctatccttaggtaatctagactacttgatcacacatttaaaatagcagacaaatggttctcagatgtatttatat

SEQ ID NO: 458291 - DNA, 595 bp, Homo sapiens
ttaacatttagctacacagtaaagaaaagcctaaaataatcaaaacattgtgtatcaactatagaatcaaatcatataagaaatggagtgatgaaggatgsatttaatctatgactagacttccttagcatatgtgaaaaggacatctctttttttctatttgtaattttacctacgttttatttacaatagttctcccttatccatgggacataccttccacgaccctcaaagaatgctgaaaccacagataatgtcaaaccctatatatatactgcttttttctatatatacatacccataataaagttaacttataaattaggcccaataagagactgacaataataactaataataaaatggaagaaaatgtaataatataatgtaataaaaattatttaaatgcagtctttcaaaatattttactgtactctattgtaagtaactgaaactacagaaaacaaaactacagataaaagggagctactgtagtaaaataaagaggggatggttagggtatagaacatggttacaattatagaaattggtagtagggaaggaaacatatatttgagtttgtagatcacatggc

SEQ ID NO: 458292 - DNA, 501 bp, Homo sapiens
aaaagcccctctttaacatcttagtaaaaacgatgacacctgtccatattggtcagagtttaaacatgaagaccaaggccattatacttattctaagtaggaagggattgttatacaaggaatgggtaatcaaaaatgattgtcaaagctaaaggaaagagggtcatctattggaagtatctattggcagtcagattcaccactggtttttagagagtaaggaagtttcaggatctatggaaaattgctgttggtgatcacagctgcctatgaacttttttttttttttgagacggagtctygcctggtctcccaggctggagtgcagtggcgccatcttggctcactgaaagctccacctcccgggttcacgccattctcctgcctcagcctcccctcgatggcagagggtcagctcccttcctgctccaggaaaccaagggaagacacttcccaggttttaagcccctcttgaaatccctgtgcttctataactagctt

SEQ ID NO: 458293 - DNA, 588 bp, Homo sapiens
gtttttgcctctaggagcctcacttttctctggctgcctttgggacttttttctctctagttttcaatagtttaattaagtgtgtttggatgtggatttctttgaggttatcttatttagggtttctctgaacttcttgaacctgtatgtttataagtttcactaatttgagaaagtttttggcaattatttctttattattttctgcacagttttcctctctttctaggactctgatgacacaaaatttagatattctacaattgtcccgtatgtctctgagagcactgtttattttttgatcatctgtatttattgaccatactggataacttctattgatctactttcaagttcactgactttcctttttcatctccacttttctaatgagctcataccwtgaaggttatgttattgttgttatttcttattcatccttggtttttggggcatttttaaatagttgcttacaaaacccttgtaataatagttacaacatctatgttacttcagtcttggcaaatattgatggttttttcacatcaggtgtttttctgattcttcacattacaagtaattttggat

SEQ ID NO: 458294 - DNA, 594 bp, Homo sapiens
cagggggagagaggttgattaaacttaaactttgtttggtaacagtgtagagaatagagtgctgagacaagttgatgcaaacaggatacccatgaggacactggcacattttctagatgaggaaaccaaaggcctgagttggaggtgtggcaatgctaagagtattaggagttcatagcttagaaagatgaatagatcattaataaagtaaaattcatgaagaaaagtttaaaaatatatgactccattgttttgaactgagtgacagaaaaaaaatggaaataacattaacaatgagagctaatatacaaacaagcagtggccaaattatatagaatgacagaacctgaaccccaaatctgcagcagtcacggaaggcaaaccacaayctttgtagcaattagccccagtggccgagactggattaataatagacagcttccctatttttgccccagcttgggactaactgtaaaagctaaatatgctgttctaaaaaatcacataaatcactaactctaaaagctaaatatgctgctctaaaaaaaatcacataacttctagttagctctccttcagttttctcatgcaaac

SEQ ID NO: 458295 - DNA, 532 bp, Homo sapiens
aggaaaatattgtctgatctcaggatcaagatggatcttatatccatcaaacaattaaaataagccacaaaaatctacaatatagtttacttttctttcagtgatgtacacaatttaaaacaagtaaaataaaaatgtacataacaaatcaatacaaaattttcatagatatcacaaacgatgttaatgctctagggagttttgaaaaccaatttactctgattttcctattggaaagttcatgttcaaaaaatccacaagagaagaactgcaattgccaatagcatatgacaaaaatttccaaattaccattgatcaaaacacattatagtatacatggaatgacattcattgttgtgatatacacgatagcacagrttaaatgacacttttatcttgccaaacagagaaaatgttttagaaaataacatccagtactcatcagggtataataaaatgtccagttttgtagcctcaaaatagcaaagcagtacaacctgtcaggattgcagttttacaatatttatcaagg

SEQ ID NO: 458296 - DNA, 655 bp, Homo sapiens
attccccttctcctgctcttaatgttcctttcatatcacttatcaccttcgaacactgtcttccccactagaatgtaaactctattggagaagaaattttgtctgttttgttactgatgtatgtctagcatcttgaaaagcaacagtaaatgattaatgaatgtttgttgaatgaacaaatgaacttggacgaacctctgtgcttcatcctgaaacattgaatagtattacctccttagaagggttattgtgagaattcaatgggttactacatgcgaggcattttgactagtacctagtkcatggtaaatgttcaaaacatagtttagttattacgtatgtttggctttacagtagtcacccttatccacagttttgctttccagtttcagttatgtaccttcacctgtggttcaaaatattaaatggaaaatttccagaaataaacaatttataacttttaaattgcatgatgttctgagtattgttattgttctactttattacttattgttaatctctttctgtgactaatttataaacttcttcataggtatgtatgtataggacaaaacagagtatatataatgcagtactatttgtggtttcaggtggggccttgaaatgtatcccccatggaaaaggggagactact

SEQ ID NO: 458297 - DNA, 627 bp, Homo sapiens
atgccagaaactgcagagtctcgaagagggtgtcacaaccctggctcagggagcctctaggtctgggctccccaaaaggctgcagctcttctctctttctcattgcccacagcatggtgagaggtggtggcagggcggtggggaggggcatgtttcagctctgtttttgttagttctttcaggctcactattcgctgagtcctgaattcttgtcccatgtccaggaagaatgaggtacacagacagctggatggtgaacaaggcagaaagaagctttattgagtaacagaacagctctcaggaaacccaaagtgggtagctcctttccacaggaaggtagttctgacaagtgcagccctcagtggagaggakacctggagtgggtagcttgtatctgcaggcaggtcatcctgatgagttggagatctcagccaagaggagatccagagtgggtaactcctttccacaggcaggtagtcccaatgagtcaaggagacctgacgtgggtagctccttcctgcagctggtagttccaatgtctgtgtgagtctggccaggtcaaggatttttatgggctcagaaaggaggaagtgcatgctgattggtccatgggtggccatgggcagg

SEQ ID NO: 458298 - DNA, 583 bp, Homo sapiens
cactattcgctgagtcctgaattcttgtcccatgtccaggaagaatgaggtacacagacagctggatggtgaacaaggcagaaagaagctttattgagtaacagaacagctctcaggaaacccaaagtgggtagctcctttccacaggaaggtagttctgacaagtgcagccctcagtggagaggatacctggagtgggtagcttgtatctgcaggcaggtcatcctgatgagttggagatctcagccaagaggagatccagagtgggtaactcctttccacaggcaggtagtcccaatgagtcaaggagacctgaygtgggtagctccttcctgcagctggtagttccaatgtctgtgtgagtctggccaggtcaaggatttttatgggctcagaaaggaggaagtgcatgctgattggtccatgggtggccatgggcaggcccaaaaaaagcgccataagttctcgctccctgccatggactccacctggaactgacagcccagcacttcaggtcgtccctggcttggaggtggtgcttcactgggaaactgcccctttctacccaggagtctgtctgcct

SEQ ID NO: 458299 - DNA, 587 bp, Homo sapiens
ccatcataaattacatcttgatttcagagatattaaccataaataaaagacacctcttagaattagtaggatactataggtggctattgttgataatgcctacttatttataactatgaactctgaccagaaaatgaaatgatactcaaggctgaggattttcataaatatcaatactaaaataggaggggttggcatgtttcacacttgtctctgctgcctctttttattcgcaggtggagtgggatagtacagactcatggattttggtattagaaagtcctggctttctaatccagctctgttacctcctaggtttctaatcaagttacatccccttgaaagtctcagatggaaatggcaatgcccatgtcacaatgatctgggtaacccctcaagcaaacaagcttggcatgaaggtcaagccaagcagggacacagacacgcaaacacacacacatgcatcaaagtaatcaatgcaggtaaaatgagaacattattgaactatatcatactttaccgttcagaattaacaacaamaaaaaaaacacataaactggtttctgcttctgctgataaggagtttg

SEQ ID NO: 458300 - DNA, 568 bp, Homo sapiens
attgtaggtgtgcaagtctggctcaacattcaaaaatcaattaatataagccattacatcaacaggctaatgaagaaaaatcacatgatcatattaataaatgaagagaaacatttgataaaattcaacacctactcatgatttaaaaaaaaacctcttaactagaaacagaggggcacttcctgaacttattaaagaatagctatatataaaaaaaaaaacctacgatgcccaggcactgtggctcacacctctaatcccagcactttgcgaggccaaggcgggtggatcacctgaggtcargagttcaagaccagccttgccaacatggtgaaaccccatctctactaaaaatacaaaaattagccagatatgatggcacatgcctgtagctactcaggaggctgagccaggagaatcacttgaacccaggaggcggaggttgcagtgagccgagatcatgccactgcactccagcctgggtgacaagagggagactctgtttcaaaaaaaaaaaaaaaaacagcaacaacagcaacaacaaaaaccctatggctatcatcatatt

SEQ ID NO: 458301 - DNA, 568 bp, Homo sapiens
attgtaggtgtgcaagtctggctcaacattcaaaaatcaattaatataagccattacatcaacaggctaatgaagaaaaatcacatgatcatattaataaatgaagagaaacatttgataaaattcaacacctactcatgatttaaaaaaaaacctcttaactagaaacagaggggcacttcctgaacttattaaagaatagctatatataaaaaaaaaaacctacgatgcccaggcactgtggctcacacctctaatcccagcactttgcgaggccaaggcgggtggatcacctgaggtcaagagttcaagaccagccttgccaacatggtgaaaccccatctctactaaaaatacaaaaattagccagayatgatggcacatgcctgtagctactcaggaggctgagccaggagaatcacttgaacccaggaggcggaggttgcagtgagccgagatcatgccactgcactccagcctgggtgacaagagggagactctgtttcaaaaaaaaaaaaaaaaacagcaacaacagcaacaacaaaaaccctatggctatcatcatatt

SEQ ID NO: 458302 - DNA, 568 bp, Homo sapiens
attgtaggtgtgcaagtctggctcaacattcaaaaatcaattaatataagccattacatcaacaggctaatgaagaaaaatcacatgatcatattaataaatgaagagaaacatttgataaaattcaacacctactcatgatttaaaaaaaaacctcttaactagaaacagaggggcacttcctgaacttattaaagaatagctatatataaaaaaaaaaacctacgatgcccaggcactgtggctcacacctctaatcccagcactttgcgaggccaaggcgggtggatcacctgaggtcaagagttcaagaccagccttgccaacatggtgaaaccccatctctactaaaaatacaaaaattagccagatatgatggcacatgcctgtagctactcaggaggctgagccaggagaatcacttgaacccaggaggcggaggttgcagtgagccgagatcatgccactgcactccagcctgggtgacaagagggagactctgtttcaaaaaaaaaaaaaaaaacagcaacaacarcaacaacaaaaaccctatggctatcatcatatt

SEQ ID NO: 458303 - DNA, 548 bp, Homo sapiens
ctgtttctgccaaagggtgcctgcaagcccttgccgagccaccttcagcaccctcttccacttctgcctccctcccgcactcatcagtgccaaaagtacggagggggctgaggcagcagggggctggtgtgtcagcatctccctgagcatgtacacacctggctgggttgtgacagtgcctgggctcggccacaactttgctctatctcagagcgggtacagggagctaggagaggccagcgagtagaagcaggcacttttgagcctgtggaactggggggtgcttcctgggcacccaagagcacaggaatgtctgggtctggagccacagctgggcacctgcagcctgggagcacggggcttctgtcccactgacccagtagggggaggggctcctgcctattccctcccctctggctttgcagagcacccagccccagccatgcctttgctgatgcagctggcatytacacagcagctgctctggacgggctggtgctactgtcactgggataactggctagccatttgcagaagattgaaactgg

SEQ ID NO: 458304 - DNA, 390 bp, Homo sapiens
aactggaatgcatgggtgctggcaggggtgaactccattcacttgacctgctgtgctgcacccctcttgggagagggagcacacaggtgagtaggtgcaggagcctggacaakcactttggggtgctggcaagagcaaactctgtactggccttgtggcagcatctggggtgtgtctgcaacccctgaagccccagaggaagtgctacagtgctcttttagctttgctgcccatggatggcttaagtgttaacatctcagtggagggtcagtgtgacagccttttgtacccacacttgtggcacctgagttcttgtccggcatccaggaggaatgatgttgcacgaacgaattgaaaatggtaaatcagcagattttattgctgatgaaa

SEQ ID NO: 458305 - DNA, 390 bp, Homo sapiens
aactggaatgcatgggtgctggcaggggtgaactccattcacttgacctgctgtgctgcacccctcttgggagagggagcacacaggtgagtaggtgcaggagcctggacaatcactttggggtgctggcaagagcaaactctgtactggccttgtggcagcatctggggtgtgtctgcaacccctgaagccccagaggaagtgctacagtgctcttttagctttgcygcccatggatggcttaagtgttaacatctcagtggagggtcagtgtgacagccttttgtacccacacttgtggcacctgagttcttgtccggcatccaggaggaatgatgttgcacgaacgaattgaaaatggtaaatcagcagattttattgctgatgaaa

SEQ ID NO: 458306 - DNA, 390 bp, Homo sapiens
aactggaatgcatgggtgctggcaggggtgaactccattcacttgacctgctgtgctgcacccctcttgggagagggagcacacaggtgagtaggtgcaggagcctggacaatcactttggggtgctggcaagagcaaactctgtactggccttgtggcagcatctggggtgtgtctgcaacccctgaagccccagaggaagtgctacagtgctcttttagctttgctgcccatggatggcttaagtgttaacatctcagtggagggtcagtgtgacagccttttgtacccacacttgtgrcacctgagttcttgtccggcatccaggaggaatgatgttgcacgaacgaattgaaaatggtaaatcagcagattttattgctgatgaaa

SEQ ID NO: 458307 - DNA, 390 bp, Homo sapiens
aactggaatgcatgggtgctggcaggggtgaactccattcacttgacctgctgtgctgcacccctcttgggagagggagcacacaggtgagtaggtgcaggagcctggacaatcactttggggtgctggcaagagcaaactctgtactggccttgtggcagcatctggggtgtgtctgcaacccctgaagccccagaggaagtgctacagtgctcttttagctttgctgcccatggatggcttaagtgttaacatctcagtggagggtcagtgtgacagccttttgtacccacacttgtggcacctgagttcttgtccggcatccaggaggaatgaygttgcacgaacgaattgaaaatggtaaatcagcagattttattgctgatgaaa

SEQ ID NO: 458308 - DNA, 632 bp, Homo sapiens
ttgcatctgtgtgcctttgatattaatggttaatgtatagagaaactaaacttatctctcaaaattggcccttacaaagtctcatgctcccacctcttttgctacagtctctgggccttggggagttgaatarctttaatttctggccctatgtctcaggtatgctctttatttgattggcattttctgccaggcctgaagatgaggctttaattgctgtcagcatttaagatttagcaagacatggtttcctttttagacccaggagtcaaagccctataactcaatgtcacaaggacttcaaaagcacatacaaaaagacacatggatgcaataaccttaatttaaaaagaaattttttaaatcttttttctaagccaaccaaaacttaataataatggcacaggaattattttgataaaacaaaaaatctgttaagccagttatcaaaaggcaaaataaaagaccttctgcagggcacagaatattatgtggaagaaaatctttcctttagacctttaaaaaactattgttagcatcaggcaacaacaaacagaatccaaggaaaaaatcttatatgaactgaaaatgagttgaagaagactgttactaattcatgccctgtaaaaggg

SEQ ID NO: 458309 - DNA, 417 bp, Homo sapiens
aataaccttaatttaaaaagaaattttttaaatcttttttctaagccaaccaaaacttaataataatggcacaggaattattttgataaaacaaaaaatctgttaagccagttatcaaaaggcaaaataaaagaccttctgcagggcacagaatattatgtggaagaaaatctttcctttagacctttaaaaaactattgttagcatcaggcaacaacaaacagaatccaaggaaaaaatcttatatgaactgaaaatgagttgaagaagactgttactaattcatgccctgtaaaaggggagaaaaactgaaaatggtgagatgcaataaamgttgatctttgggataaaaaaattaaaatttcttctaatttattaagagtaaatcaaccctttaagaaaattgtattgttctaa

SEQ ID NO: 458310 - DNA, 372 bp, Homo sapiens
taaggaatcttcagaccaaaatggaataaaagtagaaattaatcacaagaggaattttgaaaactatacaaacacatggaaattaaacaatatgtatttgaatggycagtggatcaataaatgaagaaattaagaagaaaaatataaaatgtcttgaaacaaatgataatggaaagacaacataccaaaacctatgttatatggtggaagcagcactaagagggacgtttatagctgtaagagcctacatcaaaaattttttttacttcaaacaagttacttattgaggcgtcctaaagaactagaaaagaaggagcaaaccaaatccaaaattagtaaaagaaaccaaatactaaaaatcataacagacac

SEQ ID NO: 458311 - DNA, 448 bp, Homo sapiens
ccccttctcccaggctaaccttctctagggtatagaaatataggaaggaggcttcatagaactacgcttttttcactgcctgagcccagaggctatgcaaattttgattgatctggcagctatttttaaaatgcattgtctaataggggcaggcataggagctttagttcaccctcagaaataagggccagataaggcagaagtcagcctctgaaatggaagctaataaacatcaacatgtaataggtaaaattatctactaacagaagtcactaactctcaagaggtaatgatgatgtggtaattatgaaactaagatactctccaatctttatctaagggaaccagaaaactctatcyagataaaagaccagtgtttctcattctaatgaagatgatcagcatggtgcctcagtgctgaaatgcaactggtgtcaaaaaatgaaag

SEQ ID NO: 458312 - DNA, 644 bp, Homo sapiens
aagggctgggctcccagctaaacctgtgaggagtggccagtggcggactgagtgaaataagttactccaaagggggtcaagggaactatcctatctcagtattaaatatatatgtcaataaaaatggacaatgacaataaatttggaaaacaaaataaagagaacaaagragagaaatcagaatacaaacagaaactaatgaagtagaaaaagaaaaatagctataccataaataaatattggtttaaaaaataaacaaaatagacaatcactagctaatctaatcaaaaaggtaagattgtatatgggaaggggataagaggaaagaacacaaatatacaagataaaaaatgacaaagaaaaataaccattgaaacagagaagatttaagtaatgaaaaagtgaataattttgtagaaaaacataatttgtcaaaactgattccaataaagaaaacagaccaagtactatagaagaaatagagaaagtcaactgttacttctcactctcaaaaaaatcagaaggtcaagatgatttcacaggggaattctacagaaacttccaaatccatgtcatcctatttgtataagaacatagaaaaatgatcttccaaacgtttctgacaaaaacaatgaacattaaca

SEQ ID NO: 458313 - DNA, 620 bp, Homo sapiens
tcaagggaactatcctatctcagtattaaatatatatgtcaataaaaatggacaatgacaataaatttggaaaacaaaataaagagaacaaaggagagaaatcagaatacaaacagaaactaatgaagtagaaaaagaaaaatagctataccataaataaatattggtttaaaaaataaacaaaatagacaatcactagctaatctaatcaaaaaggtaagattgtatatgggaaggggataagaggaaagaacacaaatatacaagataaaaaatgacaaagaaaaataaccattgaaacagagaagatttaagtaatgaaaaagtgaataattttgtagaaaaacataatttgtcaaaactgattccaataaagaaaacagaccaagtactatagaagaaatagagaaagtcaactgttacttctcactctcaaaaaaatcagaaggtcaagatgatttcacaggggaattctacagaaacttccaaatccatgtcatcctatttgtataagaacatagaaaaatgatcttccaaacgtttctgacaaaaasaatgaacattaacaacaaaacttgatgtaaaaaatatttttttcctcaaacctaaagactattttc

SEQ ID NO: 458314 - DNA, 578 bp, Homo sapiens
aaataacttgcccattagataataatcttatcttgggagctcagggtgggaactgtaagaccatgcagaaaggctgctggctataggtaatgctgctccccttccaccagccagctcttggaggtggctcatccctcctaaacttctgtttggctcccttgcctgtgcagcttttgttatcttatggtgtctctgagagccgaacaggccaaagtagtcctggacaaggtggtcctagctgagatgatccaggctttctcatcccggaagaactctaagcacatggatggggcctgggacaatgtgcagaatgaataacctgggcragatgcttcaattcatgtttctatgcagatggagcaggaggttagcagagcctgtgccttcagctgcgatgggaaggtgttaagttgttctgcttggtcaagtcctatgaagaagcccaggatcccaagattaccagcctgttaaacaagctgatggtgctgttcctgccacccatgacgctgccctcaaggcctgcttctgggggtagcacagcagctcctgagggtttgccatccttggtgccactgccc

SEQ ID NO: 458315 - DNA, 618 bp, Homo sapiens
cctcaccaacttcaccttgagctaggattactctggaatctaataccagtctatgagattaccaaggatatatataaagggaagggggaacttgacttgggaagaatagttaccttatgagtagtcttaaagccatttagcatttagacaatggtttgtttgtttgtttgtttgtttgtttgttttgaagggtgccacaaatgttgaggatattcttcctccaagtgtggtacatggctcaattgcattagaattgatcaattattcctgaaatggttacgttcagtttcctgttctagatccaatgtactgttctttctggttgtagagcatgtgattctacattttcacaagcactctaaagtgctttaataacacactaaaattgaaattgaataaagcccatgggaccctcaaagyccctaaattgtggataaaatttaatgcagtggccaaagagaagttccatagctttcacacatattctaaatgttcttgtgcccctacaatgttttaagccatcagattacaccatcttctgaacagtggtttggcttttgttgactcacactcatgctaattatagctttttttgaagcatcgacaaacaactataaa

SEQ ID NO: 458316 - DNA, 631 bp, Homo sapiens
cattgataacaattcccttagagagcttctttatttgtgccttgacctgcagacacaagagtgggtggtcataaatcctgtgaaaaaaagtttatccagtagagggagattcctctcttccttttccagagatagaacagagctgggtcwtgaagaggtctcagagtgctcttaggcactccctaggtagaaagtaaaagtgtcctagagtttatcacttggcattttggacatttctcagttgggtttagaaagggcatcaaggtttgacttgtgaaaaagttattcaggacaccagagctgaatacaggtgtgtctcactttacattataaaatatggctgcccaaaactgcatgcaaatcagtttgatgctggtaaaattataggcagccatcccttagcattaacagctccatcaagaacagtagagttaaggggtttaagtttttagcctctactttcatcaggccagctttacttttaaaatgttaagtgtttgaacttggtgtaaaagtttgttagaataaagattatttttagctagaagaccattgatttaatatacccctttcctatgaaaaaataaaaaaaaactgaagaagagaaatgtgaagtgactttctcaaagac

SEQ ID NO: 458317 - DNA, 574 bp, Homo sapiens
ttgggtttagaaagggcatcaaggtttgacttgtgaaaaagttattcaggacaccagagctgaatacaggtgtgtctcactttacattataaaatatggctgcccaaaactgcatgcaaatcagtttgatgctggtaaaattataggcagccatcccttagcattaacagctccatcaagaacagtagagttaaggggtttaagtttttagcctctactttcatcaggccagcttyacttttaaaatgttaagtgtttgaacttggtgtaaaagtttgttagaataaagattatttttagctagaagaccattgatttaatatacccctttcctatgaaaaaataaaaaaaaactgaagaagagaaatgtgaagtgactttctcaaagaccacccaatagttaccaatattctgttgtactgagagcttcttctatcacagtattcttggggggcagggtatttacctccatttctaatgtgctttataaatccatagacccaaagctgaaagggagctcaagagattatgatcttcttactgcactgtaaagattagagccttgaaacctaac

SEQ ID NO: 458318 - DNA, 574 bp, Homo sapiens
ttgggtttagaaagggcatcaaggtttgacttgtgaaaaagttattcaggacaccagagctgaatacaggtgtgtctcactttacattataaaatatggctgcccaaaactgcatgcaaatcagtttgatgctggtaaaattataggcagccatcccttagcattaacagctccatcaagaacagtagagttaaggggtttaagtttttagcctctactttcatcaggccagctttacttttaaaatgttaagtgtttgaacttggtgtaaaagtttgttagaataaagattatttttagctagaagaccattgatttaatatacccctttcctatgaaaaaataaaaaaaaactgaagaagagaaatgtgaagtgactttctcaaagaccacccaatagttaccaatattctgttgtrctgagagcttcttctatcacagtattcttggggggcagggtatttacctccatttctaatgtgctttataaatccatagacccaaagctgaaagggagctcaagagattatgatcttcttactgcactgtaaagattagagccttgaaacctaac

SEQ ID NO: 458319 - DNA, 627 bp, Homo sapiens
aatgaacttatttttcctctcaacaccctggtgagatgacaggtggcaaacactattaatcccattttgcagatgaagaaatactgctaatcctcgatttctatttgaagaacatgctatgccctggagtatgtgtcagtttatacatctgtttggttccaccaaacatctgagaaatattatctatgagctctgagttctttttttttcctctaagttttaaatttgtcatttacatctctgaaatcctaagaattgctacatttaggtgctgaataatatggtctagaaagaaacacctattaggaagttgagacgcttttccattgtctgaaacatttagcaatacaagatgggaattcatattagaaaaacaaatctgaaggaaagttatatttcttttaactaacagggaactcwtgaaggcactggttaatgctgaagcagtgaaagcggaaaagtcataacatgtactctttactcaaagggagtaacacctcattcctttatacctgtgtcagaaatgagcaatggtgacttaaattgggtttagatagcataggtcaatcagaataacagtgaactgtagtcatgcccaagttctcagaaaccatctgaatggttcta

SEQ ID NO: 458320 - DNA, 656 bp, Homo sapiens
atatgtgaaaatgctagatatccctaatcatcagataaatgcaaaccaaaaccacaatgagatatcagttcacayccatttggatggctactataaaaacaaaacaaaacaaaacagaaaataacaagtgttggcagggatatggagaagttagaataccatgcaaaaaatgctcaatgatggggggctatccctaacaaatactacaacatattctaaacgctctaaaataaacatagcatggcacatggatagacagactgagcaatgaaacaataaagtacataaatagattgttgaaatttggcaaatgataaaggcagcatatttaatcattggggaaacacgacctattaagaaacaatgttgagaaaactagatagccatttagtaaaagataaaattgacaaatatcacaatgtcagaaaaaattccacattaatcagatatctaaaatggaaaaaaattataaaaagtatcagaaaatatgagtaaatttatttatagtttggaaataggagaagcctttctgaatatatggaaattttagtaaaatgacctggaaacaatgacttgatagcagtgagtgcactcagggcccaaatttagtttttgatatcattcctactcaatggaagctgggatcctgacgagag

SEQ ID NO: 458321 - DNA, 582 bp, Homo sapiens
aagaacaccagaactgttgtggagttattttccaggaatgaaacatatcatttgcttaaacatttaatcccactataacattatcatagctcaaaaaaaaaaaaaaaaagaatacacataccaaaggcagctaataaggtaataaaaaggttcagtcaagaagaagaaaagaaagaactttctcctgcaagactgcttaactgtcttgtattgagtagtttttgagacccaaagtcctggattgtttttttcttaaccctattctctatcttacaacttcatttaagaacctatacagaaaactggtgtagggtggaagaaaaatgataagcagaggtataaaacaccctccattaagtaaaagagcaccccccaacacccaaccttccacaaaaagcagagggcaacaaaagggacttctcaaaatctccatccttcacaactcaagcctagaractgaaactctcctaccttctcagtggaaaggttggtctcattatcgtgtttcttctgggtgaaaacaatcgtaaacacagcgtgggaacggctacttgtttcattcatgtttgtagctgccactgt

SEQ ID NO: 458322 - DNA, 593 bp, Homo sapiens
aaagcccttaagaaagccagaaaaatcttattaaacttaactaacttaagagcatggaatactggaatgaagtctacaatcctcaagccaaaacactcaccaaacactgatgttgctcagtgagaattttaagctttgggagaaggaggtcaggggtaaagaggttaaaaaaaagcaatgcaatttggagcccagtgtagagtttcaccctatgcattagggagaaacattttaacaatcaaaccatacttcataaataaatctttattagggattgctttayaatgaaaaaaaccaaccaaccaaaacaaaataaagttctagactaatacctaaaaaacaaagatccagaatatataaccttactagttcctcattatgtataagtggaaacaaagacagtcattaatctgatttcttgctaaacttctaaagtgctgaggagaaaatccgtcacagtaatatgctctgagatctgtcaccttgttccttcctgtccagggctaggggactcttcctccatgaagtaccctttcctcacccacaacacatactccatccatcaaagggaaactttcagtgtcaggtcatgg

SEQ ID NO: 458323 - DNA, 593 bp, Homo sapiens
aaagcccttaagaaagccagaaaaatcttattaaacttaactaacttaagagcatggaatactggaatgaagtctacaatcctcaagccaaaacactcaccaaacactgatgttgctcagtgagaattttaagctttgggagaaggaggtcaggggtaaagaggttaaaaaaaagcaatgcaatttggagcccagtgtagagtttcaccctatgcattagggagaaacattttaacaatcaaaccatacttcataaataaatctttattagggattgctttacaatgaaaaaaaccaaccaaccaaaacaaaataaagttctagactaatacctaaaaaacaaagatccagaatatataaccttactrgttcctcattatgtataagtggaaacaaagacagtcattaatctgatttcttgctaaacttctaaagtgctgaggagaaaatccgtcacagtaatatgctctgagatctgtcaccttgttccttcctgtccagggctaggggactcttcctccatgaagtaccctttcctcacccacaacacatactccatccatcaaagggaaactttcagtgtcaggtcatgg

SEQ ID NO: 458324 - DNA, 568 bp, Homo sapiens
ggtctcatccaggaatccttccagacccacagtaggaaggggtgagatgcatgtttgattttggggactgatggccaggatactctctgggttggagccaggamccaaggccccttgaggcccggctttggggacaaagcagagagaaatcaggatcataggagcactgtctgaggatcagctaggcctggattcaaatccagaccacccctcgccagtgtgagctaagcccgcaccttagcctctctgagtctcatctgtggatgggggtcacactgcttgcctccctgggctgcctgtgacagtgtgcacaccctccacacaccacattcgggccccaggtggacatttgctaggaaactgcacagcctggttccactttgtcattctgaagccacagcttgcctgtgtgagtggggacaagaataagaaaggaccttgcccaaagtgctcagtcttcaacactggcccctcttctgcagagaccttgcaggacagggcctaaggagatgttgtggccactcgatgacctgccgtctctgtaggggatcaggaaccacaggtctgg

SEQ ID NO: 458325 - DNA, 568 bp, Homo sapiens
ggtctcatccaggaatccttccagacccacagtaggaaggggtgagatgcatgtttgattttggggactgatggccaggatactctctgggttggagccaggaaccaaggccccttgaggcccggctttggggacaaagcagagagaaatcaggatcataggagsactgtctgaggatcagctaggcctggattcaaatccagaccacccctcgccagtgtgagctaagcccgcaccttagcctctctgagtctcatctgtggatgggggtcacactgcttgcctccctgggctgcctgtgacagtgtgcacaccctccacacaccacattcgggccccaggtggacatttgctaggaaactgcacagcctggttccactttgtcattctgaagccacagcttgcctgtgtgagtggggacaagaataagaaaggaccttgcccaaagtgctcagtcttcaacactggcccctcttctgcagagaccttgcaggacagggcctaaggagatgttgtggccactcgatgacctgccgtctctgtaggggatcaggaaccacaggtctgg

SEQ ID NO: 458326 - DNA, 568 bp, Homo sapiens
ggtctcatccaggaatccttccagacccacagtaggaaggggtgagatgcatgtttgattttggggactgatggccaggatactctctgggttggagccaggaaccaaggccccttgaggcccggctttggggacaaagcagagagaaatcaggatcataggagcactgtctgaggatcagctaggcctggattcaaatccagaccacccctcgccagtgtgagctaagcccgcaccttagcctctctgagtctcatctgtggatgggggtcacactgcttgcctccctgggctgcctgtgacagtgtgcacaccctccacacaccacattcgggccccaggtggacatttgctaggaaactgcacagcctggttccactttgtcattctgaagccacagcttgcctgtgtgrgtggggacaagaataagaaaggaccttgcccaaagtgctcagtcttcaacactggcccctcttctgcagagaccttgcaggacagggcctaaggagatgttgtggccactcgatgacctgccgtctctgtaggggatcaggaaccacaggtctgg

SEQ ID NO: 458327 - DNA, 412 bp, Homo sapiens
ataattgctctatattttaatatccttactagaattataatttgaagcaaatatctccacaaagccagatcaataaagttaagacatcagattataaaaattggcagtctattattagagacatatagtagctttttttcagactgacatttagagccaccagaattatttgtaactactagcatgattttgaagaaataactcaaaaatatatgagtaagaatcctatttcaaatgagccagaaatagccattgcagcagccaaatgagctaacattactgagaatttgagagtagyggtccacaagttaaatattttgtcttgcttttcttctaataaagattcaagaagccagaagtttgcaggatgcattttgaattttagaaaacgttcagtttagtcagcttctgt

SEQ ID NO: 458328 - DNA, 483 bp, Homo sapiens
cttgttgcccaggctggagtacaatggcgcaatcttgtctyaccacaacctccatctcccaggttcaagcgattctcctgcttcagccttcccgagtagctgggattacaggcatgcaccaccatgcctggctaattttgtatttttagtagagacggggtttctccatccgtgttggttaggctgctctcgaactcccgaacttaggtgaccataccgccttgacttcccaaagtgctgggattacaggcatgagccaccgcacctggccaagaatccagatttgaatgtggagccattaattctctaaatgttggcaacaaattcactacccaaaatttgctgtaacatggagtcagcctgattactctgcagctgccagagaagaaggaaggcacagcctagaggacatgaatataagtatgtaagccattgattagccatagtgattaggattgaggaattgtggatagtataattttt

SEQ ID NO: 458329 - DNA, 483 bp, Homo sapiens
cttgttgcccaggctggagtacaatggcgcaatcttgtcttaccacaacctccatctcccaggttcaagcgattctcctgcttcagccttcccgagtagctgggattacaggcatgcaccaccatgcctggctaattttgtatttttagtagagacggggtttctccatccgtgttggttaggctgctctcgaactcccgaactyaggtgaccataccgccttgacttcccaaagtgctgggattacaggcatgagccaccgcacctggccaagaatccagatttgaatgtggagccattaattctctaaatgttggcaacaaattcactacccaaaatttgctgtaacatggagtcagcctgattactctgcagctgccagagaagaaggaaggcacagcctagaggacatgaatataagtatgtaagccattgattagccatagtgattaggattgaggaattgtggatagtataattttt

SEQ ID NO: 458330 - DNA, 570 bp, Homo sapiens
tctcatttaattctcacagctatttgagatagatattgctgtctgcattttacaaatgaagaaccaaggctcagagaagttgttagttgcctaaggtcacgtagctagtaaatgacaggacctggttatatcctaatctgactttaaagaccatgcatgctctttctggtatatcatacaacctcccttattcagaaacatatttttttgttaatctgattttcaaaatattttttctagcctctagtgtaccagagagaccatgtactcgaccagaatgtggccagcattctgtacttagttgrctgtttttagcgattttaaatagatcacccaccatctctcctctctagttagctgccagggagaacatccctataatccattcttggtattccctagtgcatctttttgtattagggtgatgtgttgtgaaattaagagggatatattcaattcgtttcctgttgtaaattcctgtggatttttcttcctatagtctgaccaaaaatagatttgctatataattcatacaattttaagatgtagtgagtagacaaaggctttgcg

SEQ ID NO: 458331 - DNA, 629 bp, Homo sapiens
ccgttttgtttcctgtatatgccatttcccacacaaatgaagcttaaaaagtcactgtggtctggaataagtatccttttttttcttaaagagctagcaatttattccatgagtacatgttagactctgagactcaaaagccagtaagcaatagtacgccatggtggctttcataaataaaagtagtatagtctctcatctctcctctctctctgtctctctctctctctctmtatatatatatatatttgtaaactacctcaacatgatttatatagatagatagatgataaaaatcatcatgttgaggtagtttacagaaaagcatatgcaaaggatgagataaataagttgaatgaaatacatgaagggaaaacaatgggaggaaaataataaagctaaggatgagatttatactaatgcacaccccacaatcttgtacatttgctgatgggagctgcaaacttatctgtaacctcccagcagccagagcaaaaaggattcacaatcagtaacaaaagtcatataaatagggtaacaagtttgttttttagaagcccagcttttcctcctgctaagacgggaggagacagttcccccatatcttcataaaagaagtgtgacactgt

SEQ ID NO: 458332 - DNA, 547 bp, Homo sapiens
tagctttgtttaacacggtattttcaaatgtagaaatatacttgaaagatttctagaacactttttttgtttaagacagggtcttgctttgtcacccaggctgaagtgcagtggcacaaccacggctcactgcagcctcatcctcctgggctcaagtgatcctcttgcctcagcctcccaagtagctgggactacaggcatgtgccaccacatttgctaaattttttatgattgtttgtagagacaagatctggctatgctgcccaggctggcctcaaactcctgggatcaagcagtcytcccactttggcctcccaaagtgctaggtttacaggcatgagccaccatgtgcagcctagaacactttcaaaggcatatttattaacatgcctcagaacaattttctgcagaacggtgtcccacaggacatgtacagtcaagactagagtgtagacacacactgtacacacaatgtacagtcaagactagagtgtagaaagagccctgaataagctttaggtcccaaatggtgtaaatctacaactat

SEQ ID NO: 458333 - DNA, 572 bp, Homo sapiens
ccagtaagtgctgagtgatcttaatcaacctggttgacctttccaaacctttctgtgggttgcttatgcataaaatgagtggttggttcttgtgaccttcaayatcatgtccaactccacaatctaaggagaagggaaactcagagaatcctttggataagaattgaccctccaaccaaaggaagaatgcttttctactttccaagaagcttacaaagactgccaaaatacagaacttcattacagaaaatcttaactctgcagatatctgcagaaaccactgaaaataatttcaattaccccttatgtgatcatttttagcataggttaggagctgtttctgatgcacaacatactagaactaactaagcaaggcctatgttttaattttaggacactgcatatttgtgaaaagagctctgactttggaatcaaatagacatggccttcctacttcttaaccatgtgaatttgaacgagcaccttaacctctctaaatatgaatttccttatggaaagggggtttaatgatatctatttcatagagacactaggatcaaatggaataatgt

SEQ ID NO: 458334 - DNA, 572 bp, Homo sapiens
ccagtaagtgctgagtgatcttaatcaacctggttgacctttccaaacctttctgtgggttgcttatgcataaaatgagtggttggttcttgtgaccttcaacatcatgtccaactccacaatctaaggagargggaaactcagagaatcctttggataagaattgaccctccaaccaaaggaagaatgcttttctactttccaagaagcttacaaagactgccaaaatacagaacttcattacagaaaatcttaactctgcagatatctgcagaaaccactgaaaataatttcaattaccccttatgtgatcatttttagcataggttaggagctgtttctgatgcacaacatactagaactaactaagcaaggcctatgttttaattttaggacactgcatatttgtgaaaagagctctgactttggaatcaaatagacatggccttcctacttcttaaccatgtgaatttgaacgagcaccttaacctctctaaatatgaatttccttatggaaagggggtttaatgatatctatttcatagagacactaggatcaaatggaataatgt

SEQ ID NO: 458335 - DNA, 572 bp, Homo sapiens
ccagtaagtgctgagtgatcttaatcaacctggttgacctttccaaacctttctgtgggttgcttatgcataaaatgagtggttggttcttgtgaccttcaacatcatgtccaactccacaatctaaggagaagggaaactcagagaatcctttggataagaattgaccctccaaccaaaggaagaatgcttttctactttccaagaagcttacaaagactgccaaaatacagaacttcattacagaaaatcttaactctgcagatatctgcagaaaccactgaaaataatttcaattaccccttatgtgatcatttttagcataggttaggagctgtttctgatgcacaacatactagaactaactaagcaaggcctatgttttaattttaggacactgmatatttgtgaaaagagctctgactttggaatcaaatagacatggccttcctacttcttaaccatgtgaatttgaacgagcaccttaacctctctaaatatgaatttccttatggaaagggggtttaatgatatctatttcatagagacactaggatcaaatggaataatgt

SEQ ID NO: 458336 - DNA, 579 bp, Homo sapiens
ttacttttaggcttagtttatggtcaacttttttaaaaatttcatgcataattgagaagaattatcagctctctgattttttggtagaggattttatgtattactaacagtttaagaaattagttaattgttttatccatccacagccttaaaaaatgtttaaatctagttaatcacttaggagattgttaaatctcccactgttgaggtggatttgtcaatacttttcttgctgttgtrtcgagcactgctttagatattgctatattatatatctgatattcacacatttagagttgttatatctatctaacaaataattcatttaatctgtaagatcatattagaagaaaggcagtgtccaatatttacttcacctttgtgtaatctctataattagtcttcatatgtgttatgtttttatagtcaaggtttgttcaggtttactgtcctagttgtcactttctttgcttacctttctttctttttggattttttttcccatttcataaagcatatagtttttgaattcttgtaatgataaattttattgtcattaaacattgatttgatttgtaa

SEQ ID NO: 458337 - DNA, 569 bp, Homo sapiens
tacttttgcctggcacaaaagagaatgagggcagatccaagacttattttgttattattcaattcccatctgccattacactctcttaaagtttgtttgcagtttcttatccattctgtgagagataacagagtacacttttgccctttttcctttatgtcagggaagtgaacagtgatttttttaatgaggatgaacttttaattttgagactttatatttcttgatagcagtaagcatgctttttattcgttaaaaattatagctcttrattgtttttacagaaattttatgcaaagtggtcatatattatattgcatcatattctttaacttagaactgataaaaatgagagtttgatttatccttgttgaagttcctagaaaacagacttggagctgcaagaacacaacacacttcccctggaaaatactcaaagaagtaaatctctggacattgtttacagccctagtaggatacaagaagaaatgttccttatttagaaaaagaatcataaagctaggaaatattagctaaaatgtcaataagtagggaagaaaagagagagg

SEQ ID NO: 458338 - DNA, 518 bp, Homo sapiens
aaatagagaatttttctgtactccagtctcaaaagtttcacaaactttatatcatacaggaaataatatataagatttaaatggtagacaactaatcaatcttttgtaacagaaaaataaagtcaaaaccagtgatagatatgatactttgccaaactcttaagcatttgctcctttaaaaaatatcatacaaaaggaacagagaaaaatgagtttacctttcacaagagaaaaactaacctgatagcaccagaaggaaacagtaaaacatcgcggtcaagactaggacctgtggaacctgatagaacacttaatggttctgtgacttcgggcaggtctcctrctttctgaacctcagtttcctcttgtagaaggcagagatcatatcacttgctatcctctagtgatggtaagaaagctaaatgggatgatacacgtaagacacctagctttgtgcctatcacattttaagcacttgatacacgttagacattattatcacttttagttaacagctg

SEQ ID NO: 458339 - DNA, 608 bp, Homo sapiens
aaccaagtattcagggattttgcttaaggtgtagaaagctaaaaagaatatgttcagcactcttacaataaaaagatggaatgtatatgaaattttaaactttcctgaatgcattagagagcttaagtcacagggaaagtctaaagctgagagtggtaaaataacagaaaaaaataaacaaaaaaaattccagcagtgccgccacaaccctaagcacaaagtgtcactggargaatttgaattctagggtgcactcaaggcaaccacagaaaaacaaaaccaaaatccaggtcaagtcatggctacactgactcaatccccatactgattatctaccaaattaagatgttgtgccaatttgcaggcgcaaatgctatttatatcaggactgttgttttatgcaagatgtctgatattcaagaaagaattatgagaaacattgagaggcaagaaaatacacactgtcaataaaatcaaaaccacactctaatatgctccagatgtaggaagtcacatagggaatttaaaatagctatgattcatgtgttaatatgattaatagtgaaaaagatgcaccacatatgtgactaaatagggagtttcagcag

SEQ ID NO: 458340 - DNA, 246 bp, Homo sapiens
acagaaactatgatctatgaagagtgctagaaatggcaagaataaaggaatatataaaatttattttctcatttaaattgctctaatagcaaattatttctttaaaacaaataagtagcaattcattgtgttttagcattctgtatattgtgtgcagtgaacttctttaaraaagccttatgtagtatggttgccagagcaaccatagtacagaagatggacatgagcaattaagagtacatggtt

SEQ ID NO: 458341 - DNA, 529 bp, Homo sapiens
gatattgatattccttctcttaacagaagctaatagttttgttggaaaaaacaagataaacccatgaaacaacatcaaaaaaaaaaatcacatttcataaacttttaaatgttatggtcccaaccccaagtcagcaaacttttttggcaaaaagccagacagtaaatatttcaggccttacaggacacaaggcttttctcaagagcgttcaagtctcctgttgcagcacaaaagcaactgtagacgatcctacatgaatggatttatctgtgttccagtaaagctgtatttatttataaaaacatccagtgggatggaattgtgactgccaaagtagtttactgaccctaggactattttataagtgcttttttcattatgttaacagtgtctttggaaaggcaagagtttgtttgacttagtagagtcaattttaccaactttttaattttagagatgtgattttgtgtccttttcaggaaaacttttcytaatcgatgcctcaaggaacacacatcaaaattaccaa

SEQ ID NO: 458342 - DNA, 406 bp, Homo sapiens
ctcaggctggtcatgtccctccacagaagggcacagttctcaaaacacaccattttctcctttcaatttccaataccattatctcaactcttccttttggtcctaaggttggccacacctggtatattagccccaaggcactgtactatctcggaatttctctcggctccygtgctaccccttttacgtagtccccttacaaaacacctctgccccctcacgaattatcctaacttgagcgtgccaccagattctacttgggcttgattgatgaagttaacagcctcaggaaaaaaatgttttaaactcttaaacgtaataaatagcgcttagaaatcatgttaaattcttctgcaaatcaagaatgtataactttccttctgcttgtaaaataaatagttaaaac

SEQ ID NO: 458343 - DNA, 571 bp, Homo sapiens
agagtcaatgaagtaaatcaccctcgccaatgtggatgggcaccaaccaatcttgctgaaagcctgaatagaacaaaaggcagagaaggaatttgattcttttattcctgcttcactgcttgagctgggacatttcatctcatctcatctctggactgggctttataccatcggctgccctcattcacaggcctttggacttggactgaattataccactagttttcctaggtttccagcttgcagacagcagawcataggacttctcagcctccataatcaccaattcttcataataaatcttcatataaaatatatttggatttatgtacatatattcaaatcaatacatatatcagcacatattttcaaaccaatgttttgggctctctgtggccattgacagtaagaatactgatagagtatgaaaagatttgatttctgttcagtgaagtctgtaaaatctggctctatctaccctgtagttgatggaaattcctaccagtccctagaaaagagttaaatgttagccttaattccatattctgttgctgttttttttttttcattt

SEQ ID NO: 458344 - DNA, 539 bp, Homo sapiens
gcttagcatttgaattggtagagtcaatgaagtaaatcaccctcgccaatgtggatgggcaccaaccaatcttgctgaaagcctgaatagaacaaaaggcagagaaggaatttgattcttttattcctgcttcactgcttgagctgggacatttcatctcatctcatctctggactgggctttataccatcggctgccctcattcacaggcctttggacttggactgaattataccactagttttcctaggtttccagcttgcagacagcagatcataggacttctcagcctccataatcaccaattcttcataataaatcttcatataaaatatatttggatwtatgtacatatattcaaatcaatacatatatcagcacatattttcaaaccaatgttttgggctctctgtggccattgacagtaagaatactgatagagtatgaaaagatttgatttctgttcagtgaagtctgtaaaatctggctctatctaccctgtagttgatggaaattcctaccagtccctagaaaagagt

SEQ ID NO: 458345 - DNA, 625 bp, Homo sapiens
gtccttgttccctgaagtatttctaggcttcttctttccactctaaccattccatcgaccagcataaacaaccacgatgctttgctttggtttttrccccttgtttggtttcttagataagaggctgttgcctggctccccatctttctaagtcttatgagctgaaatcaggccttagtatagtctcttgcacacattaggtgctctaaaaatgttcctggtcttttacaagctacttagtaaatacttgttgaatggataaaagtttaattttactttaaactatgaggatacagggcctatttatgttagaagcacgaaagtcacttgattggctttcctttggttcttattgctgtgtgtgtgtgtgtgtgtgtgtgtgtgtgtgtgtgtgtgttgcccctaagtctgagaaacaggttctaaaaaagttgcccttcccttccattttcttagcatgtagcaatttttaaaattcatgtatttatttgaagcacacttcaatttcatgtagatgtagatttgtaacagaaaaaaagattggtgaaattatagaaataatttaaaactatgcagaacagcataggggtttaacatgcttcactatgatacaaaattaactata

SEQ ID NO: 458346 - DNA, 625 bp, Homo sapiens
gtccttgttccctgaagtatttctaggcttcttctttccactctaaccattccatcgaccagcataaacaaccacgatgctttgctttggtttttgccccttgtttggtttcttagataagaggctgttgcctggctccccatctttctaagtcttatgagctgaaatcaggccttagtatagtctcttgcacacattaggtgctctaaaaatgttcctggtcttttacaagctacttagtaaatacttgttgaatggataaaagtttaattttactttaaactatgaggatacagggcctatttatgttagaagcacgaaagtcacttsattggctttcctttggttcttattgctgtgtgtgtgtgtgtgtgtgtgtgtgtgtgtgtgtgtgtgttgcccctaagtctgagaaacaggttctaaaaaagttgcccttcccttccattttcttagcatgtagcaatttttaaaattcatgtatttatttgaagcacacttcaatttcatgtagatgtagatttgtaacagaaaaaaagattggtgaaattatagaaataatttaaaactatgcagaacagcataggggtttaacatgcttcactatgatacaaaattaactata

SEQ ID NO: 458347 - DNA, 595 bp, Homo sapiens
aggatacagggcctatttatgttagaagcacgaaagtcacttgattggctttcctttggttcttattgctgtgtgtgtgtgtgtgtgtgtgtgtgtgtgtgtgtgtgtgttgcccytaagtctgagaaacaggttctaaaaaagttgcccttcccttccattttcttagcatgtagcaatttttaaaattcatgtatttatttgaagcacacttcaatttcatgtagatgtagatttgtaacagaaaaaaagattggtgaaattatagaaataatttaaaactatgcagaacagcataggggtttaacatgcttcactatgatacaaaattaactatatccactgagagatggttggctgataaattattagtatttgtttacaacactcattcttgaatttcaaagctttcaaaactaaaactaattctatgtgcaaaaacctccagaagaagatgcaaaagtaaagaattaaagaattttactctaatatcaaaattacacttatattatgctagtatgataaaaaaaattaggcactataacattttgggatgtaaaaggatggatattctttaaaaggtttgggttttaat

SEQ ID NO: 458348 - DNA, 551 bp, Homo sapiens
ctgattcctgttccaacaagatttaagattagtggttccttctgaaatggtgtaaacctgcatgtatatttctatgaacatatagaaaaattatgttctagtttctagcaatttattgaagatttaggtatataatatcatggagcaagaactgtggtaggcattaggaataccattgttcacaattcaggggggagaaaaaaaaggaaaccatactgtcactaattgaacacattgaataccaggaaccttgccgagtttcacatagattatctcatttaatactcacaacagccatctgctatagacacattattttacagataggaacataagacacagggagatttagtgcattgcccaagatcgtacagttagtaaatgctgacgtcaggttttgaatccagattccagactrtgctcttaattgtgatattttactacacaatataatacagctagaatataagcacacgggagctacaagggcatgaaggaagttgtgtctaattgccagggatatgaggtaggagctgagaagcaggctatag

SEQ ID NO: 458349 - DNA, 590 bp, Homo sapiens
gggtttgtaatttttactgatctttataaagaaccaacttttggttttgttaattttctttatygctttttgatttattatttcatttatttctgctgtattcattagcttattttaaaataatttttggtatacaattaagatatgcaatgtgatgttataatatagatagtaaaatcattacaattgtgtagcaaattaacatatccatcatctcacatagttacctgttttgtttttacagcaaaagcagcaaaaatctactcattttgcatgaaccccatatgcagtaaaatttattacttatggtcctcattagacctctagatttgatcatcctacatatctgctattttgtattcttttaccttcatctccccattgcctcttacctacctccttccctcccattcctggtaacacctgttttctatctccctgtattaaattgttttcttttagattccacatgtaagtgagatcatgcaatatttttctttctgtagctggcttatttcacttagcataatgtcaactcatctcattcatgttccggcaaatgcaagacttagttcttttttagagttgaa

SEQ ID NO: 458350 - DNA, 590 bp, Homo sapiens
gggtttgtaatttttactgatctttataaagaaccaacttttggttttgttaattttctttattgctttttgatttattatttcatttatttctgctgtattcattagcttattttaaaatawtttttggtatacaattaagatatgcaatgtgatgttataatatagatagtaaaatcattacaattgtgtagcaaattaacatatccatcatctcacatagttacctgttttgtttttacagcaaaagcagcaaaaatctactcattttgcatgaaccccatatgcagtaaaatttattacttatggtcctcattagacctctagatttgatcatcctacatatctgctattttgtattcttttaccttcatctccccattgcctcttacctacctccttccctcccattcctggtaacacctgttttctatctccctgtattaaattgttttcttttagattccacatgtaagtgagatcatgcaatatttttctttctgtagctggcttatttcacttagcataatgtcaactcatctcattcatgttccggcaaatgcaagacttagttcttttttagagttgaa

SEQ ID NO: 458351 - DNA, 564 bp, Homo sapiens
agcctgaccctcgatgcccggcaggggtcccaggccacagccaagacttggcctccctgggcccccccaaacacacagccttcaaggagtgggggcttcatcagcaggaccctgtgccttcacaatcaggaaggcccctcaatgtcagtagccccccacccctcaccaggctcagctgatgaaggacaaaggtggccaggaggctagggggagcttctgaggaggaaggcgggaagacacgtgggaggaaacaccatgtgaaattaagactgactctgctgacycttctaaaatgacaggctgcaaggacagcagggaggagggaggaaattggaggagttgcatgggccttggaggtggccttgtcctgcctatttattgtacagatgagaaattcaagactgagccagcaggaggcactgcccaaggtccacagcaaggcagaggctgagccctaccccgactaaagcagtccagaagctttgggcagctgggataagctcccaattcatccacatggccgaattcctacagcctggtttccaacctcctctgtttcccctt

SEQ ID NO: 458352 - DNA, 540 bp, Homo sapiens
catgctcgcccacgtgcttgagcagctgagaaccctgtagagtgggctttccwggggggtgttatgctctccatgccacacaggacagccgggaggggcacagcccacctctttggcccctttacatccctcagcatcaggggcatctaattgttcctcctgtggcctttatagggccagggaggaagttaccagaagcctgaaatgcagacaaccagttcctgatttaaaggaaacctatcgtgtgggaggtaccttaaaaaaaaaaaaagaaaagaaaaaaagagcccatggcttctccagtgcactccacatttcagggctgtggtatcagccctgaattcactctgactccattagcagcctgagcactggtgctgagacacccagactctctggaaccttgagagagcatccctggagagctgactcagccttttgtcctccaggaggtagagaaattggattccaaggctcaaaggttggcaggtctgcatccagaggcagagagataaaggactgctgcccaagtggtgggca

SEQ ID NO: 458353 - DNA, 535 bp, Homo sapiens
gtgggcagcccggggagcccttttagaacaaaggtggactcaggaaagggatggacagagggagggaggaggaagaattgatttattgcccacagctttgtagtaggcaccgtgcctgccacattattaatcctaacaaccagctttcaaggtaaatattgttaccccatgttttgcagttgtcatgactgaggctcagaccgtggagtgacctaagtaactaggtggtctggggcaagcaatagagcatacattcagattcggatgtgtctaacccatgcagtgcctcgggactgaccaccaagaaggagctataaggaaagaaaggcaccatggtgagcagccctgagccattgcctggtctcaccrgagtggtacatcccaggtacccagctgaggcttaccagaccctgaccccaggaacacctggtccctgcagaacaacatacgcaacagagtggtgtttgggacagtttagatgagacatttatctataggcatttgtcattatgcaaatctacaagtcatataccta

SEQ ID NO: 458354 - DNA, 541 bp, Homo sapiens
ggtgggaagactcagcaagtctgctctttgcaactttttctgcctgctttattctggctgcgctggcagctgattrgatggtgcccactcagattgagggtgggtctgcctctcccagtccactgactcaaatattaatctcctttggcaacaccttcacagacacacccgagaacaatactttgcctccttcaatccattcaagttaacactcaatattaaccatcacactgcactactgttagagtgagttaaaaaaaaatcctgacaataccacgtgctggggaggatgaagagcaacaggagctgccatgcttttcttgtgggagtggaaaatgggatggccactctggaacacattttgatagttccatttaaagttaaacatctaggaccatatgactcagccattcaactcctgggtcacttcaaagtaaagaaaaacttaaggccatagaaaaatctgtacgcaaatgttcataacacctttatttttaacagcacaaaatggagacaacccaaagttctcccaacagaaaat

SEQ ID NO: 458355 - DNA, 541 bp, Homo sapiens
ggtgggaagactcagcaagtctgctctttgcaactttttctgcctgctttattctggctgcgctggcagctgattggatggtgcccactcagattgagggtgggtctgcctctcccagtccactgactcaaatattaatctcctttggcaacaccttcacagacacacccgagaacaatactttgcctccttcaatccattcaagttaacactcaatattaaccatcacactgcactactgttagagtragttaaaaaaaaatcctgacaataccacgtgctggggaggatgaagagcaacaggagctgccatgcttttcttgtgggagtggaaaatgggatggccactctggaacacattttgatagttccatttaaagttaaacatctaggaccatatgactcagccattcaactcctgggtcacttcaaagtaaagaaaaacttaaggccatagaaaaatctgtacgcaaatgttcataacacctttatttttaacagcacaaaatggagacaacccaaagttctcccaacagaaaat

SEQ ID NO: 458356 - DNA, 541 bp, Homo sapiens
ggtgggaagactcagcaagtctgctctttgcaactttttctgcctgctttattctggctgcgctggcagctgattggatggtgcccactcagattgagggtgggtctgcctctcccagtccactgactcaaatattaatctcctttggcaacaccttcacagacacacccgagaacaatactttgcctccttcaatccattcaagttaacactcaatattaaccatcacactgcactactgttagagtgagttaaaaaaaaatcctgacaataccacgtgctggggaggatgaagagcaacaggagctgccatgcttttcttgtgggagtggaaaatgggatggccactctggaacacattttgatagttccatttaaagttaaacatctaggaccatatgactcagccattcaactcctgggtcacttcaaartaaagaaaaacttaaggccatagaaaaatctgtacgcaaatgttcataacacctttatttttaacagcacaaaatggagacaacccaaagttctcccaacagaaaat

SEQ ID NO: 458357 - DNA, 590 bp, Homo sapiens
ccaatttggggaagcggtggtgttcgccccctgatcaggacgccaccaaatgccacttcccgtccacatgctgcctgccgggggagcaagacctttagtctctgcacctctgggaggtgtcagagtggagaagacaggaggaaagaagagggagtgggtgtcggcacaggctggcctgaccactgccaggcactgcctctttgctggctttgtcaccctgctgtggacacctcttctctttcaatttagttcaatttcacagtcaccctccacatcctttccatgtcccaggcagcgtttgkcttcagcagatgccaaggccggtgttccctcttctgcccttactcctttcccgggccactgtcaaacttccagctccacagacagacgttgccttttttcactttatttcttttctgctcaaggtcagattgtcatatcatcgaaatgacttcgagaggactgggtccgatggactcaccaggcatggttccaattatcattcaagggacaagagtgaaatgccatggttcaaatgaaaacactcacatccacacagggtcaggtgcacacactgctggacgcagctg

SEQ ID NO: 458358 - DNA, 612 bp, Homo sapiens
gtgagtatccccgacctggaccctcttctccatgcaagccttggttgatgcggtcaccccctacccctctgcttgcttctcttctcctgaccacccttcccaccctccttcggctgggcttgtgaacatgactgagcccctggctggtcccaggcttagggcactcccatgaatgaggcacattttgaagaaactcagtctagtgagggcacagccagcgctgccattctgttctttcaaagcagaggctgctgctttgatagagggaagtgaggagcgggagcaggggtggatagtgcacagagaaggggcaccccacagcctgggggaatccagggagaattcctgggagagatggtgccgtcactgtaccttcaaggaggagtacgagtatacattaatgaataactcaaataattttcaaataaaagactatatatagtgtgcagcaactgtgggcccaagacctcaggggaggcccctgctatgtgtgtgtgctgcaggtaagtccagctgcagyggtggaggagaaaggaggagaaaaagtgatgctgaggccactagcatggcccggatgtcttttcacaatttgcatgtgctcccattccaagt

SEQ ID NO: 458359 - DNA, 634 bp, Homo sapiens
ctttcctctgcttggtctattcagttattgctgcttgtggttgcactgtgaagtcctcatgctgtgtttttcagctccatcaggtcatttatgtttctctctaaaatgattaytctggttaacagctcctgtaatgttttatcgtggttcttagcttctttgcattgcattagagcatgctcctttacctcagcaaagtttataattacccaccttctgaatcctacttctgtcaatttatacatctaagcctctgctcacttctgtgtcctcactggagaggtgttgcaatcatttaaggaagaagaggcatgctggatttttgagttttcagcgtttttgttgttgtttttgttgttgttgttgattctttcccatctttgtgagtttgtctagctttaatctttgaagctattgacatttggaaggggtttttgtggggacttttgtgttggtgctgttgttgctctctgttattttattttattttatttatttttttaacagtcaggccccctttccatagggttgctacagtttgctggcagcccactccagaccctatgcacctggtccctcccacacctgaaagtgtcaccagtggaggctgcagaacaggaaagatgggtgccca

SEQ ID NO: 458360 - DNA, 634 bp, Homo sapiens
ctttcctctgcttggtctattcagttattgctgcttgtggttgcactgtgaagtcctcatgctgtgtttttcagctccatcaggtcatttatgtttctctctaaaatgattattctggttaacagctcctgtaatgttttatcgtggttcttagcttctttgcattgcattagagcatgctsctttacctcagcaaagtttataattacccaccttctgaatcctacttctgtcaatttatacatctaagcctctgctcacttctgtgtcctcactggagaggtgttgcaatcatttaaggaagaagaggcatgctggatttttgagttttcagcgtttttgttgttgtttttgttgttgttgttgattctttcccatctttgtgagtttgtctagctttaatctttgaagctattgacatttggaaggggtttttgtggggacttttgtgttggtgctgttgttgctctctgttattttattttattttatttatttttttaacagtcaggccccctttccatagggttgctacagtttgctggcagcccactccagaccctatgcacctggtccctcccacacctgaaagtgtcaccagtggaggctgcagaacaggaaagatgggtgccca

SEQ ID NO: 458361 - DNA, 385 bp, Homo sapiens
tcttggcccgttactgggctttggtggaaaccgaatgtttgactacgggtcatcaagtcaccatgtgaacttaactgcctaycataaactgggtgctttctaacccatctagtcataaagtggctcatgcacagtaatgttccatcatcaaataaaagtggtatatatgtgattgggcttgatcaggtcctgaaggcacaaataagttatatgaggaagtggatcaaatgcgtatggtctccatttctgctaccatgccttctctccctcagcctgcaccaacagcctcatggggagctccctatgatcagtagacagagaaagagaagacagatcctggttcacagatggttcttcacaatatacaggcaccactagaaagtgg

SEQ ID NO: 458362 - DNA, 458 bp, Homo sapiens
tgtctatttatcacagaatcacaaactgactataattaaagaggacatttgactcagtgctagttaagcaaataagagactatgatgtaggtgatatccggcagtgccatgagccccaaatattggactgcatctaaatgatagaggtggttgtgaggagggtgaagcatcaatagcttttgaaccattgtgagtactatagtttacaaagcacatgcttgtcctaagagcaacrgtttaactcaaggaaagaccacttcctttgcagagaacattctatttcacttggcttgtcacactctctgtacaatggttgtcattttatttccttctttcttcttgcaatacacacttacctaatatgactgacagagcctattacattctaaatccataatcctatatctctatatagaatgacctctaatggaatagtggagtatttgaagtttcaaaag

SEQ ID NO: 458363 - DNA, 563 bp, Homo sapiens
ggcctaacaataaatcatcctctcagtattttcgtttgccattgatatctggaggttgaacaagtttgtgactcaggtgtttaaagttagttggactaatttactatctcagtgccatgctggattgtaggcagcaatggaattgaagggaacagaaagaaacttgaactcattaaatgagtttgggcaagaggtcagataaacaataagtgttaagaggacataaatactagagggtcacatcacgtagacttccaaaatccatgtcaatcgtcaggcctcatgaggttggctgaataactagaactagtaactgaagcagatatactgcaccagccataagtaaagggtagagttactgaggcaactccaggtacttttgcactgctaatggtgaacttggcctgaagagttgcaagatcctttggtgagacaaaatgtataccagaaaaaaggtataaaaaaatcctataaataaactgctggatggrctaaaacacacaactgaagtagaaagctcagaaaataaatcactctaagacacagattttaccttctctgat

SEQ ID NO: 458364 - DNA, 582 bp, Homo sapiens
agctaacagtgacgtattttgtawcaagtataagagagagacaaatcaaacatgagtctatggtttatggtttaagaaactggaaaaataaagttgtaatttactgagattaaagaaaaagactgcttaggaacaaggtgtgagggaataataaggaatttgacttttatcattttagaattgcacttggcaatcaagtagttggatatataagcttggagttattttagttactatggctctgtaaaaataattacccctgaatttactgtcttaaaacaatgagcatttattttattcatgaatctacaattacgtctacgattggtgaggctgacttatctgtgctccaattggcatcagctgaagtgacttgatggctagggggatggaatcttctgaagggtcattccgtcacgtgactggtggtagatgctggctgttggctgaaaccttagctaaggctgttggttagaacacccaagtatggcctctccccatggcccaagcttcctcacaatatggaagaatgatccccaaaggaagcatcctgagagagagagagagacaaagagaggggag

SEQ ID NO: 458365 - DNA, 517 bp, Homo sapiens
gccagtcacaattttatgctaaaaattaggccaagtatattagaactgaaatttayttttcaaataaattgggcctcttatgttttattcttggtagaattggggaactagcgagagaaaaattatatttcaggaaaactctatagtgcagcctggtgtagacttttccattgtgtttcagtttttattatttttctacaatttagactgagtcatgcattcttctctggctacaagtctccaactaatgtgttcaaattttccttcaatttttttgacatgtgatcactagaaaatcaaactacatttcttaaagccctgcaaagtgaagctagacaacttgatataaacatcacaagagatcaccacgacaactgatatataaacagccgtcatgctggctgatatatcaactactcagaaagttcaattgaatatttgctttgagttattatccagaaaaatctgtcagcttgccactgcaatctgaacacgcttcagagactctagaaaaaca

SEQ ID NO: 458366 - DNA, 517 bp, Homo sapiens
gccagtcacaattttatgctaaaaattaggccaagtatattagaactgaaatttatttttcaaataaattgggcctcttatgttttattcttggtagaattggggaactagcgagagaaaaattatatttcaggaaaactctatagtgcagcctggtgtagacttttccattgtgtttcagtttttattatttttctacaatttagactgagtcatgcattcttctctggctacaagtctccaactaatgtgttcaaattttccttcaatttttttgacatgtgatcactagaaaatcaaactacatttcttaaagccctgcaaagtgaagctagacaacttgatataaacatcacaagagatcaccacgacaactgatayataaacagccgtcatgctggctgatatatcaactactcagaaagttcaattgaatatttgctttgagttattatccagaaaaatctgtcagcttgccactgcaatctgaacacgcttcagagactctagaaaaaca

SEQ ID NO: 458367 - DNA, 517 bp, Homo sapiens
gccagtcacaattttatgctaaaaattaggccaagtatattagaactgaaatttatttttcaaataaattgggcctcttatgttttattcttggtagaattggggaactagcgagagaaaaattatatttcaggaaaactctatagtgcagcctggtgtagacttttccattgtgtttcagtttttattatttttctacaatttagactgagtcatgcattcttctctggctacaagtctccaactaatgtgttcaaattttccttcaatttttttgacatgtgatcactagaaaatcaaactacatttcttaaagccctgcaaagtgaagctagacaacttgatataaacatcacaagagatcaccacgacaactgatatataaacagcygtcatgctggctgatatatcaactactcagaaagttcaattgaatatttgctttgagttattatccagaaaaatctgtcagcttgccactgcaatctgaacacgcttcagagactctagaaaaaca

SEQ ID NO: 458368 - DNA, 548 bp, Homo sapiens
tagtggtaaccaaacttcatgtataaccccatctatgtcttttctatataccactgatgcacccatgcttggttggtgcaccttgccaagtttctttacaatttttcatccttatatttgatttagattcacttacatttctaccattgaatagtctgtttgcctggttcatgcaagtagacactcagttaaaaagaatgctgaactcacttagaaaaaacattcgtttaaatcctatacttcagtgctgtttcctaatttctacagattgaagaatcttccacacaagatgctgtagaatgtgtgcagaagaagtgtccaataatgagccatgagaatctagtaaacattctgtttattcaaaaaacatttgggaggacctactatgtgctagactctgtgctaagcactggggatgcaaaaaaaaaaatccttgccatttagaagcttgtaatctagtgagaaaagcacaagtaasgaaatgcttagaacagagtgtgttaagttctagtctagataaataaaagccactgtgaggtgcctggagg

SEQ ID NO: 458369 - DNA, 594 bp, Homo sapiens
tgatggacatatgagttgcttccactttctggatattgtgaataatattgctatgaatattggtgttcaagtgtttgttaagtccctgctttcarttattttgagtataggcctacccatggaattgctagatcaaatgataatttcgagatcataaaattctaattctatgtttaacttttaaaaaaacttccatactcttttccacagcagctgcactgttttccattttcaccagcaatgcacaagggttccaatttcttcacatcattgataacacttaatttatttttcttttaataatagccatcctaatgagtgtgaaatggtatttcatgttggtttttacttatgttttcataatgactagtgatattgatagtctttctatgtggttattagccatttgtatattttctttggagaaatgtcttttcaagccctgatatggtttggctgtgtccacacccaaatctcatcttgaattgtagttcccataatccccacatgtcctgggagggaaccagcaggaggtaattaaattatgggggtagggttttcccgtgctgttcttgtggtagtgaatcagtctca

SEQ ID NO: 458370 - DNA, 594 bp, Homo sapiens
tgatggacatatgagttgcttccactttctggatattgtgaataatattgctatgaatattggtgttcaagtgtttgttaagtccctgctttcaattattttgagtataggcctacccatggaattgctagatcaaatgataatttcgagatcataaaattctaattctatgtttaacttttaaaaaaacttccatactsttttccacagcagctgcactgttttccattttcaccagcaatgcacaagggttccaatttcttcacatcattgataacacttaatttatttttcttttaataatagccatcctaatgagtgtgaaatggtatttcatgttggtttttacttatgttttcataatgactagtgatattgatagtctttctatgtggttattagccatttgtatattttctttggagaaatgtcttttcaagccctgatatggtttggctgtgtccacacccaaatctcatcttgaattgtagttcccataatccccacatgtcctgggagggaaccagcaggaggtaattaaattatgggggtagggttttcccgtgctgttcttgtggtagtgaatcagtctca

SEQ ID NO: 458371 - DNA, 594 bp, Homo sapiens
tgatggacatatgagttgcttccactttctggatattgtgaataatattgctatgaatattggtgttcaagtgtttgttaagtccctgctttcaattattttgagtataggcctacccatggaattgctagatcaaatgataatttcgagatcataaaattctaattctatgtttaacttttaaaaaaacttccatactcttttccacagcagctgcactgttttccattttcaccagcaatgcacaagggttccaatttcttcacaycattgataacacttaatttatttttcttttaataatagccatcctaatgagtgtgaaatggtatttcatgttggtttttacttatgttttcataatgactagtgatattgatagtctttctatgtggttattagccatttgtatattttctttggagaaatgtcttttcaagccctgatatggtttggctgtgtccacacccaaatctcatcttgaattgtagttcccataatccccacatgtcctgggagggaaccagcaggaggtaattaaattatgggggtagggttttcccgtgctgttcttgtggtagtgaatcagtctca

SEQ ID NO: 458372 - DNA, 246 bp, Homo sapiens
gatggtctagcatcaaggcccactaccactagagcaacataagcctatacacaactgagatagagatagattttayatataaattcaccatgcaatattcatatgacagattttagaaatgcaatgtcccgatccttaacaaataatgatctactattttagagccgaaaagcataatcatatttataccaataaatacgaaatactaaatttcagagttaaatattcaactgccatttagtgtgt

SEQ ID NO: 458373 - DNA, 246 bp, Homo sapiens
gatggtctagcatcaaggcccactaccactagagcaacataagcctatacacaactgagatagagatagattttacatataaattcaccatgcaatattcatatgacagattttagaaatgcaatgtcccgatccttaacaaataatgatctactattttagagcygaaaagcataatcatatttataccaataaatacgaaatactaaatttcagagttaaatattcaactgccatttagtgtgt

SEQ ID NO: 458374 - DNA, 589 bp, Homo sapiens
ggcttgggtaagactctgagattacctggcttcagatgagactcagcacattcccagctgtggtagctatggggagagactccttttgattgcaaaaagtagagggaaacacaaaagggattttatcttgcatcttatgtaccagctcaggaaagggggggtagaacaccaagtcagctcctgggggtcccagaatccataccttggctactggaagacatttcttgaatggctctgggccagaggggagcccactgccctgaggtgtgagtcccaggcctggcagcattcaccataaactgactaaagagacattgaccataaaggtaacatcagcagtactccccatggtcctgtggtgctggtatccccagggtgaggctcctgtgcctgaaaaaaaagggtggtaagaattggaagaactgtgtcttatggtttgrgtgtcagcacagcagcagtacaatacaacaccaggtagacttctaaggttttttactgtactccctggttcccagatggtgtccctggacctgccccaaacctgggggatctcaaaaccctgaaagcaatgatagaagcctggctggct

SEQ ID NO: 458375 - DNA, 589 bp, Homo sapiens
ggcttgggtaagactctgagattacctggcttcagatgagactcagcacattcccagctgtggtagctatggggagagactccttttgattgcaaaaagtagagggaaacacaaaagggattttatcttgcatcttatgtaccagctcaggaaagggggggtagaacaccaagtcagctcctgggggtcccagaatccataccttggctactggaagacatttcttgaatggctctgggccagaggggagcccactgccctgaggtgtgagtcccaggcctggcagcattcaccataaactgactaaagagacattgaccataaaggtaacatcagcagtactccccatggtcctgtggtgctggtatccccagggtgaggctcctgtgcctgaaaaaaaagggtggtaagaattggaagaactgtgtcttatggtttgagtgtcagcacagcagcagtacaatacaacaccaggtagacttctaaggttttttactgtactccctggttcccagatggtgtccctggacctgccccraacctgggggatctcaaaaccctgaaagcaatgatagaagcctggctggct

SEQ ID NO: 458376 - DNA, 424 bp, Homo sapiens
acatactatcacgttctgactttatctttacctctctccagaaaaaaagaaaaaggtgtaaagaattaacatctcaaattggaggtcaatagataaaatacagaaaagtagatgatattttcccaccagagacaatattgtcaccaatgggacaaaaattggttcttgaagagtgaaaaaatcttagatattataatgrtttatggccttccaaagcttaacccacccgaaaaaatattatcccgtagtttttaatttctctattaggaaaaattaacctaattaaaatataaattatttttccacctttattgagatataattggcaaataaaagttgtatatatttatgtttttttacatgtgtacattgtgtaatggttgccacaatcaaactaattaacacatctcacatagttaccctc

SEQ ID NO: 458377 - DNA, 424 bp, Homo sapiens
acatactatcacgttctgactttatctttacctctctccagaaaaaaagaaaaaggtgtaaagaattaacatctcaaattggaggtcaatagataaaatacagaaaagtagatgatattttcccaccagagacaatattgtcaccaatgggacaaaaattggttcttgaagagtgaaaaaatcttagatattataatggtttatggccttccaaagcttaacccacccgaaaaaatattatcccgtagtttttaatttctctattaggaaaaattaacctaattaaaatataaattatttttccacctttattgagatataattggcaaataaaagttgtatatattkatgtttttttacatgtgtacattgtgtaatggttgccacaatcaaactaattaacacatctcacatagttaccctc

SEQ ID NO: 458378 - DNA, 617 bp, Homo sapiens
caaacaggcttggaagtctgactccaggtctatgctcttaactgctgtgctctcctgctccctgggaggtgagagcataggcccgggcctagccatgctgggtgtgtcattagacttaggaccccagtctttaaaaatatagtctaatctcctcctaccacacccatggtgttgttgacaaaactgatggaatcaccttttgtcattcctacctaccatttagttttcaacatttaaagttgcctttgtatttayttaaaattgacttttctcaaatggaaattttaggaacaatagaactcatcatagatgtttttggcatctccctagggacatataacccataaatcacccagttttctagttttccttaagaatctgtaatgtacattgaaccctgagtgcagcatgctgaaacggagtctttttggaatgtagtgaagtcagggctattgagacatgtgtttacgtatatgtaccttctctcttccagtaaaggatgacagagggcacagaagccaccagcagattctttggaaggaagtaacaggagtggaacttcattttcccatggattgtaaagggtgagagaaaagccatataaacgcctagccttc

SEQ ID NO: 458379 - DNA, 557 bp, Homo sapiens
tttttattactgattcaaccttactactcattattggtctgtttgggttttcttttttcctggttaaatgttggtaggctctgtgtgtccaggaattgaattttctctaggttttccagttagtcagaatatagttgtctcaaaatagactctgataatgttatttattgctgtgatatcagttataatgtctcctttttaatttttccttttttttttttttttttgatacagtcacacactkttgcccaggctggagtagagtggcgtgatctcggctcactgcaacctccgcctcccaggttcaagcgattctcctgcctcagcctaccaagtagctgggattataggtgtgtgcaccgaggtaatttttgtattagtagagatggggtttcactatgttggccaggctggtctcgaactcctgacctcaggtgatacacccaccttggcctcccaagttgctgggatttcaggcttgagccaccatgcctgacctcctttttaatttctgattttgtttatttgggtcttctctcttctcggttatcctagct

SEQ ID NO: 458380 - DNA, 557 bp, Homo sapiens
tttttattactgattcaaccttactactcattattggtctgtttgggttttcttttttcctggttaaatgttggtaggctctgtgtgtccaggaattgaattttctctaggttttccagttagtcagaatatagttgtctcaaaatagactctgataatgttatttattgctgtgatatcagttataatgtctcctttttaatttttccttttttttttttttttttgatacagtcacacactgttgcccaggctggagtagagtggcgtgatctcggctcactgcaacctccgcctcccaggttcaagcgattctcctgcctcagcctaccaagtagctgggattataggtgtgtgcaccsaggtaatttttgtattagtagagatggggtttcactatgttggccaggctggtctcgaactcctgacctcaggtgatacacccaccttggcctcccaagttgctgggatttcaggcttgagccaccatgcctgacctcctttttaatttctgattttgtttatttgggtcttctctcttctcggttatcctagct

SEQ ID NO: 458381 - DNA, 392 bp, Homo sapiens
ggaggtagctcagactcccatggtgtccaacactgttacaaaagcatgactctctcagctcatatctatatctgtgtgacagatcccttatgaccagctaaaagaggaggaaaaaaaatggcttacagatgaattggctctgtatgtggaagcagctgtactaccttcagggatagccttaaatgacagtaaaggcaaaaaatccytccaatgggaagagctttgggcagtgcatgagtcattcactttcttagttggaaagagaagagacccaaatttagaatatatatggactgctgtgtagcactgaatagactggacagctggccgggggtctggaagggaaaaaattggaagatcaaaagcaaggaatttgtgattcagtcacatgg

SEQ ID NO: 458382 - DNA, 618 bp, Homo sapiens
tatttctcccttttccttcttatcttggtgtattagtctgttctcacagtgctaataaagacattcctgagactgggtaatttataaaggaaaaaggtttaattgactcaccattcagcatggctggagaggcctcaggaaacttataatcatggcagaaggtaactacccccagtgattcaactacttccctccaggcccttcccataacacgtggggattatggggactacagttgaagatgagatttgggtggggacacagcaaaaccgtatcacttggmcactatatatcttcatcttattgggagtttctatggcagtatactacactagatgtttgttgactctgtaaaaagggactatgtctctgatctcttgtttagtcccatctcctcctggtaccctacagcgttttacaaagaagagagccgaataaagtggcatacttctaaattctaggctcaaaaggaaaaattccagagctcactatgttacccttagttaactgcacatcaacccctcctccatatttatcttgctatcaggagcaaagcagatctttggggcctttatcctcattcaatactttttcttagctaaaagctttcaccattac

SEQ ID NO: 458383 - DNA, 618 bp, Homo sapiens
tatttctcccttttccttcttatcttggtgtattagtctgttctcacagtgctaataaagacattcctgagactgggtaatttataaaggaaaaaggtttaattgactcaccattcagcatggctggagaggcctcaggaaacttataatcatggcagaaggtaactacccccagtgattcaactacttccctccaggcccttcccataacacgtggggattatggggactacagttgaagatgagatttgggtggggacacagcaaaaccgtatcacttggccactatatatcttcatcttattgggagtttctatggcagtatactacactagatgtttgttgactctgtaaaaagggactatgtctctgatctcttgtttagtcccatctcctcctggtaccctacagcgttttacaaagaagasagccgaataaagtggcatacttctaaattctaggctcaaaaggaaaaattccagagctcactatgttacccttagttaactgcacatcaacccctcctccatatttatcttgctatcaggagcaaagcagatctttggggcctttatcctcattcaatactttttcttagctaaaagctttcaccattac

SEQ ID NO: 458384 - DNA, 528 bp, Homo sapiens
tctacacccaccaccctgcccaggaatgtcaggtgaccatcagatgatggtcaggcaggtgttaaactctttaaaataataattgctcgcagccagcaccagggaaaaggagttacccaatagayagaaaacacctgaaactggtgatctcagcttccccataagatctcaagagtgagggagcgggctcaagcatgcacactaagaggcaacatggtggtgtttaactggtatgtgaccttcctctgggaacacccgactgcaaagaaaaacacctcaaatgagcatgtgcacaacttcagtgaacacactgcacatgtggcccctcccaagtgctggcaggccactgtgcatgcaaacagcccagcccaaggaaaaattaagggagaagagatgcaaaccccagaaccatgccaatatctaaaactccaagccaagggtcagatacagcacttggacctcccaagtcgcctgcttggctctcttccaagtatacttcctctcactcctgctctaaaaccttttaat

SEQ ID NO: 458385 - DNA, 528 bp, Homo sapiens
tctacacccaccaccctgcccaggaatgtcaggtgaccatcagatgatggtcaggcaggtgttaaactctttaaaataataattgctcgcagccagcaccagggaaaaggagttacccaatagacagaaaacacctgaaactggtgatctcagcttccccataagatctcaagagtgagggagcgggctcaagcatgcacactaagaggcaasatggtggtgtttaactggtatgtgaccttcctctgggaacacccgactgcaaagaaaaacacctcaaatgagcatgtgcacaacttcagtgaacacactgcacatgtggcccctcccaagtgctggcaggccactgtgcatgcaaacagcccagcccaaggaaaaattaagggagaagagatgcaaaccccagaaccatgccaatatctaaaactccaagccaagggtcagatacagcacttggacctcccaagtcgcctgcttggctctcttccaagtatacttcctctcactcctgctctaaaaccttttaat

SEQ ID NO: 458386 - DNA, 510 bp, Homo sapiens
aaatgctttttccccattaaaatatttattttgtacattgctagtaccacagttgccccaaaccattgctgtaaggtgtttatttgtcccttatgaaactggaggtacatttgggttacttccagagtataatgagaagaactcctgtcctagaaccatactctggcttctgcttttcctttgtcatagctaagtccactctactgaactagaacactgtgcrtgaatgcgttaagtgcctaccatctgctttatgctctgtagggctctggggagggtaagatgggttattgtggatgtgttcctgataaacagacatgaatacttctcccttggcagcctgagacatctgccgaatttgggagcatgactatccttgttcagcatagccaccggctcagtttactttctgtcactatgctattgtttcttctgtcccttggtaaggcctggggagatgagcatcccttcctctgatgtagagccagtggcccccagtaccagtgaggg

SEQ ID NO: 458387 - DNA, 465 bp, Homo sapiens
gacacagggaggggaacattacacaccagggcctgtcggggggttggaggcaagcggaaggagagcattaggacaaatacataatgtttgcagggcttaaaacctatatgatgtgttgataagtgcagcaaaccaccatggcgcatgtatacctatataataaacctgcacattctgcaaatgtatcccagaaattaaaaaaaaaaaagagaaatggttcaagtggacatctttgttttataacctgattttaagaggaaagcatttagtctttcaatattaaatattaggtatgatgttaactgttgaatrgttgacacagcttttaaaacttttattctataagttatctctgtgtgtgtgtgtgtgtgtgtgtgtgtgtgtgtcttgtgtgtctctgtctcttctactctctttccctgttctgtcccatccccacaccttactcactcactgattttctct

SEQ ID NO: 458388 - DNA, 519 bp, Homo sapiens
gaaaaactgcctatcaggtaccatgctcactacctggtgacaaaagcatttgtacaacaaaccccagtgacatacaatttacccatgtaacaaacctacacatataccccwcaacctaaaagttgaaaaggaagaaaaaacccaaacattattttcaatgcacagaatttgttcaccaaaataaattgtcacattcaggtataaggccaaataaaaaatcagcatttcccttcttgactggttatattagagaactagtatttctgaaggcaagagataccaacatttgcagagactttctcagttttccactgacatgagcaatgaccagatagttgagataacatgcaaaacaaaaataatgtgaagcctaggagtatgaagtgaggcagaaattgtgcagtaattccttagtaatagtcacattcctagagggatgcacccctactttgagatgctgtggtctgagaggagcccccttgagagtaaagggggatagaggccacatccatttgtgct

SEQ ID NO: 458389 - DNA, 560 bp, Homo sapiens
agtctgaaagtttgaaatcataatccccaagacttgggcaaatcaagtaattttcccaaagaaactttggtaaggagaggtaggatataagccaagccagtctgggtccaaaacctgagttgtttccaatataacaggttggcattattttatagaataaagtggaactgtagctgggaaagaaagaagctaagctttagaatatagggccctattaacagggaaatgtgcttcttataagtggcttagaaatggctatttcctaaaggactcgtagtcctaaattacttgtcagtgacatcatactttgtcatttctcaggaaacatgggattacctctgatttattctatctttatatccagcctgtcgtctaattcttctccctttgaaatgtttttcagttcagccccttgctgtacatttttactactatcactgtaagtctacaagtctctctgacctgttttttcacctctaaagcatccttactaggttacatttcctaaaatactgycttcctcacctcaactttctacataagatcctatactggatctc

SEQ ID NO: 458390 - DNA, 649 bp, Homo sapiens
tgacctagggtgagttactgaaatattttggatcctctgtttcttatatgaaaaatgggaagccaagagaatgcaaccaccaaattgcttgtcctggagactgtggactctgagagaatgaacaacctctactggagacagtggcaaataaacgctttccttgagctttctttgggctaaattgttgaaacttctcttggaccctccagtaagttcattcttgagctatkgcttctacaaatctaaagcatccttaagcaatagggtcataaatgcagttacttactatagttacttatgtgccaaacataagtcttctaagtatcaagaatgacctcgcttgaatcacaattcaaatatagatagaattgttggtgttccatagcctgctgatatcagaaccctggacaatgggtttaatcaagcaacagtttgtgggtggatgggtccttctgtcaacataccacagtaggggttgttgttttatcactgaaactttcctattaaacttataacaattttgacaaaaattattcatctaattaactgtatagataaatatattctctctggtatcttttgagatttggaaacaaaactgaatttcctaactcaccatcaattcaactatttttctagtatatttatt

SEQ ID NO: 458391 - DNA, 649 bp, Homo sapiens
tgacctagggtgagttactgaaatattttggatcctctgtttcttatatgaaaaatgggaagccaagagaatgcaaccaccaaattgcttgtcctggagactgtggactctgagagaatgaacaacctctactggagacagtggcaaataaacgctttccttgagctttctttgggctaaattgttgaaacttctcttggaccctccagtaagttcattcttgagctattgcttctasaaatctaaagcatccttaagcaatagggtcataaatgcagttacttactatagttacttatgtgccaaacataagtcttctaagtatcaagaatgacctcgcttgaatcacaattcaaatatagatagaattgttggtgttccatagcctgctgatatcagaaccctggacaatgggtttaatcaagcaacagtttgtgggtggatgggtccttctgtcaacataccacagtaggggttgttgttttatcactgaaactttcctattaaacttataacaattttgacaaaaattattcatctaattaactgtatagataaatatattctctctggtatcttttgagatttggaaacaaaactgaatttcctaactcaccatcaattcaactatttttctagtatatttatt

SEQ ID NO: 458392 - DNA, 649 bp, Homo sapiens
tgacctagggtgagttactgaaatattttggatcctctgtttcttatatgaaaaatgggaagccaagagaatgcaaccaccaaattgcttgtcctggagactgtggactctgagagaatgaacaacctctactggagacagtggcaaataaacgctttccttgagctttctttgggctaaattgttgaaacttctcttggaccctccagtaagttcattcttgagctattgcttctacaaatctaaagcatccttaagcaatagggtcataaatgcagttacttactatagttacttatgtgccaaacataagtcttctaagtatcaagaatgacctcgcttgaatcacaattcaaatatagatagaattgttggtgttccatagcctgctgatatcagaaccctggacaatgggtttaatcaagcaacagtttgtgggtggatgggtccttctgtcaacataccacagtagggrttgttgttttatcactgaaactttcctattaaacttataacaattttgacaaaaattattcatctaattaactgtatagataaatatattctctctggtatcttttgagatttggaaacaaaactgaatttcctaactcaccatcaattcaactatttttctagtatatttatt

SEQ ID NO: 458393 - DNA, 574 bp, Homo sapiens
acagctgcacatgtagaacatttactttttaaatgaaaatatgacatttcaacattacacacaacgtggcttaatcaagaaaatatatgtgaattcaaaggtgacatcaaatttcacacaygcttaacttcatattcagtgtacttgtaggtacttatatgcacagaaaaatgtaattagcctaatttaaacacaaaaggtatggttcattttggcacaatcagatgcacaatgtgccatcatgctgtgttcactaatgtttatgtttaccaaattattgttactatccaagtaaaactatgaaatagaccacagaaatttaaatacaattttgaaaaaataatttttaaaacatactgtagatagaattctaatagtggtatacaatatcatcacaatatgccatgctaatattattttataaattctacaagcaaaatgaatttgtccactgtatgaaacccttacatcagattcttttcttctcctatgtctcaaaaaaaaaacctaagactaaaatacacaaacagtattttcctgcaatgaacctatgaagcacaaaaagatgcactgt

SEQ ID NO: 458394 - DNA, 574 bp, Homo sapiens
acagctgcacatgtagaacatttactttttaaatgaaaatatgacatttcaacattacacacaacgtggcttaatcaagaaaatatatgtgaattcaaaggtgacatcaaatttcacacatgcttaacttcatattcagtgtacttgtaggtacttatatgcacagaaaaatgtaattagcctaatttaaacacaaaaggtatggttcattttggcacaatcagatgcacaatgtgccatcatgctgtgttcactaatgtttatgtttaccaaattattgttactatccaagtaaaactatgaaatagaccacagaaatttaaatacaattttgaaaaaataatttttaaaacatactgtagatagaattctaatagtggtatacaatatcatcacaatatgccatgctaatattattttataaattctacaagcaaaatgaatttgtccactgtatgaaacccttacatcagattcttttcttckcctatgtctcaaaaaaaaaacctaagactaaaatacacaaacagtattttcctgcaatgaacctatgaagcacaaaaagatgcactgt

SEQ ID NO: 458395 - DNA, 441 bp, Homo sapiens
ctgctttctacccagtggttctacaaacactcagaccaccagtcgtttctgagtgtagtgaatctttgagtgtattgaggggaaagaatcagaaaaatggaatagaacaattacatgaaaggcaggagcaggctagcaatgagactcaggtgctagtaggactagagaaaaaggctggcggccggtgggrcggggagaggggagtttagaagagggaaatctgaaattagagacatgggttgttgaaggaacttatttggtaattagcatatattaccttgcaagaatgatacaaaaaaaaaattactggtttatgacctagatgatataaggtccttgggggtggtggggggcaagtttgtctttttggtaactgttttgttatttcatgttgctttatagggatttaatttctgctatgtgatagaattcttttaagat

SEQ ID NO: 458396 - DNA, 557 bp, Homo sapiens
ctacagtttgtaattttgaacccttattatgcaccccatctttaatgaaaataacttaaatgggctaacgtaggttgtcttggaccatcctggtagttcatacattagacacctgccttaggaggttatgaggtgattagtaaaatgtctrtttttctcctgaaacctatccttctaaggacatcccagtggagatccattgctttctgatctctccattcccctcttaacctcttttggggaaggctgaatgcttcctgaatattccactttttaattggagctctaattgagttaaggcttgttcttaaatttaagacttgatatttcctggctacctatccagttgattgtcttgcaaaaacatgcttatttctgcttatattttcccagaaattttaagatgaagcaaaaatgaaacaacaatagtatagaattgtttgcctttcacattggagagagattaaactggaagcatttcccatgttggcaagaccaaaaattggcgaagttttctggagggtaatttggtgatatatatcaaaagcctaattata

SEQ ID NO: 458397 - DNA, 482 bp, Homo sapiens
taccacgagaacagtatgggggaaccgcccccatgattcagttatctattcccgggtccttcctacaacatgtgggaattatgggagtacaattcaagatgagatttgggtgagggcacagccaaaccatatcaccattttaaacagatgaggaaatgaaggcactgagaagttaaataacttgcccatggccccacagcaagtgacagcagagattcagakgtaggtaggctaattgcaaaaccattgttcttaactgttgtgttatgctacctctggaatatcaaatgtatagctttacttgttcagtcattgctggattcagggcccaaacaaggttattgggattctctctcatgttgtattttggctcagtttttctctgggttgattttatcctcaggcaggcattgccggtgaagtgacagtatagctgctgggatgagaactgcatattcataatttagcaatttgtgtggaaa

SEQ ID NO: 458398 - DNA, 578 bp, Homo sapiens
aaccagctcagtggtcctttaaatgaacttgtctgtctgtttcctcattgtgtcatttaacatggtagtctatccccatatttcctgaaaactrgaagttaattctaaacacttgattagatttaggttgaatgtttttgctaaagatcattcaaatggcaaacattgtggcttcctctacgtgtagcatacatgtagcctatgaggaggtccacagcacctggttattccacctttagtgatgtgcaattgatcaatgagttcctatggtggcagccttatgcctccaaagttccccatgaagcctttacccagtggttccatctattgctgatcatttcctgaatcagcaacttttggagagtttgcaaaatagtgattgtttattgtatcattctttccatttcatcagctggaattcttctatatagaagaaatttgtgatgtaggtttacttagtttctcaaaaatataattaatggctgggcaaggtggcccatgcctataattccagcacttcgggaggctgagacagaaggatcacttgagcccagaagtttgacaccagcctgggaaac

SEQ ID NO: 458399 - DNA, 578 bp, Homo sapiens
aaccagctcagtggtcctttaaatgaacttgtctgtctgtttcctcattgtgtcatttaacatggtagtctatccccatatttcctgaaaactagaagttaattctaaacacttgattagatttaggttgaatgtttttgctaaagatcattcaaatggcaaacattgtggcttcctctacgtgtagcatacatgtagcctatgaggaggtccacagcacctggttattccacctttagtgatgtgcaattgatcaatgagttcctatggtggcagccttatgcctccaaagttccccatgaagcctttacccagtggttccatctattgctgatcatttcctgaatcagcaacttttggagagtttgcaaaatagtgattgtttattgtatcattctttccatttcawcagctggaattcttctatatagaagaaatttgtgatgtaggtttacttagtttctcaaaaatataattaatggctgggcaaggtggcccatgcctataattccagcacttcgggaggctgagacagaaggatcacttgagcccagaagtttgacaccagcctgggaaac

SEQ ID NO: 458400 - DNA, 578 bp, Homo sapiens
aaccagctcagtggtcctttaaatgaacttgtctgtctgtttcctcattgtgtcatttaacatggtagtctatccccatatttcctgaaaactagaagttaattctaaacacttgattagatttaggttgaatgtttttgctaaagatcattcaaatggcaaacattgtggcttcctctacgtgtagcatacatgtagcctatgaggaggtccacagcacctggttattccacctttagtgatgtgcaattgatcaatgagttcctatggtggcagccttatgcctccaaagttccccatgaagcctttacccagtggttccatctattgctgatcatttcctgaatcagcaacttttggagagtttgcaaaatagtgattgtttattgtatcattctttccatttcatcagctkgaattcttctatatagaagaaatttgtgatgtaggtttacttagtttctcaaaaatataattaatggctgggcaaggtggcccatgcctataattccagcacttcgggaggctgagacagaaggatcacttgagcccagaagtttgacaccagcctgggaaac

SEQ ID NO: 458401 - DNA, 546 bp, Homo sapiens
agtaaaagtcacacccaatgtatctcttgccttagttcgtttagggttgctaccaaggaatatttgaggttgtgtcatgtacaatgaagaaaggtttatttggctcatgattctgatgattggaaagttcaagattgggatcagcatctgataagatctttcattctaagctgcttccattcacagtggaaggcaaaaggagttgacttatgcagagatcccaggatgagagaggaggaaagagagagaggctggtggtgccaggccctttataacaaccacatctggtggaactaatagagtgagaactcactcactcctagggaggrcattcatctattcatgagggattagcctccataaaccaaacacctctggccccaccttcaacactggggatcaagttttaatatgaggtttgaaggggataaacatttaaaccatagaacccctctgctgcaggaaaaaaaaaaaaacagtaatgtgctcatccacatagccaccaatgactgagcccaatcaggccctttctcctagcccaaaggt

SEQ ID NO: 458402 - DNA, 574 bp, Homo sapiens
tgctaggcaaaatacagccacagcctgcatcttccaacccatcactgcctgtatccacccccacaaacacacgctcatgccatcacccaaaagttctgrtgcttgactcagcctctaatgtctactctccttcttacctttacagttgtaagtataaatcaatcccttgtcactgatgagccctctgggaaattctcagtctcagctcaggacactaaaagatggtcatgaaaagtttccacactgacgcacacatgtgtcagtgtgcattgctaaccgtcgggccacaggaactgcttttctaagaggtaaaagcaagtatggcctctctggtcccagatttttattttatactaggtaagaatgcactctgtatgtaagaaaccttaaattcccactgtagcttgggcttctgggcacaccactaaaaagtataaacaagcaaactcatgcatacacttctgcacccgactaacaacatctctaggaagaagtaaagataagaacatcctatgagccttgtaacacagaacagttttggtggttgaacttgagaaaaggtgcactttactca

SEQ ID NO: 458403 - DNA, 582 bp, Homo sapiens
ctctcatttaaaagagatgtgcagctacagccaagggcctgcctactccaagcactttgggtcgagccaatctcagaaatgcaaatgacgcagaatcatggatgtcaggcgtgagcaggkagaaggaggcacctgactaaatcctcttgtgcccccagttaggaccagggctccccgtcggacaggactgacaggtgcatggccttagaaggatggtcactgtaatggcactcagtgggctcagctacacttactaagtggcttctgaacactgccggggccatgagagtatggaggccattctgccaatgctttctgggagcttcagaaggcgaggtgcccagctgcctcttgtcagacagcagaccttctgggctatgatcaggggtaagactgtggactctgaacctgggctacctcagtttgaacccagacttgccaggtactagctgtgtgggctggggcaaatcacctaacctctctgtgcccctgtgttctaatgggtaaaacagggattcaactaaaccctgtaagtgaaatgcttcacaagtacctccataggaagtccagtgcaagtgttag

SEQ ID NO: 458404 - DNA, 582 bp, Homo sapiens
ctctcatttaaaagagatgtgcagctacagccaagggcctgcctactccaagcactttgggtcgagccaatctcagaaatgcaaatgacgcagaatcatggatgtcaggcgtgagcagggagaaggaggcacctgactaaatcctcttgtgcccccagttaggaccagggctccccgtcggacaggactgacaggtgcatggccttagaaggatggtcactgtaatggcactcagtgggctcagctacacttactaagtggcttctgaacactgccggggccatgagagtatggaggccattctgccaatgctttctgggagcttcagaaggcgaggtgcccagctgcctcttgtcagacagcagaccttctgggctatgatcaggggtaagactgtggactctgaacctgggctacctcagtttgaacccagacttgccaggtactagctgtgtggsctggggcaaatcacctaacctctctgtgcccctgtgttctaatgggtaaaacagggattcaactaaaccctgtaagtgaaatgcttcacaagtacctccataggaagtccagtgcaagtgttag

SEQ ID NO: 458405 - DNA, 530 bp, Homo sapiens
tgggtgagtcacaaacactacgttttggggcctgtaaacttggaagcagggaggtgctatactctgaagccaatttcattaccagggctagcttacatagccagagattcagtcattgctggagtgagtgaaatatgggctatcctcacaggagattgagaactgggccttttcatcttcagagggaagccaagtgggtgccatcatcctgaggaaggcccctgctccagaggaagctgggctctttctttttcctttggaattgcctggctgtgctgttcatcgaggtgcaaagaccgactgccacatgcacttctsgccagaccacactcgacctcagaagctccttctgctcccaagcaatttacaaaaccctgaaggccgataacatgggccgcctacacatctgacttagagggaaccctcggcatgaacatgtttggccaactctcctaacatttgcttttatgtcaattaggatatttcattttcatattgagctcaaccatggctgggtaacctcatcccca

SEQ ID NO: 458406 - DNA, 584 bp, Homo sapiens
actctcttgcccaactcctgctctcatctctactactgctgggcgtacctgctgagaccaccacagcccaccctctgcctgagcctcccctccctgcctactttcagaaacawagagaaggtaggagaggccacaaacccagtgacttgtattagttcagactgagttcagccacagtgaaaagggaatccatagtattggtgagtgtaacacacccacttttagtctctcactcaggttcagaggggtcagtcctctgcttcgaccatgtcacaaagccatcaggagcccaagtccctttttatcatctgctgtcatccttagcacctggattccatcttcaaactcatctcatggcccagtatggctgcctgagtaccagcctttatgtctgcattccaaccaacaggaagaagaaaggagaaagggaaaacacaagcacatctcccaggtcgactgtttaacagccttcccatgaatctcccacaacacttctgcatggatttcattagttgaacaagccttcacctagctgcaaaagaatctggaaaaattgccttttacctgggcacattgccacctca

SEQ ID NO: 458407 - DNA, 584 bp, Homo sapiens
actctcttgcccaactcctgctctcatctctactactgctgggcgtacctgctgagaccaccacagcccaccctctgcctgagcctcccctccctgcctactttcagaaacaaagagaaggtaggagaggccacaaacccagtracttgtattagttcagactgagttcagccacagtgaaaagggaatccatagtattggtgagtgtaacacacccacttttagtctctcactcaggttcagaggggtcagtcctctgcttcgaccatgtcacaaagccatcaggagcccaagtccctttttatcatctgctgtcatccttagcacctggattccatcttcaaactcatctcatggcccagtatggctgcctgagtaccagcctttatgtctgcattccaaccaacaggaagaagaaaggagaaagggaaaacacaagcacatctcccaggtcgactgtttaacagccttcccatgaatctcccacaacacttctgcatggatttcattagttgaacaagccttcacctagctgcaaaagaatctggaaaaattgccttttacctgggcacattgccacctca

SEQ ID NO: 458408 - DNA, 494 bp, Homo sapiens
gaaaacacaagcacatctcccaggtcgactgtttaacagccttcccatgaatctcccacaacacttctgcatggatttcattagttgaacaagccttcacctagctgcaaaagaatctggaaaaattgccttttacctgggcacattgccacctcaaatcaaatctgggttccattactaaggaagaagaggcaatgggtctagggtggcatttaacagtctctgtgacatttgcccaagatcacagctaagaagtggagtcagccacaktcatctgactccaaagcccacactggtgccctcggtcaccccattgcccacctccatggggggagatgacccaggtctgcccacctgccaagtgccccaccacatccctgcagccaaggactccagccacaccaggaagggtgaagaaagccccttgccttgccgtgagcccagcaaaggcctggcagccatggcagtgcatggttttgaatcctcacacggac

SEQ ID NO: 458409 - DNA, 550 bp, Homo sapiens
atgagggtgagggattatggttatgtcaaacatggcccaaagagcaggactcaaagaacaagaagccgaaagatcaagaagcacatttgtctatatcctgaaatgcaagaggaaagacatacttaagcttattcaagatttagccatgaaaaataagagatgaaatgtatttactgcagttaggaaggcagagccattaccaccagggcatcagctttgttgtgctaagttgtctgtttctcagataagtcatcttaaattaaatattaaagattaataaatataatacccataataaatgacacacacwaatttaattaaaaatagatggtgaattttacaaatgggacattaccataatgatatagaatggacttgttatgctaaaaatgtgcagtcttgaaaatgtgcaatctccatacacatttcacccttattgtggctcattaaaattttaaaaatagctattttaattgtcaagcatttgacagactgctataaaaacttgacacttaagtttcaattttacaatatgcattttaatgacccc

SEQ ID NO: 458410 - DNA, 556 bp, Homo sapiens
ccccttcctccttcctaagtacctccttctcaaagcttcttcttaccccagaagactctgggataagatggcattctcctcagctaaggattgggcacactctagtccaaaccaatcacgaaagtcccattctccttacatctgggttatctaaatggttcaaataactaaaacataagccaactcgctcatggcactcctctggccaagctggacagaaagtagcttaagaaagggcatatgacctcatttacatcagtgacacataagaggagaaatctaaaggcttcwgaggaaactgttagaacaaaatgttctgtccccttctacactgcgtggtatggagatatgaaggttagacctgcagcaaacatctttgcttccacaatggcggctggccttaggataaagctgactctgtggaagtcaaagcagagagacagaagttaactgggtccttggaaataccttggagtgtctgactcacttaaataccatggagtgtcagtctcttgtgttttgatgaggactactcctacctataggcttccttgtt

SEQ ID NO: 458411 - DNA, 596 bp, Homo sapiens
acacaggaaacggaagcaagcatctttacaagtccccttctatgaaggaatgggtttgccccacggctgcctcacttgatgtttctgcgattcctttagagtctcccagaaagggggagagaagcccagaacctcgcaggagcccctatccctcattttcaaacactatttgaaaatcaactcaagatgagggttagggattaaatggaaagtaccgtatatgatctaggagtgaagacggcctttccrtgagacagtgaaggcaggagaccttaaaaacacggctggcagacctgagtaaatgaaagcccccagagagcacagcgtcccaatgccagaaagagactccaagcaaaggagaacctgggggaacatgagctacctccgtgacaacagatgtttttaaaaattaacaaattattcagaaaaatataaatgtcttcatagaaaaatgggcagtgaacaagtaatacagaaaataaaaaccacaaatggccagtgaaaactaaaaaatatttcacttataatggaataagtcatattaaacaagatttttcacctttaaaatgagtaaaagtgtgtgtgtgtgtgtgtgt

SEQ ID NO: 458412 - DNA, 596 bp, Homo sapiens
acacaggaaacggaagcaagcatctttacaagtccccttctatgaaggaatgggtttgccccacggctgcctcacttgatgtttctgcgattcctttagagtctcccagaaagggggagagaagcccagaacctcgcaggagcccctatccctcattttcaaacactatttgaaaatcaactcaagatgagggttagggattaaatggaaagtaccgtatatgatctaggagtgaagacggcctttccatgagacagtgaaggcaggagaccttaaaaacacggctggcagacctgagtaaatgaaagcccccagagagcacagcgtcccaatgccagaaagagactccaagcaaaggagaacctgggggaacatgagctacctccgtgacaacagatgtttttaaaaattaacaaattattcagaaaaatataaatgtcttcatagaaaaatgggcagtgaacaagtaatacagaaaataaaaaccacaaatggccagtgaaaactaaaaaatatttcacttayaatggaataagtcatattaaacaagatttttcacctttaaaatgagtaaaagtgtgtgtgtgtgtgtgtgt

SEQ ID NO: 458413 - DNA, 596 bp, Homo sapiens
acacaggaaacggaagcaagcatctttacaagtccccttctatgaaggaatgggtttgccccacggctgcctcacttgatgtttctgcgattcctttagagtctcccagaaagggggagagaagcccagaacctcgcaggagcccctatccctcattttcaaacactatttgaaaatcaactcaagatgagggttagggattaaatggaaagtaccgtatatgatctaggagtgaagacggcctttccatgagacagtgaaggcaggagaccttaaaaacacggctggcagacctgagtaaatgaaagcccccagagagcacagcgtcccaatgccagaaagagactccaagcaaaggagaacctgggggaacatgagctacctccgtgacaacagatgtttttaaaaattaacaaattattcagaaaaatataaatgtcttcatagaaaaatgggcagtgaacaagtaatacagaaaataaaaaccacaaatggccagtgaaaactaaaaaatatttcacttataatgsaataagtcatattaaacaagatttttcacctttaaaatgagtaaaagtgtgtgtgtgtgtgtgtgt

SEQ ID NO: 458414 - DNA, 596 bp, Homo sapiens
acacaggaaacggaagcaagcatctttacaagtccccttctatgaaggaatgggtttgccccacggctgcctcacttgatgtttctgcgattcctttagagtctcccagaaagggggagagaagcccagaacctcgcaggagcccctatccctcattttcaaacactatttgaaaatcaactcaagatgagggttagggattaaatggaaagtaccgtatatgatctaggagtgaagacggcctttccatgagacagtgaaggcaggagaccttaaaaacacggctggcagacctgagtaaatgaaagcccccagagagcacagcgtcccaatgccagaaagagactccaagcaaaggagaacctgggggaacatgagctacctccgtgacaacagatgtttttaaaaattaacaaattattcagaaaaatataaatgtcttcatagaaaaatgggcagtgaacaagtaatacagaaaataaaaaccacaaatggccagtgaaaactaaaaaatatttcacttataatggaataagtcatattaaacaagatttttcacctttaaaatgagtaaargtgtgtgtgtgtgtgtgtgt

SEQ ID NO: 458415 - DNA, 550 bp, Homo sapiens
actgagcgtgtacttcatgccactgctgcacacctagaaatggtaagattgtaaattttatgttacatgtgttttatcacagttttaaaaacgaagcccaaatccctggaggaaatcttgagaaatattttacatgaatagaaattagaaggaactcaagggtggcaggcaggcaccgcctcctgatgaaaatttgtctcctacatcagtgccttccacataaattaatgaaacctcccagacagtctgttggtgactgagagggaaccaaggggatctcagggagggtcatgggatgtctgagtttgtcaggataaagcatcccttgcccaggaacatgcaggcgctggctggcagcccggcttctgcttcgccaggagtccgggcatcgcggagattcatcttcgtcctggcacccaccatgsggtgcccagccagccctgcacttggtcggccctgctcgagaatccaacctggttccattttcaattttggaagcgttgttgcggattaaaaaccggtcaaatgatgggaaagagtcagagagaac

SEQ ID NO: 458416 - DNA, 598 bp, Homo sapiens
aaattataccctcataaaaattgatttttttttgagatggaatctcactctgtcgcccaggctggagtgcaatggcgtgacctcaactcactgcaacccctgcctcccaggttcacccaggttcctgggttcttctgcctcaatctcccgagtagctgggactataggtgcgcaccactacgccaggctaatttttgcatttttagtagagatggggtttcaccatattggccaggctggtctcaaactcctgaccttgtgatctgcccrcctcagcctcccaaagttttgggattacaggcatgagctaccatgcctggccaaaattagttctttatatctctgtattgttcaaagtttccacaatgaacacacattataaagatctgtatttgtgttaacaatgtaatactttaaatatgcatgaagtaagtaaaatattctgcaaaaagatcccattactctaagaaatatacaaaaatataaattactctccatcattctcacatctacccttgttaacggatgctagattttctttagagtgttttacagagagaaggcaggcatcatatctgaaggtctttgtggtacccac

SEQ ID NO: 458417 - DNA, 598 bp, Homo sapiens
aaattataccctcataaaaattgatttttttttgagatggaatctcactctgtcgcccaggctggagtgcaatggcgtgacctcaactcactgcaacccctgcctcccaggttcacccaggttcctgggttcttctgcctcaatctcccgagtagctgggactataggtgcgcaccactacgccaggctaatttttgcatttttagtagagatggggtttcaccatattggccaggctggtctcaaactcctgaccttgtgatctgcccasctcagcctcccaaagttttgggattacaggcatgagctaccatgcctggccaaaattagttctttatatctctgtattgttcaaagtttccacaatgaacacacattataaagatctgtatttgtgttaacaatgtaatactttaaatatgcatgaagtaagtaaaatattctgcaaaaagatcccattactctaagaaatatacaaaaatataaattactctccatcattctcacatctacccttgttaacggatgctagattttctttagagtgttttacagagagaaggcaggcatcatatctgaaggtctttgtggtacccac

SEQ ID NO: 458418 - DNA, 561 bp, Homo sapiens
gtatttgtgttaacaatgtaatactttaaatatgcatgaagtaagtaaaatattctgcaaaaagatcccattactctaagaaatatacaaaaatataaattactctccatcattctcacatctacccttgtwaacggatgctagattttctttagagtgttttacagagagaaggcaggcatcatatctgaaggtctttgtggtacccacatggtcctagttacatgtaaggcagacaagaaataggatcgaaacatggtctggtcacatcgggatcttcatggtacactgcggggtcacatgtatacccaagtcaagctggtgcagcggagctattaaagaagtgcttggtagaagataacctgagactgaggagatttctgattgaggggtggtgtgctctagatttgagatgttgaaaatgtgacttgtggactaacaacgtcaccacctggaagcttattagaaattctgaattccaggccccccagacccactgcactggaatctgctgtcagtaagatccccggttaagcccaaggtcgatccaaggttaagagg

SEQ ID NO: 458419 - DNA, 561 bp, Homo sapiens
gtatttgtgttaacaatgtaatactttaaatatgcatgaagtaagtaaaatattctgcaaaaagatcccattactctaagaaatatacaaaaatataaattactctccatcattctcacatctacccttgttaacggatgctagattttctttagagtgttttacagagagaaggcaggcatcatatctgaaggtctttgtggtacccacatggtcctagttacatgtaaggcagacaagaaataggatcgaaacatggtctggtcacatcgggatcttcatggtacactgcggggtcacatgtatacccaagtcaagctggtgcagcggagctattaaagaagtgcttggtagaagataacctgagactraggagatttctgattgaggggtggtgtgctctagatttgagatgttgaaaatgtgacttgtggactaacaacgtcaccacctggaagcttattagaaattctgaattccaggccccccagacccactgcactggaatctgctgtcagtaagatccccggttaagcccaaggtcgatccaaggttaagagg

SEQ ID NO: 458420 - DNA, 561 bp, Homo sapiens
tacttgagtttatttaaaattatttgttgtacgtgtgggaaagcttgcccgagcttggggtttgctgcttgtggcttgctgttggagttctgccatatagccacctgtgtttcatagccggctatctgattacagtggagatgcagtatctgactctatatatgttctcgcttgtcttacatcttcygaatttcattgaatataatcacgttaaggtaaaatgtgtttaaactgctaatggactgggccattgactttaacgacattctcaatactacatttaattatcgtacaagcttttcttgatgatcatatttcccaggatcagttggagttatgttaagtacacttaggcagataataatgaatgaaacaactcttttataatctaggagaagtagaagctcttattatgtggaggatgaggcagacactatgcaagcacccatggggcacgtgaccatgctgaggactgtcctgcaccagtgcagagagttttggcacatcttagagaagatgctgatgttctggaggcagatggcactgagccaggcagcccca

SEQ ID NO: 458421 - DNA, 576 bp, Homo sapiens
actatttttgtagctcccacatatcagcgagaacatgtgatatttatctttctgcacttggcttattacacttaacataaggaccttccattttatccatgttgctgcaaatgacaggattttctttttcatggctgaataatattccattgtgtataagtgtaagttgaacaaaactacctgaacatcttctttacccattcacccattgataggcatttaggttgattccatattttggctattgtaaataatgctgcaataaatatgagagtgcagatgtctcttcaatacatggatttcttttcttttgggtatatacccagtagtggaatttctggatcatatagtagttctatttttagttttttgacagacctccatacagttttccatagaagttgtattagttgacattcttatcaacagtgtwtgatatttcccctttctccacaccctaaccagcatctgctattccctttttgataacagccattttaacaggggtgagattatagctcattgtagttttgatatgcatttcactatggttagcgatgttaagcaattttccat

SEQ ID NO: 458422 - DNA, 576 bp, Homo sapiens
actatttttgtagctcccacatatcagcgagaacatgtgatatttatctttctgcacttggcttattacacttaacataaggaccttccattttatccatgttgctgcaaatgacaggattttctttttcatggctgaataatattccattgtgtataagtgtaagttgaacaaaactacctgaacatcttctttacccattcacccattgataggcatttaggttgattccatattttggctattgtaaataatgctgcaataaatatgagagtgcagatgtctcttcaatacatggatttcttttcttttgggtatatacccagtagtggaatttctggatcatatagtagttctatttttagttttttgacagacctccatacagttttccatagaagttgtattagttgacattcttatcaacagtgtatgatatttcccctttctccacaccctaaccagcatctgctattccctttttgataacagycattttaacaggggtgagattatagctcattgtagttttgatatgcatttcactatggttagcgatgttaagcaattttccat

SEQ ID NO: 458423 - DNA, 580 bp, Homo sapiens
ctgctgttatgggaagagaaggggcgtggaaaaaggtagaagtgcttttggtgaacggtggctgaggtgagcggaagcttagggtgagaatctgagggtggggacaaaggagggtgagaggagatgacttcctaagacatctggaagaaaactcatagactgggtgactgcatctgggcatggtgaggagtgaggtaccaggaacttgagacagatgactgagaagtgaactcattgctggtagagttgggtggggactggggaaagtgaggggctgagggaaccgagttgggaggagaaaacaagtccaggtgagagagtaggttgatggtctttgtgattttcactctggtgtttttgattcacttccacatcctttgtatctcaagtcagagatggcttagggcatcaagaagctggggcccraccttgttctgacttcgggaaatagtgcagggcaggagggatgtggccccacctcggctgtcacctcccttccacctcctgtgccctcaccaaccctgacatggaaagcaattgcattggctttgctacagtttcagacatttcagccaggggc

SEQ ID NO: 458424 - DNA, 580 bp, Homo sapiens
ctgctgttatgggaagagaaggggcgtggaaaaaggtagaagtgcttttggtgaacggtggctgaggtgagcggaagcttagggtgagaatctgagggtggggacaaaggagggtgagaggagatgacttcctaagacatctggaagaaaactcatagactgggtgactgcatctgggcatggtgaggagtgaggtaccaggaacttgagacagatgactgagaagtgaactcattgctggtagagttgggtggggactggggaaagtgaggggctgagggaaccgagttgggaggagaaaacaagtccaggtgagagagtaggttgatggtctttgtgattttcactctggtgtttttgattcacttccacatcctttgtatctcaagtcagagatggcttagggcatcaagaagctggggcccgaccttgttctgacttcgggaaatagtgmagggcaggagggatgtggccccacctcggctgtcacctcccttccacctcctgtgccctcaccaaccctgacatggaaagcaattgcattggctttgctacagtttcagacatttcagccaggggc

SEQ ID NO: 458425 - DNA, 539 bp, Homo sapiens
aatttgaaaaataccacaataaataaggctgaaagaataacgcacattgtattggaaaggggaaactcacaatctggccatttcccccagtttgaccaaagcgtggagytaccgaatgcagtcaaaccttggtgatacgattcatgggagtgtttctttttcttccatagtttcttctcccaggtagacaagttgtgcaaaatccattcactcattcaacaaatattgatctgtcgccatgacagcattccttcacatttttaccatccaaaaaatatttcctgagacctgtaacatgcccagcagtgagctatcccttggtggagcttgtgacatagtatgacagagaggctgaaggaagggagaaagaccacatgtaggagaactaacaggggctgtttattcagagctcagagctatggcaagggggttggccactgtcacttgtgtctggcagagactccaaggcaggcggaggagtggggaagctttgtgatggaaacggaggctccaggggcaccctgggtgtgggctgttag

SEQ ID NO: 458426 - DNA, 578 bp, Homo sapiens
cgcaattttggtgatggggtttatggattcatgtctggctattcctttccagcctcactgttccagcctcctggaggactccctgctctccttgccttctccaaaggctactgatgctctccctagccccacaacctccatcccctttcctctttcctagcagaattctccttttgtgcagacatctgtctgctctcgtatgtggtcctcggctgtctaaggatgctgcctctgcaggagcttgaatcgcgacccaggatcgctccaggcagtctgcacactccatgccccagccacagtcacaatcctccaggtgagtctcagagcctcgctggaggaggcaggaacatttcttctcctattggccatagtgcccacaggcccagagctccctcagccttcctgggaagcagggccacaggtaaagrtggggccgagagagtcatgtgttgcagggcaccagagatgagcaaggtggaataaattggggagaaacccaccctactcttgtgactgtccatatttgagctgatttgtttctctattgtttcagccagttgtgtcttgttgccatctct

SEQ ID NO: 458427 - DNA, 555 bp, Homo sapiens
agaatataagaatagacctaataagcagacaaaaattttacaaaacctgttataaaaatattcaatatacacaaaattaggaaagaaaagaaatactaatgccacttttagagatgaaaactacagtatctgaatttaaaaatwtactgaatgggattggcagcagatgaaccttgaatacatagcaataaaaaactgcaatattagcacagaggtaaaaaatgacttggagaaaagtaaatagaggtacagtgatatgtgatatgataccaagtggtctaacatgcttagaataggtgatcgcgaaggttaaaacaaagggagacagaaaaatactaaaactttcaaattttacagagtataaattcataggtttaagaagctcaataaacccagagcagaatcaacattaaaaaatactaagggcattgtaattattgattaacaccagtgatatataaagaaatatgtaaatatgccttgttattttaaaaaagcacattatgtacaaaggaacaaggtaatcataacctcagatgtacaacatgcaagcca

SEQ ID NO: 458428 - DNA, 544 bp, Homo sapiens
acatcatagtttcccattgaatcaagccaatgactacatttctcatttagggcataatctcaggtctcaaaagcagctctcctaccatggtgagatagtgcaagtgttcaaatacaggtagaatatcaagcacaatccgagaggccaaactgtattgtctaagtctggccatatttcataagaatggttgctataaatacagtggtaagcccggactagggcaagaacagatgatgcaatgcctataaaataacccaagggaayacaaatgagtgcacatatcagtgtccgaaccccaacaattgaacagctgtgtgccttctcatccttgtcctcgcctaatcactcaggctcttcctgtgtttcttatcactccggtgcttttaagcctcatccaaagactagtctatttcaacagattctttcaaatggctacactcgctataatgtcttcagagaagatgaatgcttcttcaaaacaataacactgcttttggggatgattgtaactacctaatgacagatcagtcatatgactgactat

SEQ ID NO: 458429 - DNA, 514 bp, Homo sapiens
aaaatcacatagtactatttacatttaattacatacttatggagtccaaattaggtggagtttccacatcatagtttcccattgaatcaagccaatgactacatttctcatttagggcataatctcaggtctcaaaagcagctctcctaccatggtgagatagtgcaagtgttcaaatacaggtagaatatcaagcacaatccgagaggccaaactgtattgtctaagtctggccatatttcataagaatggttgctataaatacagtggtaagcccggactagggcaagaacagatgatgcaatgcctataaaataacccaagggaatacaaatgagtgcacatatcagtgtccgaaccccaacaattgaacagctgtgtgccttctcatccttgtcstcgcctaatcactcaggctcttcctgtgtttcttatcactccggtgcttttaagcctcatccaaagactagtctatttcaacagattctttcaaatggctacactcgctataatg

SEQ ID NO: 458430 - DNA, 565 bp, Homo sapiens
tcaaaaatataaatgtgtgtgttaatgttgtagactggaactatgctgctgataatacaagggaaatttaactagcttataaatgttaaaatgtaaacgcaaaggaagtcttgctattcatcttctctgcaatattcagacattcatgaaattgaaagttaatgtaccagggactttcattatctgacccattccatcctatctattagcttcacaaagcactggagacagaggaccaatatgtcaccaacacaggactggaaaggtcacaaaaacgaagcatcaataaagsactacttctgaattaaatttcacagtgctcagcagaaaatatgttccatggactaagaatatttgtaagaatggaactgatagctagacacaaattgaagaaaatagaaaagtatttcttgattgaaaaaattatgttaaaactatgtttacatacacaggaaaaaagtactattttatatgcctaataaggaataaaaagaactctgcactggaaccacaacaaggttttacagtcacagaattcactagaaaatgatactgtcctgcaaaa

SEQ ID NO: 458431 - DNA, 468 bp, Homo sapiens
acaacactgcttcaatatgagaaagccacaagtgratcagccctaaactctgcatgtaaatacctgttaaatctttggatgagttctatgttttagaatgcaaacattccttgagagttctaggaaccaagacaaggattacaattgctgagtagtgatttcatcagtggtctatttctgggaaaacagggtttggagttcaagttgaaccaaattatgagggattgtcagccttacaataatgactatatactaatgaccattggattaaaggtaaaataaaaaaaaatcaccctaacggagcctaaataaattttccacaggatctaggtgacttgacagtgatttaactgcctgttagaacaaaattcaatgcctcagagcaagacaacttagtcaactgtccataacatatcatcaataattgttagcactacgcatgcaaataaacaggtaaaattggtccat

SEQ ID NO: 458432 - DNA, 582 bp, Homo sapiens
tgcaaaaacagactaaaacactcagtaaacttcaaactggttaaataaaatttttaaaaagcactccttgtatgataagaggakaaaagaaacaagtacttacataatagttaaactgctgaaaatcaaagctatagagaatgattttaaaagcaaccagaggaagacatgttatatacagagatatattaatgggaataacaaatgacttccagttttatttttaaaaatgaagaaaaaagacaatggaacaatatatttagtgacttgaaaaggaagctgtcaacatggaattctgtatctggtaaaatgtcttccaaaaaaatgaaaaataaagctatgtttagatacacaatttttggcaaaattagttgccagcagatttgcatcaaaaaaaaaaaaacatgctaaaaggagttccttgggctgaacagaaatgaagataccagatgaaaatcattgaaacacaaagaaatgacaagcagtaaaactggtaaatatgtgggtaaatataaaagacaatttttcttttcttaattttttaaaaagacaatataatgtttaaatttttaaaaataatgg

SEQ ID NO: 458433 - DNA, 470 bp, Homo sapiens
ttttaaataaattattttttgtttaattctctcagactcctttttagctgcttgcagttaaaaacattgaccaatgcagttagtttgagcaaaggaaagcaattctaacagtcagtgctacattaaaaaaattcrcattgatacttttctatgtatatggaaagtaggagtaatcctggctgtcagaaggactatcctcagaagaaacttactctgtatggaatgaacaggagaagttaggaccagcatttaaggctttgttccctgaaatcctgccatccctatggagatcagataagtcagtgtgaagaaatcagtcttccaatcactctaggttcgtgcagtgtgaaacctaatggcttatttttcttgttttaaccactattcccaagatgaacttatacacaggaactcaatagcaaaattatgcaaagacagaaacaataacatttctgagaatctatgaagcc

SEQ ID NO: 458434 - DNA, 545 bp, Homo sapiens
aaatttatactgagcagaaacacttgcattggttgtggagacaaattgaacaatctcaccatgagagttataaactaaaaactatttcatctacctaagatgattttcatgtagtcttgctggaatatgaattcccatcttatgtagatgaagttagatatcagttggaatctaccatgaatatttatagttgcaattactttaaactrttacttgaatataatttaaattttaatttcccttggtaaattagagggcctacagctagattttcttctaatattaaactaaaggttatttatttaaaattaaatataacactgtgttatccatagtttaaacaaccaagaaaaacccctcttttattttcaatattaaaaaaaagacaagctctgttttactgacaaggaaatcaaaatgtggattagaaaaactttcagacctaagtgttctattaccaaaaaagagacaagaaaagaattgaacttcatcatcaaacactttttccaaatatctttccaagcttcctagaatccatagagcaa

SEQ ID NO: 458435 - DNA, 545 bp, Homo sapiens
acatttcaaaaaatgttcaactgtattaagaaaaatgtaaaattagtaaaaatgtgatgctacattattttaattcaccaaataggcgataaagataatagtcaatatttgcaagagcttaacaatatgaacactctcacacacttctgttgagaatgacaactggtagagcctttcwgaaaaaaccttggcaacgtacttcaaaagccagtgtttctacatctaaaaatatagaataaggaataaataaaaggccaatatttatgaacaaaaagtttcatacagtattataacaaaataacaaataatggaaacaaaagtctaacattaaccagatgattgaatacatcgtataatggaatataatatagccaataaaattatgtttaagttcagatgccatggctcaagactgtaatcccagcattttgggaagtggaagtgggaggaccacttcaggctaggaatttgagattagtcttgtcaacagagtgggaccctctctctacaaaagatttaaaaattagccaggcatggtggtgcat

SEQ ID NO: 458436 - DNA, 488 bp, Homo sapiens
agaaataatctctgatgaggaaaaaaaagggcaaggtcctaaggaatcctagtatgaatttgcagctagaacttcagaagactaaggggaaccatcttcccactcagcatcacaaaagagtgtattcagataggaggagccataacccaggaaaatataaaagacyggtatgaaattgtgtggaatgtgtcaagagccttgtaggaaatacaaaatgggaattttaaaaagttgtattctgggtaagatctgtttgatgtgtattgtagtatgattttcacagatgactgtgagaagggaaattttggatttttattttgtgttgagtagcacaattgtcaagctggaaaaatgcagcaggacttctttgtaggtgtttcatttccatttactaacattgataagagaagtctataattgaaacttagtaaatttataagagagtttctgattttataaatttttttcttctattgggaaaaattttg

SEQ ID NO: 458437 - DNA, 464 bp, Homo sapiens
gactccaaaagcgggtaaggatggaggggagtaagggctgaaaaactactattggatactatgttcactatctgggtgatgggtttactagaagcctaaaccccaggattacatgacttacccatgtaacaaacctgcacatataccctgaaacaacaacaaaaaagttactgtacagtaagttcagcaaagtttcccgctccayttttgttttgttcctcactcgctccttattgttaaaatgaactacatcaaaactatagcaacaaaacctgaaattgtgactgaaagtatttatgcaatcagagacccctctaagatgtgcaaggccttgggaaaatatttttgcagaacccccatctacattaatcattcgacttttaaatatgctacaaaattcatgggtcgctgcaaagattagtgacttcttgataaagatttggaataacagatacttagctgtt

SEQ ID NO: 458438 - DNA, 528 bp, Homo sapiens
cctccagtgctcctcataagttaaccagtgtctagacaattaaagtgggaagaaagagtgaaagagaaccctaaagtcccaaacggaagtacaagataaaatcaatgccattgggaatctgaaatccatttgagatcagacaattaggcctaaaaatctgttacaaagataacatataggggtcaagtgatcaaccagtacttaggagttgagaaaagagtacttaatgacagcagactaaagtaggggagctttatgagaaatattggggataaaccccactttaaaagttgtgtaggggttaaaaaggtaaactgatgtgagacaatttaaaaggtaaagagagaggataacataaacaaatgtgcaagrgtagaaatatctaagcaaataggtgaggtgatcagtgagtacacccatcaaagagaggcagagagcctaacatgaatttccagaatgccaagctaaaaaaagttgtagttctatttgtaggtggtagaaggcactgaggttataaggagtgggatg

SEQ ID NO: 458439 - DNA, 607 bp, Homo sapiens
tatagctaacccttgggttttaggagaggtcatcaagagttcatagattatttgagtcagacagttcccttgatgacagatcaatttcaatgaagccaaaacattagctctttttatgtgctagttagtgtcacacaaaaatacacactgttccttggccacaagctgcactgaagtttctggttagcttttccttatatacttattcaaaattgaaggttggagcaaacacatctattatagaaaccaacttgaagttgcatcttgtgacagttctgtggaatttcatctgtgaaattatcttaccactaattaacccttttaacagggaaatatgggggaaaatgagaaagcaattaaatacatattcagaaatatggtacattgaatagttttggatttttttctaaattacttagragagtttattagttgtgtatcacaccagcgatattttaataaaaaagtatagtgctttcagagaattgcctgttaaaataattatacaactattttctctctagatatgaatagatgcaactaaattagcttatatagttttttaagtaaatgcaataaatcattgtctaattcacatatttggttg

SEQ ID NO: 458440 - DNA, 620 bp, Homo sapiens
tatagccactctcttcaaagcaaaaaacgaacaaactaataagcyttctgattgagttcattttgaaaattttctaaaggtattttataagaaatcttgttacttatattcttatatactttattgaaagatgcacacacaaaaggttttaaggaaaaggcatctcctctatgtacctgagaagctgagctgtttttgtgtttcctttatactgatatattgctgtagaggatttggaaggtcagatgttcacatttttattcttcccacttcattatttatgcctgttcttctcttttgggacttgttatggaaaaggtagagaaaaagaatacatttacttggtctatgaatcctcatttttttgtgtgtaaaacattttaaaaaccatgtcttgatttatttctatgtcaagcttccaataaatgctttacacaaaaaccatgttcactttagagcacctaaattagtgttttggttttcagtgaggaagagcaaaatccgtgtggcttgttgctggaacaagatgtacatttgagactctggaattctactgtgatttttatcccattctccccgctgcctttttgtagcaacaactgtcaggattggaagattgt

SEQ ID NO: 458441 - DNA, 620 bp, Homo sapiens
tatagccactctcttcaaagcaaaaaacgaacaaactaataagctttytgattgagttcattttgaaaattttctaaaggtattttataagaaatcttgttacttatattcttatatactttattgaaagatgcacacacaaaaggttttaaggaaaaggcatctcctctatgtacctgagaagctgagctgtttttgtgtttcctttatactgatatattgctgtagaggatttggaaggtcagatgttcacatttttattcttcccacttcattatttatgcctgttcttctcttttgggacttgttatggaaaaggtagagaaaaagaatacatttacttggtctatgaatcctcatttttttgtgtgtaaaacattttaaaaaccatgtcttgatttatttctatgtcaagcttccaataaatgctttacacaaaaaccatgttcactttagagcacctaaattagtgttttggttttcagtgaggaagagcaaaatccgtgtggcttgttgctggaacaagatgtacatttgagactctggaattctactgtgatttttatcccattctccccgctgcctttttgtagcaacaactgtcaggattggaagattgt

SEQ ID NO: 458442 - DNA, 620 bp, Homo sapiens
tatagccactctcttcaaagcaaaaaacgaacaaactaataagctttctgattgagttcattttgaaaattttctaaaggtattttataagaaatcttgttacttatattcttatatactttattgaaagatgcacacacaaaaggttttaaggaaaaggcatctcctctatgtacctgagaagctgagctgtttttgtgtttcctttatactgatatattgctgtagaggatttggaaggtcagatgttcacatttttattcttcccacttcattatttatgcctgttcttctcttttgggacttgttatggaaaaggtagagaaaaagaatacatttacttggyctatgaatcctcatttttttgtgtgtaaaacattttaaaaaccatgtcttgatttatttctatgtcaagcttccaataaatgctttacacaaaaaccatgttcactttagagcacctaaattagtgttttggttttcagtgaggaagagcaaaatccgtgtggcttgttgctggaacaagatgtacatttgagactctggaattctactgtgatttttatcccattctccccgctgcctttttgtagcaacaactgtcaggattggaagattgt

SEQ ID NO: 458443 - DNA, 292 bp, Homo sapiens
acctgcatatatatatatacacacacacacacacacacacataaacacacacacacaaacaaatttatatacagaaataataaaatgctattctttaattctgcatgtgtgagttttgctatgataataacattgatcattataaggctaacatttaatgaactaagtgtcagtcactgttatcagtgccctgagtacattcccttatttaaaactcacaatacccacakggagtgtctatttttttattttaatgatgatgaaactgaggcacagagatgccaagttactt

SEQ ID NO: 458444 - DNA, 487 bp, Homo sapiens
tctgtttactacaaggattctttgttctttaaattcaaaaaaatgtttagttaggatgaagttccacaaagcctgcagatggcagcaactttcttttactgggcatttgctcctgcttagcacttttggctggagagttgactcaaattaaatgtaggaccacaatctgtggggctatgtcctaagatacgcaaatggcagtgtattttctatttggctttccaaaagcaattttctattattgattttgaaagactatcccatgccctttatttgaatagggattgaattgcatttgtctggatctgaaaggaawagctgagctaaatgctaggcattctcaacaaaagcaatatcagggagcattctgttatcaatctttgacatttcatctaggcagttacacactttttctaaatacagtgacctgcatgatttatgttgaattccaaaagcaatgatccagtaaatttactaacagttccag

SEQ ID NO: 458445 - DNA, 623 bp, Homo sapiens
taattaacttttttggttataaaaataaaaaatattaatagccattaaaatgtgttcatgagtttatccagccactataaatcagcaaggttagtaaaatgtttttatcaaagttgtttaatatccagagtagttggactttttggttgtcacaaggttttggtatagttgaaagtcctcctatagagagtacattagcagtctcagttgctaaaacaatggaaaattattttctcactgttctggaggctagaagtccaagatcaaagtgttggcagatctagtttggtgctaagacctttccttccttgggctgcgggatgagattccttttccccatgtggtttctcacataattacccctcagtctgtaggtctgtgtattgtctgcatttgaatctccccttcttataaggacaccagtaatactagatcaggcctacctgcatggactcattttatatcaattatatccataaaggccctatctcaaaaaacagtcacattctgaggtactgggggattcaaatttcaacaaataaagcttgaggggacacaagtcagcycataacacatagtataaagacccaaatgatttatctgatggaaacaagactcaggat

SEQ ID NO: 458446 - DNA, 609 bp, Homo sapiens
atagaactgaatgaattctgatctttcggagaaaagtctgccattgtctgaatcaagtagttgctaggacctcttaaagatttgcggttgggcgcagtggctcatgcctgtaatcctaacactttggggaggccaaggcgggcggatcacaaggacaggatcaagaccgtcctggctaacacggtgaaaccttatctctactaaaaatacaaaaaattagccaggcgtgtgggacacgcctgtgctctcagctactccggaggctgaggcaggagaattgcttgaacccaggaggcggagtttgcagtgagctgagactgcgccactgcactccagcctggatgacaaagcaagactctgactcaaaaaaaaaaaaaaatttgctacttaatggcagaactcttgatttataaagcccttatatatggtaattgttatatttgctataatttactttaaaatactacaatttaaagaggagtrtatagtgtggtagttaattgtaatctgcaccctaggggcagtcaagttaacagttgaaaaacccgaattaggaaggcattctccaggggtggttagttagcatatgaaagactaatctaatgcttt

SEQ ID NO: 458447 - DNA, 297 bp, Homo sapiens
aattggacaagtaacttggcatctctgtgcctcagtttcatcatcattaaaataaaaaaatagacactccatgtgggtattgtgagttttaaataagggaatgtactcagggcactgataacagtgactgacacttagttcattaaatgttagccttataatgatcaatgttattatcatagcaaaactcacacatgcagaattaaagaatagcattttattrtttctgtatataaatctgtttgtgtgtgtgtgtgtttatgtgtgtgtgtgtgtgtgtgtgtgtatatatatatg

SEQ ID NO: 458448 - DNA, 297 bp, Homo sapiens
aattggacaagtaacttggcatctctgtgcctcagtttcatcatcattaaaataaaaaaatagacactccatgtgggtattgtgagttttaaataagggaatgtactcagggcactgataacagtgactgacacttagttcattaaatgttagccttataatgatcaatgttattatcatagcaaaactcacacatgcagaattaaagaatagcattttattgtttctgtatataaatytgtttgtgtgtgtgtgtgtttatgtgtgtgtgtgtgtgtgtgtgtgtatatatatatg

SEQ ID NO: 458449 - DNA, 589 bp, Homo sapiens
attcttttacatattgtctgtatctgctttcacattacaattgcagaactgcatagttatgacagagaacatatggcctgaaaaaccaaaagtatttactagctgcccctttatggagaaagtatgccaacctccaatataaattatctgaatactgaatgtataatcaacttcctatttcacaaattcacaaattttttaagctctaagttatccacaatgtaactttgaagatatagacagtctggtcaggcttacacatgacaataatcgtataaattccacccctcaccctaatcacttatatwtatttgagatgtgctcatttttggactataaagaaaaagaatcaaaataaaattctggcttcactaatctggaatctggacttgatttacctttaacaaggcttactaaacaatttggtacaaataaaagataaagggagtgtatacctattcatgacaattaagttatataaaatacaatgatataaaacacctgctctaataacttcaaattgtccttactactcattaaaaacaagttccgcaaaatctcttgtcaacacttgctaagcccaagtgca

SEQ ID NO: 458450 - DNA, 573 bp, Homo sapiens
attttacttattgtctaacactatacatttgagacttagaaagtctttcttaaaatattagactctagaattacagatttttcaagaagtgtttaccatgataatactaatgccttatatttgcaaaaagaggggttattcacaarttatctcgttactttatctgccattagaaagaaaagagtaaagaaaatgctcactggaaaaacacagaccttaattcagtaccatagtcttaaacttctgggtcagtcaatcagtcagaagaaaaaataatgcaaccttaaagaattaatgcaaatttaatgaatgaagatttggggattatttgaacatagctacttctttcagaaaagcaagataagttttagaaattattaaaattctcatattaacacccaaaaagtgattctgtccagagatactagtccagtgctcattaatccactgttgtataactttctgcaaaataatgccctgtcctcctgtggcagcttctttcctatgcgacaaacatcctcaaaagtatttgcagtagagggaagagattccaaaatgtatatgccactgcat

SEQ ID NO: 458451 - DNA, 573 bp, Homo sapiens
attttacttattgtctaacactatacatttgagacttagaaagtctttcttaaaatattagactctagaattacagatttttcaagaagtgtttaccatgataatactaatgccttatatttgcaaaaagaggggttattcacaaattatctcgttactttatctgccattagaaagaaaagartaaagaaaatgctcactggaaaaacacagaccttaattcagtaccatagtcttaaacttctgggtcagtcaatcagtcagaagaaaaaataatgcaaccttaaagaattaatgcaaatttaatgaatgaagatttggggattatttgaacatagctacttctttcagaaaagcaagataagttttagaaattattaaaattctcatattaacacccaaaaagtgattctgtccagagatactagtccagtgctcattaatccactgttgtataactttctgcaaaataatgccctgtcctcctgtggcagcttctttcctatgcgacaaacatcctcaaaagtatttgcagtagagggaagagattccaaaatgtatatgccactgcat

SEQ ID NO: 458452 - DNA, 510 bp, Homo sapiens
tgtgtgtatgcatgtttgaatacacaggaaaccgcagaactcataccctgcctgattgaacactaaaactctccttctacagatgccccttttcccttactatttcattatttgaaaacttcctctccttttgcatctgtttttytttctcttttatctgctgttgtttaggagcatcatatcacttccaatttgtcctttctcatgtaactacagggctagtccaaggtgtggtcaaccgcagcagaactagttgaaatgcaggtgacttggaagaagagagagatggaaatcattagctaccactcaccctcagttgccaccatgaagtcttccagcccaatgctgattttacagacaaaatacttagcctccctccctccttcttacccaccaaccaaccaatgtgagaaaatcaagaaatagatgtttttggagtcctgagagaagagagaggaaattcctgctttataacagtaccccagtaaagaaacaaaaccgagaaagaaa

SEQ ID NO: 458453 - DNA, 615 bp, Homo sapiens
ctttcactttccaccatgattgtgaggcttccctagccacatgaaactgtgtgtttgttaaacctctttttctttataaattacccagtcttgggtatgtctttatcagcagtgtgaaaacagactaatacaactatatttcactacaacataatagccccaatcctggtgtaaatgttgtttaatagaaacaaaatattgtaggatgtgtattttccttaygaaagttctccagcatttctccccattctcttttgctccagggaagtctaaagggaagaaaatgaataagtatctcttttcctgttttgaacccaacacgtacttattgaacaccctccacatgccctgtgctgaagttaaaatggaagaaaacggattttcttctctcacagagcttacagtccaaaataggggcagtaatcggcattttcagcaatttgatcaattatttattagggagaagcacaagctactgtgggatcccatggtggggccttttaactcagccttggaaggcctcctggaggaggtgacatttaaggtaatacttaaagcaagagagaacagcactaatgaatccagttggaagcacttccgaaaaacaaaactggt

SEQ ID NO: 458454 - DNA, 607 bp, Homo sapiens
attttctaacaccaaacaatctctatattattatgagaggtattacaatttttgtttcactcactgataacctatttcttgtagcttacaggaaaaagcagagggctttccttttttctgakactgcaaagaagggctctgagataccccagggaagagtcattgttacccaccataaatggttaatgtgctttcattttccaacgtaaaaaccaaatcgttaagatcagaagcttataattctactgccctatttccctttgctaatccattaacttgtattagggcaaaaatgttctgaatcatttatcaaaagctgctgtatgtaaacacagagatttttaaaaagccatgttgtaaatgtcctgtgttactttgtaaataagcagaaaataatatgtcaaacttctcaacaacctaccctgccctatagctcttacaatggcaactttttaaaaaatgtgtgtgtatgtgtgtgtatttcttccctatctgtctagcacagctcattaaaaaaaacaaattgagaaagtgggcaactgaatatttctaatgaaaacatgatggtaactataatgtcctacaaaaatactggcctgttcatttt

SEQ ID NO: 458455 - DNA, 616 bp, Homo sapiens
atcgcatttgctggtagccagttatatgctctttgattcaacccagtatctgttgtagaagaggcaatggcccctttaagaccctcatttcaaccctcggaaggcccaaagacaaattaatacctgttgatcagtcttctccagccaagctttttaagatcagggtccttttaagaagatgttccgctttgattgtgcccggcccctagagaatcttttgcttcagatcctcccggtaatgggtggtgtctggtcattctccccccaccgctcagagccccataggcgatgtaggatcaggcccttcaaaacagcaagtgtgcagggcagaacaaaatgcccaagtctggcctcacawtgaacttttcttaatgactactgatctacaaaacgctgattaaacaaaattagaaaacaaaaaaaatggtttctgttctgaattttgcatgaaaacgtttttgttcacgttaatgaaggtggcagaagaaaaatttgctatggttttccactcctgtaaacatatctgctctggttccaaatcttatcacttccacggctgggaagataacaaagcaattcagggcctactagagaaagtagacttgacattggcaca

SEQ ID NO: 458456 - DNA, 648 bp, Homo sapiens
gttataaataatcagggatttctaccacagggttttaacattcttgaaatgtggacaaacttgggagtgagtgctcccgcgcttagtaatggaatacagcctcccacctctatttcagcttcagttcttaggctaggctgcttttctggcagctgtctggcctgagtaatgatggttgtggtttccctgaagttcccagcggagagtcatcccatgatagaaactgccttgcgcttctcactcacgctctcagcccggggaatcccagcggggaggagggagggaggtcgttttcttcagctccccagrtggtctgtgctgggtgtgctgacggtccttttgggaaaacaggtccacctttgccagcgtaattcagaaagagatgtaattttctgagagcacacacctgggcaggagatcgcttgaagtgagaaattcgtagtggtaaatgtatttgtagcaaagtaccactgcatatcctgcttgagaggatgaaatttgattatttagtaagttttcatgaacaactccacttcagtgtggggattacgcagatgagcaagagcgtggctctgtcacacagtcccgttgggaaagcctgcaactcattaagaatccgatgagtgccatttagaaatgtggacaggg

SEQ ID NO: 458457 - DNA, 549 bp, Homo sapiens
ccccaatgttttcttgtagtagtttcatagtcagatttaagtctttaatccattttggtttgacttttgtatatgatgagatataggtttagtttcattcttctgcatatggatatccagtttttcccagcatcaatttttgaagagattgtcttttccccaatgtatgttcttggcacctttgttgaaaattagttcactgtaggtgtatggatttgtttccagactctctgttccatyagtctatgtgtctgtttttatgccagcaccatgctgttttggttactatagctctgcagtataatttaagtcaggtaaagtgattcttccagtttttgctcctgttgttcaggatagctttggctattgtgggtcttttgtggttccatatacattttaggattgatttttctatttctgtaaagaagaatgccattggtattttgatagggactgcactgaatctatagattgctttgggtagttgaatattttaacattattgattcttccaatccatgaatgtggaatatctttccattttgtgtg

SEQ ID NO: 458458 - DNA, 627 bp, Homo sapiens
gtgtgatacatagtgaagatagagacattcacttcttctatttcccacccctggccgggggtaacacaaagggacctgatgaagacacagccttatacctgtatcaagtgtccttgagagtggtaggactggagaggcctgagaaataaaaacatacatgcattaaaaggaacaaataaagagaagaagaaaactcagacatggtaaattaactttgtacctttccttacaacctagcatatcagagggtacatgatttccttttgacctgcttcctttatgctgactgcatgaacagggaagggggttggggtacacgtggstgataattgtatttattatatacctggtattaatacatctatagagacaattggaatgaccatactggggaaacagcaagggaagaactgaaaaagctaaaataaatacttggttctataaaaaatactacaaaaagatttctcatgtctgacaaattacattttagtctaatagcaataagtagaccgaagctaaggtgatttgataaatatcataaggtattttattgggaaattgatatctatatgtattgcttgtaaagctcagtaatctgttcttgaattgagaaattacggagacaac

SEQ ID NO: 458459 - DNA, 599 bp, Homo sapiens
acaccattgctttgtttaggtatttgtatgtcttcgtcctctttccctcctcactacagtatagccaattgtgtctttgccatcttcactgctatatcccctagtgcctggtaggctttctataaatatccatttattgacttattgactacatgtatatgctaatcctttttactaatttttgttatactatgtatttctcttctccctctctttgcttccctctcttctcatgtccttgatgcttcctactcaatattaacatgtacatcactttgtgtcttcagcatttctcttttcattatattacgataggttaattttcctaagaaaacactattttgacaaaagcaaagcattaaagtaaagcagcataggatcaattttttcctggtagaaggaaacaccatctttccaagaagacaattccgccaggaaacaaaacaaacgaaaacatttctggtaagtcctagttcccaagacttgaagccagtatattttcccactttcaagtacccttgactgtagagataaaaggtatccacttagagatattaacycattaccactgcctaaatttgggttccagaaacacaact

SEQ ID NO: 458460 - DNA, 558 bp, Homo sapiens
gaagattttacaaacaagcatcagaaattaccataagaaaagcaagtacaaaataatcataagaaaaacaattgcatcccaattattatgacaaacataattaactaygaaaacccaaaaacagttcatgctttgataatgctaaagttgataagtagattaagatgtgatagaacaatctgtaaatcttggtgcttcctaacttttgagaaaacatttttaggcaaaatatgatgatttaaggaagaaaagttgctgatggatgaggcatgtcccttaaagacaaacactatgaacactgtgtacagcctttataatggaaaggtgccaggtttttttttaagtccttggaatctcaggtggcaactttgaaattcatgtgtaattcatgagttttttaaaagaaatgtaataagtaacacaagtgattctagagcttgtctttaggctgagggagatattggcattataagttgaagtgttagaaaggaacaataagaattaagaataagcagtaatttctgccaagatctgtggcacccagtctcacacataagg

SEQ ID NO: 458461 - DNA, 507 bp, Homo sapiens
actgtgtacagcctttataatggaaaggtgccaggtttttttttaagtccttggaatctcagktggcaactttgaaattcatgtgtaattcatgagttttttaaaagaaatgtaataagtaacacaagtgattctagagcttgtctttaggctgagggagatattggcattataagttgaagtgttagaaaggaacaataagaattaagaataagcagtaatttctgccaagatctgtggcacccagtctcacacataaggctttttggaatctcttggtttccaaggttcaggctctcatactttagtttgtacataaaggacttaagttattcttaaagcacagttttagcacttcacaccaggagatggttatgagaccgatcacaagataaagtgaaataggatgtgtgcctgcttgtagaaggaacctctttccttctgcgtttctattcctacttttctggcaggcaagtcctagaaaaaatttcatatacagattaattt

SEQ ID NO: 458462 - DNA, 507 bp, Homo sapiens
actgtgtacagcctttataatggaaaggtgccaggtttttttttaagtccttggaatctcaggtggcaactttgaaattcatgtgtaattcatgagttttttaaaagaaatgtaataagtaacacaagtgattctagagcttgtctttaggctgaggkagatattggcattataagttgaagtgttagaaaggaacaataagaattaagaataagcagtaatttctgccaagatctgtggcacccagtctcacacataaggctttttggaatctcttggtttccaaggttcaggctctcatactttagtttgtacataaaggacttaagttattcttaaagcacagttttagcacttcacaccaggagatggttatgagaccgatcacaagataaagtgaaataggatgtgtgcctgcttgtagaaggaacctctttccttctgcgtttctattcctacttttctggcaggcaagtcctagaaaaaatttcatatacagattaattt

SEQ ID NO: 458463 - DNA, 507 bp, Homo sapiens
actgtgtacagcctttataatggaaaggtgccaggtttttttttaagtccttggaatctcaggtggcaactttgaaattcatgtgtaattcatgagttttttaaaagaaatgtaataagtaacacaagtgattctagagcttgtctttaggctgagggagatattggcattataagttgaagtgttagaaaggaacaataagaattaagaataagcagtaatttctgccaagatctgtggcacccagtctcacacataaggctttttggaatytcttggtttccaaggttcaggctctcatactttagtttgtacataaaggacttaagttattcttaaagcacagttttagcacttcacaccaggagatggttatgagaccgatcacaagataaagtgaaataggatgtgtgcctgcttgtagaaggaacctctttccttctgcgtttctattcctacttttctggcaggcaagtcctagaaaaaatttcatatacagattaattt

SEQ ID NO: 458464 - DNA, 330 bp, Homo sapiens
aagaataaattatttcattgcttcaccatttctttgagcattttaaaaatgttatcttgttaaatctttgtaataacctagtgaaataagtctctaaaatcctcatttttagaagacattgaacctaagagaagcaacttgttcaagaaaaaatacctgttggtaactgcgctaggactttttmtgagttagggacattttccattaagccaagctaactctagttaatttactgagtgatactgccctcaattcatgagtatttcatcttactttatttattatttaattagaagcttaataagttcatagagcttacaaacttaaagt

SEQ ID NO: 458465 - DNA, 330 bp, Homo sapiens
aagaataaattatttcattgcttcaccatttctttgagcattttaaaaatgttatcttgttaaatctttgtaataacctagtgaaataagtctctaaaatcctcatttttagaagacattgaacctaagagaagcaacttgttcaagaaaaaatacctgttggtaactgcgctaggactttttatgagttagggacattttccattaagccaagctaactctagttaatttactgagtkatactgccctcaattcatgagtatttcatcttactttatttattatttaattagaagcttaataagttcatagagcttacaaacttaaagt

SEQ ID NO: 458466 - DNA, 517 bp, Homo sapiens
ttaaaaatgttatcttgttaaatctttgtaataacctagtgaaataagtctctaaaatcctcatttttagaagacattgaacctaagagaagcaacttgttcaagaaaaaatacctgttggtaactgcgctaggactttttatgagttagggacattttccattaagccaagctaactctagttaatttactgagtgatactgccctcaattcatgagtatttcatcttactttatttattatttaattagaagcttaataagttcatagagcttacaaacttaaagtctrtgaaataagtaatgttctgatgttagctctgatattgtctgaaatactctaagaacttaataaatttggtaaatgttttctatatccgtgttaaaatagtaattttatttattacatttttatacatagcattcatcaacaacttttgaaacatatacgaaaattatctaaaaatcctcaaaataccaattcaggtaagacttcagatagcaaactactcttgatc

SEQ ID NO: 458467 - DNA, 517 bp, Homo sapiens
ttaaaaatgttatcttgttaaatctttgtaataacctagtgaaataagtctctaaaatcctcatttttagaagacattgaacctaagagaagcaacttgttcaagaaaaaatacctgttggtaactgcgctaggactttttatgagttagggacattttccattaagccaagctaactctagttaatttactgagtgatactgccctcaattcatgagtatttcatcttactttatttattatttaattagaagcttaataagttcatagagcttacaaacttaaagtctatgaaataagtaaygttctgatgttagctctgatattgtctgaaatactctaagaacttaataaatttggtaaatgttttctatatccgtgttaaaatagtaattttatttattacatttttatacatagcattcatcaacaacttttgaaacatatacgaaaattatctaaaaatcctcaaaataccaattcaggtaagacttcagatagcaaactactcttgatc

SEQ ID NO: 458468 - DNA, 517 bp, Homo sapiens
ttaaaaatgttatcttgttaaatctttgtaataacctagtgaaataagtctctaaaatcctcatttttagaagacattgaacctaagagaagcaacttgttcaagaaaaaatacctgttggtaactgcgctaggactttttatgagttagggacattttccattaagccaagctaactctagttaatttactgagtgatactgccctcaattcatgagtatttcatcttactttatttattatttaattagaagcttaataagttcatagagcttacaaacttaaagtctatgaaataagtaatrttctgatgttagctctgatattgtctgaaatactctaagaacttaataaatttggtaaatgttttctatatccgtgttaaaatagtaattttatttattacatttttatacatagcattcatcaacaacttttgaaacatatacgaaaattatctaaaaatcctcaaaataccaattcaggtaagacttcagatagcaaactactcttgatc

SEQ ID NO: 458469 - DNA, 517 bp, Homo sapiens
ttaaaaatgttatcttgttaaatctttgtaataacctagtgaaataagtctctaaaatcctcatttttagaagacattgaacctaagagaagcaacttgttcaagaaaaaatacctgttggtaactgcgctaggactttttatgagttagggacattttccattaagccaagctaactctagttaatttactgagtgatactgccctcaattcatgagtatttcatcttactttatttattatttaattagaagcttaataagttcatagagcttacaaacttaaagtctatgaaataagtaatgttctgatgttagctctgatattgtctgaaatactctaagaacttaataaatttggtaaatgttttctatatccgtgttaaaatagtaattttatttattacatttttatacatagcattcatcaacaacttttgaaacatatacgaaaattayctaaaaatcctcaaaataccaattcaggtaagacttcagatagcaaactactcttgatc

SEQ ID NO: 458470 - DNA, 583 bp, Homo sapiens
gcctggtccatagagcagctggcatcaacaaatggaagcccccttcccatcttgtctttgcgtgcaaaacaaaatcctgaatatgtgggtataaaaagtactcttataagagaaaaattggaaacttttgcaaaaagagattggaaaggtgtcacatcttgtggcatgaggatttgtggrcatacacttgaactttgtgctgtgagatatccacagaacttcagtagcttaagagaacagtttagatgtcatcttattcatctaccatagaacttcttcttcttttctgagatttctagacagtaacttttacagctctaataatgcagttatctcccaattgtttggacttttctaatagatacaaagcagtatttcaccagcagatgctactgcagttcatatggtgatttcaaactaagaatccctttaaagttatgcaatactttttttttttggaaatagggtgaaagtactttaagattaaaatcctatgaaataggtttacagtaaataattatttgttgcaatgtctatcctaatatcttatattcacacatgtatcggtgtcctaataaatata

SEQ ID NO: 458471 - DNA, 511 bp, Homo sapiens
aattaagtgtgcaatagcattatgtctaaaatataatgtatataccttattttgaaaatacttgatygccaaaaaatgctaaccatcatctgggccttcagcaagtcatcatcattttgctggtggatggttttgtctcagtgttgatagctgctgactgatcagagtgatggttgctgagggctggagagggtgtggcaatttcttaaaataacatgacagtgaagtttgccgcgttgactgactcttgctttcacaaaagatttcactgtagtattctacaccgtttggtagcattttacccacagtagaatttatatcaaaactggaaccaatcctctcaaaccctgccactcctctgtcaactaagtttatgggatattctaagtcctttgttgttctttccacaatgttcatggcatcttcaccaggagtagattccatcccaagaaaccactttctttgctcattcataatgagcaactcttcatccattatgattgcagcaatc

SEQ ID NO: 458472 - DNA, 555 bp, Homo sapiens
  misc_feature (1)...(555): n = A,T,C or G
cgtgaacccaggagacggagcttgcactgaccccagatcgcgccactgcactccaacgtgggagacagagcgagacaccgtctcaaaaaaaaaaaaaaaaattaatttagtataaaattaaaaagagctacgtttgaaatatagttttggtgaatttctaactgtaaaaaaagaaaagatgcttcaaagtaatacattaacttaatwagaggaaagaaaatccagcattttcagtgttaaattctaaaccattatcaataacagaactgtacaatcttttcactatttccttaagcaaagcccaaaaggtctgctcattaataagaaaagtcatcgtatttctctttgaaaaatatttgtcaccaattctgtggtatattctttcncaagttctgactagaatcgtgtaagtccaccacgcaacacagcacagcgctaaataccacaatctatcaccagcattaactgctcccagtcctaagactttaatttcgacaaggctgcagctcagaaactgaagactggtagggtttctctttcagcaggcatggacaa

SEQ ID NO: 458473 - DNA, 555 bp, Homo sapiens
  misc_feature (1)...(555): n = A,T,C or G
cgtgaacccaggagacggagcttgcactgaccccagatcgcgccactgcactccaacgtgggagacagagcgagacaccgtctcaaaaaaaaaaaaaaaaattaatttagtataaaattaaaaagagctacgtttgaaatatagttttggtgaatttctaactgtaaaaaaagaaaagatgcttcaaagtaatacattaacttaataagaggaaagaaaatccagcattttcagtgttaaattctaaaccattatcaataacagaactgyacaatcttttcactatttccttaagcaaagcccaaaaggtctgctcattaataagaaaagtcatcgtatttctctttgaaaaatatttgtcaccaattctgtggtatattctttcncaagttctgactagaatcgtgtaagtccaccacgcaacacagcacagcgctaaataccacaatctatcaccagcattaactgctcccagtcctaagactttaatttcgacaaggctgcagctcagaaactgaagactggtagggtttctctttcagcaggcatggacaa

SEQ ID NO: 458474 - DNA, 631 bp, Homo sapiens
agcaaccgtaaagaagtaagcgtcgagactattgtcgtgcatgctgctgtcctggggtgcagctcttctgtgcatgtcaaggacatgtgccacatgttgatatgcatcccagggataaatgcacaacatgggggataggccgacgctggcagtaatgagctttgtaggagttattgcaaagwccaacagtttgtgaaggaattttgcttaacaggccaaggagatagacagagttgagggttgccaagatttgcctgtgcggggcttgtcagtcacattgttttcatccaaacttcatttgaggggaaaattgaatacatttgacagcaatggaaagtcttattttcttttttcaaatctttcagaggacaaaagcagtatttctggtgactaacataactatttttagtactgactaaatcatatatatgaatggatctattagcagtttatctttttccatatctagagaataattaaaagatatttcatagatgtcatatatatgttttaaaatctatgtaaaaataatgtagcctattaattttcctttgctcttttcctcctttgattttcctctagcatagcctggttctttagaaatacatttgcttaattggctagatgcaga

SEQ ID NO: 458475 - DNA, 565 bp, Homo sapiens
ctttccagtgacctgtgatgttcacggtgcacactttggactcctttcctgggctgtgcttgtaagagtattgacrgtgtttacccctcttgctttttttctgctaccattgcccttgtgatagacaaatttctctttctttagatacgttaatattctcaagcagatattaggcaactgtcctgggagctagttgttaaggtgactttgcctctctttggttttttatggatctaatgcagatggcagtctcatttcactcgtttcaaattttcttgggggatacctcatgctactgccttacacataacatgtttagtatacggataagtggaaatggtggaaaaaaagatatatattgcaagaaaaaaaagacttagaaactagttattaaatacctggtagagaaagtttcttttgttaaatgccttatagagaaatatcttgatctgaaattgactttatatacaggtggaataaactgctctagaaatcaagagggagtatgtgtatttaatctctgtatctgttttctgtgtctcttttccatcctaaaataagggtt

SEQ ID NO: 458476 - DNA, 565 bp, Homo sapiens
ctttccagtgacctgtgatgttcacggtgcacactttggactcctttcctgggctgtgcttgtaagagtattgacagtgtttacccctcttgctttttttctgctaccattgcccttgtgatagacaaatttctctttctttagrtacgttaatattctcaagcagatattaggcaactgtcctgggagctagttgttaaggtgactttgcctctctttggttttttatggatctaatgcagatggcagtctcatttcactcgtttcaaattttcttgggggatacctcatgctactgccttacacataacatgtttagtatacggataagtggaaatggtggaaaaaaagatatatattgcaagaaaaaaaagacttagaaactagttattaaatacctggtagagaaagtttcttttgttaaatgccttatagagaaatatcttgatctgaaattgactttatatacaggtggaataaactgctctagaaatcaagagggagtatgtgtatttaatctctgtatctgttttctgtgtctcttttccatcctaaaataagggtt

SEQ ID NO: 458477 - DNA, 606 bp, Homo sapiens
gaaaatttatagatttttttggtggggggaatgagagttcgggaaataaaaagaaatgaaataaatttgactccaggaaagctaattttacatttgtttcttcattcctccctggggctctctgaaactctggaattttctcatttaaaagaaagctagaacaacctgtgttggacatacaggttgagcctctggtatttgaaatgcttgggaccaaaattcagatttattcagattttggaatatttacatttacataatggggtatctcagggacaggacctaagtctaaacatgaaattcattaatttttcttatatattttatacacatagcctggaagtaattttgtatatttttacattttatgcctgaattaaagtttgtgtacgtggacatcagaaagcaatggtgtcaggtgtggaattttccacttaggacatgttggtactcaaaaagtgtrggattttagagcattttatgatttttggatttaggatgctcagcctgtaaacttgagggtcaaacttttcttgtgttagttgaaatctcctgggtgctttcttttaaccaaatcccaaagtcttttttataactaatatgcta

SEQ ID NO: 458478 - DNA, 595 bp, Homo sapiens
gatagcggatagagaaatttaatagagtttgagaagtcatagttaaagaatggagcacacgaaaaggaaaggaaaagtgtaaagaaatctgcctctggtatgatttgaggacagcttgtaagggtctttgggtgtccaccaggaaaatctcctcagtgagtgaaactcactgttgcattataaattcctttatgttaaacactggcaattcccagtgtttgccttttgaaatataaatgttatattgtattcctggcaggactatcacattaaatctttcacatcttagttgaatcaaygtcctcagtaatagaaaactgtcttcaaactccactaaacattataattactatgggagctttaaaaatacatatatgcaagttcacagtctccccaagagacataccgatcatgagccatcatagtgaagtagaaaagaatgagactcagagacgcttgggtaaagctacccttctgccactaattgggttaacttacctaagtttctttagccttactttgctttctttcaaaaataaaggccgggtgcggtggctcacgcctgtaatcccagcactttggtaggccgaggtga

SEQ ID NO: 458479 - DNA, 545 bp, Homo sapiens
gtgtgtttagcctagaattgacacccctcagtgttggccctagtctgtttttttcaggctgtatgccatagcactccttcacatgagccaaactggatggttcaggctttgatacttcactacctcttttctcatcctcaaatcagtctctgtctttgtgatacccatcttctcttccttcatcccctccccaaatccctgcatgttgaattcctacttcttcctcaagatcttagcataatgccacttctacttcttctttaaggtcagacatagaaagaaaagagtaggaactgtatttactgtatcaatatggtaaaaacaacactttaattscttttttaaactaaaatgatttaacctacttcatttatatagttcatccaaaaaaacagaatgaccttcccaaatgcaaatgcttaatatgtaaagtttagttaccatattaaagaagattctgcacaccatgccacttaggtatcaagaaatgatggtatggccaaaatgggcaaaggaagaatgaactattacagacaaaactatga

SEQ ID NO: 458480 - DNA, 617 bp, Homo sapiens
ttgtgtgtttatcgtacttggtatgcaataaaatgcttggatgtgtaagtggatgtttttcatcaaatttcagaaatatgtctctgttttgttttatttttctcaagaagtcataattttttatctgatttattgaaagaccaacaaaaatactgggttatggattttacttctgttttggtttttcctgtttgtttttcatgattaaagaccctttcaccatctccacataaatatgtatttccacatacatacagtagaataactggaaggaaggatcacctgtggccaaaaaatttttgatgtaattatggctgcaaatattatctaggcatatacctcaatgtattatttttgtttctgtagtctattttcattaaataaatataaattttaatgagggcacaacttgtgttactttttttcttaattctggtaataaattttatcttaacactatacacgttgggaacaagcccyccaaaatctggctgtaaactggccccaaaactagccataaacaaaatctctgcagcactgtaacatgttcataaaggccctaatgcccacgctggaaggttgtgggtttaccagaatgagggcaaggaacacctggc

SEQ ID NO: 458481 - DNA, 588 bp, Homo sapiens
ctgatgttctttgatagcattactcacagtggaacttctttcaaaattagagtcagtcttctcaaaccttgccactgctttatcaactaagtttatataatattctaaattatgcgttgtcgttttaacaaagttcacagcatcttcatcaggagtagattccatctcaagaaaccacttttatttcctcattcataagaaacaactcctcatcaattttatcatgagtttgtagcaattaagtcacatctcayggatcacttctaattcaagttatcttgccatttccaccacatctgcaattgcttcctttactggagttttgaaccctcagtgtcatccatgagggctggaatcaaaaaaaaagaaatttctgttaatattgatatttttacctcctcccgtgtatcatgaatttccttcatggcatctggaatggtgaatcctatgcagaaggttttctacttactttgcccagatctgtcagaggaatcactatctacggcaggtctagccttacaaatgataagacctgaaagtctaaattactctttgatccatagattgcagaataggtgttgtgttagc

SEQ ID NO: 458482 - DNA, 573 bp, Homo sapiens
gcctttgaagctttgaaggaagacattgccatcatttattttaactgtgaaagtcctagatggcatcttcctccaatacagggctgtctacattaaaaaaaaatacattaaaaatgtcattaagtgtagcctccttcatcgatgatgttagctaaatcctctggatagaacttgttgcagctttaaacctcagaacttgtgacttccacttttgggttatgaagatgkcttctttccttaaagctcattaattaagctctgctagcttcacactttcctttcacagttccttacctctcttagcctccacagaattggacagggttagggccttgctctggattaggctttggcttaaggaaatgttttggctgggttgatcttctatccaggccacacaaactttatccatatcacaataaggctgtttcactttcttatcattcgtgtgttcactggagtagcacttttaatttccttcaagaattgtccttggcgttcacaatttggcaaactgcatggcacaagaggcctatctttaacttatcttagcttttgaggtgccttctttat

SEQ ID NO: 458483 - DNA, 552 bp, Homo sapiens
actagcggtagctcttccacacatatcaatgtatatctctaaaagctaattggctgttttttcccaagatggcagatcacaggatttcagcaggtctcagtcacttgcaaatagccacatagtgcacacaggtcaatwctctgagctttaattcaagaaagaaaacagcaatttaccagaatagccaaggacagcccagaccatggggagaagaatctgggcaagcagcccctgtgatggcatttggttgataaaagtgagtgaagcccctgtgtgtcagaggcatggtaagcctccctctgtgactcaccttcccacttgggatctgggcaacccaggctaagagagagcacatactgttatcccaagacccagagctaagttgaggagaggctgagacacagagagggaaagtggtatcgttatttgtccccctaaatctcatgttgtattgttatccctagtgttggaggtggggcctggtagcaggtgactggatcatgggggggtatttctcatgaatgatatagcgcccatccccttggtactgtt

SEQ ID NO: 458484 - DNA, 552 bp, Homo sapiens
actagcggtagctcttccacacatatcaatgtatatctctaaaagctaattggctgttttttcccaagatggcagatcacaggatttcagcaggtctcagtcacttgcaaatagccacatagtgcacacaggtcaattctctgagctttaattcaagaaagaaaacagcaatttaccagaatagccaaggacagcccagaccatggggagaagaatctgggcaagcagcccctgtgatggcatttggttgataaaagtgagtgaagcccctgtgtgtcagaggcatggtaagcctccctctgtgactcaccttcccacttgggatctgggcaacccaggctaagagagagcacatactgttatcccaagacccagagctaagttgaggagaggctgagacacagagagggaaagtggtatcgttatttgtccccctaaatctcatgttgtattgttatccctagtgttggaggtggggcctggtagcaggtgactggatcatggsggggtatttctcatgaatgatatagcgcccatccccttggtactgtt

SEQ ID NO: 458485 - DNA, 621 bp, Homo sapiens
tactgggtagtaaagcttgcagacagggacagctttgtgatttggagtmtgcatctgtcattgttagatgctccagacttctcccttgttcagctgggggagagtgccttaccagctccaaggagtgggagggaggtgaaccccactcccctgcagatctaactgctggcacaaagcacccctgagagagaagagcacagcccatcaaagccccccttgggttaagggaaacatgagcaaggcaccagaagctgaagggaggcatcaccaaaatctgagaaagagcttggagtaggagatcatatgtcacctcctgctcccttccctgggaacgcctgcaaacaccatagcagctcttccctttggggcctggggaaagcattctgaaagaagctgcttctcagacatctccagtggccccatccccacagaaggggagggtttttccatgattctttgcgccccacccccgctgaaggaaagtatgagcccagagattatctgcgaactcttactcttatctgccatctcctcaaatggagcctgaattacaacaccaaacaaaaataacatcagtataacaagcgacatctgagaaagccactatccgaacctatctgc

SEQ ID NO: 458486 - DNA, 621 bp, Homo sapiens
tactgggtagtaaagcttgcagacagggacagctttgtgatttggagtctgcatctgtcattgttagatgctccagacttctcccttgttcagctgggggagagtgccttaccagctccaaggagtgggagggaggtgaaccccactcccctgcagatctaactgctggcacaaagcacccctgagagagaagagcacagcccatcaaagccccccttgggttaagggaaacatgagcaaggcaccagaagctgaagggaggcatcaccaaaatctgagaaagagcttggagtagragatcatatgtcacctcctgctcccttccctgggaacgcctgcaaacaccatagcagctcttccctttggggcctggggaaagcattctgaaagaagctgcttctcagacatctccagtggccccatccccacagaaggggagggtttttccatgattctttgcgccccacccccgctgaaggaaagtatgagcccagagattatctgcgaactcttactcttatctgccatctcctcaaatggagcctgaattacaacaccaaacaaaaataacatcagtataacaagcgacatctgagaaagccactatccgaacctatctgc

SEQ ID NO: 458487 - DNA, 532 bp, Homo sapiens
agacatccaaatacaggaagttcaaagaacacctggtaaattcatcacaaaaagataatcacctaagcacgttatcatcagattatctaaagtgaagatgaaggaaagactaagagctgtgagacaaaaacaacaggtaacctataaaggaagacctatcagattaacagctaacttttcagcagaaatcttacaagccagaacagattagggttgtatcattaggctccttaaacaaaataattgtcagccaagtgttttgtatccagcaaaactaagcttcgtaaatgaaggagaggtaaagtcttcttcagacaaacaaataccamcaaaattcaccactaccaagccagcactgcaagaaatactaaaaggagttctaaatttgaaacaaaaccacaaaatacaccaaaacagaacctccttaaggcataaatatcacaaggcctataaaacaataacacaatgaaaaaaaaggtattagtgaacaactagcatgataatagaacagtaactcacgtctcaatactaa

SEQ ID NO: 458488 - DNA, 421 bp, Homo sapiens
ccctacctctcacgttatacaaaaaataactcatgacgagttaaagatttaaatgcaagacttcaaactacaacaatcctataagaaaacttagggaatacttttttttgacattgccctatgcagagaatttataactaagtcctcaatagcaaatgcaacaaaagcaaaaattgacarttgggaactaattaaactggagagattctacactgtaaaagaaaccatcaacagagtaaacagacaacgtacagaatgggaaaaaatattcacaaacagtgcacccaacaaaggactagtattcagaatatataaggaacctaaacaaatcaacaagcaaaaacaaaatgggcaagggacatgaagacacttctcaagacatacaagtaggcaataaacatactaaataatgctcaacatc

SEQ ID NO: 458489 - DNA, 603 bp, Homo sapiens
tgctggtagattggataaagaaaatatgcaatatatataccatggaacactatgcagccataaaaaagaaaaaatagcatcctttgcaccaacatagatgcagtggaggccactatccaaagtgaattaatgcaccaacagaaaaccaaataagctcagatatataaaactattattagccttgctgtaaaatctgcttctttattattccaagttacttctcgggtctaaatgttttttgttgtgacttgtacaactagattgtgagctcatcaaaaataatattttattgtgtattatatcttcagtgcctaagtcaggtcctgctgtaaaacacacatttgtgcacacatgcatgaacatgcacacacacacaaatacaaagtttctggaagttaggctrcataacagctattcaataaacttgtttttgataaatgagtaaatttgaaaaaaactctatgacttaagttatctttacatataatcacttggcatttttagtgctaagctaaatacaaaaaaattcttataaaaacaacagttttgtatatatatatttcttctgttcgtgactgattttttgcaaaattttatacaact

SEQ ID NO: 458490 - DNA, 603 bp, Homo sapiens
tgctggtagattggataaagaaaatatgcaatatatataccatggaacactatgcagccataaaaaagaaaaaatagcatcctttgcaccaacatagatgcagtggaggccactatccaaagtgaattaatgcaccaacagaaaaccaaataagctcagatatataaaactattattagccttgctgtaaaatctgcttctttattattccaagttacttctcgggtctaaatgttttttgttgtgacttgtacaactagattgtgagctcatcaaaaataatattttattgtgtattatatcttcagtgcctaagtcaggtcctgctgtaaaacacacatttgtgcacacatgcatgaacatgcacacacacacaaatacaaagtttctggaagttaggctacataacagctattcaataaacttgtttttgataaatgagtaaatttgaaaaaaactctatgacttaagttatctttacatataatcacttkgcatttttagtgctaagctaaatacaaaaaaattcttataaaaacaacagttttgtatatatatatttcttctgttcgtgactgattttttgcaaaattttatacaact

SEQ ID NO: 458491 - DNA, 383 bp, Homo sapiens
ttggagtgcaggctcaagttgcttcttcrtagagatgttacagagtcactttatgacccagaaggaagatccattcaattcttaccatttagccctggcaacagcttcatggcggccacatccctggtattggtagtagaagttttagcatgtactcacaaaggcagcagtatctttttgagcttgcttttattaaagaaattttagtttttaattgatgagaaatgaacttccagccacttctgtcagcttttggttctagaaacttcaaagtgcccccttcatcctctagttacagttaccatagaatattttgggtctattgcacttccaaggagctatgtgtctatattttaacaaactgagatttctattcttataat

SEQ ID NO: 458492 - DNA, 543 bp, Homo sapiens
tattgaagagtaacacttgtatagttaaaagagggaggaagaggattggaaaggaaaagcttccaaacaatratgcagacataataaactcctggtcaattctgggagctctggaacaaagatcaactactagagatgacttacatgggggcagaaatggtaagagaccattaaattattaaataattgccttcagattattgcatagtctctgttatctggaattatcctctttaaacaattaataattaggagagatgaacctttggttattgtaaaattacatatttgtgcaaacaatataaatattcaaaaattatcacaaggttattagtttagagagaaacatgccactatgctaagacattatctgggactttatagaaatattcaagaatatgaccttagctcaaggaaggataactctgaagactctaatatatagaagctgtagctaaatgttctctttgaagttttataacaagttgtttcttgaagagagatctaagtgaaatacctcaagagccactacagagaaagttt

SEQ ID NO: 458493 - DNA, 529 bp, Homo sapiens
caattgcctctcacagggcttttctgcaccatagatgatttgcttctttctatctcagcataatagatttaacaaagacactattacaaattgtgatttcttttacacatttggttgtgtttttttttattttagtgatttaagctgtgtactttctgattcttttttcttttattctcttagtcattcagcaagcatatattgaacatctgtgtgccaagaaccrtcccagatgttagaaagaaaattaagacacgatccctccctttgaggtgctcacgacatagaatggggcacgggtacatgaataaataaaatgcagttgaacaggtaactctgtagaggtaggaaagtctaggaaatggtcacttttacgtgggagtaggagagagggcaggcagaggtcgtaaatatggaagagattggggcgggtgacagcccaggcagagagttcagaagggtggggtgagaaagtccctgaactggagtatagtccaaggtagtggcagcaaagaggagcagtgagggg

SEQ ID NO: 458494 - DNA, 529 bp, Homo sapiens
caattgcctctcacagggcttttctgcaccatagatgatttgcttctttctatctcagcataatagatttaacaaagacactattacaaattgtgatttcttttacacatttggttgtgtttttttttattttagtgatttaagctgtgtactttctgattcttttttcttttattctcttagtcattcagcaagcatatattgaacatctgtgtgccaagaaccgtcccagatgttagaaagaaaattaagacacgatccctccctttgaggtgctcacgacatagaatggggcacgggtacatgaataaataaaatgcagttgaacaggtaactctgtagaggtaggaaagtctaggaaatggtcacttttacgtgggagtaggagagagggcaggcagaggtcgtaaatatggaagagattggggcgggtgacagcccaggcagagagtwcagaagggtggggtgagaaagtccctgaactggagtatagtccaaggtagtggcagcaaagaggagcagtgagggg

SEQ ID NO: 458495 - DNA, 562 bp, Homo sapiens
ggcttctgttgaatacaaagtactaattccctcccttgcatagcccaggttatatacgggctatgcaagggggaattgaaaaggcacatttgttatgtctgatgtttgaattagatacagctgcatgtttgggtttttttaattgtggtaaaattcacataacaatattaaccatcttaatagttgtgtacagttcagtgacattgaatgcattcataattctgtgtatctatcaccatcatccatctccagaactcttcatctagcaaaactgaaattctrtacccattacacagtaacttcccattcctccttccccactgtccctggcaaccaccattctattttctgtctctatagttttaactactctaagtgcctcatataagtggaatcatataatgtttgtcattttgagaatggcttgtttcacttagcataatgttctgaaggtccatccgtgtcgtatcctgtatcaaaatttcctctttagcttctcctttttaaggatgaataatattccgttgtatgtatatacacattttacttacatgttcatctg

SEQ ID NO: 458496 - DNA, 449 bp, Homo sapiens
tagttctgatgccatgcaatttggtgactttttgatctgtacctgtaaatggtattgccacaaatagcgtaaatgccatcataccagttttttctccaaatgtttattattttttaaccatttaaaagaattatttcatttatttgaaagccagttccaaaamcaaatgataatagctaacaattgttgtatgcttcctgtttgccatgtggatctaagtggtccatatgaattatcttaaaaatcttcataacaatcatcatttacctgaggaaactgagatatagagaaaccaataaatgtactaaaccccacatagttgggggtgggtatgaaggaattgggatttaaagacatgttgtctgtgacatctggcctcttggagaagggtgggatcccagaaccacttatgtctgttgttgattttgtccaagtgtgaaggtagcagt

SEQ ID NO: 458497 - DNA, 449 bp, Homo sapiens
tagttctgatgccatgcaatttggtgactttttgatctgtacctgtaaatggtattgccacaaatagcgtaaatgccatcataccagttttttctccaaatgtttattattttttaaccatttaaaagaattatttcatttatttgaaagccagttccaaaaacaaatgataatagctaacaattgttgtatgcttcctrtttgccatgtggatctaagtggtccatatgaattatcttaaaaatcttcataacaatcatcatttacctgaggaaactgagatatagagaaaccaataaatgtactaaaccccacatagttgggggtgggtatgaaggaattgggatttaaagacatgttgtctgtgacatctggcctcttggagaagggtgggatcccagaaccacttatgtctgttgttgattttgtccaagtgtgaaggtagcagt

SEQ ID NO: 458498 - DNA, 449 bp, Homo sapiens
tagttctgatgccatgcaatttggtgactttttgatctgtacctgtaaatggtattgccacaaatagcgtaaatgccatcataccagttttttctccaaatgtttattattttttaaccatttaaaagaattatttcatttatttgaaagccagttccaaaaacaaatgataatagctaacaattgttgtatgcttcctgtttgccatgtggatctaagtggtccatatgaattatcttaaaaatcttcataacaatcatcatttacctgaggaaactgagatatagagaaaycaataaatgtactaaaccccacatagttgggggtgggtatgaaggaattgggatttaaagacatgttgtctgtgacatctggcctcttggagaagggtgggatcccagaaccacttatgtctgttgttgattttgtccaagtgtgaaggtagcagt

SEQ ID NO: 458499 - DNA, 595 bp, Homo sapiens
cctgaggaaactgagatatagagaaaccaataaatgtactaaaccccacatagttgggggtgggtatgaaggaattgggatttaaagacatgttgtctgtgacatctggcctcttggagaagggtgggatcccagaaccacttatgtctgttgttgattttgtccaagtgtgaaggtagcagtacagatgaaatataaattatacttttttcacacacagccagtgtgttattttccccctcaggacccctaggttttattttttgcttgtttatttaagcaaatatctttaaaataatgactttgagcaccrtcctcaatgatcatactttcttgtcatcattagaagaaccagccttgacctcgccatctaccacatgcctccaccccagcacacagaattatgacctcacctcttctttaggtctccagctaaggctgtttataagtggcctgtctggatgtcttcaggtgacagatatggatatatatcttgtgctcagaccctggcagaaatgacagggagaaaatatgtgattcttaaatatttacgaagagatctcatcatggtcctctgaggatgttaagaacccaa

SEQ ID NO: 458500 - DNA, 623 bp, Homo sapiens
tgagactatagtgatgtttcatttaagtagctttggaaaacacagacatttggttgccatttgattctggttacttactctagtttgttatcgaacttctggttcagcaacattaaagggaattaacacttgaatttacatctcttctgatttgaagctcatggcttgaggttcaagggcacgcctcttattaaaatcatttaatgttctatacatttccgagaaagtaatcaaaatcagacactctcactcctagactcaacttcagtggttatttcttttataaaattaattgcttaatgggaattttaaatgaaaggcagtggtttagaagttgaggcmgggtggctcagagtctcttattgtgtaatgaatcacttgaaccctaccatgcaccttttcctgtgcattgctgatgaagcctggtatgtgccccaaagaacttttgaaattaaaaaaacacaggtcaaagcaatcagatgccatttttcacccatttagtttagcaaacattgttgagtttaataatttctgatgctggtgaggatttggggaaatcagagcccttgctgtgttagtggctcctcattggtagataatttatcaatatctttcaaaatgtt

SEQ ID NO: 458501 - DNA, 623 bp, Homo sapiens
aggcatccacagtgttcaccacagtatggattctcatggggttttatttggcttcttggccaaataagctgatgcaggtacttgttggataacactgtggggtgggtcagtagcagaggatgtgagtcaggctcccagttttagaaaaggaacctgcagtgcctgctgacaggctttcataccaggtatactccttgcatattatcaaagcatatccaaaaacccattcttgcttccagarcaaaaagaatcagagagcctctgctggtgaaggaagttctgttccagaaggctgtgtctgtcatggacccaggcagaggagaagaacaggagcctctgccagaggccaggccaagccaaagaatgggaatcagaggacagtcccctgattatttaaacacaaaacaggaaggaaggaaccctccaccgtcttggccaccattgtgaccactgcccattattttttcagatttatgtggtcaaataatgattttaaatagaaaatcttaaagctattatgttttattttggaactattccacatgttgaggaagaatgaaggaaggggaaacagaatcagacttctaaagagtggaaaggtgatatctgtatcatatgaccaa

SEQ ID NO: 458502 - DNA, 592 bp, Homo sapiens
tgaattaggtataacatgcttgcaaagaactcagatcagtgccatgcataggccctcgataggtttcagcaggtactatgggsccccttgcagtcggaggttagtgcagggtactgggtgcaaaatgacatgcagtggtcagaatgctcggtctagaaaaaaagactgcttattgctttccaactgacttcacatactttaataggcaaggacagtcctgggtcctgggagtgtctattataccttaaacattctcacatgcactttattttggaagggcggtgacttttatttaactctccacccaaaccttcacaaaaatagctttatgacatagaaacaagaatgttattgccctcacatatgaagccattactatacttcccttgaaacatgtaggttatttatttcacttcttaccttttcaattttttcatccagcattctgaagaattcttgttggctttcagagatgtgcatgctgaaaaacaaagggtagttaagtgcatattttagtgctttgctaaacctggtcccctcaaaggaaaaatgcagagtccccaaactttggggaagacatttatttattgca

SEQ ID NO: 458503 - DNA, 489 bp, Homo sapiens
tctttctcttaatataggtaactggatagataaccgtatgtatatgttgccccagaaatgttgccctagaaaatattccagggacctcataaaaaacggcatttttaggatttgacgttcattgtggaaactctctggttggagkttttagcattatattgccttgaatatagcaggagggccaaaaatatttcttaattaattgacagagtccccctatttaagttcatgtgattcatgaccccttgctgaagcagcagagtttgtcagcaggggtgatgtgcagggcctgagtcctcatctataaaaccagggctggtcactgatgtcccttctactgtctatgattgtcactaacttccattagctcctttatttaaataccacaacatgaaaactgcaacgtttggtcagtactcatacacatgcacatgagagggacaagagggggcatttttaaacaaaagtaactctgcaaatgtatctgca

SEQ ID NO: 458504 - DNA, 564 bp, Homo sapiens
agcctcatcttattttatgcatcagtacagtaaattgatcctatatgtcagcaagtaggaaaagtaaaactcttctcttggccctccagaaagatttcttaattgaattccaggaatccaatgttctgttcacagtttgaaatacatacacacatgtgtgtgtacacacacacacacacacacacaagcatgctgctgtggggaaaacagaattttctcctctgaaagcttcagcacatgccagtctgtgaagtgtgctgcttcagggtgtcaatgttaagtaagtattctttcaaacagaaaagagaaattctcctccattcaatctctctttataactctgagataagggaagcattttaaaatagcatttttcagacatcctggatgataaggtggtttggctgtgttatcagatatctgctgtccccaaaggcagataaagtggatgaaygtgatgagcagtaaggtgggctagggaggttgcggccatagcacaacattcacctgagggtgaaaacatcagccgcatcattacactgacattgtaaatggtaagtggat

SEQ ID NO: 458505 - DNA, 493 bp, Homo sapiens
tgtgggggattggttccatgacctccctgcagatagataacaaaatctgcagattctcaaatccctgatataaaatggtatagwatttgcataacccccacacatcctctcatatactctaaatcatctctagattacttataatacctaatgaagtgcctacacatcacttcattcacatgaattcaacatagtacttggtgtgcggcaagttcaaattttgttttttggaactttgtagaattattattttttgaatatttttgatccatgggtagttgaatccacagatgcagaatccatggatatggaaggccgactatataaggaaaacagaaactagaacttactttgctctgggttgatgaactaatcccggaacctctttattagttttaagtcttacatttgagctggcacttttttcctgaaacacataaacacagacatgtgaaagacaggattagaatccacaattaaacaagtgtatgag

SEQ ID NO: 458506 - DNA, 589 bp, Homo sapiens
ggatgtgtgttaaaatagagtttcccaggccccactcaagacatctcaagtaggagtctgtggaagtgaagcccaggaatctgcattttaaacaagagtcttaggttattcttcactcaaaaaagtttgagcacgtctatttcagcagaaagatcctttacacttagtatttccccatttggctctctacagagccagctttcaacctaagccttggggctctgtggagctatctcagggtcgacagggagacccaccagaccagcaaactctttaactttttttattattaatatttaggggctccatcagttgggaaaaacatccatttctcaagaatgtttgcactactactgtcaggtagtgacagatttatttaaacaacaaatcaaacaattttttcctttgcttgaagtaattttatttctttatgaatcgaatatacttgtcagtgtctagagtaaaccgatcattctcttcttagtttctctgatgctgaagacagtcaaactcactatacttatgctgttgtcgcgagcttcccaatcccttattccctttgrtatctcccaaagggacagtgaaaata

SEQ ID NO: 458507 - DNA, 602 bp, Homo sapiens
ttgggtgagtgaaggcacacattgtcaaccgggctgggggcacagaaagaggacctggtttagaaaaaaaaaaaaaaaagtagtgcatttggttttgaacatgttgtgctaaggayacctaccagaatttgttttatgaacagttagttggaaatacagattgaaagaggagtcagggccgggcttggtggctcacacctgtaatcccagaactttgggaggccgaggtggtcgaatcatgaggtcaggagttcaagaccagcctggccaacatggtgaaaccccatcactactaaaaatacaaaaaattagctgggcatagtggcgggcgcctgtaatcccagctacttgggaggctgcggcaggagaattgcctgaacctgggaggcagaggttgcagtgagccaagatcgcgccactgtactccagcccaggcgacagagtgagactctgtctcaaaaaaaaaagtaaagaaagaggagtcagggctagaagtacaaattcttgagccatttgggatcatgtctgaagctgtgggaatgaagtttcagggaacactaatacatatggcatattgagaagaaaccagagtagcaacgatt

SEQ ID NO: 458508 - DNA, 565 bp, Homo sapiens
acttgcttctggtctgctaccaagaagagttaatcatctccccaaatagtgcagggaatgagttttaaccttgaatatacaggctttgcgctcacagatactggtcattaatgtttatgcatgaaaggtgacagtttttgtttggtatacagagcattgaaaaggaaaaaggaactacyaatttctacaggtttcattgtcttgagatcaaatattcatagcaactcagaaatctgtctagagaaatgtagctattgctaagctaatgcttagtaaactcaaatagaccccattttattactgatatatatgaattatattgtttcaaatgcatgcttttatcaataattcttcaaaggaaaaatttttaattttacagaatctttttttttaatctatcaagctttttctaaaccatcatacctatgttgctcaaaaattgttgagacccggggtcaaggagacattcacattggctttcaacggaaaatgtgcttctctacactaaaatggccacttaagcaagactgtggaaatgatttatctcacaatgtttaaagttgga

SEQ ID NO: 458509 - DNA, 615 bp, Homo sapiens
caggggagaaatgatgaggatattactaaggcaacggcaatgaggatgggaagagatggtaacaatggattartgatgtagaaggtacaagcagcaggatctggtgatccactggacgtggtggggggtggcagggagaagatctactgcaagagaggaagggtcacagctggctcctaggattctggctagggtttctgggtgggtggtggtggtaatcaactgagatagagaatgtaggagcgggagcaggtttttgaagaaagacactgagctcagtttctctttgaagtgttggtgctttgtcacttagtatctggcatatgggattgaagcttaggaaaacggttcttgctggagatataaatttgaactcatcagctatgggtggcaattgaagccatatgcatcagagtactttggaccgcaagtaattgcagaaatacaacccaaaaaacagaagagatttatcagctcagaaaaattaaagggcaccagaggtaaggtggtggtcagtcttatttcacttggggctccagccttgcttttctgatgtcctctggcctctgcatgccttctctgtgttgccttctcctctgactgggggctgatggt

SEQ ID NO: 458510 - DNA, 571 bp, Homo sapiens
gtaacccacatttcccaatgccctctgggagcacgatttttctcctttccttttcctgaaatgcaatctgaaacaaaattctaaaataaaaatatttttttctgctcaaaactgtgcacatgcrcattctctctctctctctctctctagaatagagtcaataggagataaaaccttcagaattcaaatgtcaccttaaatacagtgattaaatagcattctctaagcagaattactttaaaagggagaaagatgaaacatttttattttctttatgttagatctgccatcaaaagtaattgatagacgtgtgctgttttttttttagcatatcattgttacttccctcaaaactgttatgttactgcttgtactcattttattctcctttcaggactaaatctgctgaaagaaaaagactacatcttgtttatctttgcattcctcatgggtccttgtattgttttttgcacattgttctatataaggttttggcacagcgcttactcttcttaaaaattggtggaataacagggcatgaaatgactttcatccaatatttttgcaactt

SEQ ID NO: 458511 - DNA, 571 bp, Homo sapiens
gtaacccacatttcccaatgccctctgggagcacgatttttctcctttccttttcctgaaatgcaatctgaaacaaaattctaaaataaaaatatttttttctgctcaaaactgtgcacatgcayattctctctctctctctctctctagaatagagtcaataggagataaaaccttcagaattcaaatgtcaccttaaatacagtgattaaatagcattctctaagcagaattactttaaaagggagaaagatgaaacatttttattttctttatgttagatctgccatcaaaagtaattgatagacgtgtgctgttttttttttagcatatcattgttacttccctcaaaactgttatgttactgcttgtactcattttattctcctttcaggactaaatctgctgaaagaaaaagactacatcttgtttatctttgcattcctcatgggtccttgtattgttttttgcacattgttctatataaggttttggcacagcgcttactcttcttaaaaattggtggaataacagggcatgaaatgactttcatccaatatttttgcaactt

SEQ ID NO: 458512 - DNA, 506 bp, Homo sapiens
tgctcaaaactgtgcacatgcacattctctctctctctctctctctagaatagagtcaataggagataaaaccttcagaattcaaatgtcaccttaaatacagtgattaaatagcattctctaagcagaattactttaaaagggagaaagatgaaacatttttattttctttatgttagatctgccatcaaaagtaattgatagacgtgtgctgttttttttttagcatatcattgttacttccctcaaaactgttatgttactgcttgtactcattttattctcctttcaggactaaatctgctgaaagaaaaagactacatcttgtttatctttgcattcctcatgggtccttgtattgttttttgcacattgttctatataaggttttggcacagcgcttactcttcttaaaaattggtggaataacagggcatgaaatgactttcatccaatatttttgcaacktttaccttcactacttaaaagaaaaaagtcaaatagca

SEQ ID NO: 458513 - DNA, 550 bp, Homo sapiens
gaggagtacaggacagtcttgtagtgatggaatagtgttgtatcttgattctaatggtggttgaaaagctacacaagggataaatttgcataaaactatatgtacacacacacatatatgtgcaaaagtaactgcatacaaatcttggtaaaatccaaatcagctctggatcgtacaatgtctgttttctggtttcgatattgtactatagttacacaagatggtagaaaatgtactgtagttgtctaaccatcattaccattgtgtgaaactgggtgaagggtacctgaaatctctctgtacatttcttttgtaatatcctgtgaatytatgattatttcaaactaaaaaggcaaaaaaataacttgaggtcccttctcgtttgtagaaaggacctgtagacgaaactggttgggtcattaagaatgttttgtccctgcctattgtcaacaagaaagaagatattgtgggagtggctacattttacaacaggaaggatggaaaacctttcgatgagcatgatgaatacattaccgaggcaagtgcaata

SEQ ID NO: 458514 - DNA, 633 bp, Homo sapiens
tgggggtaacaagatcagttgagttagtttgttgttgtgggttgctggtccaggatgtggcagctgattcatcaaaatacaaagtctagctgggtgcaatggctcatgcctgtaatcccagcactttgggaggtcaagatgggaggatcatttgagcccaggagttcaagaccaacctgggcaacatagcaagtccccatctctactttttattttaagaaagcaaaatacaacgtctaaaagatacttcaatcaccagtcttcaattttacaatagttatgttatatataggagcaactgggaaggttacaaatcttgtgatctttggctgcatgactctcaagccataactctaacactgtggctaatttgttagttttacaaaggtgatttctgttcctaagcaaggaggaggttagtttcagaaaaggactgtaattatctttgtttcaaagttaaactataaattaaatatcycccatagttagcttgtcctacacccaggaatgagcaaagacagcttgtgaggttagaagcaagatggagtcagccatgtcaaatttctctcactgtccttgtttttgcaaagtcatttttaaggccttctttgagccaatcccacctctgtcctt

SEQ ID NO: 458515 - DNA, 559 bp, Homo sapiens
atcagcatcactatccatcatcatcatctctggaggagacagtttgatgggaggcagagaaagcacagtatggggaagaagagggaaagcccacaagacatagcagattatgttgctgatgataataaaaataataattaccatttattaaatatattttgtgacagataatagacatgtgctttttataacattatttccatttaattctcataatattataaaatatgtattattatcttcattctttaatggtagaataaagctcagagaagttaaacacattattcaaggacaaacaactatggaatggtttaatgtgtacatgctttccgcttttcaacatttattttctttgacctgacttcaatgttgatgcttttttcatttgtctatgctttataaaaaattttactttttaaaaatcaacaaataatacttgtacatatttatggggtatatagtgatgttttgatacatataatgtatagtaawcagatcagggtaattagcctattcaccacctcaaacattgatatttcttctgaaatgcagcctg

SEQ ID NO: 458516 - DNA, 500 bp, Homo sapiens
acccctgagggcaccccgcagccggcgggcggcagactccgcttcctcaacggctgcgtgcccctctcgcatcaggtggccgggcacatgtacgggaaggacaaagtgggtaagtgggggtggcataggtctcgccgctccccttccgcctgtgcgagccccctgtcarcggaggcagcctagcgctctcgagcctgcctggacgcccccctggtgtgcacgccaaatccctggcctcttccgctgtcccccgaagcctcgccactcgagcagaaggggctcggaaagtgggacaattcctagggtgtgggtcgtcaggcttgcagcacgggtggcagggagaggcgtgtctggtctcacccaccccccagggaggttgggtgttgattggagacggcgttgttagtgaaaataaggaacttcatttttactggacggggaagtaaattctcccttgagcacaaggtctgtttattataggcgagtagctattgcaaaag

SEQ ID NO: 458517 - DNA, 500 bp, Homo sapiens
acccctgagggcaccccgcagccggcgggcggcagactccgcttcctcaacggctgcgtgcccctctcgcatcaggtggccgggcacatgtacgggaaggacaaagtgggtaagtgggggtggcataggtctcgccgctccccttccgcctgtgcgagccccctgtcaacggaggcagcctagcgctctcgrgcctgcctggacgcccccctggtgtgcacgccaaatccctggcctcttccgctgtcccccgaagcctcgccactcgagcagaaggggctcggaaagtgggacaattcctagggtgtgggtcgtcaggcttgcagcacgggtggcagggagaggcgtgtctggtctcacccaccccccagggaggttgggtgttgattggagacggcgttgttagtgaaaataaggaacttcatttttactggacggggaagtaaattctcccttgagcacaaggtctgtttattataggcgagtagctattgcaaaag

SEQ ID NO: 458518 - DNA, 524 bp, Homo sapiens
gaaactcggattcctggtgggaaattcacacgcatattgtaccagaatgatacacaaaatgttcagctattcttgttcattttataaggytgtatcatggccactgtaatacattttctgagttcacaagtttaaagcctatctcagtttaggaactctaattcatctagtttacccgtagtggttccctgggccatgattactggggtaatctgatggatgagtatgtgagtattgtggatctttgacccggaagagccactagagacaatttagtttatgccggtaaaacgattcgggtttaggttgctaatactgacatttttagacgaggtgactaaggccaaccctggttaagaatgacgtgcctgaagtcacgttacaatatgttaagaattgtgaaaccaaaagttcttcctttgagtactgtattttttcaccatgtattgtgtttgctgaaacaactcaaggcttttagaaaatggataagtattaatttgagtatatgctatttctcaaagcga

SEQ ID NO: 458519 - DNA, 571 bp, Homo sapiens
gtttgtaaataattaatttttactaaagacacaaacatgtggaaggaatcagaaaggataaatcacaaaccatcaaagaaaactgcaattcttgtgtaaaatagtgttcttgaaccaaaatgactttacagggtccaggtagaagtagacaaggtttgttgcacaatagtggtttacatttattcttttaacaaagacaccctctggatttagactactctgcagttccacacacacacamaaaaaaatgttctttgagttttctagaaaaggcatgaccttctaggtctagattttactcttccacttttgatagaaagatacttatgacataattgcattttcctttttattctgctataagaaaagcaaacttataataaatggaaacttcataagacagatgacaacatgaaggctaaataaagcacatctgtggaacaattttggcacatataatatcaacctgcaactgatacaattaacagaaaaaatatacaagatatgaaactttctgtctggcttacttcaaaactaagctcaaattaattctcaggccataatgtgctat

SEQ ID NO: 458520 - DNA, 571 bp, Homo sapiens
gtttgtaaataattaatttttactaaagacacaaacatgtggaaggaatcagaaaggataaatcacaaaccatcaaagaaaactgcaattcttgtgtaaaatagtgttcttgaaccaaaatgactttacagggtccaggtagaagtagacaaggtttgttgcacaatagtggtttacatttattcttttaacaaagacaccctctggatttagactactctgcagttccacacacacacaaaaaaaaatgttctttgagttttctagaaaaggcatgaccttctaggtctagattttactcttccacttttgatagaaagatacttatgacataattgcattttcctttttattctgctataagaaaagcaaamttataataaatggaaacttcataagacagatgacaacatgaaggctaaataaagcacatctgtggaacaattttggcacatataatatcaacctgcaactgatacaattaacagaaaaaatatacaagatatgaaactttctgtctggcttacttcaaaactaagctcaaattaattctcaggccataatgtgctat

SEQ ID NO: 458521 - DNA, 589 bp, Homo sapiens
  misc_feature (1)...(589): n = A,T,C or G
gtcgggagttcaagaccatcctggccaatatggtgaaaccctgtctttactaaaaatacaaaaattagctgggcatagtggtgcatgcctgtggtctcagctactcatgaggctgaggcaggaaaatcgcttgaagccaggaggcagaggttgcagtgagctgagatcacggcactgcactgcagcctgggtgacagagggagactctgtctaaaaaaaaaaaaaatgaagttgtagaattcatactaccacattccaagattcactctaaagctaccaaaaacaaagacactgtggtattgrgagataggtacatagataaatggaacagaaaagaaagttcagaagtagacacaagcaaatatgatcaatttgttttttaacagctttattacataactcccaataaattgcacatatttaaaatgtacgatctgataattttgatataggcatatacccttgaaaccatcagganaatgaacatattgatcaattgtaaaaatttccttatgcccattggtaatcctgcttgcaggccctcctcatcatccctccttcctgtctccattcccaagcaaaaacttac

SEQ ID NO: 458522 - DNA, 560 bp, Homo sapiens
tttgttcatttgcatcagtatgaagttagaaaagtcccacccaaagacagacagacagacagacagacagacatacttttatctagtagcacttggggaaaagaatacagttggctttatgtatctgcaggttacttatttgcagatccaaccaatcagagatggaaaatattcaggaaaaatctccaacaaaaataacaatacaacaattagaaataatacaaattttaaaatacagtataacaactatttatatagttttrcattgtattatatttaatacataatctagagatgatttaaagcatacagtaagatatgggtaggttgtatgcaaatgccacaccattttatatcatagacttgagcctccacagattttggaatccatctggaaccaatcctctacagataccaaaggatgactgaattagataaaattcagcaaatatgtcactaataccaccctctctttcccactataccaggtagtgtcactgtgaggtggaattccctccttctccccgaaaggagaaaaaccactgaactcatagggttcg

SEQ ID NO: 458523 - DNA, 489 bp, Homo sapiens
attttggaatttttgaaatccaatactcagacatttctcttccatgggattacaaattagctactaatatttctggtttataatcgaaagtyaacttcaaaatatccacaagcttatccaaaatatttactagataaattttaaaaactttagttttaaaaacaaatgatatcctttcttcaaatgagagtttacttggagtcccagtatgtttagcagataaatacttagtttatcattggatggtctactcactcccctacttgctgaagataactgtagaaagtaaagactgtggagaaatacacaaaacagaaagaatagttatctctgagtactggaaaataagtgaggttttccttttggttttattttttcgctggagtgtgtatatataattgaaaaaaactataataaattgtatttagaaattgaatataaaattttaaaatattgcaaaaatgcctaccaaggtccttgcaaaacagc

SEQ ID NO: 458524 - DNA, 489 bp, Homo sapiens
attttggaatttttgaaatccaatactcagacatttctcttccatgggattacaaattagctactaatatttctggtttataatcgaaagtcaacttcaaaatatccacaagcttatccaaaatatttactagataaattttaaaaactttagttttaaaaacaaatgatatcctttcttcaaatgagagtttacttggagtcccagtatgtttagcagataaatacttagtttatcattggatggtctactcactcccctacttgctgaarataactgtagaaagtaaagactgtggagaaatacacaaaacagaaagaatagttatctctgagtactggaaaataagtgaggttttccttttggttttattttttcgctggagtgtgtatatataattgaaaaaaactataataaattgtatttagaaattgaatataaaattttaaaatattgcaaaaatgcctaccaaggtccttgcaaaacagc

SEQ ID NO: 458525 - DNA, 489 bp, Homo sapiens
attttggaatttttgaaatccaatactcagacatttctcttccatgggattacaaattagctactaatatttctggtttataatcgaaagtcaacttcaaaatatccacaagcttatccaaaatatttactagataaattttaaaaactttagttttaaaaacaaatgatatcctttcttcaaatgagagtttacttggagtcccagtatgtttagcagataaatacttagtttatcattggatggtctactcactcccctacttgctgaagataactgtagaaagtaaagactgtggagaaatacacaaaacagaaagaatagttatctctgagtactggaaaataagtgaggttttccttttggttttattttttcgctggagtgtgtatatataattgaaaaaaactataataarttgtatttagaaattgaatataaaattttaaaatattgcaaaaatgcctaccaaggtccttgcaaaacagc

SEQ ID NO: 458526 - DNA, 489 bp, Homo sapiens
attttggaatttttgaaatccaatactcagacatttctcttccatgggattacaaattagctactaatatttctggtttataatcgaaagtcaacttcaaaatatccacaagcttatccaaaatatttactagataaattttaaaaactttagttttaaaaacaaatgatatcctttcttcaaatgagagtttacttggagtcccagtatgtttagcagataaatacttagtttatcattggatggtctactcactcccctacttgctgaagataactgtagaaagtaaagactgtggagaaatacacaaaacagaaagaatagttatctctgagtactggaaaataagtgaggttttccttttggttttattttttcgctggagtgtgtatatataattgaaaaaaactataataaattgtatttagaaattsaatataaaattttaaaatattgcaaaaatgcctaccaaggtccttgcaaaacagc

SEQ ID NO: 458527 - DNA, 452 bp, Homo sapiens
catttttaaaatgtgagaaaggtactgagaaaatatttgacaaggcaatggctgaaatgttctaaaagtattaagaaacataaaaacgtacagccaagatgctcagagaatccgaaacagactgaaaaatatcaaacccctagacactttttraagacacagatgagttaaaagtgaaagaatggaaaagatgcatcatgcaattattgctcataagaacgtttgatatagtaatattatatatcagactacatagtattagagacagcagactacaagaaacagaacattaaacacaaagagagacatatcataacaataaaaaggtcagttcattaagatgatacaaaaatcctaaataagtgtgtactaaattatttggtggttcaaaatacatgaagcaaaaactgacagaactgaaaggacagacaaatccataaaggacaaatcca

SEQ ID NO: 458528 - DNA, 452 bp, Homo sapiens
catttttaaaatgtgagaaaggtactgagaaaatatttgacaaggcaatggctgaaatgttctaaaagtattaagaaacataaaaacgtacagccaagatgctcagagaatccgaaacagactgaaaaatatcaaacccctagacactttttaaagacacagatgagttaaaagtgaaagaatggaaaagatgcatcatgcaattattgctcataagaacgtttgatatagtaatattatatatcagactacatagtattagagacagcagactacaagaaacagaacattaaacacaaagagagacatatcataacaataaaaaggtcagttcattaagatgatayaaaaatcctaaataagtgtgtactaaattatttggtggttcaaaatacatgaagcaaaaactgacagaactgaaaggacagacaaatccataaaggacaaatcca

SEQ ID NO: 458529 - DNA, 559 bp, Homo sapiens
cttggccttcctcacactataataaattgaggcaccccttcagtaaatagggatgaatatcatgggttttatttgatattttgttagactatccaaatgtgtttttctttactttactttcaggtccttcttatgtttcatatggttggaattaccaaataactgctaaattatttcttattcgccttcagaaataaaaccrtaagttaagcctagtgaagagtggtttggtgttttctttctgttctctaatcttacatttttttaagtgaaaataagaatttgagattctcatttctatctttccctctgagttaaaaaataaacatcaaaacctgctttagagatgcagaattcttatgaaagaatgcgataccatgtctttcacaacttgactgcaagtgcttttgaaaaaggtaaatagaaaaacagggcatgatctgagcattgagatttttactgatttacaggctgtcattaatagaaataaatctgattattaattcaccctgaaaaatgctattagcaaattctttccctacaagagagtttaattcaa

SEQ ID NO: 458530 - DNA, 420 bp, Homo sapiens
ccaaaaagaaaaggaaactcaagtggcatatttaattgaaattctaaatatgtttatttgagccatattctagctagcatgattttataaaatcccaacacatcaaaatttaagattttgacgtataaatttggaatgagtcttcatggcataggggtaggaccagtgttggtatatatatgrtgactttataaaaagtctccctctttgaatggacagattataaaaaggtgccctttcctgctctaggcttgttgcctgatttcagccctaactttacccattggctagatgccctggtactatctatacagttgtatacagtgcatttgaatcagcaaatattttagttgcttttagacaagagagacttataaaaaattaccaagtaggaaattcatatatggccactgttaacac

SEQ ID NO: 458531 - DNA, 682 bp, Homo sapiens
taataaatagatttgaatgcacgatttttaaaggatacaaaggtaactgccargaagtcaatattttgtcttgttctgcccccaaacctgattaccttttttttttcatatttgtttacatcatgtattctaaatttttgaacatggcttttaggaaaatgtactgaatagctcttattctgacaagattggctataaagtagtctacctaatcagcacttctgtggctaaacttgtggtataaaaaccaaccaaccaacaaaactgctatccaagtcagcttgttttaaaccagtgtgcacatggtgtatcatacataactggggagatatgtggtacttggttatttcaaatctggccagtgctctgggagaaagctgctataaagacaactaaagtttctagtgtttgtcagcctggaagtcctggtgattgcccttggggcaatgtggggacaacaatcatggaattctaagtcagacttaaaatcagatccctgatctgcccctcattatttgagatcttgaagaaattattctttctaatggttaattttatgttgcaatttgacagggctacaaggtgcccagatatttgttcagacattcttctgggtgtttctgtgagtggttttggatgagattaacatttaaatcagtagacaaagtaaagcagattaccg

SEQ ID NO: 458532 - DNA, 625 bp, Homo sapiens
gttgttgtggggatggaatgaagggcattatgtaaagcaattagcaccttgctagaagtagtaagtgctcaatagaaggtagctattattataattgctttatattagattccgtttcagtaggtcaggggtggaggctgagaaccagtaccttgggtgatcctgaagcaacccatttctgctctaggcattattccctatcttttttaatattaataaagtaaaaaagattcatagactcaaatatgatagtggttatgcttttcacatccagtgattaggaaacacataatggcaaagttgccctgaatgtattaatgctttgaaataaatttgtatcttttagttcagcataatagttatgtttgaaaatagtagtaggtatatgtcacggatattgtatatttagcccaaagacaatgcccatttggtatttaaaatctattttcataatgtatggagagattccttttggaccttgtgcctgccagrtcagaagtcagactacttcattcccaaagaattctgtggaacatgacagatcctttgcaaaaaaaaaaaaaatttggtataaagttaatagatatttacccaagagaaatgaaaacatatgtcaaaagagaaa

SEQ ID NO: 458533 - DNA, 591 bp, Homo sapiens
attttatttgtaaaatatgaaatgtatataaatatataaaatacatagatttaaaacctatattaaatattgcatatttaatatatttatataatataattatgtaaattatataaatataatttaatatatgttaaatatataaaaatacatattttatatataaactatgtaatatatattaaatatatctatgttttttagctagatttcttcattctgtgatttcaatattaatctatattgatacatatagatcaaattcattcatttttaattgctatatggtattatattgcatttatatgctattamtatataatatatagtatttaagttaccacagtttatttatagacatatatttggactgtacctaaattttcctaatacaagaccatagtgaacagccaaatttgtatctttttgtgcatatatgcaagcatttctctaaggttataaacctaaaagtaaattcttgagccaaaagtatgtgaatcttcaactttagtattgacaatttactgttcaaatttgttgacccatagcattttccttcttcttttcttttctttttttttggagacgaag

SEQ ID NO: 458534 - DNA, 645 bp, Homo sapiens
tttttaaaatatcactgtttttaatactactaattttgaacatctttactcatgatatttactttttggtgattatccaggatagctctttgaaaatgcagaaagtcctgttgtttaggaagaatgtactagaaatagagtctcataatacgtggccaatcataaatattttacaggcctgccaatattttgggatttattgtagagtcctctgcccttgttttaaactttgcacacccatgacatgttgggtttggaggaggatttgctttgtttgggggaaacactccagtgggctatttttgaattatgtttgacatttagacttggaaatactgtatttccaagatgcttatccctcaataagctcgcaatgcttatgtaaaagtatatcaagagaaaattttaatcacctgttgatgtgatttttttcataaaggacttccttaatgtggacttctcttcrtgtagattaagtggtgggtacaaaaataaacacaagatgggggaaagtattcaaggttcaagaactcagacttatcccttaattattttgctcttattctcatttctaagatttatgaacctaggaaagacacacacacgcacacacaaaatccctagagactctgtgttttggtttag

SEQ ID NO: 458535 - DNA, 607 bp, Homo sapiens
gtcatttaagaaccctggtataataacttgtttactcagtcatctccctaaagcaaatcagccagttgaaacacttcattcatgttagcagaaccttaaatatgaacaaaggctaagggatcgctagagatttgagataacatgaacacaagtggaaaacaaagaaatctctggtcctcgaggaaatacatatagtgcaaagaacaagagagaaacaatgtgtagcaacttggatatagctggaggccattattctaaatgaagtgactcaggaatggaaaaccaaatgtgataygttctcacttataagtgggtgctaagctatgaagatgtaaagttgtaagaatgatgtaatggactttggggactcgaaggggaaggttggaagggaggtgggggataaaatactacatattgggtatagtgtacactgcttgggtgatgggtgcactgaaatcctagaaatctgaagaacttactcatctaactaaaaatcaccagtacccagaaaaacttttcaaaaacaaatgacaaaggacttgtatagtaatttcactgaagagatatacaatactatacaaagagatatatattactatacaaagag

SEQ ID NO: 458536 - DNA, 607 bp, Homo sapiens
gtcatttaagaaccctggtataataacttgtttactcagtcatctccctaaagcaaatcagccagttgaaacacttcattcatgttagcagaaccttaaatatgaacaaaggctaagggatcgctagagatttgagataacatgaacacaagtggaaaacaaagaaatctctggtcctcgaggaaatacatatagtgcaaagaacaagagagaaacaatgtgtagcaacttggatatagctggaggccattattctaaatgaagtgactcaggaatggaaaaccaaatgtgatacgttctcacttataagtgggtgctaagctatgaagatgtaaagttgtaagaatgatgtaatggactttggggactcgaaggggaaggttggaagggaggtgggggataaaatactacatattgggtatagtgtacactgctygggtgatgggtgcactgaaatcctagaaatctgaagaacttactcatctaactaaaaatcaccagtacccagaaaaacttttcaaaaacaaatgacaaaggacttgtatagtaatttcactgaagagatatacaatactatacaaagagatatatattactatacaaagag

SEQ ID NO: 458537 - DNA, 575 bp, Homo sapiens
caaacttggtgtctaactctaaatagttaattgcatcacaggaacagatgtaagatttcaaatgttacaagatctacaaaagagtcagatgatggcaggattatatgttcttgaggtttaaaatagtgataacccagacttaggttgaaacaaacagcaacccctgtagcttctgtagaggaagtgaggcctgctttgatgggaattctcatttggacatgcaggaaacatgatgagtatttctcctgggcctctacctgtaatagtagcaaccctcagtggaaaaaaaggacacttttgtggaaggggtaacttttcttcctttttgcttctttcctcagggacattycactttcccaggcttttgtatgacctggtatggtttttgtgattatgacaggattttctgttcttatgcactgtgtgtaagttccctgtaagtctgaaccaagcctataatctttcagttttctgtaaatcttgaagcaggcccctccaaggctttgtgtttccaagtattggaattgtgatttgattgggaagatgtatgaatcagggcacatggctgcaagtga

SEQ ID NO: 458538 - DNA, 564 bp, Homo sapiens
ggtaagttggtcagggcaggtatgctggttccatggaatcaaaggctgaagtttgttctgtctcgttgttctgccaaacrtggcttcaattcccagggtcacttcctggggcgttctacctgcattgttggagctctgcttacaaaaaccatagtccaggaaggaggaaagggagtgaagattaaaagaaggagtcctctcccttttaaggcagtttcctggaaatgccacacaacatggttacttagatgtaatatttaggaaactggtcagtatgcttaataaaaagagctcaaaatacagtgccacctaggtaggactttgctccatgaagcaatccaaagagctaagctagtaaggtggttctagcaacatggtggttacaaggttgctgctgcttttgccacttgccactttcagtcaataaaaaggaaaggaaggaataggaacaaagcaaaatttttaggaggctgatctatctatataatcttataattagcaataatatatgtagtcatattgttagcaatctttgctccacatatcagtggccagaatttagtc

SEQ ID NO: 458539 - DNA, 575 bp, Homo sapiens
tatgacaatcccacagataacatcatgcataatggttaaaagctacaagctttttctctaagatcagaaacaagatatggatgcccactctcaccacatctgtccaatayagcactggaagttctagacagagcaatgaggcaggaaacagaaataagttatttaactaagaaaagaaaaagtagaactgtctctgtttgcagatgatatgtgttaaagcaaaataagcctgaggccattagcctggaattatttctgtacctggcacgattatgcaagcaatccaaaatttaacttagaggcattccttgtatctgattaattttgaatcaagtttcagccaatcataaatggccaagtagctgattggttatataatttggagcctccagttaaaccatatcgaaataaggtaaatacctagctgtggccaatctagtttctttgttttcatgttcaaccaataaaagctcactgctcacacttctagagcaaggcccatgatctcctttcagttttggtgcttcccacttcatgaactgttctttgccaaataaatgttgttaaattttatt

SEQ ID NO: 458540 - DNA, 607 bp, Homo sapiens
ggtgaaacgcccagcaaatatcctgtaattcctctgcactgcacaagccagaacatgattctaattcttccatgctagaattgacaacacaatctactgagagaggttctttagcatttaaaaaatatgagaataaagatttatttggcaaaaattttcttattattaaaaaaattttagataattttttacagccctctgtgcagaagacacgtatctcataaaggaaagacatttatatatacacrcgccttgcattttaagcctcaaatgattcttctaaaaatacaaagtataaactaggtatttggcacgaaaaatttaaaagaagaatgtacaatgtctctttttttaaaataaaatatttatttcaacttagcaggaaactaatgctttatttgttattaaattcagttcctttttcacctccacattttctcctagaccactggaatttcctctaactctttgattgctcgcttgtttttatgtgttttgccctgcttattttcctttttctggctagtttcagcgtctagtgaaactacacaactgtagtccagtagttccctgaacttcagctttaatgaacaagaaagtaaaaata

SEQ ID NO: 458541 - DNA, 607 bp, Homo sapiens
ggtgaaacgcccagcaaatatcctgtaattcctctgcactgcacaagccagaacatgattctaattcttccatgctagaattgacaacacaatctactgagagaggttctttagcatttaaaaaatatgagaataaagatttatttggcaaaaattttcttattattaaaaaaattttagataattttttacagccctctgtgcagaagacacgtatctcataaaggaaagacatttatatatacacgcgccttgcattttaagcctcaaatgattcttctaaaaatacaaagtataaactaggtatttggcacgaaaaatttaaaagaagaatgtacaatgtctctttttttaaaataaaatatttatttcaacttwgcaggaaactaatgctttatttgttattaaattcagttcctttttcacctccacattttctcctagaccactggaatttcctctaactctttgattgctcgcttgtttttatgtgttttgccctgcttattttcctttttctggctagtttcagcgtctagtgaaactacacaactgtagtccagtagttccctgaacttcagctttaatgaacaagaaagtaaaaata

SEQ ID NO: 458542 - DNA, 528 bp, Homo sapiens
tggcccaatccagaggatgctatttgtatagaagaccaggtgctcctggaggtgtatggcatcacgactgggaattattacagtaaaaaggggtgactgaaaaaaattctactctctttcacccaggaaattttgataagtttcatcaatcctgtggtgaataactataccagaaggtacattagaatgaggaaaacagctttttgtgctgacgcaggtggaggaaaggtggcctggtgcagtgcagaggtgaggagtggactgtgcgggccggacttcctggcacagcatccatgagtgtgggcacctgcttcatggctggacggtcacttacctcttctgtgaaacagaggtgattatagaaacagacrgctgtgcctgttgatagggccactgagaacaaactaagatgatacccatgaggcactcagaacattgctgagcccctggtgggtgtgcagtcaatgttagctatttaatgattttttttaacaagtagatggagggctatttcttttttgtattaac

SEQ ID NO: 458543 - DNA, 574 bp, Homo sapiens
acaagcattggtgaccttgagtcaaaaacaaattcagaagagttagactccaaatttaacagttcttagtaattactttgttaatttatttcacttatgtgtatgcataagaccaccatatgatttttaaaagtttctaattaattctaaaagatcctttttaaaaagttcaaagtaagtgttatgtcactgtttaattacacattatgttcattcttagtgatacctaaaatgatgctgcatcttaaaatcaatgatatcttagatttgatgaaatacaatataaggtaatcataatcaatgtaaagaaactagacttccccaataaaatacagatacttacaaattatattttgaaaataaagcttcggtgcatgcctgtagtcccagctctttgggaggctgaggagagatgattgctagagcccaagagtttgaggctgtagtgagctatggtcatgatcactgcactctagcctgtgtaccaaagcaagaccccatctctaaaaacaaaacaaaacaagaacaacaaaaattaaaagtaaaaaartgggggaaatatctgaaaaatatt

SEQ ID NO: 458544 - DNA, 647 bp, Homo sapiens
catttcctcattgcaaaagcaaagtcagaaagataaatgttacacttagggaaatccgacaaagcaatratatttttaatgcctaaatgtaaattaaatagattatcaaggaaaattctcaacaaggaagaataagaagtatcattcaaagttagaaaattaacacgtggagtgctatggtctgaattttatgttttacgtacaattcgtgtgttgaaacctaagaaccaatgtgatggcattaagaggtggagttattaggcaaattattaggtcataaaggtggaccctgcatgaataggattagtgcccttataaaagaagccccagagagcagccttgtcccttctgccatgtgaagttacagcaagaagatgggctcttgacagacaatgaatctgctgttgtcttgatcttggacttcccggcctccagaactgtaagaaataaatatctgtttataaacttcctggtgtatggtatttgtttatagtagcaagaatggattaagtcacggctttacttccccaaaaaactcaaaaagtctgctaggaaataattatgtgttgccatgatatatgggaaaacacataaatagttaaaaatatctatccctagtttatatcactaatcctaaattaaacccc

SEQ ID NO: 458545 - DNA, 629 bp, Homo sapiens
tatctattcttggagacacaaaactattgaagtgaagccatttagcaaccctacaatgtcctgtaagtattcaagtgaaaataagagtcaaacatttttcactttatttttttttccttctaacttttattttaggttcgggaggatacatgtgccggtttgttacatgggtaaattttgttttgctagtgtttggtgcacaatttcatcacccaggtagcragcatagtatctgatggttagttttttcatccttaccctcttctaaccttccaccctcaagtaggcccggtgactgtggttctcttctctgtgtccccctctttatgttcccttctttgtgtctacatgtactcaatgtttagcctcaacatgtactcagtgtttaccattgtggtacttggtttttagtttctgcattaattcacttaggatagtggcctccacctccatccctgttgctacaaaggatatgattttattctttttttatggctacgcagtattccatgaggcataattttcacaccttctttatgccgttgatgggcacctaggttgattccatgtctttgctattgtgaatagtgctgcaatgaacatatatgtgcatatgtctttatggtaga

SEQ ID NO: 458546 - DNA, 588 bp, Homo sapiens
gttgttgcaaatgacagaatctcattgttttaaggcttttctatgtacttcattatgtatcagtataacattttctttatccattcatctgttgatggacatggttttagtgtgttttcatgctgctgaaagaggttttcatgttgttttagtctgttttcatgctgctgaaagaaagagatttaactgacttacagttccacatggctgggaaagcctcacaatcatggtggaaggcaaagaggagcaagtcttgtcttacatggatggcagcagtcaaagagggagagcttgtgcaggggaactcctctttttaaaaccatggatctcatgagacttattcactaccatgagaatagcacgggaaagacttgccctcatttcagttatctcccaccagatccctcccacaacatgtgggaattcaagatgagatttgggtggggagtggggacacagccrgacacagccaaaccataccattctgcccctggtgcctcccatatctaatgccctcgcatcttaaatccaatcatggcttcccaacagtcccccggagttttaactcatttcagcattaactcaaaa

SEQ ID NO: 458547 - DNA, 581 bp, Homo sapiens
tttgtaaagtatgcaataacagagaagaatctataacagaccaactgtatgatatttgaggttgctacggtattccccagaaacatctgaggcccagaagacacgaagggaagaaggaagggaaaaagaaagagtaatctgatatatttacttacatccaaatctaaatttctgcattaaaaaaaccataatttattgtaagcaaaattaaaagacaacttcaaggttggagaaagcatgaaacacaggaaacacagggttaacattgctaatctgcatattgccccaatcaattagttataaaatgacaatacaacaggaaaaagcaggcaaatgatattatagtagaattttcaccacatctgtttttcttccctgtaagagaaaaatgctttaccaccctggtgagctcagacatggccatatgatttggttgggtcaatgaagtatgtcacaagcagacactttaagatttatgttttgatttgttgtgttctgtttamcttattctgcagcaaccagtgatattctgaatactatctgctcccaaccaacccaggattaaaatacaatgtgagaat

SEQ ID NO: 458548 - DNA, 581 bp, Homo sapiens
tttgtaaagtatgcaataacagagaagaatctataacagaccaactgtatgatatttgaggttgctacggtattccccagaaacatctgaggcccagaagacacgaagggaagaaggaagggaaaaagaaagagtaatctgatatatttacttacatccaaatctaaatttctgcattaaaaaaaccataatttattgtaagcaaaattaaaagacaacttcaaggttggagaaagcatgaaacacaggaaacacagggttaacattgctaatctgcatattgccccaatcaattagttataaaatgacaatacaacaggaaaaagcaggcaaatgatattatagtagaattttcaccacatctgtttttcttccctgtaagagaaaaatgctttaccaccctggtgagctcagacatggccatatgatttggttgggtcaatgaagtatgtcacaagcagacactttaagatttatgttttgatttgttgtgttctgtttaccttattctgcagcaaccagtgatattctgaatastatctgctcccaaccaacccaggattaaaatacaatgtgagaat

SEQ ID NO: 458549 - DNA, 629 bp, Homo sapiens
tatctattcttggagacacaaaactattgaagtgaagccatttagcaaccctacaatgtcctgtaagtattcaagtgaaaataagagtcaaacatttttcactttatttttttttccttctaacttttattttaggttcgggaggatacatgtgccggtttgttacatgggtaaattttgttttgctagtgtttggtgcacaatttcatcacccaggtagcgagcatagtatctgatggttagttttttcatccttaccctcttctaaccttccaccctcaagtaggcccggtgactgtggttctcttctctgtgtccccctctttatgttcccttctttgtgtctacatgtactcaatgtttagcctcaacatgtactcagtgtttaccattgtggtacttggtttttagtttctgcattaattcacttaggatagtggcctccacctccatccctgttgctacaaaggatatgattttattctttttttatggctacgcagtattccatgaggcataattttcacaycttctttatgccgttgatgggcacctaggttgattccatgtctttgctattgtgaatagtgctgcaatgaacatatatgtgcatatgtctttatggtaga

SEQ ID NO: 458550 - DNA, 564 bp, Homo sapiens
tttctgcttgacaagatggcagctactacagggttacattaggaaataaatgtataactgtacctaggtctcacatgtgccactgtgacaagaatggctgaatgattaggtgaatcatattcactccgacacggagcattatctctgctagcgtcttccttttagtcctcaaactgtttcatctctttactcacagaagacattgccctactccctaagggatacagccctaaatataatctactcacggtctctagctcaaagttaaaactctcaggatagtatgtagttgtctttatctggcccagatgtggtctcattttgtctgacaacctatggttaaaagacaggttatcaacccacactcacacatgcctaatatacaatggttgaatgaggaccaaataactgcaataagtatcgtggtggtagattgtaatacctgttgacaatattccctktcacccctattattcaaaatggttaactctggacagagatatttctccaacgtgctgattttggttttagccatgtgccttgctttggctaatgacatgtgag

SEQ ID NO: 458551 - DNA, 583 bp, Homo sapiens
cacaaaactatgagaaataaacacttattcttataagctactgaagtgtgcaagtctttaaccacagtaaaagttaataccattcccatttagaaagaggaagaatgggagacacagaatagccactgactgggttgtgatcattttgaaatctccctgggaagctgctatgcaggtgctctctctttggtggaaggaaattccttgattaaactctgattctgccctctgaaggaactcctttgtttatgatcgccatggcccrtggatctaccctctggggagctgtaccttgttcatagtattgtctttggccacttctgaaatgcatgttgaagagcaagctctctttaggtgctacagagcctttgaagtcagcttcctaatcatgggaggttggaggacccaggtttatttatgtctagaatagtccaaggcacttgagtttaggcttatggttcctttcacagcacagttacctctaaatttagtcatctgtttgcatccagttagttttgtgagccagtaactagaagaaaaaatttttctagacataattctcaaatgttccttatttctttgc

SEQ ID NO: 458552 - DNA, 504 bp, Homo sapiens
ctgggtaatgaatcactgtttggacagcccgttactgttacgaatagattgcttatgattgaccagaataacagctgaaaatttaatgaatctactgcaatcttgtcacttcagtcaggcagcataaaggcagccagtggaaatatcatccttgctttgttccagtctaaagaattcagcagtcagcatgagctcctctggttagaaatgcagacacaggacccttggggtagagacttgctcacttgctgccagaatgcccctctggattaatttcaggcccagtgaagtatatgatttactgattaatagaaaatattaaatgctacttagttacagcacaaatgcattatgaaaaatgaatggttttaatgacaaggactttttctcagtatacatagagctcaatagggggaacgtttttccaaatagtagaataycggctctcaggattaggactctaatttagggtattcagttgcaaatgaggaattcatcatgtac

SEQ ID NO: 458553 - DNA, 504 bp, Homo sapiens
ctgggtaatgaatcactgtttggacagcccgttactgttacgaatagattgcttatgattgaccagaataacagctgaaaatttaatgaatctactgcaatcttgtcacttcagtcaggcagcataaaggcagccagtggaaatatcatccttgctttgttccagtctaaagaattcagcagtcagcatgagctcctctggttagaaatgcagacacaggacccttggggtagagacttgctcacttgctgccagaatgcccctctggattaatttcaggcccagtgaagtatatgatttactgattaatagaaaatattaaatgctacttagttacagcacaaatgcattatgaaaaatgaatggttttaatgacaaggactttttctcagtatacatagagctcaatagggggaacgtttttccaaatagtagaatacmggctctcaggattaggactctaatttagggtattcagttgcaaatgaggaattcatcatgtac

SEQ ID NO: 458554 - DNA, 605 bp, Homo sapiens
cttgtaaaacatcccagtaccacaaaaatgaacgatgacaagattagcagatccatatagagttttgaaaaaactagaaaactaaattcaatacttatcaattgaggtagacccaagcacagaaaaacaaccatgaagcaaaccaaaacttttaatgtaatataatactccaaacagtattaagcagacacaattggtaatatttttaaaaactccaagtcagaaactccaaagttaargacagtaaaaagcaaacaaagaaaggaagaaatagacttgatttaactcaggaaagaaatggaagaaaaatacaaacttattttagaaatgaaaaataaattacagaattcctacgtgagaacaatccctagtaaaatgtaatagggggcattggggaatattaagaggcaggaaaacagtaaataaaatgaaaatgagattaggaaaacaaaaaggataacaaagcaatggaaataagagataaataaaaaagcaatgccattcatattacttcagtccctataaaaagataatcaatagaacaaaagtactactgaaaagtataatccaagaaaactgtctttttcttttttttttttgagatg

SEQ ID NO: 458555 - DNA, 592 bp, Homo sapiens
ttatcattctttgtttggaggagattttctcagcttctaagatgtttactagctttatagcctaaggacatttctatcctccaggctgctttcctcatctgaaaacgggatagcccatttaacaaatgtttgttgcacatctaatatataccaaagaatcatccacattaagagcacaagaaattgaacaagatcaataatgttcctgctttgatagtgcttacattctcatacacatagagattataaacataaaaacaaataattaaagaaaaacaaaaattgatatgaagaatgtaaacagggtgacttagtgggggactgggagaggggtagaagtaatttagatcagatgacttgaaaagttgttactgagcaggtggaatttgagctaagacctgaatggcataaaggaatcaggcttgtgtgcaaacatcaagaggacaaatgcctcaggtagagggaacaaccagggcacaggctttgaagatgaaataaatgtagcgtgctcacataggccagygtacctagaatggttggtgaatgaggcggagagaggacaagatgagtttggagattcaggcaggggcaa

SEQ ID NO: 458556 - DNA, 550 bp, Homo sapiens
tggacgtcaccaaggcttatggcttacaccctctggagctgcaacctgaagtgtacctgggcccgtttgagtggaggctagagccccagtggctaggatgcaggtagcagtgtctccaggctgcacccctgggcctggcccasaaaaccattcttccttcctagacttctaggcctgtgatgggaggagctactgtgacggtttctgaaatacctttcaagtattttccccattgtcttggctatcagcacttggcttctttttagttactcaaatctttctagcaaatggttgctctgcagcttgcttggattcctctccccaaaaaagcttttttttctctgccatgtggccaggcttcacattttccaaactgtcaggctctgcttctcttttaacgataaacttgaacttcaagtcatttctttgctcctttatcagatttaggctgttagaagtagccagaacacctcttgagcactttctgcttagaaatttcttccaccagataccctaagtcatcactctgaaattcatacttccacagatc

SEQ ID NO: 458557 - DNA, 565 bp, Homo sapiens
gctctggctaagacttccatttcattgttgaataggagtactgaaagtaggcatccttacattcttccagtatttagagaacaagttttcagctyttcctcattcactgtgatgttagctgtggttttatcatatatggtctttattatgttgagctatgttcagtttttattgtgaaatgatactgaattttatcaaatgattttactgcagtggtggagatgatcatataatactgatttttgttctgttaattcgatgtaacatatttattgatttgtttaccatgaaccatccttgcatctctgaaataaataccactttatcatggtatgttatctttttatgcgaagttgaatttggtttactaatgttgaggatttttacatttaggtttttcagggatatcgatccatagttttccttttttgttgcatgcatgtctggttttggtgttagggtaatactagactcataaaaagatgtaaggagaattctttcctcttcaatttttttgaaatatttcaggataatgggtgtagttcttctttataagtttggtaga

SEQ ID NO: 458558 - DNA, 565 bp, Homo sapiens
gctctggctaagacttccatttcattgttgaataggagtactgaaagtaggcatccttacattcttccagtatttagagaacaagttttcagctcttcctcattcactgtgatgttagctgtggttttatcatatatggtctttattatgttgagctatgttcagtttttattgtgaaatgatactgaattttatcaaatgattttactgcagtggtggagatgatcatataatactgatttttgttctgttaattcgatgtaacatatttrttgatttgtttaccatgaaccatccttgcatctctgaaataaataccactttatcatggtatgttatctttttatgcgaagttgaatttggtttactaatgttgaggatttttacatttaggtttttcagggatatcgatccatagttttccttttttgttgcatgcatgtctggttttggtgttagggtaatactagactcataaaaagatgtaaggagaattctttcctcttcaatttttttgaaatatttcaggataatgggtgtagttcttctttataagtttggtaga

SEQ ID NO: 458559 - DNA, 566 bp, Homo sapiens
tatataccatatttgttactgtttatttgttgctctggctttttgtttctatttttgtcttatactcttttttctgcctattgttgttttaattgagcattttatatcattttgcttgtyctttttccttaaaaactgttttatttcctttcttaggtttttttccccatggttgccctagagtttgcaatatacatttacgagtaatgcaacccacttttgaataagatgataataacaaaataataccaattcccttttcctgtccttcatatccccactgttattcgttttattatatacatacttacataagaatatgccatacaagatataaatataagcatacaaaatttaatatgttattgctcttattattttgaacaaacatctatttgtcaattaagaatgagaaaaaaaataaaagtttttattttatattaactatttcttcttggatgttctttcttactttatgtagctctgcatttctggcctatattactttccttctctctaaaatttttttttaaatgttttctgtaaggcaagtctactggaaaaaa

SEQ ID NO: 458560 - DNA, 517 bp, Homo sapiens
gctggcaatacaagttatgagagggtaacaggaagaatcatatggaaaataaagatggtcttattatgcagagaaaacatctctcaagtaataaaagttgtctaggagcatccttcagaagaaaaagtgatggtctgtctgggggtagtgtcaaagagtkaacctttcagggttgataaaattaccagggagatgatttatgataatacagatccatttttaggcagataaggaagttcaaagaaagcccctccctgcattaactaaatattcctcaagtgccttcgatctaaagtaatcagcataccaaagttgcatattttggggtggcatttcctgaactccttcatttgccgcagttacattatctttcaacactactgagagccccttgagggcaaggatgataatccgatttttctttgtatccttagcacctaatttaaggtctcacatgttagatgtttattaatgaagagaaaaataggaaatcatgatcatgttaaaggctccaaag

SEQ ID NO: 458561 - DNA, 473 bp, Homo sapiens
cttggctctttaacaagcagagggaagcagcatttggcagcttgcagccatagtacatcagcaacagaactgaactgaggttgaaggacaagtgcatggtccccactgggggtgaccccacccatctcttttttcacactcgtcttttcaaaacggaatgagtcaaaaaatacttcctcaaaataagttttctcctcagctatgcaagctcaccctggctttatttggggcatarttactagagaccagccaaagtctaggtcattggcacaatggaccctgttagcagcaaaccagggaccctgaactaatggcaaggaacgtagcctgcattgcactattaatatgtgcctgtcggaaaggctttattgttctaggtttttcatcagatcttggattgatgtatggctttgagactagaacaaatgctctggagggcagcacagagtcctaaatgcccccagtaagaggga

SEQ ID NO: 458562 - DNA, 473 bp, Homo sapiens
cttggctctttaacaagcagagggaagcagcatttggcagcttgcagccatagtacatcagcaacagaactgaactgaggttgaaggacaagtgcatggtccccactgggggtgaccccacccatctcttttttcacactcgtcttttcaaaacggaatgagtcaaaaaatacttcctcaaaataagttttctcctcagctatgcaagctcaccctggctttatttggggcatagttactagagaccagccaaagtctaggtcattggcacaatggacccygttagcagcaaaccagggaccctgaactaatggcaaggaacgtagcctgcattgcactattaatatgtgcctgtcggaaaggctttattgttctaggtttttcatcagatcttggattgatgtatggctttgagactagaacaaatgctctggagggcagcacagagtcctaaatgcccccagtaagaggga

SEQ ID NO: 458563 - DNA, 563 bp, Homo sapiens
gtgctgaggttgacagaaaggaatccaaagggagcacagattgcccaaaccctagatgcttcagcaacttatactaagctcccatcccctgtctcagaattcctatcaaacctgccaatctgcatagmgagatggcaactatcaatacatctaagcagaatataatttctcgcttttaaaaacagacctatctgtgatgatagacaaaacttaaagagttaaatacatcattcaatatatgttattgaacatacaagtatgtggtgaataaaaaaaggtacatgcatgataaaaggaatcatttaagtgatggttggacagggaacttgtgacaagaaggaggttggattttttaacctaaattccctcctggcaccttgattaaaatgaaatgaactgaggcagccaaagagattattttattcagatgagtgttattagcctttctggcttattttctctattatgcattttgctgatgctgacagaagcaggcaggctggatagagaggcaaagctgcagcggatttatggtctgacagtgtcatgcataaaatcagacc

SEQ ID NO: 458564 - DNA, 563 bp, Homo sapiens
gtgctgaggttgacagaaaggaatccaaagggagcacagattgcccaaaccctagatgcttcagcaacttatactaagctcccatcccctgtctcagaattcctatcaaacctgccaatctgcatagcgagatggcaactatcaatacatctaagcagaatataatttctcgcttttaaaaacagacctatctgtgatgatagacaaaacttaaagagttaaatacatcattcaatatatgttattgaacatacaagtatgtggtgaataaaaaaaggtacatgcatgataaaaggaatcatttaagtgatggttggacagggaacttgtgacaagaaggaggytggattttttaacctaaattccctcctggcaccttgattaaaatgaaatgaactgaggcagccaaagagattattttattcagatgagtgttattagcctttctggcttattttctctattatgcattttgctgatgctgacagaagcaggcaggctggatagagaggcaaagctgcagcggatttatggtctgacagtgtcatgcataaaatcagacc

SEQ ID NO: 458565 - DNA, 486 bp, Homo sapiens
cagattggctgcatgtgtcattatcagttctcatgtgttatttggatatttatcttgcctttattagaaggaagtctctttttgtgtgggggtgcaggaggaaaaacccccaggcccagtaaggaattctcttgaggacagggtatatttagaatgtttaatgaacacctatcaccaagaataggtgggtccttaatcagtattgactaacaacagatgccagagccaaagcaatcctgtaaatgttgaggacagaaagaccatgattcatttaatgactagttaatatgttcagccttcaccaatcttgccaaatcagctgctccagtgtgtatctgtgctcactctctgggtggctactgaatgaccaaatttgtatgtccattggcttgtgtgctctaaattacagcatattattaaccatcttgatattttactggcaaaactttaaagggstgagtggtataagagaagcacgagtcaatt

SEQ ID NO: 458566 - DNA, 427 bp, Homo sapiens
aagcaccttttgcttcctcactaacactaaggacrtattccacgcaggtcgtaaggtaacccctgctactcaggaaagtgtgagatagaaagacaggacaggaatttatctgctggcttttttatttttctcattactctaagtttgtgtggaggtaaagcaactccatcttgaatgctactcagatgtgttgactgacttaccacaaattctgtccttgagcaaattacttcaattgtcttacaaattccttttgaagcacgttaccctttccctatggtaaaaaaaaaaaaaaaaaacaaaaaccctgggtctgagggagaatggtgcagggatccaccatatcctctcaccaccaccagagatatggctaatattcctaagtcaactgaagaatgacaaggttcgtaaattgtcaactgaagaa

SEQ ID NO: 458567 - DNA, 427 bp, Homo sapiens
aagcaccttttgcttcctcactaacactaaggacgtattccamgcaggtcgtaaggtaacccctgctactcaggaaagtgtgagatagaaagacaggacaggaatttatctgctggcttttttatttttctcattactctaagtttgtgtggaggtaaagcaactccatcttgaatgctactcagatgtgttgactgacttaccacaaattctgtccttgagcaaattacttcaattgtcttacaaattccttttgaagcacgttaccctttccctatggtaaaaaaaaaaaaaaaaaacaaaaaccctgggtctgagggagaatggtgcagggatccaccatatcctctcaccaccaccagagatatggctaatattcctaagtcaactgaagaatgacaaggttcgtaaattgtcaactgaagaa

SEQ ID NO: 458568 - DNA, 427 bp, Homo sapiens
aagcaccttttgcttcctcactaacactaaggacgtattccacgcaggtcgtaaggtaacccctgctactcaggaaagtgtgagatagaaagacaggacaggaatttatctgctggcttttttatttttctcattactctaagtttgtgtggaggtaaagcaactccatcttgaatgctactcagatgtgttgactgayttaccacaaattctgtccttgagcaaattacttcaattgtcttacaaattccttttgaagcacgttaccctttccctatggtaaaaaaaaaaaaaaaaaacaaaaaccctgggtctgagggagaatggtgcagggatccaccatatcctctcaccaccaccagagatatggctaatattcctaagtcaactgaagaatgacaaggttcgtaaattgtcaactgaagaa

SEQ ID NO: 458569 - DNA, 593 bp, Homo sapiens
ttgtgaaatccctcctgtggtgtgatatttcgttttccttgctttgtgttaggacaagaatgcttcagctcttaatttaaaattatgtttctccctcctaggttgagtgaacttagaatgcattctctgacatatccaagattttgttaatatgaatttcgggaaaaaagcatacttaattagctaagacgtcttattctaagcttgaccctatgttcgacatcttttgaatttctrgttgcatgggctgctctctgacactggttagtgacctggaagctctattaatgttaggggaggtggtgtatgagcattagaggtatccttgcaaggaaagacttgtcttatctcaatacgtctttttttttgcacacaagaaagtcaatgtctgagtcttctaaaatcttcctatttccaaattgcagattatgattgattcctaaacaaagacctaatttttgactcagagacgtggcaagctagtgaatcaccattataatttaacaatcttcaagataaaattatctctgatatttagattttgccccattattaagatatttgggtgtttagttaagaatggaaaactctag

SEQ ID NO: 458570 - DNA, 593 bp, Homo sapiens
ttgtgaaatccctcctgtggtgtgatatttcgttttccttgctttgtgttaggacaagaatgcttcagctcttaatttaaaattatgtttctccctcctaggttgagtgaacttagaatgcattctctgacatatccaagattttgttaatatgaatttcgggaaaaaagcatacttaattagctaagacgtcttattctaagcttgaccctatgttcgacatcttttgaatttctagttgcrtgggctgctctctgacactggttagtgacctggaagctctattaatgttaggggaggtggtgtatgagcattagaggtatccttgcaaggaaagacttgtcttatctcaatacgtctttttttttgcacacaagaaagtcaatgtctgagtcttctaaaatcttcctatttccaaattgcagattatgattgattcctaaacaaagacctaatttttgactcagagacgtggcaagctagtgaatcaccattataatttaacaatcttcaagataaaattatctctgatatttagattttgccccattattaagatatttgggtgtttagttaagaatggaaaactctag

SEQ ID NO: 458571 - DNA, 593 bp, Homo sapiens
ttgtgaaatccctcctgtggtgtgatatttcgttttccttgctttgtgttaggacaagaatgcttcagctcttaatttaaaattatgtttctccctcctaggttgagtgaacttagaatgcattctctgacatatccaagattttgttaatatgaatttcgggaaaaaagcatacttaattagctaagacgtcttattctaagcttgaccctatgttcgacatcttttgaatttctagttgcatgggctgctctctgacactggttagtgacctggaagctctattaatgttaggggaggtggtgtatgagcattagaggtatccttgcaaggaaagacttgtcttatctcaatacgtctttttttttgcacacaagaaagtcaatgtctgagtcttctaaaatcttcctatttccaaattgcagattatgattgattcctaaacaaagacctaatttttgactcagagacgtggcaagctagtgaatcaccrttataatttaacaatcttcaagataaaattatctctgatatttagattttgccccattattaagatatttgggtgtttagttaagaatggaaaactctag

SEQ ID NO: 458572 - DNA, 593 bp, Homo sapiens
ttgtgaaatccctcctgtggtgtgatatttcgttttccttgctttgtgttaggacaagaatgcttcagctcttaatttaaaattatgtttctccctcctaggttgagtgaacttagaatgcattctctgacatatccaagattttgttaatatgaatttcgggaaaaaagcatacttaattagctaagacgtcttattctaagcttgaccctatgttcgacatcttttgaatttctagttgcatgggctgctctctgacactggttagtgacctggaagctctattaatgttaggggaggtggtgtatgagcattagaggtatccttgcaaggaaagacttgtcttatctcaatacgtctttttttttgcacacaagaaagtcaatgtctgagtcttctaaaatcttcctatttccaaattgcagattatgattgattcctaaacaaagacctaatttttgactcagagacgtggcaagctagtgaatcaccattataatttaacaatcttcaagataaaattatctctgatatttagattttgccccattattaagatatttgggtgtttmgttaagaatggaaaactctag

SEQ ID NO: 458573 - DNA, 606 bp, Homo sapiens
aactctagtctcttgagcagagactataaaggcctcagatgatcatttttaattttatgctcttttctttaacaccttcaacacagttggaagcagccgatattccscagagttgttgtgttttttaaaccaaatgcatggttcagtggtagaaaactgggctgatccaagctgttttcagtaaacacttcatttcaggtgacccatttcatattaaataatctctagatcctgtcttcgaaactaactagatcagataaactaccctggattttctctttttagggtctgagagctgcagtcacttttgtgaaaatgattacaatgacaagatagagttgtagatggggaaaatgttttgactaatttaagcatagtggtatttcatatgagaatttaagttacacacatttgaaaattataatggagtctcttggctgagctttaaaaagaaatagcgtttaggctaaaaagggaactgctacctctcctaaaatcagaaagatgttacagtaattctccattctctagaattatcaagaagcacctttgtgatgatttacttttgctcttgcgagtgtgagcccgtgtagtcgtggaaccatc

SEQ ID NO: 458574 - DNA, 606 bp, Homo sapiens
aactctagtctcttgagcagagactataaaggcctcagatgatcatttttaattttatgctcttttctttaacaccttcaacacagttggaagcagccgatattccccagagttgttgtgttttttaaaccaaatgcatggttcagtggtagaaaactgggctgatccaagctgttttcagtaaacacttcatttcaggtgacccatttcrtattaaataatctctagatcctgtcttcgaaactaactagatcagataaactaccctggattttctctttttagggtctgagagctgcagtcacttttgtgaaaatgattacaatgacaagatagagttgtagatggggaaaatgttttgactaatttaagcatagtggtatttcatatgagaatttaagttacacacatttgaaaattataatggagtctcttggctgagctttaaaaagaaatagcgtttaggctaaaaagggaactgctacctctcctaaaatcagaaagatgttacagtaattctccattctctagaattatcaagaagcacctttgtgatgatttacttttgctcttgcgagtgtgagcccgtgtagtcgtggaaccatc

SEQ ID NO: 458575 - DNA, 460 bp, Homo sapiens
tatcaaaaccctacatgctcttccacaacatggtttacttccaagatatctcttcaacatttttttcactgtactgaattggtgactaatagtcatatttttgtttttgctcaaaaagtcttgacttgtaaatttttcagtttctcctttatccacaggtaactctttcctgataaggcgaattgcttgcttccttgaattctgctctcaaagatacccttcaytttctacctaatattaataactttaatcattcattattccattactatgctctatagtgtatacaatttctgttctttgtcatgttattaactaaattatttattgggtccagtaacgtattccataaatattgtacacataaaaattgtgttatttttattcctgtatgctcagctgcccaataacagtctgaggattaacatatttgttaaatgcacaaatacattctttcaca

SEQ ID NO: 458576 - DNA, 460 bp, Homo sapiens
tatcaaaaccctacatgctcttccacaacatggtttacttccaagatatctcttcaacatttttttcactgtactgaattggtgactaatagtcatatttttgtttttgctcaaaaagtcttgacttgtaaatttttcagtttctcctttatccacaggtaactctttcctgataaggcgaattgcttgcttccttgaattctgctctcaaagatacccttcattttctacctaatattaataactttaatcattcattattccattactatgctctatrgtgtatacaatttctgttctttgtcatgttattaactaaattatttattgggtccagtaacgtattccataaatattgtacacataaaaattgtgttatttttattcctgtatgctcagctgcccaataacagtctgaggattaacatatttgttaaatgcacaaatacattctttcaca

SEQ ID NO: 458577 - DNA, 608 bp, Homo sapiens
gatacaagttggaaatctatatactctttaagtgtttgaaatattagcttyccagggaagaaaatcaaattcataagatatgctaggacaatttaactcaagatgttcaaaactgaaatgacatattctacaacatgtgataaaaccaccccctaacaacttaaagcaaaacagggatggaccttaaagacctgccttttcctcatcccccagccaatcagttttcaaatcttgcattttattttgaaaggtccctatccccctggtctcttgtttctagacttggcacatatttaagtttgttacctctctctactgacttttctctcttcaaacagtatctatgcctgccaaatgtgaacgtacaagaaacaaatcagaatgtgtcattctgatttaaactgcttattagttaataccctcaagataacatctgggttcttagcttcaatgagtcaagcctacttacatctttttgtctttggctgctcatttcctatcacatcgcactccagcaatgccaagctgtgccggccttccactccatctccattatttcgccctccaccgccgccgccacggctttttgcccccccgccgccgcggct

SEQ ID NO: 458578 - DNA, 608 bp, Homo sapiens
gatacaagttggaaatctatatactctttaagtgtttgaaatattagcttcccagggaagaaaatcaaattcataagatatgctaggacaatttaactcaagatgttcaaaactgaaatgacatattctacaacatgtgataaaaccaccccctaacaacttaaagcaaaacagggrtggaccttaaagacctgccttttcctcatcccccagccaatcagttttcaaatcttgcattttattttgaaaggtccctatccccctggtctcttgtttctagacttggcacatatttaagtttgttacctctctctactgacttttctctcttcaaacagtatctatgcctgccaaatgtgaacgtacaagaaacaaatcagaatgtgtcattctgatttaaactgcttattagttaataccctcaagataacatctgggttcttagcttcaatgagtcaagcctacttacatctttttgtctttggctgctcatttcctatcacatcgcactccagcaatgccaagctgtgccggccttccactccatctccattatttcgccctccaccgccgccgccacggctttttgcccccccgccgccgcggct

SEQ ID NO: 458579 - DNA, 608 bp, Homo sapiens
gatacaagttggaaatctatatactctttaagtgtttgaaatattagcttcccagggaagaaaatcaaattcataagatatgctaggacaatttaactcaagatgttcaaaactgaaatgacatattctacaacatgtgataaaaccaccccctaacaacttaaagcaaaacagggatggaccttaaagacctgccttttcctcatcccccagccaatcagttttcaaatcttgcattttattttgaaaggtccctatccccctggtctcttgtttctagacttggcacatatttaagtttgttacctctctctactgacttttctctcttcaaacagtatctatgcctgccaaatgtgaacgtacaagaaacaaatcagaatgtgycattctgatttaaactgcttattagttaataccctcaagataacatctgggttcttagcttcaatgagtcaagcctacttacatctttttgtctttggctgctcatttcctatcacatcgcactccagcaatgccaagctgtgccggccttccactccatctccattatttcgccctccaccgccgccgccacggctttttgcccccccgccgccgcggct

SEQ ID NO: 458580 - DNA, 608 bp, Homo sapiens
gatacaagttggaaatctatatactctttaagtgtttgaaatattagcttcccagggaagaaaatcaaattcataagatatgctaggacaatttaactcaagatgttcaaaactgaaatgacatattctacaacatgtgataaaaccaccccctaacaacttaaagcaaaacagggatggaccttaaagacctgccttttcctcatcccccagccaatcagttttcaaatcttgcattttattttgaaaggtccctatccccctggtctcttgtttctagacttggcacatatttaagtttgttacctctctctactgacttttctctcttcaaacagtatctatgcctgccaaatgtgaacgtacaagaaacaaatcagaatgtgtcattctgatttaaactgcttattagttaataccctcaagataacatctgggttcttagcttcaatgagtcaagcctacttacatctttttgtctttggctgcwcatttcctatcacatcgcactccagcaatgccaagctgtgccggccttccactccatctccattatttcgccctccaccgccgccgccacggctttttgcccccccgccgccgcggct

SEQ ID NO: 458581 - DNA, 593 bp, Homo sapiens
gcctgcatagagtggcgctgcctgtggaggcgrtgggagagaagaaggagggcggtggtgggggtgatgcggcggccacggagggtggcacaggggctgcggccagccgggcgctgcagcagtgcgggcagctccagaagctcatcgtcatcttcattggcagcctgtgcgggctgtgcaccaagtgcgctgtgtctaacgacctcacccagcaggagatacagaccctggaggtaaggggttcggggacccgggctgggctccaggagcggcccggacacctccttcgggggccccagttcactcctggccgagttgcatctttgagcccacgtcacccccttggaggcttcccctccctcctgcactcgctgatgcggcagccagaggacccaggaccagccctcaccttgggcaggatttgtggagcgggtgcgtggtgggaactgggatggaggctccagggtcccgtgggggtgggggtgggctgcgtgaggacatccccttaccccctgaatttccatctggtccagccctctcatcttgtaggtgaggaaaccgaaggcccgagggagaaatgacttgccaggaac

SEQ ID NO: 458582 - DNA, 593 bp, Homo sapiens
gcctgcatagagtggcgctgcctgtggaggcggtgggagagaagaaggagggcggtggtgggggtgatgcggcggccacggagggtggcacaggggctgcggccagccgggcgctgcagcagtgcgggcagctccagaagctcatcgtcatcttcattggcagcctgtgcgggctgtgcaccaagtgcgctgtgtcyaacgacctcacccagcaggagatacagaccctggaggtaaggggttcggggacccgggctgggctccaggagcggcccggacacctccttcgggggccccagttcactcctggccgagttgcatctttgagcccacgtcacccccttggaggcttcccctccctcctgcactcgctgatgcggcagccagaggacccaggaccagccctcaccttgggcaggatttgtggagcgggtgcgtggtgggaactgggatggaggctccagggtcccgtgggggtgggggtgggctgcgtgaggacatccccttaccccctgaatttccatctggtccagccctctcatcttgtaggtgaggaaaccgaaggcccgagggagaaatgacttgccaggaac

SEQ ID NO: 458583 - DNA, 593 bp, Homo sapiens
gcctgcatagagtggcgctgcctgtggaggcggtgggagagaagaaggagggcggtggtgggggtgatgcggcggccacggagggtggcacaggggctgcggccagccgggcgctgcagcagtgcgggcagctccagaagctcatcgtcatcttcattggcagcctgtgcgggctgtgcaccaagtgcgctgtgtctaacgacctcacccagcaggagatacagacccyggaggtaaggggttcggggacccgggctgggctccaggagcggcccggacacctccttcgggggccccagttcactcctggccgagttgcatctttgagcccacgtcacccccttggaggcttcccctccctcctgcactcgctgatgcggcagccagaggacccaggaccagccctcaccttgggcaggatttgtggagcgggtgcgtggtgggaactgggatggaggctccagggtcccgtgggggtgggggtgggctgcgtgaggacatccccttaccccctgaatttccatctggtccagccctctcatcttgtaggtgaggaaaccgaaggcccgagggagaaatgacttgccaggaac

SEQ ID NO: 458584 - DNA, 245 bp, Homo sapiens
caggatttgtggagcgggtgcgtggtgggaactgggatggaggctccagggtcccgtgggggtgggggtgggctgcgtgaggacatccccttaccccctgaatttccatctggtccagccctctcatcttgtaggtgaggaaaccgaaggccygagggagaaatgacttgccaggaacccctgttaaggaaaattaacaaagtgtggttattaaagaagaactgagttgggagtcagacctggag

SEQ ID NO: 458585 - DNA, 525 bp, Homo sapiens
tcctgggccgcacataaaatacactaatgctaacaacagctgatggggttaaaaaaaaaaaaggtttgtgcataattttcatgctacccaccaccacagataggtggaaaagtccttgtartcaaagggctggacacggctgatctagtgtcttgtcgtccgttttggctttctccctgaatccagaatgcaggtagagatgtagagacatgctctcaggacagctgttgagataaaaaaaattcgttgtcatttattcccaagcacagctgtttctcattgcattgaaaaagtctccattcaaactgctgtcacatataaaatctatttatgtaagtctgtatttttctgttgtcttggcctttgtaggcagtagtgtgttttaaccgagcaaactgtccttccaaataatgaagccgaagtcagcctacctacttgccatttttcttccccttccatttttgtaacctcagaataattgtaagaatgaattaagatttgtgtttaaggccaggcacagtgtct

SEQ ID NO: 458586 - DNA, 525 bp, Homo sapiens
tcctgggccgcacataaaatacactaatgctaacaacagctgatggggttaaaaaaaaaaaaggtttgtgcataattttcatgctacccaccaccacagataggtggaaaagtccttgtaakcaaagggctggacacggctgatctagtgtcttgtcgtccgttttggctttctccctgaatccagaatgcaggtagagatgtagagacatgctctcaggacagctgttgagataaaaaaaattcgttgtcatttattcccaagcacagctgtttctcattgcattgaaaaagtctccattcaaactgctgtcacatataaaatctatttatgtaagtctgtatttttctgttgtcttggcctttgtaggcagtagtgtgttttaaccgagcaaactgtccttccaaataatgaagccgaagtcagcctacctacttgccatttttcttccccttccatttttgtaacctcagaataattgtaagaatgaattaagatttgtgtttaaggccaggcacagtgtct

SEQ ID NO: 458587 - DNA, 516 bp, Homo sapiens
ggtattatatctggttttgaacagtttggtacaacttttatatgagctgataagtcatatttttcattcaaaaaattattcaaatatttacttttgttctattaagtaaatatttttaatactgatttatttattttcattatttctctcttttatctagtattaatttttttgtcatataatatgcctggagggagggagaaaaacgggggaaagaagatggagggaaaaagggatgaagggaaggaaggagggaaaaattttacattttcttcccaaagattctgattaagtagatctgaattagactgtacttacaactgtgcttgtaagacatttcaaaaattgattttgatgggcaacagrttggagaactgtcaactagaggacatggtaatgaattgatggtcaaatgaacatgcccaaaactataaaaaatactatctgtgagtctggtataagccactaatctactatttgaatattagtgacacctacagttgggattgcaccaac

SEQ ID NO: 458588 - DNA, 601 bp, Homo sapiens
agtaaacactctcaccatggctgatttcaagatttaagtagtttaacaagcaactttcaaaattcctgataatgcagctcttgacttgacaaaccattatgagcagtctggctctcatgcaccatagctctcaacccacctttagaagatagcaaagtaccacttcagatgttctctcaccaatggattatccatcgcatttttccaactggttgtattagcctatggatgacaaatattcttctcagattctagcagtagagttactgtcatcctaggtgttaatggtagtgtgagcattgcctttttcttattttattttaaagttcggaaacaaaaaaaaatagagaagctattttaagttagactcccaaactacaaaatactaataatatttataaatttattcattagtttaacaaaaatgtattaagctctttctaggtacagttttaggttgcaagggtagagcagtgggggaaaaktaaaataattaaaaccaactaaccaaacaatttcttctcttctgctcccctctgagttcttccctaatttggtttataaaatatctcatttctttcctttatgtaaatgaaatata

SEQ ID NO: 458589 - DNA, 513 bp, Homo sapiens
ctaatttaagagttttctgcctacatgggaatgccccaagggagggagaaaagagattaytcaccctgtgggatagtaatcattggccattcaacaaccctgggcatgtctctaatcaactacaatttaattgatccaaagttacaaagatcaagagaaattcctatgatctgcaactatacacaacagtatgaataaatctcacaaacataatattgaaagaaaccaaacaaaaaagagtacatactgtgcaattctacttatataaagtatgaaaccaagcaaagctaatctctgctgttaaaagtcaagacagttgttatcctgggggatttagggtggggagatgactagaagggaatatgaaggggtttctagggtacagaaatgttctgtttcttgatctgggtgctggttacacaagtgtgaattcagtttgtgaaaatgcatatagctattaaattataataggcatacttttcttcagtgaaatgtaatatataaacagtccta

SEQ ID NO: 458590 - DNA, 513 bp, Homo sapiens
ctaatttaagagttttctgcctacatgggaatgccccaagggagggagaaaagagattactcaccctgtgggatagtaatcattggccattcaacaaccctgggcatgtctctaatcaactacaatttaattgatccaaagttacaaagatcaagagaaattcctatgatctgcaactatacacaacagtatgaataaatctcacaaacataatattgaaagaaaccaaacaaaaaagagtacatactgtgcaattctacttatataaagtatgaaaccaagcaaagctaatctctgctgttaaaagtcaagacagttgttatcctkggggatttagggtggggagatgactagaagggaatatgaaggggtttctagggtacagaaatgttctgtttcttgatctgggtgctggttacacaagtgtgaattcagtttgtgaaaatgcatatagctattaaattataataggcatacttttcttcagtgaaatgtaatatataaacagtccta

SEQ ID NO: 458591 - DNA, 574 bp, Homo sapiens
ttataaaagttgttttctcagatgaacaaagaaaacggaggaggaaactatcagtcaagccctttccttcttgagatagtctaagtggctgtcaaggtcatagagacgagctgtcaaaatttcacctaaataggttttaattttagtcacacacatgcatcaccaagtattgcagaataattcaaattaatgacaaccaagctgaagctgatgctggaaaccatggaggagatggtgagaagtaccctcactccaaaatgaggtgtggccccaaccacagcacagccgggctactaataatagccagtgagctctgggaggagttatctttctctgccttcttttcgtcgtcagatgattgtaccctcaatattctgtctctaagacacagggaaagcaccttcacggatgcaattaggtagatggaagattccaaatcagttatttgatcaggctggtaattacagaaaaaaaatggggtattaattccagatctagtgaaatctggaaaaattcctgagaactggaaagctgatsaagagctttgactgtatcgactacagtcctgtttacc

SEQ ID NO: 458592 - DNA, 497 bp, Homo sapiens
tttgcaaaattatggagagtgcagactaggagaaaaaggacaggcatagttgtgacaaggagctattttttctagttctgcattctagaaacagtactgatgagtccaaaaatatagagataaaattttgtcttttttcttgctttaaaaaaaaatgcttctaaatgtctacatacttgcctaagaaaatatttctcaactcctccagaatatttagggttaactaaaaattataaaaacataccacagagctagtccactctttatgcctagggtttacccaaaaggtctgcatgctctggcttggagaccctgaccccatctcaacttgctggtttyaagtctacatatttggctgcaaagccctaatgccaggaggaatgcagaactgacgagtccaccccatctacaagctagaaggacatcttgattaaattagtgtcaagggctgtggagagaaaggcacagtgacacaaagggtgttttgaggagccctg

SEQ ID NO: 458593 - DNA, 599 bp, Homo sapiens
tgacattctcttctggatactgactgtggtctagagaaacagctaaggaaggcaaatctgaattaaaatctggttcttgggaaagaactgaagttttcagattttgcaaaattatggagagtgcagactaggagaaaaaggacaggcatagttgtgacaaggagctattttttctagttctgcattctagaaacagtactgatgagtccaaaaatatagagataaaattttgtcttttttcttgctttaaaaaaaaatgcttctaaatgtctacatacttgcctaagaaaatatttctcaactcctccagaatatttagggttaactaaaaattataaaaacataccacagagctagtccactctttatgcctagggtttacccaaaaggtctgcatgctctggcttggagaccctgaccccatctcaacttgctggttttaagtctacatatttggctgcaaagccctaatgccaggaggaatgcrgaactgacgagtccaccccatctacaagctagaaggacatcttgattaaattagtgtcaagggctgtggagagaaaggcacagtgacacaaagggtgttttgaggagccctg

SEQ ID NO: 458594 - DNA, 599 bp, Homo sapiens
tgacattctcttctggatactgactgtggtctagagaaacagctaaggaaggcaaatctgaattaaaatctggttcttgggaaagaactgaagttttcagattttgcaaaattatggagagtgcagactaggagaaaaaggacaggcatagttgtgacaaggagctattttttctagttctgcattctagaaacagtactgatgagtccaaaaatatagagataaaattttgtcttttttcttgctttaaaaaaaaatgcttctaaatgtctacatacttgcctaagaaaatatttctcaactcctccagaatatttagggttaactaaaaattataaaaacataccacagagctagtccactctttatgcctagggtttacccaaaaggtctgcatgctctggcttggagaccctgaccccatctcaacttgctggttttaagtctacatatttggctgcaaagccctaatgccaggaggaatgcagaactgacgagtccaccccatctacaagctagaaggacatcttgattaaattagtgtcaagggcwgtggagagaaaggcacagtgacacaaagggtgttttgaggagccctg

SEQ ID NO: 458595 - DNA, 652 bp, Homo sapiens
gaggcagtgcgccagcctgggaaaactcccagcctccctttggccatagagtaagcaaaacaaatggcttcactggccccatctacccacttgacttaggtcagtattcagcctaaatgttttatttcctgagaggctggaatctgtatttgtggtatcaatcagtcaactgaaatttattaaatgcctgctgtgagcaaggcctaatgctgagggatgtaaagaagagtgagaagctagtctggttggggtgatatgacatggcaagtcatagaatgaagaagcgtattccttgtcatatgaaagctgcagattagtgtggttctaagtagaggccagggtcactggagtctaggattgcagggttggctggcttcccagaggctaagaatttaatttggatcttgaagatctggtccaattccaacaggtgagaggcataggaaacatttaaggaaaaggacattctgggagctgaagggcagaggtcagtggatttggagctatattagtattttttwaaagtgtctacatggtaccaaatatctgtaaatatattgcctgttagcctacaacaacctgtgtggctggtgttatcctcatttgaggcccagaaggattaagtagcttgcttatggccatatagctgatt

SEQ ID NO: 458596 - DNA, 498 bp, Homo sapiens
cagtgtgtgagtgttgttttctccgcatcctcatcaacacttcctatcttttgtcttttttataatagccatcctaacaataatgaagtgatatcacattgttgttttgatttgcattccctgatgattagtgatgttgagtatttttttcatatacttgttagctatttgtatgtcttcttttaagaaatgtatattcaggtcttttgtccatttttaaaatcgggttatttcttttcttgctattgcattgtttgagtttcttatatattttggttattaatcccttatcagatgtatagcttgaaaatattttctcccattctgtaggttatctcttcactctgttgttttctttgctgtgcagaagctttttagtttgatgtcatcccatttgtctatgtttktttttgctgcctgtgattttgaggtcatatccaaaaaatcattgcccagaccaatgtcttggagctttttctctatgttttctcccagcag

SEQ ID NO: 458597 - DNA, 583 bp, Homo sapiens
tacttcatttttttattcttttttattttgtctcctctgactttgtattttcaaatagcctgtcttcaagctcactaattctttcttctgcttcatcaattctgctatgaagagactctgatgcattcttcagcatgtcagttgcatttttaactctagaatttttgcttgattctttttaagtttttaaatctttgtgttaaatttatctgatagaattctgaagttcttctttatgtttttttgaatttctttgagtttccttaaaacagctattttgaattctctgtctgaaaggccagatatctgtttctccaggattgatccctgatgccttatttacttcatttgatgagattatgttttcttttcctggatggtgttgatgcttgtagatgttcttcagtgtctgagtgttgaagtgttaggcattcattgtagtcttcaaaataygggcttgtttctgtctgtccttcttaggaagactttccaggtattcaaagggatttggaccccaagtccaataatgctttcacttttgcagactcatagaggtaccaccgtggtggtcttagataagatc

SEQ ID NO: 458598 - DNA, 568 bp, Homo sapiens
tcttgtccaagaccatcaaggcagtatatctaaaagtctgcaagaaccacagtgttactgctgccccctaaagtggatacagcttagatcacaacccccaagtcttaccaatatctggaaagccttcccaaaaaggttgggtataaagaagctcagattgtgaagactacaataagtacccaactcttcaatgcccagacacagacaaacatctacaagtatcaaaacaatccaggaaaacatggccycactaaatgagctaaataaggcactagggaccaatcctggagaaacagagatatctgacttttcagacagataattcaaaattgctgttttgaggactctcaaataaatatgagataacacagagaaggaattcagaattatatcagataaacttaacacagatattgaaataattttaaagaatcaagaagaaattctggagctgaaaaatgcagtaggcatactgaagaatgtaccagagtctttccataacagaattgatcaggcagaagaaagaattagtagtgagcttgaagacaggctatttgaaaatgcacag

SEQ ID NO: 458599 - DNA, 594 bp, Homo sapiens
atctgggtgctccagtattgggtgcatatgtatttacaatcattatatcctctcactgaattgacccctttatcattatatagtgaccttccttgtctcttcatatagtttttgtcttgaaatcaattttgtctgatgtaagtgtaactactcctgctctttttttggcatggaatgtttttctatccctttatttttagtctgtgtgtgtctgtaagtgaagcgtgtttcttgtaggcagmatattattgggtgttgtttttattcattcagctactctgtgtcttttgattggagagtttagtccatctacatttactgttattattgataagtaaggacttactactgccatattgttatttgttttctagttgttttgtagtcttttctctcgtcttaacttccttcctttctttcttttagtgaaggtgatttttttttctgctggtattatttaatttctcactttttaatgtgtccattgtatggttttgtatttgaggttaccatgaggcttgaaaatactgtcttataatccattttttaagctaataacaacttaacattgtttgcataaacaaaaaagtgaaa

SEQ ID NO: 458600 - DNA, 616 bp, Homo sapiens
catcaggtgatggatcctgccaggactgggtccttctcttcaatgcagcaagttcccttctgtcccagcgtttgtctagaaatgtcatctgggagttagggcctcacaactctgactggtgcactatcctactrtggctgaactggtattcaagatgcaagacaacatcctctttactttccctctcttcttttcaagtagatgaaaggggtctcctctggaggcacaaactgtactgcctcaggttacaaacactcctttagctgccgcagctggtatctcactaggctgtgtgtcaccaagtacagtgtctatgagcccatttcaacactaggagtcacctaggagttacagtccttgtggcctaggtgacctttcagatttatttatgttccccagagcacttcagcccatgctggtgaggctttccagtactcaagttctgactactgggatgggtgattcctttctagctaggcctggtttaagtactctctccatgggcgagcatcagctgaattcaacctagttttgctttctgctgtgacagggcagcactgagttcaatgcaatgtctcacagttgttgcacttttcttctcccaaatgcacagatt

SEQ ID NO: 458601 - DNA, 439 bp, Homo sapiens
  misc_feature (1)...(439): n = A,T,C or G
tttgtttcattgaccttttgtattgttttgttcatttcagattaatttatttctgttctgatctttattatttctttttactattttttttttgctatttatttttactttattatttctttttatctatttactaattttgggatcggtttgttcttggctttctagctctttaagatgcatctttaggttgtttttttgaagcttttcttcttttttgttgtagggacttatagctataaatttttctctrgtactgcttttgctgtatcccttaggttttggtatgttgtgtttccattatcatttctttcaaaaactttttgaattttcttcttaatttcatcattgaccaactgatcattcaggagcatatcatttaatttctgtatgtttatatagtttccaaaatttctnctgttatttatttatnnnnnnn

SEQ ID NO: 458602 - DNA, 439 bp, Homo sapiens
  misc_feature (1)...(439): n = A,T,C or G
tttgtttcattgaccttttgtattgttttgttcatttcagattaatttatttctgttctgatctttattatttctttttactattttttttttgctatttatttttactttattatttctttttatctatttactaattttgggatcggtttgttcttggctttctagctctttaagatgcatctttaggttgtttttttgaagcttttcttcttttttgttgtagggacttatagctataaatttttctctagtactgcttttgctgtatcccttaggttttggtatgttgtgtttccattatmatttctttcaaaaactttttgaattttcttcttaatttcatcattgaccaactgatcattcaggagcatatcatttaatttctgtatgtttatatagtttccaaaatttctnctgttatttatttatnnnnnnn

SEQ ID NO: 458603 - DNA, 636 bp, Homo sapiens
tagaaagtagaaaccaagagagtgtatcaaaaagtgaaaccacaatgggagatatgggacagttcttgcagggttcaagattttaaacatgggactttatattaatagcaatgaggagccactgaaagataagattttaagcaatgctggtgtgtgtgtgtgtgtgtgtgtgtgtgtgtgtgtgtgtgtgtgtgtttgagggagagagagagagagagakagaagagaagagaagaagtcaaattggtattttatagagatactactactactctggccctagtatggagactagtatataggaggccaagaaaggtaacaggggaaccagtcttaaggttactaaaatcaccatgagagaatggtgacgacttaaggtagaaatgggaaattatgggcatggggaataagtcatctaatttgagagacttttaggaggtaaaatacacatggcttagttctagattgaatgtgggatattcccccacagtcattttgacttggctgatgggatggatggcaggattgtttgctgagatacaaaatactagaatagtggaatttacttatttattttttggcaggaaagagatgatcagttcaatttgaacactgagtttcggataaatgtgaaat

SEQ ID NO: 458604 - DNA, 626 bp, Homo sapiens
agtgtaggaatataaatcaaaacaacactaagatataattttacacctaacaaacaggaactggaaaattttgataatacccacttggcaaaagtgtgggaaacaggctgtttcatacacttttcatagaaaagtgattctatctttgatagaataatttagtactatctatccatttttaaaatcaagtcttttacccaacagtttaacttctaagaatttatcttctaagaatttatgcactgactcatcaaaaagatacaaaaaaaatccaccacaacctttttttgtaaaggcaagaacatatccacaaacactctagaagcaaattaaatgattattaataggggacttctaaaattgatacatcagtagctgttgaatgagaaaaaaagaaagctgctaattatatattattaactaaaaaagcaagttcttggatgatacagtatgatgccatttgtattattttttaataaagaatagagcaaaagctctattttcttcatgcaatacagtggttctcaaasttttattttctcaaattttaacagggccattcgtggtctctagaagagcagcagcattagtatcaccagggaacttggtagaaattcaaagtcagg

SEQ ID NO: 458605 - DNA, 622 bp, Homo sapiens
gcactgctgattccagctggtttcatgatgctgcatccttctgggtatctctcggggggatgtcaaggtgttccccagggatgtggaagtgctagagctattgagccccagggcaggatttagtggtggctttgttctcaaaataatgccatgttgcagcagcctgggccccagaggatgggggtgcagtgttgatttcttctttgggattgcagtcatgtggactccaggcagcttcctatactaggctcatgacctctgagggctggaagactcttcttaactcagaattgcaggcatatgtggtggaatgtggactgctagggatctcccacttacctcttctggctatgaggagtctctcttgcctcagagttgcttctgtctagctgcttcacttccctctctatgctgctatctcaagtttctatgcctcggagggtctttctcagttccttcctgaattccagtgttctcctttagatgtcctatgtgaagcctggttatctattttttgctttggtcctttttttgtgggcaacaccasttctgggtgcctctatgcaagcatcttaatgaaattctttgcacatatctatgtgattgcatttatgtgacgttt

SEQ ID NO: 458606 - DNA, 533 bp, Homo sapiens
tttttaaaggacagaaactactacaccctgaagactttccacacttttacgcaatgtggagggtgctagtcaatggtcagttatttttatccatgatgtgactattacctccatctctagctacagaaagcaaaactttcattcataacaggcaaccaacctaatagcaatgagcacttacttcaagcattcacatgtagctttttaacagtaatttaccacttaagggaaataattcttcttggagagatgacagactccaggtctggggcaggaaatgttcaggatgagtgtagagtatcttgttgcaccagatacttaagaatccagagactgctgaggtcatgtcgaaaggactcagagccaacttgaaaggactttcactagtgaccagtggcacatttcgaaaatcagaaagaatattcacaattaattgaaacayattaagtgtgttaaaattccatggatttataataataatacaagaaaattggtaacttttacagaatgctaggggcagagcacaacccaac

SEQ ID NO: 458607 - DNA, 494 bp, Homo sapiens
ggttactcactaatgatctgtaagaggggagtgcatacttgggtctgctgtaccaccgaaaggttgtaggtattctcagcatcttctaagtaaccaacacaaaccaaagctttttacattgttcrtcgaatagcacattctagtctaagttgactttatagctatatttatcagctgcaattaataaaataccctattattaatgacttaagtaactgtttacttatctcaaatatgaagaggtctggaagaaggtagttgctgctattgaattaactacttaaccctggcattaagagaacagcctctttccatctttacttttgctatttcttactatgttgggtttcattcccattctcattgctttgtataacagttgcaaggtgtctactgcactaccagaaatcacagccacattccaggcaggaatgaaagtaaaggagcaaaagactttcttttctttgtcttataattctgaaaaggaagtcctc

SEQ ID NO: 458608 - DNA, 541 bp, Homo sapiens
gggggaagtccctcaatttagaaacaataattatctgattcctgtcttgtcagatatttctactaacaaaaaagaccaggaagtgtttcccttcacagaggaaaggacattgtttattaccatcagatgttttctaacagctactctggaatgtagagagggaaaaatttgagggaaggggaaaaatgtgagggaagcttatttaaactttagtrtgcaatagttttggaaatctccttgccataggagagtgaatcaaactctatagagaaaaaggatgtgaaaaaaagaaaaagaactactatatagtctttatatgaattcagtctttctagagactctactgaattaaaactttgcactaagtgctatttgatatttttccatgttctgatagtctgtcttatctaacttgggatcatggctaaaaaaaaaagtttgttttacctcttttggtaagtttattttaaaaaatcagattagttttaagaattactgaaaaatcaagcaataattttatctttgacattcatgttaataa

SEQ ID NO: 458609 - DNA, 541 bp, Homo sapiens
gggggaagtccctcaatttagaaacaataattatctgattcctgtcttgtcagatatttctactaacaaaaaagaccaggaagtgtttcccttcacagaggaaaggacattgtttattaccatcagatgttttctaacagctactctggaatgtagagagggaaaaatttgagggaaggggaaaaatgtgagggaagcttatttaaactttagtatgcaatagttttggaaatctccttgccataggagagtgaatcaaactctatagagaaaaaggatgtgaaaaaaagaaaaagaactactatatagtctttatatgaattcagtctttctagagactctactgaattaaaactttgcactaagtgctatttgatatttttccatgttctgatagtctgtcttatctaacttgggatcatggctwaaaaaaaaagtttgttttacctcttttggtaagtttattttaaaaaatcagattagttttaagaattactgaaaaatcaagcaataattttatctttgacattcatgttaataa

SEQ ID NO: 458610 - DNA, 520 bp, Homo sapiens
tagaataataatatgaaggactgttcagtatattctcctctttcttaatgtggctgctcagaactagatgccacaccccatattttccttatcccctggcagatagtgaacctttcaaaaaattgatgtaaggaagggaagaagaacaaagagatgaaaagaaaagaaggaatcygtccatgggaaaaaattcgctaaatgagggccatgccaaggtactcaccatatagtggaatataatatacttgtattagtccattctcatgctgctaataaagacatacctgagactgggtaatttataaaggaaagaggtttaattgactcacagttccacagggctggggaggcctcaggaaacttacagtcatggcggaaggggaagcaaacatgtccttcgtcacatggcagcagcaaggagaagtacagagcaaagtaggggaaaagcccctcatgaaaccatcaggtcttgtaagaactcactcactatcatgagaacagcatggaggtaaccatcccc

SEQ ID NO: 458611 - DNA, 520 bp, Homo sapiens
tagaataataatatgaaggactgttcagtatattctcctctttcttaatgtggctgctcagaactagatgccacaccccatattttccttatcccctggcagatagtgaacctttcaaaaaattgatgtaaggaagggaagaagaacaaagagatgaaaagaaaagaaggaatccgtccatgggaaaaaattcgctaaatgagggccatgccaaggtactcaccatatagtggaatataatatacttgtattagtccattctcatgctgctaataaagacatacctgagactgggtaatttataaaggaaagaggtttaattgactcacagttccacagggctggggaggcctcaggaaacttacagtcatggcggaaggggaagcaaacatgtccttcgtcacatggcagcagcaaggagaagtacagagcaaagtaggggaaaagcccctcatraaaccatcaggtcttgtaagaactcactcactatcatgagaacagcatggaggtaaccatcccc

SEQ ID NO: 458612 - DNA, 582 bp, Homo sapiens
atccatgagctaacacaataatcctttcaaccgaagattttgactgtctgttctatgtaacactctgtgctattctagaaaaggttgtattctgggaaaggttattaaacagatggttgtgagccataagaaagtggaagacatctctaggaataaacaagaatccactaaaagaaagtcaagccaaatcgacatgatcatctgtgatagaagagactagtcaggcaaaacactgctgtaggttagttcattttgatttyggaacaacgtttgagggaggttctcaaggaactgtgattgaaaacatagattgcttaataatttaatgaggtgatgtttaataagcttaataactataaaaatgaaaactaacattattctataaaaatttgttctggaagctgtgctatttggggtggtactaattgactgaatggcaatggaaacttcaggaagataaaatgttaaatctatcacatctaggtaaataaacattaagtctcacatttgagccaggaacaaagtttctatttaaggaatttgaggtggggggtgcagataatgcacaaaggtgaaaaagca

SEQ ID NO: 458613 - DNA, 516 bp, Homo sapiens
aggaactgtgattgaaaacatagattgcttaataatttaatgaggtgatgtttaataagcttaataactataaaaatgaaaactaacattattctataaaaatttgttctggaagctgtgctatttggggtggtactaattgactgaatggcaatggaaacttcaggaagataaaatgttaaatctatcacatctaggtaaataaacattaagtctcacatttgagccaggaacaaagtttctatttaaggaatttgaggtggggggtgcagataatgcacaaaggtgaaaaagcacagctttcttctgttctttgagcatattctttgtcagcctataggctgaccaatgatttatgatattcagatgcaaattaagggcagaaaaaagcgaagaaatgaacattcatagagagttgtgaaaaggtttaaaacctattctaggttctgcttaggatattagccaaaaatgtgaatccttcaartagttacagggttgtatttcctgagacctaga

SEQ ID NO: 458614 - DNA, 575 bp, Homo sapiens
tatagtatcatacagaatagtttcacctaggccaagtgtgttggctcatgcctttaatcccaacacttcgggaggccgaggcaggtggatcacttgaggccgggagtttgagaccagcctggccarcatggcaaaaccgcgtctctactaaaaatacaaaaaattagccaggcatggtggcacaagcctgtcatcccagctacttgggtggctgagccacaagaattgcttgaacctgggaggtgaaggttgcagtaagctgagattgtgtcactgtactccagacttggcaacagagcaagacactgtctcaaaaaaagaaaaaaagaatagtgtcacctaaaaatcctctgtgctctacttattcattcctccctgcaccctaacctctggcagccactgatctttttactgtctccatatatttgccttttccaaagtgtcatatacttgtaatcatgtagtatgtagccttttcacattgccttttttcccttagtaacatgcatttaaagtgccttcatgtcagttcatgtcttgatagtgtctgtctttgtagctttgaataatattcc

SEQ ID NO: 458615 - DNA, 494 bp, Homo sapiens
ctttcaagttttagcaattatgaataaagttgctataaatattcatgtgtaggcttttgtgtggacataagttttcagctcctttgaataaataccaagtaatgtgattgccagattgtatagttagaatatgtttagtttcgtaagaaactgctaaacagtattccaaagcatcagtrccattttgcgttcctgttggcaataaattaaagttcctactgctccatatcctcaccaacatttggtgttctcagtgttctggatttttgctattctaataggtgtgtagtggtatcctgttgttttactttgcatttctctaagaaaatatgttgagcatgttttcctatgtttctttgccaactgtatatcctctttggtgaagagtctgttcaggctttgaccattttttaatcaggtggttggttttcttattgttgagttgtaagcattctttgtatattttggagaacagttctttatgtgttttgcaa

SEQ ID NO: 458616 - DNA, 494 bp, Homo sapiens
ctttcaagttttagcaattatgaataaagttgctataaatattcatgtgtaggcttttgtgtggacataagttttcagctcctttgaataaataccaagtaatgtgattgccagattgtatagttagaatatgtttagtttcgtaagaaactgctaaacagtattccaaagcatcagtgccattttgcgttcctgttggcaataaattaaagttcctactgctccatatcctcaccaacatttggtgttctcagtgttctggatttttgctattctaataggtrtgtagtggtatcctgttgttttactttgcatttctctaagaaaatatgttgagcatgttttcctatgtttctttgccaactgtatatcctctttggtgaagagtctgttcaggctttgaccattttttaatcaggtggttggttttcttattgttgagttgtaagcattctttgtatattttggagaacagttctttatgtgttttgcaa

SEQ ID NO: 458617 - DNA, 543 bp, Homo sapiens
tttatttattcattcacctactggaggacatcttggttgctttcaagttttagcaattatgaataaagttgctataaatattcatgtgtaggcttttgtgtggacataagttttcagctcctttgaataaataccaagtaatgtgattgccagattgtatagttagaatatgtttagtttcgtaagaaactgctaaacagtattccaaagcatcagtgccattttgcgttcctgttggcaataaattaaagttcctactgctccatatcctcaccaacatttggtgttctcagtgttctggatttttgctattctaataggtgtgtagtggtatcctgttgttttactttgcatttctctaagaaaatatgttgagcatgttttcctatgtttctttgccaactgtatatcctctttggtgaagagtctgttcaggctttgaccattttttartcaggtggttggttttcttattgttgagttgtaagcattctttgtatattttggagaacagttctttatgtgttttgcaaatattttctt

SEQ ID NO: 458618 - DNA, 594 bp, Homo sapiens
cttccagaaggccaatggaccgggaacttaacaggtcatgggtagacttagagagagcaacttaagtgatgaggagtggagtgcactggattgaatgagtttgagacagagcctgtgggaaagacaggtggctagtatggaaaatgttcatgatgatgggcaggaaaaggaccaatgcatcataaatgccttcaaggagcattaccagagttgagagtcttcacttctcaggggcaggatcgaacacgctgttttcgctccaggcactgagattcagaggaaccaggaagcccgctcatggaatccctccrcctaccctcccagggaacctactggttgtagcctcatcttcctctccatcaatgtacccatgtccacaggtcacactttgccactattgtcacttttagtgacacagctctactgtagacagcaggagaaacaggcatattaggctgccactgactttattgctttttgtgccatgacaatttttcataacagtgcagattccgttgtctttaggcaaaaaatgtcactctgcccaacatcaaactgtaactgcttcacacagccctgtctcagggggagaaa

SEQ ID NO: 458619 - DNA, 643 bp, Homo sapiens
ctccactctgctttggcctggtctgctggggcctagtgcaggagctcagtctaaaacaatggcttcccataaactttgtttaacatgagccagttatcctctcaactttctgccactcagccaggcgactacctgactggagtccctggccaagcagatagatttgcgctccttaaaagctctaccttgttgcacccctaacctgctctccttccagtcgatgtcaccccaaataaacgaggctagtaggcacagaccccacagtcacagataggtctcttaggtccccctgcaggagatctctggacaggcaggtggaaattcattcatgcacttgaagggcttaratcaacactttacacattctgaggtttccactgtttcttccgatcagctatcattttgggtcctgttgctccttcagaggaagaaaagtatgagtccacagttgcttctagctcagcctgtatctgacctcaatttcctattactgcctgtctgcgttaagcaaaatagttcattgagctacatacatatttaagcaatcggggaaatttgatcaaaaagttcaataaatatataaaagcctgtaggaaagattaatggaaagatcaggtaataacatgagatggctgtgagaagt

SEQ ID NO: 458620 - DNA, 605 bp, Homo sapiens
agttataaaacacctgctatctgttactgtattttactttctataccaaaaaagcatgtattttcagataaatttcaatatatcaatcttttgtgtttcatcttataacagttttactaaaaattgtttgactcatgtggtcttcaggttggggaaggctaggacagatggcacagcagagtggttaaagcagggtctcagaggcagactgcctcgatgtgaaacccagctctgccacttactgtgtgaccttgggaaaattactcaccctctctgtgctcaatttccytatctctaaaatgggaataacagtagtacttccctcagagcctcagaattgctagggtaatcaaatgacttaatgtccaataagcacttagaacattgcctgacacatagaaacaccaaataagagccccttataattactatttttgtctctactcaaatactgtacctgcctctatttttgaagaatttgaaaaatacttgatatttgaaatctctgcgattatttcaaggaatttaatagcaaaatgatacctgggccttggaactgtcatttaggatggactgtttgtgaaatatgcctttttaaaacatca

SEQ ID NO: 458621 - DNA, 602 bp, Homo sapiens
agtaccttttggaaaacttgttcctgaaaataccaggcttatagactgcactaggttctgttccacttcacagatcctaacccaatggtaaaagcagaatgacaagtggtcagatttattatgtatttaagtatacagatattaaggagagaaatagtagatggtggcaaaagagcattcagtaataaaatctagcaataattttctactctcccctccctcccccatatttggttactacatactctagagcagagattatgaagatcttgtttactgtgtttccaggggatgactaagtttccaggggatgactaagaacaatgtatttcaactggaaatgcttaaacagtccaaattttaatttaccctcgaaaatattaaaaatattagggggaaactaatggctgcagcagaaatttgcaattcaaatagcattcatttttttcttctgtgcagcaaactgctttcattcagaaaaacaacaaacaaggcaaagccaaacaacyctatatatgctttgaacacctaccacacagagtaatgttgaagtggtgctaattgttgtatcactatgatttctcatctaattttatcaatgc

SEQ ID NO: 458622 - DNA, 552 bp, Homo sapiens
taaggggtgtgcggtacccagtttgagctctttctctggagtaatgctatcgcacggactggtggaagcttcctacagaagactcagagcctgctagggtcaagggactttcctgtggttaggattgcaggagtccatggtgggaatgtagacagtgggggatattttacttatcctttccccacactggggagcctctccagactcccagccaatcctggccaggctggctgccgcctcgtttccttctcttcctgcgcctcargtgtttcctgtcacttctctacagaattccagtgttctctcttagatgctctgtttaaagtgtgattatatatgagctatttcgggttttcttgttgttgttgagcaggatagcgttgggtgcctctagtcagccaccttgaagccccctccatcatgatgactttaatctgctcttatgtaatcttaaataagacactgcttcatggggttaaatttattcatattgcaaggatattctttaaatctttcttagtaaggagtgctgaatttccctccaatcttaat

SEQ ID NO: 458623 - DNA, 315 bp, Homo sapiens
ttctgtcattcctgcttgagtcattcaattggttctttgatcaattcattccgttttcagttctcaaaagaaaaaaacagacgtcttactttctaacattccacatgtggttttcattttcttgcactgttattagaattggactaacttgtagtcaatggcaaatcttttttggaatgtagttgggataattaaaaagccttctrcaggaaaaagattgtatgaaacaatcctgcttctcaattacattgtaatttttgggaaaatggggcaagtgattttcattagttgacttggtgaccaatactgttctct

SEQ ID NO: 458624 - DNA, 572 bp, Homo sapiens
aaatcatcaagttaatctcactatttcatttggtcccattcaagtcagccacaagaaactctagcctcccagttcatgccttagcrcaagccactgtcatttcacctggatgacagtggtggcattctgtctccctgctttcaccttatactcagcagctagagtgagccttttaaagctgttacctatgcctctactcaaaaacttctatggttttcctctacttcaatgtaagattcataagagtttttttttattatgttcagtactagctctacaatgtctagaacaacacctagcacataacgcatgctcagaaaatatttgtcagagaaataaggaaggaacagccccctccactcaatgttcccttcagtttccttagtctttttatttatctaactttatcttttttatcttaactaagtctttttttatcccacattgcttattctaaaaataaatataatggtaaatatagaaaaaatcatgtaagattaacaaaagtcttgaaccatgctttattctaaacacgtcccgtagtaatagtttctttcattatatctcttccc

SEQ ID NO: 458625 - DNA, 572 bp, Homo sapiens
aaatcatcaagttaatctcactatttcatttggtcccattcaagtcagccacaagaaactctagcctcccagttcatgccttagcacaagccactgtcatttcacctggatgacagtggtggcattctgtctccctgctttcaccttatactcagcagctagagtgakccttttaaagctgttacctatgcctctactcaaaaacttctatggttttcctctacttcaatgtaagattcataagagtttttttttattatgttcagtactagctctacaatgtctagaacaacacctagcacataacgcatgctcagaaaatatttgtcagagaaataaggaaggaacagccccctccactcaatgttcccttcagtttccttagtctttttatttatctaactttatcttttttatcttaactaagtctttttttatcccacattgcttattctaaaaataaatataatggtaaatatagaaaaaatcatgtaagattaacaaaagtcttgaaccatgctttattctaaacacgtcccgtagtaatagtttctttcattatatctcttccc

SEQ ID NO: 458626 - DNA, 435 bp, Homo sapiens
ttccacaacttgaccagcagaactgtttattttatatatatattctagccactagagactaagcatcatatattggctactagtttattgcatatattgtattctagaagacagaaacccaaatctgtgggatgctattcttgaactttagaggagcttttaattggcctaacattctattagactaatttcatgtaaggtggcatatggtaagataaatgagttatgtgatcatgcattaattgttattttttctttactttaaacttggccaattagtctgacatgatgttatacaacagcagtcttcaacacttttggcaccagggactagtttcatggaaggcaatttttccatggattgggcatggagttgsgggggctggtttcaggatgattcaagcacattacatttattgtgcactttatttctat

SEQ ID NO: 458627 - DNA, 545 bp, Homo sapiens
aaccatattacacggtgtgattgttacccctgttttgtaaacagaactgctttagtttgggaagtaactttctgaggacttcatagcaagtaagcagtatgtcgggggtgagggaggagctctttcttttcattattgagaggctcatgctctgaaccactgcactaacatacattttagatgacaggttatttcagacctttctgtttcctcaggcctcttctctagcagatgacattatcttcttctaacaaaggaaattgagagtttggattaaaaactctgagatgtgcattttttcctcctgaagacaataatgaaggaaatacagttgagtacagagagaatagaagttcttccaaataattmtcttaccgctatcttgaggccagtgattttgactttccagacatctttttacatcattagccactgttctctctctcagtctgtctctctgcctatctccagtgctctgacttctccctctgttatgactaatttacctcatcattaaaagtgaactcttgctctatctagggaaa

SEQ ID NO: 458628 - DNA, 605 bp, Homo sapiens
ggtgactatagtcaaactatcacattgtacctcataaaacatacacaattatgatttttcaattaaaataataataaaaaagaaagggcaaaaaaatagctrataacaacccctttaaaaaatggtcttctaaggataccaatgaccttttgactctccaattaaaatggaaactgaagagtccttagtttagtagacattattatggcaaatatcaaataaatatcaaataaagcttttgatgacaacttattttttcttgaaattatcatctccttttgcttgaacatgcattttttccctttgttacctcactttttggaatagcccatcacatttacctctccacattcccctttgttgtattcttttcaaatggcggtgatcctctggagtgtgtctttcttgacttcccttcttagattctatacattcctctgtaacagatgttctgcaacaatgaccgtatctttgtcccactgctctgctgaactccaattcagcctaatgtgagcctccgttctggtagttcttttgaacctgaaaatcagtatgtcactgtctaaacttgtatcttttcactaaatcctcttctgttgcctctt

SEQ ID NO: 458629 - DNA, 611 bp, Homo sapiens
aagagttaagtaagagttaggtatgtaattacataaatacaacttgtttgaaggttttcagtttaaaggtttaatagaagtccaaacaaatactagtgctgataagatggtttggagagttataagtaattcctacccaaatttagtctattattttaaatattagaatttacattaatacaaaaccctttatctacacatatttaaagtttccacaaccttcattttctcagccttccagtgatgttttttaaatttcacaaatggagaaactgggggaggttaattggctttccactgcaatgaagggtgagtcagtgacagagacagaaatagacaccagggcttcatctcttctcatcctggttcatatcatgagaaaaagctttctgcttataaatacatttaatgacatggttcctggaactgttaattaggagagtttttaaaacccacctggttttagraacagattgcaacttccaaagttgggcatgttttgatgaaaaggttgggagatttgtgtcaattttttgagaattagaaatcagttcatcacttaaggaaacaaaaaatatatatagtgaagtgtgtatatagttgccttcata

SEQ ID NO: 458630 - DNA, 632 bp, Homo sapiens
agaaatcagttcatcacttaaggaaacaaaaaatatatatagtgaagtgtgtatatagttgccttcataaatgcttgtcaatgtgttccacccctgttctagtgctaagatagctacgaaagttgtatgtatacctatatgagtcaagagtacattgattttgttggaaacatgaacacatgaaaaagcatacacatataaatatggaagaaaaactgagctaaagrgaaaactgaacaaaagaaaaaaagggaattaggattgatttagtctgtcttagtggaatatttgatgcatgcagatgttccttaacttacaatgggattatacccccaataaatcctttgtaacttgaaaatatcctaagttaaaaatgcatttaatatacacaacctaccaaacactatagcttaacacggcctaccttaaacatgctcagaaatttacattagcctatagttgggaaaaatcatccaacataaagcctatttttttatgaagtgttgaatatctcatgtaatttattgaacattatatggaaacaaaaaaaaaaaacagatgatactatgggtactcaaagtagtttctactaaatagatatcactttggaccattgtaaaattgaaagactg

SEQ ID NO: 458631 - DNA, 558 bp, Homo sapiens
agatagctacgaaagttgtatgtatacctatatgagtcaagagtacattgattttgttggaaacatgaacacatgaaaaagcatacacatataaatatggaagaaaaactgagctaaagagaaaactgaacaaaagaaaaaaagggaattaggattgatttagtctgtcttagtggaatatttgatgcatgcagatrttccttaacttacaatgggattatacccccaataaatcctttgtaacttgaaaatatcctaagttaaaaatgcatttaatatacacaacctaccaaacactatagcttaacacggcctaccttaaacatgctcagaaatttacattagcctatagttgggaaaaatcatccaacataaagcctatttttttatgaagtgttgaatatctcatgtaatttattgaacattatatggaaacaaaaaaaaaaaacagatgatactatgggtactcaaagtagtttctactaaatagatatcactttggaccattgtaaaattgaaagactgtatatcaagacatcataagtcggggaccatatg

SEQ ID NO: 458632 - DNA, 561 bp, Homo sapiens
cgtctatgaaaaggcagtcttagactaccagataaacaagtctatactatagtagtccccctaaatccccagtggatgcctgaaacaaaggatagtgctgaaccctatatacattgtgttttttcctatacagtaacgggcaggttgcgtttattatatggatacgctaaagggatgattcatgtccggggtaggatggcacaagatttcatcatgatactcagaacgacacggaatataaaacttattaattgtttatgtctggaatttttcacttamtgtttttcagactgaatcctcagaaagcaaaaccatgggtaaggggggactactgcattctgttcatgtctgctagctaatgtgaatacacggtaccaagaagtttcttaaaggaatcttcttcacgtggtcctcactgatgtcacctctatccagttagggattctttaggtgcaagttgaattatttaagacagcttaatgaggattacttaatgcaacatggcatgccaattccctctttaaatctgtagttttaactcagatacatcatagtattatt

SEQ ID NO: 458633 - DNA, 561 bp, Homo sapiens
cgtctatgaaaaggcagtcttagactaccagataaacaagtctatactatagtagtccccctaaatccccagtggatgcctgaaacaaaggatagtgctgaaccctatatacattgtgttttttcctatacagtaacgggcaggttgcgtttattatatggatacgctaaagggatgattcatgtccggggtaggatggcacaagatttcatcatgatactcagaacgacacggaatataaaacttattaattgtttatgtctggaatttttcacttactgtttttcagactgaatcctcagaaagcaaaaccatgggtaaggggggactactgcattctgttcatgtctgctagctamtgtgaatacacggtaccaagaagtttcttaaaggaatcttcttcacgtggtcctcactgatgtcacctctatccagttagggattctttaggtgcaagttgaattatttaagacagcttaatgaggattacttaatgcaacatggcatgccaattccctctttaaatctgtagttttaactcagatacatcatagtattatt

SEQ ID NO: 458634 - DNA, 598 bp, Homo sapiens
tcagtagcaagctttggtatcattcatttattcattaatatagtttccagatactattgagtactgcctacgtgccgtgcactgtgctcaagttaattatactcttagagaaggagatatgctgaaagctgctctatatgtcttctagcaggtcaagagagaagacaggctgttcctaggaaactatagttgagtgtccagaagaagcttagggcagtatgacatgagcagttkgttcacagatagggtgtttgtgagtcaagagtgttgcagacctatgaaagtgagtatttcattttgaggaccataagttatttacatgtgtatatagaaacatacatagagaaaaatatgtaagcagtagaaaagagtacgaagaaagaaaaaaattcaaacaactcatttttatgctttcctaagcagcagctatggcaaagatttgagtgcaactaacctatgtggaaggtgaaatcaggaagcactcttagcagagtatggaataaagacaatggaaagaatccaatgagggtgccttaatgaatagttgactgctgaaaacaacaggagttcagtctcctggagacctctgggagacaac

SEQ ID NO: 458635 - DNA, 598 bp, Homo sapiens
tcagtagcaagctttggtatcattcatttattcattaatatagtttccagatactattgagtactgcctacgtgccgtgcactgtgctcaagttaattatactcttagagaaggagatatgctgaaagctgctctatatgtcttctagcaggtcaagagagaagacaggctgttcctaggaaactatagttgagtgtccagaagaagcttagggcagtatgacatgagcagttggttcacagatagggtgtttgtgagtcaagagtgttgcagacctatgaaagtgagtatttcattttgaggaccataagttatttacatgtgtatatagaaacatacatagagaaaaatatgtaagcagtagaaaagagtacgaagaaagaaaaaaattcaaacaactcatttttatgctttcctaagcagcagctatggcaaagatttgagtgcaactaacctatgtggaaggtgaaatcaggaagyactcttagcagagtatggaataaagacaatggaaagaatccaatgagggtgccttaatgaatagttgactgctgaaaacaacaggagttcagtctcctggagacctctgggagacaac

SEQ ID NO: 458636 - DNA, 546 bp, Homo sapiens
gctgttcctaggaaactatagttgagtgtccagaagaagcttagggcagtatgacatgagcagttggttcacagatagggtgtttgtgagtcaagagtgttgcagacctatgaaagtgagtatttcattttgaggaccataagttatttacatgtgtatatagaaacatacatagagaaaaatatgtaagcagtagaaaagagtacgaagaaagaaaaaaattcaaacaactcatttttatgctttcctaagcagcagctatggcaaagatttgagtgcaactaacctatgtggaaggtgaaatcaggaagcactcttagcagagtatggaataaagacaatggaaagaatccaatgagggtgccttaatgaatagttgactgctgaaaacaacaggagttcagtctcctggagacctctgggagacaacagggaccattcctcacagctgtaaccccctgtacccaagggggamgaagctggattgtttattctctaaataccatttatcattcccagagggctgtcctcccaaccttcgttttt

SEQ ID NO: 458637 - DNA, 611 bp, Homo sapiens
tgatcatttttaatatgcctattgaccatatgtatgtcttcctttaataaatgtctattcagcttccttgcccagtttaaaaatctggtaatagtcattcaagttccttgtatattttrgatattaacccctatcagctgcatggtttgtaaatattttaccccatttcataggttgtctcttcactctgttgactgtttccttggctgtacaaaaacttcttagtttgatgtcattccatttgtttatttttgcttttgttgcctgtgcctttgggttcatataaaaaattcattgcctagacccatgtcatgaatagagcttttagagtttagtttcttacatttaagtctttaattcatttgaagttgatttttgtatacaatgtgagataaagatgtaattttatttttttgcctgtgcatatctagtttttccaacaccatttattgaagagattgtctattccctattgtgtgttcttggaaacttcgttgaaaatcagttgactataaatatgtggatttatttctatttgttctattccattggtctatgtatctgttttgtgatataaatggtttttactataactttttttgtttcatgct

SEQ ID NO: 458638 - DNA, 611 bp, Homo sapiens
tgatcatttttaatatgcctattgaccatatgtatgtcttcctttaataaatgtctattcagcttccttgcccagtttaaaaatctggtaatagtcattcaagttccttgtatattttagatattaacccctatcagctgcatggtttgtaaatattttaccccatttcataggttgtctcttcactctgttgactgtttccttggctgtacaaaaacttcttagtttgatgtcattccatttgtttatttttgcttttgttgcctgtgcctttgggttcatataaaaaattcattgcctagacccatgtcatgaatagagcttttagagtttagtttcttacatttaagtctttaattcatttgaagttgatttttgtatacaatgtgagataaagatgtaattttatttttttgcctgtgcatatctagtttttccaacaccatttattgaagagattgtctattccctattgtgtgttcttggaaacttygttgaaaatcagttgactataaatatgtggatttatttctatttgttctattccattggtctatgtatctgttttgtgatataaatggtttttactataactttttttgtttcatgct

SEQ ID NO: 458639 - DNA, 573 bp, Homo sapiens
attgagtacctgtggcttttccaggctaagggtacaaacttctggtagatttaccattttggggtctagaggatggtggccctcttctcacagctccactaggcagttcaccagtggggactctgtggggctccaaccccacattccccctctgcactgccctaagtacacgttctccatgagggctccrcccctgcaaatagtttttgcctggacacccagacttttccatacatcctctgaaatctaagcagaggctcccaagcctcaactcttgcattctgcccacccacatgcctaacaccacggggaagctgccaaggctaagagcttgcaccctctgaagcagcattctgagctgtacctgggcccctcttagccaacgctggagctgaagtggctgggatgcaggaagcagtgtcccaaggctgtgcagggtagcggggccctggactcagcccagaaaaccattctgtcctcctagacctctgagcctatgatgggaggggctgccccaaatgtctctgaaatgccttaaggccttttcctcattgtcttgaccattagcacttg

SEQ ID NO: 458640 - DNA, 629 bp, Homo sapiens
tgtgggcagctctgcctctgtggctttgcagggctcagcccccatggcttctgtcacatgctgacattgagtacctgtggcttttccaggctaagggtacaaacttctggtagatttaccattttggggtctagaggatggtggccctcttctcacagctccactaggcagttcaccagtggggactctgtggggctccaaccccacattccccctctgcactgccctaagtacacgttctccatgagggctccacccctgcaaatagtttttgcctggacacccagacttttccatacatcctctgaaatctaagcagaggctcccaagcctcaactcttgcattctgcccacccacatgcytaacaccacggggaagctgccaaggctaagagcttgcaccctctgaagcagcattctgagctgtacctgggcccctcttagccaacgctggagctgaagtggctgggatgcaggaagcagtgtcccaaggctgtgcagggtagcggggccctggactcagcccagaaaaccattctgtcctcctagacctctgagcctatgatgggaggggctgccccaaatgtctctgaaatgccttaaggccttttcctcattgtcttgaccat

SEQ ID NO: 458641 - DNA, 573 bp, Homo sapiens
attgagtacctgtggcttttccaggctaagggtacaaacttctggtagatttaccattttggggtctagaggatggtggccctcttctcacagctccactaggcagttcaccagtggggactctgtggggctccaaccccacattccccctctgcactgccctaagtacacgttctccatgagggctccacccctgcaaatagtttttgcctggacacccagacttttccatacatcctctgaaatctaagcagaggctcccaagcctcaactcttgcattctgcccacccacatgcctaacaccacggggaagctgccaaggctaagagcttgcaccctctgaagcagcattcwgagctgtacctgggcccctcttagccaacgctggagctgaagtggctgggatgcaggaagcagtgtcccaaggctgtgcagggtagcggggccctggactcagcccagaaaaccattctgtcctcctagacctctgagcctatgatgggaggggctgccccaaatgtctctgaaatgccttaaggccttttcctcattgtcttgaccattagcacttg

SEQ ID NO: 458642 - DNA, 608 bp, Homo sapiens
ttaccctgggctgcctgtcgaggttttacgttatttatttggctattctgctagcaattaaactctgagcctaattttcagcacagcactgacttcacggaaagacctctaacaatgccaagaagatcttcagactttatcatgttctgatacttgagaccttatcattctctttctttcttaaagtmttttaagaaatttaacaaaaaccacccacctcctaatttttattgccattgtcccacaccattcaagggctagaactaatgcataagttaatatgtcctctttcaattgtatttaattttagtccatcataggtgaggctcttggtggttgtgatattgctttacacatcagaggttatcatcattctgtttatttccagtaagaactcatatctgagcagtgagagatccagttccaaaatcccacctcaagaataagtttttcaggaccacgtctgggacaactgtctttgtttaggcatgctcaattatagagcttgaaagaaaatttgtgaggggaactataaaatagttgagagagagaatgaaaaagaaaaatttaaattaaggacaagtattcaaagtaggtctgagggtaac

SEQ ID NO: 458643 - DNA, 527 bp, Homo sapiens
ttttaatttttccccttttctttttctaaataggtggcaagatatattgcatccaagctgagaacttaagaaaactacccataatgacatcacaattatatgtgttgcttcaattattagtttactcaatcaccagttcccagaagatattattgaaagggttacattattgaaatgctaaacaaaggtggtacttggtaccatatgtacttgagaaaacaaaatctgactggtaggaaatttttatgcrtgccattcctctttgaacttgacattaggtctgtttgttacacaagaatgtatctgagtcctgtctgagataaaggatactactctgaagatgcaaagaatatgtggaccttaagctggccttacaatactcttttcttgttttaacgtattgcaagtcaaatttagcctgacattttatcagattgtttaatttcaggaatatgcatccaatcattctgatggctctttctttaaaattctccatgattttttcttttttttttaaattaagttgg

SEQ ID NO: 458644 - DNA, 527 bp, Homo sapiens
ttttaatttttccccttttctttttctaaataggtggcaagatatattgcatccaagctgagaacttaagaaaactacccataatgacatcacaattatatgtgttgcttcaattattagtttactcaatcaccagttcccagaagatattattgaaagggttacattattgaaatgctaaacaaaggtggtacttggtaccatatgtacttgagaaaacaaaatctgactggtaggaaatttttatgcatgccattcctctttgaacttgacattaggtctgtttgttacacaagaatrtatctgagtcctgtctgagataaaggatactactctgaagatgcaaagaatatgtggaccttaagctggccttacaatactcttttcttgttttaacgtattgcaagtcaaatttagcctgacattttatcagattgtttaatttcaggaatatgcatccaatcattctgatggctctttctttaaaattctccatgattttttcttttttttttaaattaagttgg

SEQ ID NO: 458645 - DNA, 606 bp, Homo sapiens
agtcaaataacaaatgttttatgcctcaagactgaaaaacatgaatatttatattacaagaaggaaattgtatagaaattgttagacraaggaccacaatttatatcgacttacgtggaaacttgagttccttccattctctgacaaagacaaccttcattataggaacttgaattgttaaatctgaattcttgacaacccaatcaattttcctttgttaagaagcagataggcactcccaccttgactggatattatcatcactataatctgcatgaacccctccaaaaagccattctatgttccctctcattcatcttagtagaatcagaatttaaggggggtgtgtgtgtgtgtgggtgtatgcgtgtgtgtgtgtgtgtgtgtgtgtgtgtgtgtgtgtaacattaagcacctattacatcagccaattcctctagtagatttgtgatgttgacaggattgttctataatctttatcatacagatagtaagctaaggctcctactgttgttctctgctgcttgcagtgagttttgccttacattgtaattcagaaagcggtaacagtggtaaaacttaaagtttaaaaaagtacttaaagac

SEQ ID NO: 458646 - DNA, 507 bp, Homo sapiens
tcctgaactgccacaactcacatgaattttgctgcttccatggtgttcttcagtgtacttctgcagtcactctactcaaaatataattattttttgtttctgtccgcttttgtgaggatagggcaagcactaggtaactagatccagccatcttgctgattctatgaaggattaggtgtaaccacattttaaaygtattattttcgcaagggctcaagggctcacactcagtgaatgacaggataaggctcataacttaggttccccaaacttctgctttctattcaaacattgtgtcaatatagctactttctgttcataaatgtggtcagagaaattggtctataggataacctctggagaactttcacatcaatctactctgcaacttaaaattgtgcctttaaatcatatgcctttatgctttaaaatcattttaaaacgatttttggtcaatacacatgtctgcctcagctctgtagttgcacaagtatcttataactagct

SEQ ID NO: 458647 - DNA, 606 bp, Homo sapiens
agtcaaataacaaatgttttatgcctcaagactgaaaaacatgaatatttatattacaagaaggaaattgtatagaaattgttagacgaaggaccacaatttatatcgacttacgtggaaacttgagttccttccattctctgacaaagacaaccttcattataggaacttgaattgttaaatctgaattcttgacaacccaatcaattttcctttgttaagaagcagataggcactcccaccttgactggatattatcatcactataatctgcatgaacccctccaaaaagccattctatgttccctctcattcatcttagtagaatcagaatttaaggggggtgtgtgtgtgtgtgggtgtatgcgtgtgtgtgtgtgtgtgtgtgtgtgtgtgtgtgtgtaacattaagcacctattacatcagccaattcctctagtagatttgtgatgttgacaggattgttctataatctttatcatacaratagtaagctaaggctcctactgttgttctctgctgcttgcagtgagttttgccttacattgtaattcagaaagcggtaacagtggtaaaacttaaagtttaaaaaagtacttaaagac

SEQ ID NO: 458648 - DNA, 619 bp, Homo sapiens
ttatccttggttaaagtctggggagagtgattygataatacacatgttaaaaatcttagctttatttttctttactcagatagaaactatttctgtttggtttaagagaaggttgaaccttgccctccaaaggaaaaataaacatattattttgttctccattttaattgattttcaaaacctaggctaaataaaatcacagagaaaatgagataaagtgttctcagcagctgtattgcaatactgaagtgtctctaatagttgctgttctcagagcagctcatcactttctatcaaaggttaagaaataattgtttgggaactgaataaatggataagaaacacaagtaaaggagaacgaaacaagattgaaatgtctaaatcctatgttgtttctaaaggttaggaaagaatgcatattttctttctaaatgtcaatctgaatggcagtgaacctcgaataacatttgaatttaatgtagaacttttgaaaatgaagcaattgcctagctaactgcctgtttgctttggggtaaacttcacgtttggctagctgaaatatcatttccatttggaagtataaacataatagttagctgttatcagaaaggaagagagg

SEQ ID NO: 458649 - DNA, 600 bp, Homo sapiens
tttaattgattttcaaaacctaggctaaataaaatcacagagaaaatgagataaagtgttctcagcagctgtattgcaatactgaagtgtctctaatagttgctgttctcagagcagctcatcactttctatcaaaggttaagaaataattgtttgggaactgaataaatggataagaaacacaagtaaaggagaacgaaacaagattgaaatgtctaaatcctatgttgtttctaaaggttaggaaagaatgcatattttctttctaaatgtcaatctgaatggcagtgaacctcgaataacatttgaatttaatgtagaacttttgaaaatgaagcaattgcctagctaactgcctgtttgctttggggtaaacttcacgtttggctagctgaaatatcatttccatttggaagtataaacataatagttagctgttatcagaaaggaagagaggatctttatttgttagatascaatcaatctgggattgctgaggctcagcaggcaggataatgaatggagctacgcagttcatctgactgttgcctatttaggattagaatggaccaggcgttgaacattattctggacattcag

SEQ ID NO: 458650 - DNA, 595 bp, Homo sapiens
tattagtacttaaattcctggggagtcaaaagctatatatggattaaaaaatacagagaagtcagtccctgctaatttctgtgttgtttaagggacaactgtatattacataattcttcacaggccatgcataagtgtgaagagtttgattagcctaggaagaggacaattgactgtaggacagtaactgcctgttaatcctaggaattagttaaatattaacagggttgttttttttttttttttttcaaatttttttttttttttttaccttgaccaaactatcaactgaagggatctgggcttaggattatacaaattgggtctggaaagtcagtcattaggaacactggaratcagagagagaagtttgaggtcatagctgaaagaacatgaaggcaaacaggcagtatcccagtagacagagggaggcagaatatggcaattccttgttcattctgactgaccaattattatttctgtgtaccatctgtctgagtcatcactaacctctccataaggcctgtccaattttttttgtattctagtggaatttactggtttctattctttcctattagtctttctgaaaatt

SEQ ID NO: 458651 - DNA, 595 bp, Homo sapiens
tattagtacttaaattcctggggagtcaaaagctatatatggattaaaaaatacagagaagtcagtccctgctaatttctgtgttgtttaagggacaactgtatattacataattcttcacaggccatgcataagtgtgaagagtttgattagcctaggaagaggacaattgactgtaggacagtaactgcctgttaatcctaggaattagttaaatattaacagggttgttttttttttttttttttcaaatttttttttttttttttaccttgaccaaactatcaactgaagggatctgggcttaggattatacaaattgggtctggaaagtcagtcattaggaacactggagatcagagagagaagtttgaggtcatagctgaaaraacatgaaggcaaacaggcagtatcccagtagacagagggaggcagaatatggcaattccttgttcattctgactgaccaattattatttctgtgtaccatctgtctgagtcatcactaacctctccataaggcctgtccaattttttttgtattctagtggaatttactggtttctattctttcctattagtctttctgaaaatt

SEQ ID NO: 458652 - DNA, 595 bp, Homo sapiens
tattagtacttaaattcctggggagtcaaaagctatatatggattaaaaaatacagagaagtcagtccctgctaatttctgtgttgtttaagggacaactgtatattacataattcttcacaggccatgcataagtgtgaagagtttgattagcctaggaagaggacaattgactgtaggacagtaactgcctgttaatcctaggaattagttaaatattaacagggttgttttttttttttttttttcaaatttttttttttttttttaccttgaccaaactatcaactgaagggatctgggcttaggattatacaaattgggtctggaaagtcagtcattaggaacactggagatcagagagagaagtttgaggtcatagctgaaagaacatgaaggcaaacaggcagtatcccagtagacagagggaggcaraatatggcaattccttgttcattctgactgaccaattattatttctgtgtaccatctgtctgagtcatcactaacctctccataaggcctgtccaattttttttgtattctagtggaatttactggtttctattctttcctattagtctttctgaaaatt

SEQ ID NO: 458653 - DNA, 520 bp, Homo sapiens
tgggcttaggattatacaaattgggtctggaaagtcagtcattaggaacactggagatcagagagagaagtttgaggtcatagctgaaagaacatgaaggcaaacaggcagtatcccagtagacagagggaggcagaatatggcaattccttgttcattctgactgaccaattattatttctgtgtaccrtctgtctgagtcatcactaacctctccataaggcctgtccaattttttttgtattctagtggaatttactggtttctattctttcctattagtctttctgaaaattgtaggcactatcagtaatgaaatttctgctggaacaacatttcaaagctcataggcatatggacattgttttgactcttaattgttaaacaagtttggaggagcatccttccttctccttatcagaaaatgatggaacagaactgaattcccaaggtcctttagggttctaactttctggaaatagaattgtttaatatcttagaaaatccaggacataaaaaa

SEQ ID NO: 458654 - DNA, 508 bp, Homo sapiens
tctggaaagtcagtcattaggaacactggagatcagagagagaagtttgaggtcatagctgaaagaacatgaaggcaaacaggcagtatcccagtagacagagggaggcagaatatggcaattccttgttcattctgactgaccaattattatttctgtgtaccatctgtctgagtcatcactaacctctccataaggcctgtccaattttttttgtattctagtggaatttactggtttctattctttcctattagtctttctgaaaatwgtaggcactatcagtaatgaaatttctgctggaacaacatttcaaagctcataggcatatggacattgttttgactcttaattgttaaacaagtttggaggagcatccttccttctccttatcagaaaatgatggaacagaactgaattcccaaggtcctttagggttctaactttctggaaatagaattgtttaatatcttagaaaatccaggacataaaaaacattgatttcaaa

SEQ ID NO: 458655 - DNA, 570 bp, Homo sapiens
acattgatattaacgctgttctcaagagctagttatcttttagtctaattgcccttttagcaaaagaagagaaagtatacagccaatttcagaccctataaagaaaactaaaccccatagttaagtgcagaatctttggccatatccatgtaaagatgctagaagaaatagccacttcacactcctctacctactatagagtaaaagtctccaaattgccttaggtcagatctttctaactacaaatccagagaaaaatgggagtcacataatgaggcattatgttattatggtaaaactttgtagttaattatcaagactactttatatattctttattagatatgcatcratgacgatgtatattgctgatagaccttcaaatgaattcagcacattgttcatccttatatcttttgatattatcatttctcatcaatgccctatcttttctatgtactgatgcattaataacttaccaaagatgattaaattgtgtaattttcttctctccctctgagttctcctaattccatatcccattttcttccccaagaggagaaaaatatt

SEQ ID NO: 458656 - DNA, 498 bp, Homo sapiens
tcacactcctctacctactatagagtaaaagtctccaaattgccttaggtcagatctttctaactacaaatccagagaaaaatgggagtcacataatgaggcattatgttattatggtaaaactttgtagttaattatcaagactactttatatattctttattagatatgcatcaatgackatgtatattgctgatagaccttcaaatgaattcagcacattgttcatccttatatcttttgatattatcatttctcatcaatgccctatcttttctatgtactgatgcattaataacttaccaaagatgattaaattgtgtaattttcttctctccctctgagttctcctaattccatatcccattttcttccccaagaggagaaaaatattctggggcttagtctgatatgctctttgagacagttggttttcccagtgtgcttgtaaaaggaaggtgtctgtggattcagattggaatggatagccttgcaatt

SEQ ID NO: 458657 - DNA, 498 bp, Homo sapiens
tcacactcctctacctactatagagtaaaagtctccaaattgccttaggtcagatctttctaactacaaatccagagaaaaatgggagtcacataatgaggcattatgttattatggtaaaactttgtagttaattatcaagactactttatatattctttattagatatgcatcaatgacgatgtatatkgctgatagaccttcaaatgaattcagcacattgttcatccttatatcttttgatattatcatttctcatcaatgccctatcttttctatgtactgatgcattaataacttaccaaagatgattaaattgtgtaattttcttctctccctctgagttctcctaattccatatcccattttcttccccaagaggagaaaaatattctggggcttagtctgatatgctctttgagacagttggttttcccagtgtgcttgtaaaaggaaggtgtctgtggattcagattggaatggatagccttgcaatt

SEQ ID NO: 458658 - DNA, 462 bp, Homo sapiens
aatgtcagtatctaaggtgagtaaaaaatccaggtcacatggtgtcaaaatacctattgctgagcgtcctaggatagcgtaacccctgcacatgaccaagctactggaaaacaacatctttccaactgtggtctaaaatcacctccattttcctggttaatttgagtagataggcaaacttttcagcagaatgwtaatgtaaaaaggtcaaagaagttaaagccaagaaagtctggattctaaaagctgttgtgccacttcctggccatgtgactttgtgcaattcgcctaatctccctgggcatcactttcctcatttgttaaaaggagccaataatagctgctgtaagacccatgtagtggtgacaatgacatgtcctaggaatatagaaaaaataataaacttaccctctgagagttaagtaatgagaacaactagtaattacataaatgttaagatcc

SEQ ID NO: 458659 - DNA, 564 bp, Homo sapiens
gggttaaataaactatagtaaataggcctattgtgtgtgtttttatatttttctgggtaggagttgtgttgtatttactgtttgagtaactgtgatataagagactaaagttattctagtgtttttgtttttgtctcctttattatctttggtctaagccttgagttctttcagttgtggtgctttgttactgtacaggagccctattratatggtagtaagttgtgggaaagagaagcattctataatcctatgattaactttgctgtatccctgggctgtgacctttataggtgcttattatttctttttctccccctttgtgagacaggaagactagaagtttctagaagtggatttttttttcccaaggtttgtgggcctctggtaaaatagttttccttgaggacagccttttgttaagaagaagataatgctctaggtatattttaaattgattactctttcccctcttcttactgaaagcaagagaggatttttgttttatctttactcaaggaacttggtgggcttggaagtaaaactcataatagtgtgggagtt

SEQ ID NO: 458660 - DNA, 564 bp, Homo sapiens
gggttaaataaactatagtaaataggcctattgtgtgtgtttttatatttttctgggtaggagttgtgttgtatttactgtttgagtaactgtgatataagagactaaagttattctagtgtttttgtttttgtctcctttattatctttggtctaagccttgagttctttcagttgtggtgctttgttactgtacaggagccctattaatatggtagtaagttgtgggaaagagaagcattctataatcctatgattaactttgctgtatccctgggctgtgacctttatargtgcttattatttctttttctccccctttgtgagacaggaagactagaagtttctagaagtggatttttttttcccaaggtttgtgggcctctggtaaaatagttttccttgaggacagccttttgttaagaagaagataatgctctaggtatattttaaattgattactctttcccctcttcttactgaaagcaagagaggatttttgttttatctttactcaaggaacttggtgggcttggaagtaaaactcataatagtgtgggagtt

SEQ ID NO: 458661 - DNA, 584 bp, Homo sapiens
aaatgttcattttttaaacagatatatcacatatttttacccttttcaatataaaagatttattgttcaataagtcctacttagcattcctataaaaatatttgagttttcctttgtctttgttctctgagaagttctaccaattattatgyaggatatcttccatttgtccctctagatccactttcttaccattttcatcctgctctgtgtcctgagtttacctacctggacagtatcaacatggtactgtccttaccctcgaacttgaatcaagagaaaaagaagagtgagaaattaaggggtgtggctggaggaaattgagttccaggtatctattatccagctcattctctgacagattgttgtgaagcaatcctcaacctctcattaagcagcaagggttcaggtctttgcttctttcccttgcttttgcaggtataaaggtatttatgcctacctagctgatactagcccaggactactgcactgttccttgtgagcttccttaaacactgctcatgcctttatacattattcttttgctaagcttttcttaaattacccccgtttgaaattgtaat

SEQ ID NO: 458662 - DNA, 600 bp, Homo sapiens
gaaaggaaaagtgagtcacataaatagtaaacaaagaactagtgttttggaatcgcagaatgctaaatattttaaataaagagcttgtactcaataaatactataaaagaggaaactrgagaacaatagagtttaatccacttatccaagttacccagctagttaatagcatatccataacccagtttattatcttctctaccatgctacacttccatggccttttataaactttctagttagttttacacacacacacacacacacacacacttcaaggtattaggaaggaagtagataaaactgcttctgaattgcagtgatattttttaggattgtatattttcttttcatttattttttaattgtttatatttatggtatttatggtatacgccatgatgttttgttatatgtatatatcatgaaatggctatatcaagctatttaatgtttgcattgtttcacacataatttttttgtgtgtgataagaacacaaaatctcttttcacagtcttcatatacattatacattggtattaattgtagtcaccaagataaacaacacatctcttgaacttatttttcctttctaaaaa

SEQ ID NO: 458663 - DNA, 600 bp, Homo sapiens
gaaaggaaaagtgagtcacataaatagtaaacaaagaactagtgttttggaatcgcagaatgctaaatattttaaataaagagcttgtactcaataaatactataaaagaggaaactggagaacaatagagtttaatccacttatccaakttacccagctagttaatagcatatccataacccagtttattatcttctctaccatgctacacttccatggccttttataaactttctagttagttttacacacacacacacacacacacacacttcaaggtattaggaaggaagtagataaaactgcttctgaattgcagtgatattttttaggattgtatattttcttttcatttattttttaattgtttatatttatggtatttatggtatacgccatgatgttttgttatatgtatatatcatgaaatggctatatcaagctatttaatgtttgcattgtttcacacataatttttttgtgtgtgataagaacacaaaatctcttttcacagtcttcatatacattatacattggtattaattgtagtcaccaagataaacaacacatctcttgaacttatttttcctttctaaaaa

SEQ ID NO: 458664 - DNA, 567 bp, Homo sapiens
ttcctgacaggcccaagtgtgtgttgttgccctccctatgtccatgtgttttcattgttcagatcccacttataagtgagaacatgcggtgtttggttttctgatcttgttttagtttgctaaggatgattgcttccagctgcatcgtatctttgcaaagtacatgatctcatttctttttatggctgcatagtaatccatggcatatatgtaccacattytctttatccagtctatcattgatggacatttgggttcattccatgtctttgctattgtgaatagtgttgcaatgaatacatgcatgcacgtatcttataccacattttcttgatccattcatctgtcaatggacactaaacttgagttcatatcttggctgttgtaaataatgctgcaatgaacataggagagcaaatatctcttcgacacactgatctcatatcctttggatatatgcccagtagtgggattgctggatcgcatggtaatctatttctaattttttgaggaacattcatactattttccatagtggttgcaccttttacaatcccactaacagtg

SEQ ID NO: 458665 - DNA, 567 bp, Homo sapiens
ttcctgacaggcccaagtgtgtgttgttgccctccctatgtccatgtgttttcattgttcagatcccacttataagtgagaacatgcggtgtttggttttctgatcttgttttagtttgctaaggatgattgcttccagctgcatcgtatctttgcaaagtacatgatctcatttctttttatggctgcatagtaatccatggcatatatgtaccacattttctttatccagtctatcattgatggacatttgggttcattccatgtctttgctattgtgaatagtgttgcaatgaatayatgcatgcacgtatcttataccacattttcttgatccattcatctgtcaatggacactaaacttgagttcatatcttggctgttgtaaataatgctgcaatgaacataggagagcaaatatctcttcgacacactgatctcatatcctttggatatatgcccagtagtgggattgctggatcgcatggtaatctatttctaattttttgaggaacattcatactattttccatagtggttgcaccttttacaatcccactaacagtg

SEQ ID NO: 458666 - DNA, 566 bp, Homo sapiens
gctaatatgaaagatgcttacaatgaaatattttagtacagataatgttattgagaagttcttgtttttttgagaaatgctaaagctaacataaatacacttttagatttgcccaaacttttagaggagacactgtgtgttgcaatgaggactggataaagagcaactgtactgtacatcatgaaaataaaatccaagtttccctatggcacactcaaaatatcaaagttcccattgtccagaasggacaattagtaaattttttttctcaaagagaaataataaggaaactgcatatataagtgtatccatctcttacatgttcctcccttccctgaacctccaagtcacccacagtctctcctgtgagtacagttttgagagttcttggtgggcacttgattatgcaagagtttttctcttcccctctggctacactgcctggaatttagctccgttttgctagtttatatatcaaggtttaaaaaatattcagccacacataaacacaatgataatgtaaattgtcaactaataacaactcacactctttctctacaatactg

SEQ ID NO: 458667 - DNA, 566 bp, Homo sapiens
gctaatatgaaagatgcttacaatgaaatattttagtacagataatgttattgagaagttcttgtttttttgagaaatgctaaagctaacataaatacacttttagatttgcccaaacttttagaggagacactgtgtgttgcaatgaggactggataaagagcaactgtactgtacatcatgaaaataaaatccaagtttccctatggcacactcaaaatatcaaagttcccattgtccagaagggacaattagtaaattttttttctcaaagagaaataataaggaaactgcatatataagtgtatccatctcttacatgttcctcccttccctgaacctccaagtcacccacagtctctcctgtragtacagttttgagagttcttggtgggcacttgattatgcaagagtttttctcttcccctctggctacactgcctggaatttagctccgttttgctagtttatatatcaaggtttaaaaaatattcagccacacataaacacaatgataatgtaaattgtcaactaataacaactcacactctttctctacaatactg

SEQ ID NO: 458668 - DNA, 521 bp, Homo sapiens
cctgtttactttaaatgtgctacgagagcccttatagatacttaaagggttgattcagtcatgactaggacaatagtgacagaatcacacttatcttacaatctagatcatctacataaagggtgagggacatgggtggctcttagctgataatagatttgtamgtatcaaaatgacttcagcattagcatttggatcaagcttcatttaaagagacataaaaataaagttttgcacagtagttttacaccacttttgatgaagctgattgatctcctacattagatagagaaaactaaaatcccccagggaaacacttacaacaataaaaagcgaggcaaaattaatacaccctgtctatgggtcctgcatatttcatttctttcatagttcatatcatgattgttgaaaacttagtgactttacacatatttgaagtaaaactcccctctgacttcactgggtaaaatgtgcatgataacaaatgcatttaccctttaaatgaacccaattcactgtaa

SEQ ID NO: 458669 - DNA, 587 bp, Homo sapiens
gcaaatattacctttaacatcattatatttattagggtgctactctgatttgtatatcagctctgcttttatctttgcagtgttggttagatgactctccctaattctccagaactttgtttccccatctaagagacggcacggatggatcaagtaggctccagggcactatcaaactctaacaatctataacttgatcttgtttaaagactgcacttttgagagtcaccagctatgcacgcatattcttccrgaattccaaattgggagacattattcagggaatagaaatgggaaaaaaaatccaaggaaataattacagaaagaacataatgatagaaagggcacctaaaatccctgcctatttccaaaggctgtttttacacttatgcattcctcatgagactgccccaaatgcaatttaaggaaacactgaattggattcagaaagttgagcgttttatgaatttttgtctctaagtgacatatgcctttctacaaaatcagaaaatagatttgttcagtgcatggagtattactgatgcaattgggtaaggctggcaaaatgtctttggttttagttgacg

SEQ ID NO: 458670 - DNA, 553 bp, Homo sapiens
catacaaatacttggattgatattgaggcttatcatttactaggtttgtgactttgggctaattaacttgcctcatttagctttgtttgccttatctgtaaagagtaaaatttgaatgcattagaaaatgtacatgaaagctctttgcaagacagaaagtaaaaaaaaaaacagcaaagtgcaatgttaaattctgttaagatctaccatcaaacctcatgggttcaaagccaaactctattgcttgaaacaatatgatttgagcaattttctcagttttcacatatttataatataaataataatagtccatacttattaacatcatggagtggattcaaaataatctctgattaaaatatttaaaaaacaygtaaattagtgcagccattatggaaaacaatatggtggttcctcaaaaaattaaaaatagaactatcatatagttcaacatttccattaacaggtatatacatccaaagaaaatgaaatcagtatgttgaagagatatctgcactcccatgtttgttgcagcattattcacaatagccaa

SEQ ID NO: 458671 - DNA, 580 bp, Homo sapiens
atgagttccaatgtacagtagcctcatacagtgttcccaactttctccccttcagcccagcttgtgtcttccctccatccactctgggtgccstccctctgcagatctgttaggaacacacctgtcatcgaggtccctgggtgggagctgttccctctggctgcctccagatgatttttatgcatctaaactgagcatgctttctgtaatactgaaacgttactgtgtagcttgtacttaaacacttctcatgggagcactaaaccatccaaagtggcctagcctactcttgggcagaagtattagaagaccattgtaaagttgggcaaaatttatccttttattgcttctaacaagtggttgtatcaattcttggaacaaaatcgaaacttttatttttctgaaatgtctttgggaatttgtattttttaaatttgagtggaccatctatgttttcttatacaactaattgtaccattctcttaggaggaaatagaagtagatgatagttttttttttgttctgtgatatgttagcattattccatattatccaaacttagaagctattttttccctgt

SEQ ID NO: 458672 - DNA, 524 bp, Homo sapiens
aaataaatgtgtatatttatgctagcttttattatttgaatcaaaagttattctgttggaatgcaattgcaagtgcatatgaaagttagtgaggaaatgtttgatgtgtacatatgttggccaatttagtacagtttcaaggaataaatgttatatgtagctgggcacaatggtgcatgcatgtaatcccagcacttcgggaggccaaagcggacagatcccctgagatcaggagttcaagaccagcctggccaacatgatgaaaccccatctctacaaaaaaaaaaaaaaaaaaattcgctgggagcggtagcacatgcctgtaatcccagctactcgggaggctgaggcacgagaatcgcttgaacckgggaggcagagattgcagtgagccaagattgcaccattgcattctagtctgggtgaatgagtgcaactctgtctcaaaaaaaaaaaaaaaaaaaatgttaatactgaatgtaggaaagggaaaggtgaaaaagaaaggactatttttaaataac

SEQ ID NO: 458673 - DNA, 534 bp, Homo sapiens
agttttttgttcaccttaaagactttaactgaaattactaaatttcaaaaatatatctcttcctagaactactggtttttgcttttatattgagtatcttggcttaaatgtcttttttggtcttggttttcaaaaatcaacagctgttaaagctttcatattgctttatatcgctgttctacaacctgtctctctaatattggcagctgagaggtaatcatacatgagatcttagatcaggaaggggaacatgagacaaaatatatatcactagctggaaagagatgtatccttcagtaagctcctcacgaaaatacctacatcatttgtgttggggatgtaggtatagaggctgatataatgayacataaattactctagaaaaaatagcccaaaagattgatgagaatgaccagtattacaaagactaacaattaagataattttatactaaagaatgacaactcagtgggacagagtagttcagaaacagatgcaaatactcatggaaattaaaagatgataaagatcttt

SEQ ID NO: 458674 - DNA, 534 bp, Homo sapiens
agttttttgttcaccttaaagactttaactgaaattactaaatttcaaaaatatatctcttcctagaactactggtttttgcttttatattgagtatcttggcttaaatgtcttttttggtcttggttttcaaaaatcaacagctgttaaagctttcatattgctttatatcgctgttctacaacctgtctctctaatattggcagctgagaggtaatcatacatgagatcttagatcaggaaggggaacatgagacaaaatatatatcactagctggaaagagatgtatccttcagtaagctcctcacgaaaatacctacatcatttgtgttggggatgtaggtatagaggctgatataatgacacataaattactctagaaaaaatagcccaaaagattgatgagaatgaccagtattacaaagactaacaattaagataattttatactaaagaatgacaactcagtgggacagagtagttcagaaacagatgcaaatactcayggaaattaaaagatgataaagatcttt

SEQ ID NO: 458675 - DNA, 570 bp, Homo sapiens
gtatgacataaaactcaggatctatgaaagcataaacattatttgaaaaaagagcaactataaataaagtygtaaaggcaaatggtaaactgggaaagatatatttaacaccataacaaagggccattttccttaatctaccaagtccttatcacatcaataagaaataagccaatagaagaacaagtaagtcacatgaccagacaattcacggtaaaattaattcagtgggcttgcaaatttgaaaagacgctcagcctctgtcaaagtgaaagaaatgcaaattaaaacaatgaaaaaaacactttttacctatcaggtttgcaaagtattcacgtttgttaaaacccacagttggtgaattgatgggaaaaatcagcattttcatgactctggttgggaggttgaattgacaacaattttagagaagttttgtgacacctatcaaatttttaagtatatatatcctttgacctattaattccactgctagtactttacctaaaggtttactcacaaacaagcctctgtatgttcaagaacattagctgccctcacaagctaggaata

SEQ ID NO: 458676 - DNA, 571 bp, Homo sapiens
  misc_feature (1)...(571): n = A,T,C or G
tacgataaatccataacaagtatgcatctgtttgaaaatgagagaaattcatgtatacagatatggagagatatataaattacattttaattaaattacatttaatttaaaaaaacaagatcttggatcagtaatgataggatcctaattgtgtgaaattatatatacacaataattcatatttttgatatgctggaatatgcataacatttttctggagggatttattcataggacactgtgaacaaggattcctacaggggtaggaccatagatcacaggggaaagaaacttgtttgcttttcattttatagactttactcctgtctgaattattgatactatttctttttaccataggtatttttttatttttaaaagcctaagacagttttttgttttaccatgttatagaagataatctgcgcttcagttattcccacaattagtataactacatgcagtractgttccctggcagggaggagagaacagaacatacaggtggctgacctgagggaattaaaggacagaggttgagggaagctctgctgaaactcgatnnnnnnnn

SEQ ID NO: 458677 - DNA, 571 bp, Homo sapiens
  misc_feature (1)...(571): n = A,T,C or G
tacgataaatccataacaagtatgcatctgtttgaaaatgagagaaattcatgtatacagatatggagagatatataaattacattttaattaaattacatttaatttaaaaaaacaagatcttggatcagtaatgataggatcctaattgtgtgaaattatatatacacaataattcatatttttgatatgctggaatatgcataacatttttctggagggatttattcataggacactgtgaacaaggattcctacaggggtaggaccatagatcacaggggaaagaaacttgtttgcttttcattttatagactttactcctgtctgaattattgatactatttctttttaccataggtatttttttatttttaaaagcctaagacagttttttgttttaccatgttatagaagataatctgcgcttcagttattcccacaattagtataactacatgcagtaactgttccctggcagggaggagagaacagaacatacaggtggctgacctgagrgaattaaaggacagaggttgagggaagctctgctgaaactcgatnnnnnnnn

SEQ ID NO: 458678 - DNA, 571 bp, Homo sapiens
  misc_feature (1)...(571): n = A,T,C or G
tacgataaatccataacaagtatgcatctgtttgaaaatgagagaaattcatgtatacagatatggagagatatataaattacattttaattaaattacatttaatttaaaaaaacaagatcttggatcagtaatgataggatcctaattgtgtgaaattatatatacacaataattcatatttttgatatgctggaatatgcataacatttttctggagggatttattcataggacactgtgaacaaggattcctacaggggtaggaccatagatcacaggggaaagaaacttgtttgcttttcattttatagactttactcctgtctgaattattgatactatttctttttaccataggtatttttttatttttaaaagcctaagacagttttttgttttaccatgttatagaagataatctgcgcttcagttattcccacaattagtataactacatgcagtaactgttccctggcagggaggagagaacagaacatacaggtggctgacctgagggaattaaargacagaggttgagggaagctctgctgaaactcgatnnnnnnnn

SEQ ID NO: 458679 - DNA, 636 bp, Homo sapiens
ctgattgtggatcttgaggggaccttaagatcgattctgcatcttgccaaaactgaaaaatgctacaratattttaaaatagtgaaaagtcaggtattttattccatgtgggaagttttaatattgctgtttaagcggcttaagtatgactgcttcaattatattacaattcaattaaaaagtaaatttaaaaaataagcttacagttaatatttagttagtgactacagtgtgctaggcattgtgctagatatgttatctcatcatttcaattcaggtttattataatcctgtaacttagctaaatgtaatgccattttgtggttcagtgaacaactgagaaattaaataaccaatgtcatatagctatcgactggtaaagagtatgattccagtaaacttcaaaaaacattcactcttctatggcaggcaccttgtgaggtgaacataatctcgaacctgaagaagttcacagtctaatggaagatacaggaaataaacagataatttcagtattatatggcctttctgaattcagtgtgctatagtttctaaatgttgtaaagttaccatcagtaactaataaaatctttgactgattatcattacatatactatatgttatttaaataattg

SEQ ID NO: 458680 - DNA, 517 bp, Homo sapiens
tagatgctaattaaaatgaggatggtgacaaggttgcaggtcctggtgttttactgaagaattgctggggtcaggatactcaggggagtgggttagaaagatgggcattgtggccagagagttgaagggttgaaattgagaccatggaaggatgccacccctgtgatgtgccccctattgkcatgcagaggtctatgcagaagatcattggctggggagtcaggcatggcctggttgcttcctggacccatctcttgctgagtttagcaaacttaggcacattacatgaagttttctaaggtacagtttctttatctgcagaatatcaataacgtgaaacctacatattgtgacagtcacatggaatgaagcataatttctggcacaaagtattaatttagtaaaggtcgttctcattccatttccctccatttcttatgcttttatttcagctcatcatcttctttggtatgactccctctcttgaatgagagagaaatcttgttcctcagatagg

SEQ ID NO: 458681 - DNA, 571 bp, Homo sapiens
ttccaatttggtaattccccacaaccaaaatatcaggttattacatcaaaacctacccatatttagtagtgtatcatgtcaaagtagataggaagtactggcatgttggcacctttccaaggctttggtagtcagctagacacagtatgcaaagaggacaagtgagtcctgggtgcacytgtgacctgtccttgtgacttggaaaaaatggcatcatgttctgtccgatgtgtttccgctagggttctttgtgacccctgccaggtgctcagaccatggtaatactaaagaatgttcatattctatgtgttctttgtaaagatcatttggtggcaagttaagcgaaaccaatttgaggcaccttgagcaataaaggttttattatgagaaaagtgggaaattccatggaaccacaaaggatggattttgctgagcctcaggaaggggcaagaatcagaaatagcaaaattttccagaggtttgtttttttttaaccaatgtttgtctgtcttttgcttccagcccccagggtaggatacagccactctttaaagaaactgatatgatggat

SEQ ID NO: 458682 - DNA, 571 bp, Homo sapiens
ttccaatttggtaattccccacaaccaaaatatcaggttattacatcaaaacctacccatatttagtagtgtatcatgtcaaagtagataggaagtactggcatgttggcacctttccaaggctttggtagtcagctagacacagtatgcaaagaggacaagtgagtcctgggtgcacttgtgacctgtccttgtgacttggaaaaaatgscatcatgttctgtccgatgtgtttccgctagggttctttgtgacccctgccaggtgctcagaccatggtaatactaaagaatgttcatattctatgtgttctttgtaaagatcatttggtggcaagttaagcgaaaccaatttgaggcaccttgagcaataaaggttttattatgagaaaagtgggaaattccatggaaccacaaaggatggattttgctgagcctcaggaaggggcaagaatcagaaatagcaaaattttccagaggtttgtttttttttaaccaatgtttgtctgtcttttgcttccagcccccagggtaggatacagccactctttaaagaaactgatatgatggat

SEQ ID NO: 458683 - DNA, 571 bp, Homo sapiens
ttccaatttggtaattccccacaaccaaaatatcaggttattacatcaaaacctacccatatttagtagtgtatcatgtcaaagtagataggaagtactggcatgttggcacctttccaaggctttggtagtcagctagacacagtatgcaaagaggacaagtgagtcctgggtgcacttgtgacctgtccttgtgacttggaaaaaatggcatcatgttctgtccgatgtgtttccgctagggttctttgtgacccctgccaggtgctcagaccatggtaatactaaagaatgttcatattctatgtgttctttgtaaagatcatttggtggcaagttaagcgaaaccaatttgaggcacctkgagcaataaaggttttattatgagaaaagtgggaaattccatggaaccacaaaggatggattttgctgagcctcaggaaggggcaagaatcagaaatagcaaaattttccagaggtttgtttttttttaaccaatgtttgtctgtcttttgcttccagcccccagggtaggatacagccactctttaaagaaactgatatgatggat

SEQ ID NO: 458684 - DNA, 619 bp, Homo sapiens
tatttgtatgtgacatcttgaatacagataattctaaggacttcactaaaaagaattaytagaactaataaacaagtttagcaagacagtaggatataacaacaaaagagaaaaatgtgttgtatttatgaataatagcattaaaggatccaaaaaataaaattaagaaaataattttgtttacaataatatagaaagaataaaatacattaacaaaagaaatgcaagacttatacactgaaaactacaaaatgtcaatgaaatatttaaagtagacctaaataatgtaaagaccttctatattcatggattaaaagtcttaatggtgttaagatggcaatatgctccaaattgatccacagatttaatgcaatacttttcgaaatttcaggttgcttttttgcataaattgacaagctggtcctaaaatttctgttaaaatgcaaggaagctgtgatggttgatactgagtgtcaacttgattggactgaaggatgcaaagtattgttcctgagtgtgtctgtgagggtgttgccaaaggagattaacaatagagtcagtggacagggagagacagacccaccctcaaactgggggtgggcaccatctaatcagctgc

SEQ ID NO: 458685 - DNA, 619 bp, Homo sapiens
tatttgtatgtgacatcttgaatacagataattctaaggacttcactaaaaagaattattagaactaataaacaagtttagcaagacagtaggatataacaacaaaagagaaaaatgtgttgtatttatgaataatagcattaaaggatccaaaaaataaaattaagaaaataattttgtttacaataatatagaaagaataaaatacaytaacaaaagaaatgcaagacttatacactgaaaactacaaaatgtcaatgaaatatttaaagtagacctaaataatgtaaagaccttctatattcatggattaaaagtcttaatggtgttaagatggcaatatgctccaaattgatccacagatttaatgcaatacttttcgaaatttcaggttgcttttttgcataaattgacaagctggtcctaaaatttctgttaaaatgcaaggaagctgtgatggttgatactgagtgtcaacttgattggactgaaggatgcaaagtattgttcctgagtgtgtctgtgagggtgttgccaaaggagattaacaatagagtcagtggacagggagagacagacccaccctcaaactgggggtgggcaccatctaatcagctgc

SEQ ID NO: 458686 - DNA, 619 bp, Homo sapiens
tatttgtatgtgacatcttgaatacagataattctaaggacttcactaaaaagaattattagaactaataaacaagtttagcaagacagtaggatataacaacaaaagagaaaaatgtgttgtatttatgaataatagcattaaaggatccaaaaaataaaattaagaaaataattttgtttacaataatatagaaagaataaaatacattaacaaaagaaatgcaagacttatacactgaaaactacaaaatgtcawtgaaatatttaaagtagacctaaataatgtaaagaccttctatattcatggattaaaagtcttaatggtgttaagatggcaatatgctccaaattgatccacagatttaatgcaatacttttcgaaatttcaggttgcttttttgcataaattgacaagctggtcctaaaatttctgttaaaatgcaaggaagctgtgatggttgatactgagtgtcaacttgattggactgaaggatgcaaagtattgttcctgagtgtgtctgtgagggtgttgccaaaggagattaacaatagagtcagtggacagggagagacagacccaccctcaaactgggggtgggcaccatctaatcagctgc

SEQ ID NO: 458687 - DNA, 619 bp, Homo sapiens
tatttgtatgtgacatcttgaatacagataattctaaggacttcactaaaaagaattattagaactaataaacaagtttagcaagacagtaggatataacaacaaaagagaaaaatgtgttgtatttatgaataatagcattaaaggatccaaaaaataaaattaagaaaataattttgtttacaataatatagaaagaataaaatacattaacaaaagaaatgcaagacttatacactgaaaactacaaaatgtcaatgaaatatttaaagtagacctaaataatgtaaagaccttctatattcatggattaaaagtcttaatggtgttaagatggcaatatgctccaaattgatccacagatttaatgcaatacttttcgaaatttcaggttgcttttttgcataaattgacaagctggtcctaaaatttctgttaaaatgcaaggaagctgtgatggttgatactgagtgtcaacttgattggactgaaggatgcaaagtattgttcctgagtgtgtctgtgagggtgttgccaaaggagattaacaatwgagtcagtggacagggagagacagacccaccctcaaactgggggtgggcaccatctaatcagctgc

SEQ ID NO: 458688 - DNA, 571 bp, Homo sapiens
caaaaggctagactaaaatgaatgtgatattcaccactccttattacctggaatgagcttccatattatccacacttgctcttgctcttcataattcacttggaaagaggctataactcctgtcaaatcattagaagaaaggctaaaataatcactgtaatagttagaatcatgattatcacaaagaacagatagtactgtgttttatacatacataattgcatacatataacaaacctgtgaagtatgtactgttatatccatgttaaagaggaagaaactgagactcaaagaggttaactaacctgtccagtcacagagttggttagaggatccaacaccagctgtctgactgcagaactcaggcacattaatggcttcccaygctgtctgccattggaacaggacctggtgccctgtattaggacagaggtgaacagctcccaaacgaggccctctctcttcttcctgcaacatcctcaaggtctgcgaagaggttccagagagcccctcagtcccagctgtcaactttttctctaaacaaccatgatttatttgtaaacacaaacta

SEQ ID NO: 458689 - DNA, 296 bp, Homo sapiens
ctgggcacagttattcacacctataatcccaagactttgggaggccgaggcataaagatctcttgaacccagttcaagtctgcagtgagccatgattgtgccattgktctccagcctggacaacagagtgagaccctgtctcaaaaaaaaaaaaaaaaaaaaaaaaaaaggaggtgggggagagaatttccagagcagatgatgctttagttaggtttttgtttgtttttttgagacggagtgttgctgtgtcacccaggctgggaagcagtggcacgatctcagctcattgcagc

SEQ ID NO: 458690 - DNA, 548 bp, Homo sapiens
tgtaacttttcccaattactcccatagataacatcactattgtagaacctaagattgatatgttggagtatttttcaggcttttgcattctggcaactgactgacccccacccaaaggcagacctgtgactcatgacccaactggtcccgtggccccgtgatccagaagtgaacacagtgcacaaggaccattttccatacccttaagagtgcattccaatgaatcaacagcagctgttccttagtcccctgcccaccaaactatgcttgaagaccccctaacctccaagccttcagagactgatttgagtcataactgtctcccatgtggctggcctcacatcaatkatattctttcctcatcagaatgtcagggtctcagtgaattgatcttgcctgtgcagcaagtaagacaaacccatcaggcaattacattagttacatttgagggggaccaaaaaactctacatggatttttggctgcatgcggggttggcacccctagcccccacattgttcaagggtcatccatactgacatccctctca

SEQ ID NO: 458691 - DNA, 581 bp, Homo sapiens
gagtatttttcaggcttttgcattctggcaactgactgacccccacccaaaggcagacctgtgactcatgacccaactggtcccgtggccccgtgatccagaagtgaacacagtgcacaaggaccattttccatacccttaagagtgcattccaatgaatcaacagcagctgttccttagtcccctgcccaccaaactatgcttgaagaccccctaacctccaagccttcagagactgatttgagtcataactgtctcccatgtggctggcctcacatcaattatattctttcctcatcagaatgtcagggtctcagtgaattgatcttgcctgtgcagcaagtaagacaaacccatcaggcaattacattagttacatttgagggggaccaaaaaactctacatggatttttggctgcatgcggggttggcacccctagcccccacattgttcaagggtcawccatactgacatccctctcaaagtccgactacccgttcagtagggtatcctcctgcctgtgaaagggaatgataattttccacccatcatggcaaaggaaggtgtggagcagggaggg

SEQ ID NO: 458692 - DNA, 581 bp, Homo sapiens
gagtatttttcaggcttttgcattctggcaactgactgacccccacccaaaggcagacctgtgactcatgacccaactggtcccgtggccccgtgatccagaagtgaacacagtgcacaaggaccattttccatacccttaagagtgcattccaatgaatcaacagcagctgttccttagtcccctgcccaccaaactatgcttgaagaccccctaacctccaagccttcagagactgatttgagtcataactgtctcccatgtggctggcctcacatcaattatattctttcctcatcagaatgtcagggtctcagtgaattgatcttgcctgtgcagcaagtaagacaaacccatcaggcaattacattagttacatttgagggggaccaaaaaactctacatggatttttggctgcatgcggggttggcacccctagcccccacattgttcaagggtcatccatactgacatccctctcaaagtccgactacccrttcagtagggtatcctcctgcctgtgaaagggaatgataattttccacccatcatggcaaaggaaggtgtggagcagggaggg

SEQ ID NO: 458693 - DNA, 609 bp, Homo sapiens
taaaccctgaccttacagggatacgtgtgtttcacgcaacaaactatcctasaagcttgatgttaacatacttgagcctcatgaaaatatcacatagtattcattcatccccagcgtctagaatctgggaaagatacaaatcaaataacttgcccagggtcacttgagcaacaaaagatagattccagttcaagttttaacactaacttgcacccttaactccccatggtactgaaactcagttcctcagaaagactagttgccagcggtaggcacaggtgcagcttgacaaagggttgtctcaggcttatgaaaagataatggcttggggagataatggctatgctacatgcaaaggtctgtctgttgacctgtaatgaagtcagacatttagagaagaatagtctctgactgcagtggggtagtgttttggtgtctaggttaaacaactcaagtatacatgtaacttacttggcaatcagatgaaacttaacctactactgaatatcatattcaaggttttgctttcctattcaatctcttgaatatacttataacaaattttgaatgttaaacattaattggaaatacgatgtacttctagatatt

SEQ ID NO: 458694 - DNA, 592 bp, Homo sapiens
atgtaattcatccctgtatcttttttcctagagaaaaatcactttattccttacgtgcctcttgctaactgatcttccagaaaagtgttctacatgtaagtgatatggcaacatagcctcctattttaatatggcggggtagctttccaccgcacagctgtcagcctcagcttcccctgccatgtcttgcctacatrctagctgtgtaacagttctagctaccctaaatttcttgagggtaggcacctatttttggaagcaaattcttccattagcctaatgtcagctcctcatcatgcttgtctgtgaaactcagaaagggggccatatgtctgtctcctcttacctctctagtttgacacttgtgagtctataaccacagatcctattaggtcagattccctcctcccctgtgttagccagggtgttcctgttcatgtatgactcacaagaaggtgggactttccaagtcaatgaagagacaggctgtggaatgagaaacatctgcaagccatatatctaataagggattaatgtcaaaaatgtaactcaataaggaacccaaataaaaatgggcaaaggacatgagtag

SEQ ID NO: 458695 - DNA, 309 bp, Homo sapiens
aggcacaagcattcaaactgttatatcccctcrtcagtctataagcagtcctctcagaacattaaatttatcttatgtgtgtcaaaaacacctagaagattattttcaaagaaaataagggggaaaagtttggaaatgtttatgaaaggatacaaaatttcagctacaaagaataagttaaagaattttacaacatggtgactgtagttaataacaatgtattcttgaaaattgctaagagtacattgtgttatcactacaaaaaaataagaggtaatgtatgtgttagctagctcaactttgctattc

SEQ ID NO: 458696 - DNA, 461 bp, Homo sapiens
taggattgtgataaatatttatttcatgttaatgtactgggtaaaatgaaaaacaatgaggtgcagaattaatcatgagtctctagtggtgagcttatctaagcgaaaggttattctgtaaaacagatggtgttaaaaggaaaagattaatttctgcattttaacccctaaactgttgagaaagcataaaataattaccgttttttagtatgtacaccatgccagacgctctttaggcaatttccatggattattttatgtgatgctcataaataacccacaaagtaggtaacattactatcccacttttaaaaaatgagatttgagggtttttttttttaacattgatgctagatagaggaacgtggtttttataaraaacattcaataaatattccatacatagtgagtaaatgactgttattgatggactatcccagtcctgtgcaggctgaccttgg

SEQ ID NO: 458697 - DNA, 559 bp, Homo sapiens
tattgatggactatcccagtcctgtgcaggctgaccttggcaacacccccagttctacaagtctgagaaatgacagagaagcaatttaaatccccgattttccaggacatcacatacatctcctctccagatttcatttatctgtttgctctatgacttcctrccttctacagagcccaggaacctgagggcactagtagatccactcaggaatcccagtttggatttgagtttttctgattctgtgccctttccatggtagcacctgcctccattcttttccattctagtagctctcttgattttctccactttgagttggaaatgtcaaacacagtgttccatttaactccctcggctttgtatctctttttataggtcctcgcacaggataggtccacaggaggaagctggtggccttggcatctcagcacccctggaagctcagcaggagaggttttgcctttcagccactctgtggcccagtgtgcttgggtaactgtctctgccgcctcatctgtgtaaactgggatagtccaacaacctgtggggtaagtca

SEQ ID NO: 458698 - DNA, 588 bp, Homo sapiens
atcttttgagaatttactgtgaggtaggctcccctgtgccaccaggtactttacatgaatgacctcaatcctcttaacctaagaaacaagtattattattatgattctgatcttacacttaatggtaccaaataaaggagtggctacgtaacttcccagtgtcacacaactacagtaatgaggagagccaggattcaaaactaggcatggctcygctaatcacaatcttagctgttacactttaatgcctttctcaactaagacctcggtaaacagaaccattagaacaagtcataggctggataatacaacaaaattaaagttgatgttctctagggcagtgctacccaagtgtaatccatggaccaacagcatcagcatcacctacgatctatccagaaacacaaattctcacccccaacaccagatcccaggaattagaatcccaggagcaggactcaggaatcgctgttgtacaaatcccaccaggtgattctaatgcattctaaatgagaagccctgtaggaactcttcacaagtataacaccttgagtatggatatgacataacatgaaattcaaagcaggc

SEQ ID NO: 458699 - DNA, 531 bp, Homo sapiens
actcttctgagagatgtattttttgtaaatatcagatgctcttrctagctagtgcacagagttgctctcagctggttctaatcattgttcttttattcccctttaacactttcctgtccctcccatgtctcaagttaccatacccagctaaatatctaagcatcgcttaagaaacccattttcctcacctgtaaaacgaaaatttcaggctaagcaatgcttaagaggctttcctagctttaaatttctgcaattacatctcattggtaccattgcaagtgtgtccaaaaatagcatccaccttttactccctgcttcgattgtgacactacaacattctgttataaacaccatttgtatttctaagtactctgctctcagaaaccaggactctttactgcagaacctaatcaatctagatttttttattgtagaatataagacttccaatgactgagtttctaataactttctagcccgtctttgattattccttcacagtccctctcaggaagccagtccaaataactc

SEQ ID NO: 458700 - DNA, 531 bp, Homo sapiens
actcttctgagagatgtattttttgtaaatatcagatgctcttgctagctagtgcacagagttgctctcagctggttctaatcattgttcttttattcccctttaacactttcctgtccctcccatgtctcaagttaccatacccagctaaatatctaagcatcgcttaagaaacccattttcctcacctgtaaaacgaaaatttcaggctaagcaatgcttaagaggctttcctagctttaaatttctgcaattacatctcattggtaccattgcaagtgtgtccaaaaatagcatccaccttttactccctgcttcgattgtgacactacaacattctgttataaacaccatttgtatttctaagtactctgctctcagaaaccaggactctttactgcagaacctaatcaatctagatttttttattgtagaatwtaagacttccaatgactgagtttctaataactttctagcccgtctttgattattccttcacagtccctctcaggaagccagtccaaataactc

SEQ ID NO: 458701 - DNA, 606 bp, Homo sapiens
ttcggtctctttccccttctgtcaaaaacttggaagtgccctgttgcaaacaaaagagccacaaattagtaagagccttagtaagtaacaaaggccaagaagaaatcacagatgacttgactcagctttcagcaaacatcagattaacgaggtggcctatgcacctatttttttgagatgatggcttctaagtagctgtcattaasttgattgagaggcatgggaggctgggcactaagaaaaaaaatcaggcttcagtattgtgtctaggtagaaatttgggaagtcaaaaaatacattaaaagtctactagctttttaggaaaccattgccaagaaatgagaagcctggactaaaaattgagattgaaaaatactcctaaaatctcaaacttgcactagtgcctgcaggttcttcattggggcccctttccagatcccagtttcagctgtgacttcagtggacaaaagattagatcttcccagagggcagagccagaggcacagagaagaataggtaagtgagttcctttcagaaaataagaatcagagtctaatcaagaagcttcccgcaataaacatacatgtgcatgtgtctttatagcag

SEQ ID NO: 458702 - DNA, 575 bp, Homo sapiens
ttctattcagaattatctttacaaaagggaactgtcagattacttatctgttaattaaagatattgtaatattgtgatgtcaatggtacagtggcttactatggtttgttcttccttctaaaaatcttcagattaaaaagaaagaaagctaagacttactaagctcataatatgggccagggactttataaagcattttactaaatggaaaaataattcataatacagtcattcaggagaagttcttcagccacaaaatataggcctcctttgttttctagtttctgtaacagaaaagtgaagtattcattcaatttgtcttaaagaaatttaaatgcctactatgtgcyacttattttaccaggtattacaatgggaaaatgtgatctatttatcatcaaggggactgtagtttgcgaaggatgaggagaaagatgtaaaccaataaatataataaagtgttacaggaacagagtatttatagggtacaggggatgaacaaaagacaacaatattagtgaatatataggtgcttaatgtacattgtttcattttaatacacacaatagtcctgt

SEQ ID NO: 458703 - DNA, 592 bp, Homo sapiens
cctatttctctccaggtaagtggttttcctgacatgggaagaactatgccatggttgagtaagtcgcttctactctccttttgcttggagagggctctaagactcagtgcatgagaagtcctgctggtcaatcacagccccggagagtctgaccagggctatggttgaccagcaggatttctcatggagtgagtctgtccaattcagcctrgattttatcagttataaagctgactttttaatcttcataaatctaactcctgcatgcctttcagttgaatctgaactcctgtgagggtggagctattgtccctagaagccctatgaaacactagattagatgccatgctgctttttttgcacataatatcaggtggcagggttgccatgggaagggggcaggtatctttctcattttgatttttttccctaaaaatgtgtacaaaatcccttgtctctgtctcttggaaccaatagttctcttacaaattgactcctggaaaccttaccttcctattcattagataggatctgaaatctgccacaatggcaacaaaagcaattgctgctgttttctgcaacctcactaaat

SEQ ID NO: 458704 - DNA, 541 bp, Homo sapiens
agactttgtttttctttaaaaaattatttctcaataagttgacatttcccaatatgtcaatggactttgtgaccttgtgagactgcaagattatattcattctataatcccataatttcaaacatctaacatctaattcagtgtatgttctaagtatgactgttctaaaatgatgattaggttaggagatattattgtggtctgttcccaaacagtcatcatatcttatgccattgtttttgtttgtttgtttgtttaaatcatatgagcccaccataacaattgtgatgtgggaaaaatttatttagktatttatacttggtcatattttatggaacataatagctatatttaaacccattctttaggatggattgtactatttgcattagttcactagccttttcaacgctcaatgatatgttttcatcatttttattatagttgttcattcacaaagcatggtttcatccatggtttccttccttgaaggatttattggcctaggtaagcttggagttttccccagatgctctccaca

SEQ ID NO: 458705 - DNA, 567 bp, Homo sapiens
aactgactaaagccatacttaggataagatgcaaatctagctctttacagtgatcacagtttggctattttgtgtccctttagagggagtgatcaatcccatgttctggcaggattttcatcctgactgtgttctgcctgggtcattattctttctgttcaattcacagaaaacagagatttcattgctacacagaggygtttcactgttgcagtgagaaattacaatgtattacggattaaaaggaagcaaaaagaaaggaagaaatcctaggattgtcacctattgccattgtttactaggtttcttgctttgggctggacactcagtgttttctttgtgctggcatgtatagtacaagggtggcatctgctccacctccatctacagtgctggtgtgagaatgccatgcgataatgctatcaagatgcaaagagctatacatctgttagtctgggaaacagatgggaggaagcaatgcatcataacattgaagagcctggctttgaagtcacacagacctgggttccaattccaactctgtcatttactagatttgtgatcttg

SEQ ID NO: 458706 - DNA, 567 bp, Homo sapiens
aactgactaaagccatacttaggataagatgcaaatctagctctttacagtgatcacagtttggctattttgtgtccctttagagggagtgatcaatcccatgttctggcaggattttcatcctgactgtgttctgcctgggtcattattctttctgttcaattcacagaaaacagagatttcattgctacacagaggcgtttcactgttgcagtgagaaattacaatgtattacggattaaaaggaagcaaaaagaaaggaagaaatcctaggattgtcacctattgccattgtttactaggtttcttgctttgggctggacactcagtgttttctttgtgctggcatgtatagtacaagggtggcatctgctccacctccatctacastgctggtgtgagaatgccatgcgataatgctatcaagatgcaaagagctatacatctgttagtctgggaaacagatgggaggaagcaatgcatcataacattgaagagcctggctttgaagtcacacagacctgggttccaattccaactctgtcatttactagatttgtgatcttg

SEQ ID NO: 458707 - DNA, 563 bp, Homo sapiens
aatgcttatatatctaccacccaaaatgacagtattagcattttatatacatttaaagtccttttaatattaattttaatattccaggtaagctcaaattcccatttctttcccatgcacagatacctttctttctgtctccagaagcaatcccacagaacagtggaaaaaccacatcatatatttatatgaatttatatatatgttgtattcatatgtattttaagttcatataagtgatttcatactttgcaatgtatcgttctttaactttatgtcactcaacatggtttttgagatctatccatatgaatgcataaagatcaagccttttctgtttaatatccttacagggttttatcatatcagtataccacatttgatttattcattctcctattgatgrctcttgaatttgtttctaagagttcactctaactcacagtataatcctttgtatctctgtaagtacccatattggtttgttaattacaaaatattttgccattacaaaataccatgaactgcatggcttgaataactgttctagaggctggaagtcg

SEQ ID NO: 458708 - DNA, 592 bp, Homo sapiens
acacagaaacatgtgtgcttgcaagtctatgcttgtgggtgggtacacagtgtgcccccccaaaatccatttgaatcctacaaaattaacaactctaccaagataatgctactgatgtgccagtggcctctcaggtggtctgactattctctctctcactctctttttttgtctctctgtttctttcccacccctcttctctctggccagtaagtccagtgaaatatccttgtgaaatgttgtgattatttttaatccaggggtgtccaatcttttggcttccctgggctacattggaagaagaattgtcttgggccacacataaaatacactttcactaacaatagctgatgagctaaaaaaaataggtcagagcataaatctcatgttktaagaaagtttgcaaatttattttgggccgcattcaaagccatcctgggccacatgcagccatgggccgcgggttggggaagcttgatctaatacaataaaaacttgtttctttttctggctgcttctgcctggtacaaagacaaagaagagactaaaacattctgttaaaatttatcttgattcacttccatgcttgatg

SEQ ID NO: 458709 - DNA, 541 bp, Homo sapiens
cagctagcttaataaaattgtttgccatctcaaccacacagccttattgatttttgcaccctcctcatcctttgcaaaatactttgaagtcatgaacaaacctcttgaatatcttcttccaaatgccatttacacactccttggtgacattatgccaagctcatgcaagttcctgaggcaattatatatgtcataatccctccaaaattgcatcagtgtcttctgattgtccaatggagaaacactacttccatactgggatgaagatcaccaataaaggaggatgtgtgaggattatcaacaataagcaaaatcttgaaagttcccawttgtgcttctccatttctctggcatagcaatttgagagggcacttaggagaggacgtgggtcattcatgacttcttattattcctgtagtccactgccagtgggtgcctacttatatacttgaagacctggggttctcactgtgccatatcacaaaagaattcaatttatagcctgctccactgctcccaatcaagactgttatcctgtcct

SEQ ID NO: 458710 - DNA, 618 bp, Homo sapiens
catatttctaaaatatgtgaagtgtctaaagattaagagtaatgtacataccctgcaagtttctcatttagcttaagagacatgacaataggaattgtctaggagtcccacatctccttcttcagttctatcctattctctccactacctctttgcagagataacattgayctgaactttgtatctaccatttctttcttttctttatagttttctggtacatgcatctatcaatccacagacagtttgaatttttaaaaatgggaatgaacacctgttgcaaattaaccatcattttaacttcactatcaaaaagcaaagctgatgaattttacaagcatgttatagatgcatcatgaaaattgtattattaatctgtatctaaaatgaaaactgattaaagaagctaacataaaactatcaagaattaaaactaaaagaatattacaattaaagggaaaagttaaaggattttgaaggaaaaagtcatacatttatatttgcctaatgtggaatttataacaaaaatgtgacaagctgaataatttttttcttcttacacagtactggagttatacaaaaacttttgaaaataaaagagcccaactatgaagcaat

SEQ ID NO: 458711 - DNA, 618 bp, Homo sapiens
catatttctaaaatatgtgaagtgtctaaagattaagagtaatgtacataccctgcaagtttctcatttagcttaagagacatgacaataggaattgtctaggagtcccacatctccttcttcagttctatcctattctctccactacctctttgcagagataacattgacctgaactttgtatctaccatttctttcttttctttatagttttctggtacatgcatctatcaatccasagacagtttgaatttttaaaaatgggaatgaacacctgttgcaaattaaccatcattttaacttcactatcaaaaagcaaagctgatgaattttacaagcatgttatagatgcatcatgaaaattgtattattaatctgtatctaaaatgaaaactgattaaagaagctaacataaaactatcaagaattaaaactaaaagaatattacaattaaagggaaaagttaaaggattttgaaggaaaaagtcatacatttatatttgcctaatgtggaatttataacaaaaatgtgacaagctgaataatttttttcttcttacacagtactggagttatacaaaaacttttgaaaataaaagagcccaactatgaagcaat

SEQ ID NO: 458712 - DNA, 618 bp, Homo sapiens
catatttctaaaatatgtgaagtgtctaaagattaagagtaatgtacataccctgcaagtttctcatttagcttaagagacatgacaataggaattgtctaggagtcccacatctccttcttcagttctatcctattctctccactacctctttgcagagataacattgacctgaactttgtatctaccatttctttcttttctttatagttttctggtacatgcatctatcaatccacagacagtttgaatttttaaaaatgggaatgaacacctgttgcaaattaaccatcattttaacttcactatcaaaaagcaaagctgatgaattttacaagcatgttatagatgcatcatgaaaattgtattattaatctgtatctaaaatgaaaactgattaaagaagctaacataaaactatcaagaattaaaactaaaagaatattacaattaaagggaaaagttaaaggattttgaaggaaaaagtcatacatktatatttgcctaatgtggaatttataacaaaaatgtgacaagctgaataatttttttcttcttacacagtactggagttatacaaaaacttttgaaaataaaagagcccaactatgaagcaat

SEQ ID NO: 458713 - DNA, 639 bp, Homo sapiens
taaaatacttaataaatgagctaatgcatgatgggcttcaaggagggtctggtcgtggaaagtggggagcaaacattcactactgtgattatgtgcaacattctctaaattcttccagatgaaatcattctttcctccagacttcttgtaacagatccgtgtatagatatatgtccccattggaatattgggggagtattagtctggtctcatgctgctaataaagacatacctggggctgggtaatttataaaggaaagaggtttaatggacttgcagttccacgtggctggggaggcctcacaatcatggtggaaggtgaatgagaagcaaagtcacatcttacatgatggcaggcaagagagcgtgtgcaggggaactcccctttataaaaccatcatatctcatgagacttattcactatcatgacaacagcacatggagacgtgcccccattattcaattacctcccaccaggtccctcccatgacacatgggaattatgggagctacaattcaagatgagattttgrtggggacacagccaaaccatatcagggtgtatgagattcacactgacaggatcttgcacacagaatgaagcttattaggcaggcaatcagtgccgaatagatgagt

SEQ ID NO: 458714 - DNA, 545 bp, Homo sapiens
atttggttatttttttttacaaaaagaccctattaacaatcacttaagctataaggaactctggcattgtaacggactcaacgacatgataggagtttagcatccagaatggtctgacctctgtgcttttctctgatctctgtatagccattccatctctgtcttcasatgactttctctacttctcagtccaaatggcagaaaacccagcaaacatttaatcatagagaaagaggagtggagacacagagagaaaagagagagagagagacagaatttctttctcctaatcccagttgtgacatttctggattaactcaactgctcaaccctagaccaattctggtcttaagggagatgacaacaggttgcaaaatggttgttcctacactaactatgtgaggggaggggtgagatgtgggcagagttcacagaaaatgggtcaggagctgggcaggcccaatagtaaggactagtagaggagctttaagagacatatctggccaggcaccatggctcaggcctgtaatctcagcacttcaggg

SEQ ID NO: 458715 - DNA, 628 bp, Homo sapiens
agtttccacttagatgtagatagctggaaataccctcgctcccaaatgtcagtttttaaaaagctagaaagacaatacctttgaacctgtcttgaatgttccttttcctaaccrttggaatagtggagaggcaaccaaccgtcccagagtctagggagagacgggtgcctgcagggagagacaagagctgcaaacactggcttttctgggcagatgcagcggactccataagcagactcctgctagggctggtgggtaaataggtggagcctggttgagtgtgtacttcaatgagagggtgaatcccctgggggaagtggactataaatacagaggggccccccatgcttgcaggcttttccttcatgaactcctctaggtggtcacagaagactgggaaaatcctaggaaaatctgcaggatggggatggaggcatcagaggcaagaaactcagagtgaattcttctctttctcccctatgaaacaaaatcattaatctgtggggacaaaagcaagaaatcgtcacctgtagagtactggtgaaatttctttgcagttcagggagagaaattttttctaaaaaatcttgagcatcaagggaggggtaggaatatatttttgggttta

SEQ ID NO: 458716 - DNA, 628 bp, Homo sapiens
agtttccacttagatgtagatagctggaaataccctcgctcccaaatgtcagtttttaaaaagctagaaagacaatacctttgaacctgtcttgaatgttccttttcctaaccgttggaatagtggagaggcaaccaaccgtcccagagtctagggagagacgggtgcctgcagggagagacaagagctgcaaacactggcttttctgggcagatgcagcggactccataagcagactcctgctagggctggtgggtaaataggtggagcctggttgagtgtgtacttcaatgagagggtgaatcccctgggggaagtggactataaatacagrggggccccccatgcttgcaggcttttccttcatgaactcctctaggtggtcacagaagactgggaaaatcctaggaaaatctgcaggatggggatggaggcatcagaggcaagaaactcagagtgaattcttctctttctcccctatgaaacaaaatcattaatctgtggggacaaaagcaagaaatcgtcacctgtagagtactggtgaaatttctttgcagttcagggagagaaattttttctaaaaaatcttgagcatcaagggaggggtaggaatatatttttgggttta

SEQ ID NO: 458717 - DNA, 583 bp, Homo sapiens
aggaacagcacaggaaagacttgcctcctgggagaattacctcaattaactcccactgggagaattcaagatgagatttcggtggggacacagccaaaccatatcaggcactaatcctattcatgggggttccactctcatgacctaatcactttctaaagactctgcctccactgggaacagtggctaaggccagtaatctcagcactttgggaagctgaggtgagcagatgagttgaggccaggagttcaagaccagcatggccaacatggtgaaaccctacctctattaaaaatacgaaaattagccaggtgtcttggtgcatatctgtagtcccagctacttgggaggctgagacatgagaatcacttgaacctggaaggtgsaggttgcaataagccaagattgtgccactgcactccagcctggctgacacagcaagactctgtcttaaaaataaataaataaataaatataaaaataaagactctgcctcctaacattgtcccagtagggattagatgttaacctatacattgtgcggagacacaaacattcagttcataacaaggagtgttaatg

SEQ ID NO: 458718 - DNA, 622 bp, Homo sapiens
gatattctgtgatagcagcctaaaccattactcaattctcaaatctttgtgattttggtaagaaatttgtttcttcaatgtgagaaacattttgcttacatcctattgtttctgtctccctctactctcatcacttttacttcttccttgcctcaatccctacccaaatctatcattaattctctatacactcatacccttgtttggttgtttggtaaatgcttatcttcttttatgaaaattcaatctgaggtcccacatcttaatactctttggaaatttagaataattgagttttaacattttcccctttatttgtgagattcagtggtcatttttcctcacacagtcatttcatctttrccagcatgcgggaaactaatatttctacctggttagcattgtgcatcatcagcatcaactcttccaaacacagagtgactttgccttctagttcccattgcctttgggcaaacaccatgcttcatactcagaagggagaagtacaatcttgcaagtatgaagaatccagagtccctgaaatctgaccaaattttccttgcatttttcaagctttaccaagaataactggagcttgctgtgagaatttttgatgtctttg

SEQ ID NO: 458719 - DNA, 622 bp, Homo sapiens
gatattctgtgatagcagcctaaaccattactcaattctcaaatctttgtgattttggtaagaaatttgtttcttcaatgtgagaaacattttgcttacatcctattgtttctgtctccctctactctcatcacttttacttcttccttgcctcaatccctacccaaatctatcattaattctctatacactcatacccttgtttggttgtttggtaaatgcttatcttcttttatgaaaattcaatctgaggtcccacatcttaatactctttggaaatttagaataattgagttttaacattttcccctttatttgtgagattcagtggtcatttttcctcacacagtcatttcatctttgccagcatgygggaaactaatatttctacctggttagcattgtgcatcatcagcatcaactcttccaaacacagagtgactttgccttctagttcccattgcctttgggcaaacaccatgcttcatactcagaagggagaagtacaatcttgcaagtatgaagaatccagagtccctgaaatctgaccaaattttccttgcatttttcaagctttaccaagaataactggagcttgctgtgagaatttttgatgtctttg

SEQ ID NO: 458720 - DNA, 508 bp, Homo sapiens
ggggagatagagaggacttgctccccactagagtaatccccagaatgctggggaaactagaacaactaactaataatccaaattaacttgaatccagatttcaaaacctgtcagcagtgaacacgttttggatatagggaacaactcagataattttggatacatatattatattaactgtgacctgagaactgtttattatgtggttcaggtgtcaccacaatatctgcacagccaagccaccacttggctggaccttggcttagtagcagctgaatcctcctctgaagctgagcagttttgcttctaataccatgtcctcttaacactgttgtatatatcttaggtccttcaggttataacaacaagaaactggatagtttacaaatctagatgagaccattaagataatggggaaagagacttctccatgcagtttacgactaacgcttatatgcttccratttttaaatgtccaagtccacattctagtttatgggatagaagg

SEQ ID NO: 458721 - DNA, 479 bp, Homo sapiens
gtgttactttaagtaataatcyctttgtcttcagggaagataaagtccaatgtaccttttggcaaagtgggtgattgctctcctaaagagactatattaagaaaacgaatagtttcagtctgtgctgcagacaagttagatattcagtaaattcaatagctggatcagccataatgaggactcaggtgtttagatgtttgcataccctccatctttgaccccttgcatattctattcctgggcctgtgtgcaagtactatgacagctgggaacagataccactcaatactttccctgcagtgaatctctctgataggtattaatataagagacaaagatccactcattcatgaatcacgttcaggtttttccatcctccatctcttctgggccactcatatgcataattttcttgtgtcctccaaatctcctctgagacaatctaaaaaatagcattgtgaccataggatgcaatactg

SEQ ID NO: 458722 - DNA, 427 bp, Homo sapiens
agtagcctagtgagaccagtaaattccacaagcatcagctcattgcaggacttaattttctttaacaataaaatttttttaaagtcaatgctatgagcagtattatgatggtgaataaggcattttacaagattatggatgatggaaataatcttgcctgggaactccaagtttagagcatgttcatagctccaccccacagagaaatgtcttcaattcaactctgaccttttcttgtgtctgttctgagtcatggtttcatttctaaggtttttatttctttatatatttaaacactacaattccatttattttctgttatccagaaaactttcagaatagcagtttcrttgatgtactttcattcattcttatccatattttaaatgcactttctttatatacattgtttctatcatcataacta

SEQ ID NO: 458723 - DNA, 555 bp, Homo sapiens
tttataatagtctctgagggtttttgtatttctgtggcatcagtagtaatgtcacctttgccatttctgattgtgtgtatttgtatcttctctttcttttttctattagtctagctagccatctattagtcttatttattctttcaaataaccaatttttggtttcattgatctttttaatggattttcatatctcaacttcattgaattttggctatttctggcagagggcaagatagccaactagatacagccaagtggaacagctcctactgaggaatcaaaatgactgccgtgcttcctaacagatcttcagagtgaagacacagaagctggctaatgggggaggaagcctagaaccctgcacaaggctatcatgtactggaactcattcctgatccccaatgactccagggtaatgggtgagttgaactggcatggagcaacctgctcttgccaagggacctcagaaatcccggcaggaggcgacccyttaaccaccaagaacactcaatttggcagggagagctgcttagagaagtggtaggggacatc

SEQ ID NO: 458724 - DNA, 554 bp, Homo sapiens
ctccagggtaatgggtgagttgaactggcatggagcaacctgctcttgccaagggacctcagaaatcccggcaggaggcgaccccttaaccaccaagaacactcaatttggcagggagagctgcttagagaagtggtaggggacatcacatcagctgatgcagagcccagagggtttggtgcagaagcatctgtagtggaacatggacagggttacccatctccctaggcttgacttgctccaataggaggctttagccctaggggaactgttggacctgaactcttcrgggtggccttgcccatcagatggggacagtccaacctgagcatcccttggtctcctggccaattccgtagccccagcctggccgtgtctgcttgcatggcagcgtcaggtgccccatcctttttagcaccagggaccaggttcatggaagacaatttttctgtgaactggggatggcggggaacggttttatgatggaactgcaatggaaccgttccaccttggatcatcaggcattagattctcataaggggcatgcgacctag

SEQ ID NO: 458725 - DNA, 548 bp, Homo sapiens
actttacagctcaaaaagattactctggggcattctgaaactctcataggccatgttcctggtctaggcatggaatttgtaaactacttggcctacaatagcccttgcatttaatgaaactatctttgacagaggagaaaggaaaaaacctgatcaggagggcagttagggtgggtccttggttgaaacctttagaacaaagaacagcctgcaggcacagataagggaacttgcacaagggggcttgcctaagacatgcccaaggctgtactgataagaaaagctacataggcaacttgctcagatacgcccacatggggaaattccattccctgacacgtgaatggtaaagggaacaaagctattatggagtaactcaagctaagggccygcatgtgcattagaaggacaaggtggagctaccagaaacttaggccttatgcaaatgagatgcccagccctcagtggtttcctataaacgcttttgcattcaactgtaaaaatggcaaccctcttccagttctcctctccacagcggacagctttct

SEQ ID NO: 458726 - DNA, 558 bp, Homo sapiens
tgagaatcaaatctaacaggcgcagttcgattaacatagtttagtgaggatgttgtttttctggtctcttctgacatgtacgagaggccaggctaatactaaaatctgagcaggtcttttgttaaaacaaatattctaagccaatcttcctgtcaagggaacaaatccccgtacagatcactgcttagacttccttccactttcttcagcagctggacatcgtacctcaccttggctggtgcctaaatacagtctcgggggagaaaagatgtttttttgtggtggtkgttttgtttttcaggattgtacccccagtacctagcatagtgtctggcacaaagcacacgttaaatataagtctgtaaaggaggaaagaaatacacagatgaattgagtaatgactactttcagttgtagtatgtgagactaatatttagaggtggttaccaaggatgtagtcacccttcccaacatccctcatggttggctctaagtctttgggggtctctgtgaaacacttcaaggagacagaggcactgatcctaaataatatagtaa

SEQ ID NO: 458727 - DNA, 579 bp, Homo sapiens
aacaaataatcaataaagaaatatagagcaaataaagtaacatgttcttgcatgatgctaagaaaacaaattatgcagtttttcaaaattcaggactccrtttccgacttggaaacctgagaagaagagagatgtgaatgtgtggttgagacagttttgataataccacaatgagatgcatgccctgaagcactgctccttactactaatcaactagatatatcttgtagcaactaacctcagaagctttttgctataattatcataaagactttagagtctaatttattatggtggtatttaaaacaattttttgatttctattttagacaggatatatttaaaacatcttctgtttttcaagtgcttggcaaaaaactattagtctgtatctccatgccatccaagtatctcatttactttattcactaaagaccctctccctaaatactgtaactaccaatgtggagaggtgtggatcctgtgtagaattgaaagccatctgcttgcttttcaactttggcctccatcagggataataaacacattctttagaagaaattatcgtactctgaacta

SEQ ID NO: 458728 - DNA, 579 bp, Homo sapiens
aacaaataatcaataaagaaatatagagcaaataaagtaacatgttcttgcatgatgctaagaaaacaaattatgcagtttttcaaaattcaggactccgtttccgacttggaaacctgagaagaagagagatgtgaatgtgtggttgagacagttttgataataccacaatgagatgcaygccctgaagcactgctccttactactaatcaactagatatatcttgtagcaactaacctcagaagctttttgctataattatcataaagactttagagtctaatttattatggtggtatttaaaacaattttttgatttctattttagacaggatatatttaaaacatcttctgtttttcaagtgcttggcaaaaaactattagtctgtatctccatgccatccaagtatctcatttactttattcactaaagaccctctccctaaatactgtaactaccaatgtggagaggtgtggatcctgtgtagaattgaaagccatctgcttgcttttcaactttggcctccatcagggataataaacacattctttagaagaaattatcgtactctgaacta

SEQ ID NO: 458729 - DNA, 432 bp, Homo sapiens
taaaacttcttaatctctctgaaccacagttttcttatctgtagaaatggtagagaaatgaggataaaatttgaaaacaaggggaaattggccaatcacagagagtatgagggttctttattttaataaaagtaatttccaaatgggctttttaacccacggatgtttgatgtgtagaggcagaagagagagtgaagggaaaaggttaggtgtaccctgtgtagtaacatttctatgtctttcatcaaagacatgttatctaatctaagtacttttgtagacttttaactttttaacctagcaaaatagaagaaaagttttttaataaaaaaagaaaatataaaaatratatgaatgcattcaatttttgactcaaagtaaaaaagatatatcaaatttaatcaaggcaaaaattaaaaacaaagctataaa

SEQ ID NO: 458730 - DNA, 573 bp, Homo sapiens
ctggcacccgtggtctcagaggaagagtgccctgccagtctccacaagataagtctgccctccccaccacggcccaycccacacccccactcctttaaccagagaggcttgggacctgggaaccaaaactggaagggagagttcaattctcacaaccttttttcagttgagttactagaaaaagatggaaataatattaattttggtggctttggcttgatcccaaaagccaacattagctttgctccgtaaataattcttgaagcacatggaaaataaaaacacaactataaatcattcaacaattaatgaaaaacctaaaccacatcaaattatatgctatagaaagaaagatgtataaaaaagaactttaaagccagacattattttatttaaaaagaaagactgataaggaattatgtatgtaacatgagaacaaaattattatgtaaagataaacaaaagaagaaacagaaaattaggaaagtgttttcagatgaaatagaaaagaataaagatgtagtccaaaataagtaaaacaaatcctagctttttagcaaaaaaaaaaaaaaa

SEQ ID NO: 458731 - DNA, 555 bp, Homo sapiens
tttagactttagggattttgatcctttgggatttcaacatttaggattatggagtttgaggttgtgtattttagtattattatccaaacctcatgtcctgaaccccatcaatcatgaagattaaataaaacatttacaaaaagtttaaagtgtctatcagataataactacttaatagctatttttaatagttgratattattttgaaattatttttatgcattctaccaattcagatgtttgtagtcatttgacatatttttattagaaatctaataaaattaacataatattatatttttttaattttaaagacagattatgtgtaatcatattaaataacagaatatagtcatttctaatattaataattaattttttacacgggccaaagatgtgattttgttgtcataggtcttagtgggagtatcgtgaggaaaatggggccgaaaaaaagaagagtgaatcagctcaatttcaaatgttcaccggccacaaaattgatcattagatcataaattcaaagtgaaagaaaataatgacaagatcaatcat

SEQ ID NO: 458732 - DNA, 555 bp, Homo sapiens
tttagactttagggattttgatcctttgggatttcaacatttaggattatggagtttgaggttgtgtattttagtattattatccaaacctcatgtcctgaaccccatcaatcatgaagattaaataaaacatttacaaaaagtttaaagtgtctatcagataataactacttaatagctatttttaatagttgaatattattttgaaattatttttatgcattctaccaattcagatgtttgtagtcatttgacatatttttattagaaatctaataaaattaacataatattatatttttttaattttaaagacagattatgtgtaatcatattaaataacagaatatagtcatttctaatattaataattaattttttacacgggccaaagatgtgatttkgttgtcataggtcttagtgggagtatcgtgaggaaaatggggccgaaaaaaagaagagtgaatcagctcaatttcaaatgttcaccggccacaaaattgatcattagatcataaattcaaagtgaaagaaaataatgacaagatcaatcat

SEQ ID NO: 458733 - DNA, 555 bp, Homo sapiens
tttagactttagggattttgatcctttgggatttcaacatttaggattatggagtttgaggttgtgtattttagtattattatccaaacctcatgtcctgaaccccatcaatcatgaagattaaataaaacatttacaaaaagtttaaagtgtctatcagataataactacttaatagctatttttaatagttgaatattattttgaaattatttttatgcattctaccaattcagatgtttgtagtcatttgacatatttttattagaaatctaataaaattaacataatattatatttttttaattttaaagacagattatgtgtaatcatattaaataacagaatatagtcatttctaatattaataattaattttttacacgggccaaagatgtgattttgttgtcataggtcttagtgggagtatcgtgaggaaaatggggccgaaaaaaagaagagtgaatcagctcaatttcaaatgttcmccggccacaaaattgatcattagatcataaattcaaagtgaaagaaaataatgacaagatcaatcat

SEQ ID NO: 458734 - DNA, 624 bp, Homo sapiens
tgctattaatactacttgtatttgattgctgggatatcatggacctggatgttttaattatagtgggtaatttgacaccattgaggagaacaaactgtgattatgttctctatttgttctcagtatttcctatgggcacatatctcctactgaaatagaatagttggacttgcaggcctggggtggtggctcacgcctgtaatctcagcactttgggaggccaaggtgggtgaatcacctgaggtctggagttcgagaccagtctggacaacatgatgtaactccctctctactaaaaattaraaaaaattagccaggcatggtggcaggcacctctaatcccagctacttgggaggtggaggcaggagaatcacttgaacctaggaggaggtggaggttgcagtgagctgagatctcgccactgcactccagcttgggcaacaagagaaaaactccacctcaaaacaaatacataaataaataagaaaggcattcaatgagattttagccgaagagtcaacattcttttcaatgacgaagggatggaagaaacatttccacatatcaaatagaaacttagaaagatctgtggggttttctcaaagatatgtcagtaacagtgt

SEQ ID NO: 458735 - DNA, 534 bp, Homo sapiens
tatgtagaagcaagataaaatggaaatcttgcatttctttttscatgaattatttattcccgatcttaaactctgcttattttactgcttgaagtgacttcctttgctgtttcctttttggaaatcctagttcagctagaatagaacaatgaggaacatattttctaatgagattgtttttcccaaaatctaaaatatggtgatagcgcatatgtgaattggattgtcatttcactgtaaataaatttgcttgcaaccctttgtcgaagtctggagaggaatttaaatatgtctttatatatttctatatataactctatggagtattgtgtcattttaaacaaaatttcatggaggatataaaatctttagataatgtacataatataaaattacatatatattttaatatatatgtgattaatctcctctgaactataataatacattacagaaaaaagacatgttctgcaacagcacaaaaagaaggcaccccactaacaagaaactatcttggtacttaagaagcttact

SEQ ID NO: 458736 - DNA, 477 bp, Homo sapiens
atgtcaatatttctgatcacatgtgtattccaacagacagaggtctttggaaactattgaactatagggagatargagaataaaaatcttctttatagatcctggataatatttaacactatattattgaattattttagtacaagcagtataatgtggcatggtgtaataactgtcatcaaatcctctgtagaataaaaggcatcaacagaacatttctgaaagaaaatgcatcctggaatctgcaagagcataaaatatccaggcaatagttaaattacagctgattggccatttaaacatgtctccaagaatgatttcatttcctatcgtctcattaaataaggcgacataaatttttattgagattttactttatagagattatatcaataacgttccgtatgactttcattagaatttttcatttctgagactttaaacaagagatgtcaaaagcaataaaacaaatgccag

SEQ ID NO: 458737 - DNA, 477 bp, Homo sapiens
atgtcaatatttctgatcacatgtgtattccaacagacagaggtctttggaaactattgaactatagggagataagagaataaaaatcttctttatagatcctggataatatttaacactatattattgaattattttagtacaagcagtataatgtggcatggtgtaataactgtcatcaaatcctctgtagaataaaaggcatcaacagaacatttytgaaagaaaatgcatcctggaatctgcaagagcataaaatatccaggcaatagttaaattacagctgattggccatttaaacatgtctccaagaatgatttcatttcctatcgtctcattaaataaggcgacataaatttttattgagattttactttatagagattatatcaataacgttccgtatgactttcattagaatttttcatttctgagactttaaacaagagatgtcaaaagcaataaaacaaatgccag

SEQ ID NO: 458738 - DNA, 477 bp, Homo sapiens
atgtcaatatttctgatcacatgtgtattccaacagacagaggtctttggaaactattgaactatagggagataagagaataaaaatcttctttatagatcctggataatatttaacactatattattgaattattttagtacaagcagtataatgtggcatggtgtaataactgtcatcaaatcctctgtagaataaaaggcatcaacagaacatttctgaaagaaaatgcatcctggaatctgcaagagcataaaatatccaggcaatagttaaattacagctgattggccatttaaacatgtctccaagaatgatttcatttcctatcktctcattaaataaggcgacataaatttttattgagattttactttatagagattatatcaataacgttccgtatgactttcattagaatttttcatttctgagactttaaacaagagatgtcaaaagcaataaaacaaatgccag

SEQ ID NO: 458739 - DNA, 477 bp, Homo sapiens
atgtcaatatttctgatcacatgtgtattccaacagacagaggtctttggaaactattgaactatagggagataagagaataaaaatcttctttatagatcctggataatatttaacactatattattgaattattttagtacaagcagtataatgtggcatggtgtaataactgtcatcaaatcctctgtagaataaaaggcatcaacagaacatttctgaaagaaaatgcatcctggaatctgcaagagcataaaatatccaggcaatagttaaattacagctgattggccatttaaacatgtctccaagaatgatttcatttcctatcgtctcattaaataaggcgacataaatttttattgagattttactktatagagattatatcaataacgttccgtatgactttcattagaatttttcatttctgagactttaaacaagagatgtcaaaagcaataaaacaaatgccag

SEQ ID NO: 458740 - DNA, 603 bp, Homo sapiens
taactcccctcccagcctctacccttaagtaggccctggtgttgttgccttctttgtgtccatgtgtactcaaagtttagctccctttatataagaagtgagaacatgaagtatttgctcttctgttcctgttagttcactgagaataatagcctccagttccatccatgttgcttcaaaggacgtgatctcattctttttcatggctgtgtagtattccatgatatatatgtagtacattttcttatccagtctmcctttgacggccatttttgttgatgtcatggctttgctattgtgaatagctctgttatgaacatacacatgcatgtgtctttatggtagaacaagctaattttttaacttgttaattaaacttttaaaaattcctttcaaattattattttaagacaactttgcataacctaagataatgacgatttttttctatagtaccttgtagaagatccattgttctatctctcacgtttagatggcaatccacttggaatcaatttttgtgtataacatgaggcataggccaagattcaattttccatgtggatattcgatgaacaaatgttgagtgggccttcgtttctc

SEQ ID NO: 458741 - DNA, 568 bp, Homo sapiens
cttctttgtgtccatgtgtactcaaagtttagctccctttatataagaagtgagaacatgaagtatttgctcttctgttcctgttagttcactgagaataatagcctccagttccatccatgttgcttcaaaggacgtgatctcattctttttcatggctgtgtagtattccatgatatatatgtagtacattttcttatccagtctccctttgacggccatttttgttgatgtcatggctttgctattgtgaatagctctgttatgaacatacacatgcatgtgtctttatggtagaacaagctaattttttaacttgttaattaaacttttaaaaattcctttcaaattattattttaagacaactttgcataacctaagataatgacratttttttctatagtaccttgtagaagatccattgttctatctctcacgtttagatggcaatccacttggaatcaatttttgtgtataacatgaggcataggccaagattcaattttccatgtggatattcgatgaacaaatgttgagtgggccttcgtttctccacagctgtatct

SEQ ID NO: 458742 - DNA, 543 bp, Homo sapiens
tcacttaacaattgtcaaaaatacgtatgactcctaagaacattttaatagatataaagtgagattatctgggcaaacatttcgtgctcatgatttgtaagcttaaagttcctgtttccaaatggcaaaaggagaacagcattttttatatatttataacrtttctgtggcatgaaattttcctccaaggagctaaagcctccagcagcttctaagtggataagcacagatagcaaaggccctaatagagcacatattatatattggagggacagagtggttctctattaggtcttttgctatctgtgcttatccagttagaagcttttggaggttttagctccttggaggaaagtttcatgacacagaccattgcctctcagtacttcctgtggtttatcatgtatggctcatgttcaagagtcctgcggttgatgttactaaaatgaaatgaccctgcaggattacaaaaaatgataaatatgatcttataagtcaaacattttacctccataacttcaattttttattttagatcttcct

SEQ ID NO: 458743 - DNA, 603 bp, Homo sapiens
taactcccctcccagcctctacccttaagtaggccctggtgttgttgccttctttgtgtccatgtgtactcaaagtttagctccctttatataagaagtgagaacatgaagtatttgctcttctgttcctgttagttcactgagaataatagcctccagttccatccatgttgcttcaaaggacgtgatctcattctttttcatggctgtgtagtattccatgatatatatgtagtacattttcttatccagtctccctttgacggccatttttgttgatgtcatggctttgctattgtgaatagctctgttatgaacatacacatgcatgtgtctttatggtagaacaagctaattttttaacttgttaattaaacttttaaaaattcctttcaaattattattttaagacaactttgcataacctaagataatgacgatttttttctatagtaccttgtagaagatccattgttctatctctcacgtttagatggcaatccacttggaatcaatttttgtgtataacatgaggcataggccaagattcaattttccawgtggatattcgatgaacaaatgttgagtgggccttcgtttctc

SEQ ID NO: 458744 - DNA, 563 bp, Homo sapiens
attttaagttaaaataacgtggaaaaattataaatgaaaaaagaaattacagaaggggcttttaaaataaagtcttcaatatataattctgtgtataatttttcacgtgctacccctgtaaagcttagtgtggctgtagcagaagaacattcccaccagagcgtcactctgggaacctcaaccgggtggagggcctttgcagaaaaacctgagtgctattaaagtctctagtgggaattgagagcagctctttgggtttcacagaatgaaggaataaataaataaataaatacataaaggaagtaaaggggtatgaagctggtacaggagagattaaaaagacaataactaaaataaaactccctctcatatawccagctggaggtgccttgcataggatgtgtgagtttctgaaacaggacaaagcaaattgctaggggcaacaacttcatggttggtggattcctgcctaagtacctgcattcctcctttcccatttcttcactggcagaatcgcttccaccaagaaacgtcaggagtaaaagaaggggtgcctaccatca

SEQ ID NO: 458745 - DNA, 563 bp, Homo sapiens
attttaagttaaaataacgtggaaaaattataaatgaaaaaagaaattacagaaggggcttttaaaataaagtcttcaatatataattctgtgtataatttttcacgtgctacccctgtaaagcttagtgtggctgtagcagaagaacattcccaccagagcgtcactctgggaacctcaaccgggtggagggcctttgcagaaaaacctgagtgctattaaagtctctagtgggaattgagagcagctctttgggtttcacagaatgaaggaataaataaataaataaatacataaaggaagtaaaggggtatgaagctggtacaggagagattaaaaagacaataactaaaataaaactccctctcatataaccagctggaggtgccttgcataggatgtgtgagtttctgaaacaggacaaagcaaattgctaggggcaacaacttcatggttggtggattcctgcctaagtwcctgcattcctcctttcccatttcttcactggcagaatcgcttccaccaagaaacgtcaggagtaaaagaaggggtgcctaccatca

SEQ ID NO: 458746 - DNA, 563 bp, Homo sapiens
attttaagttaaaataacgtggaaaaattataaatgaaaaaagaaattacagaaggggcttttaaaataaagtcttcaatatataattctgtgtataatttttcacgtgctacccctgtaaagcttagtgtggctgtagcagaagaacattcccaccagagcgtcactctgggaacctcaaccgggtggagggcctttgcagaaaaacctgagtgctattaaagtctctagtgggaattgagagcagctctttgggtttcacagaatgaaggaataaataaataaataaatacataaaggaagtaaaggggtatgaagctggtacaggagagattaaaaagacaataactaaaataaaactccctctcatataaccagctggaggtgccttgcataggatgtgtgagtttctgaaacaggacaaagcaaattgctaggggcaacaacttcatggttggtggattcctgcctaagtacctgcattcctcctttcccatttcttcactggcagaatmgcttccaccaagaaacgtcaggagtaaaagaaggggtgcctaccatca

SEQ ID NO: 458747 - DNA, 617 bp, Homo sapiens
gtgacatagaaaacagaaaaacagagaaaattactaagacacaaaactgttctttgaaaatattaaaaaatgtctgtttaggtataaatctagcaaaacatgtacaaaatctgtatgctgaatactacaaaacatggtgggagaaataaaagaacataaaaaaatggagctgggtacagtagttcacacctgtaatcccaacactttggaaggtcaagattggataattgcttgaaagtaggtgtttgaggccaacctggccaacatagtgagaccctgtctctatttttaaaattgaagaggtataacacatacatggattaaaaaactcaacataatacgtcaattctrttccatacttacgtactggtttaatacaattcctattgtatttccagtaaagctgttttttagatataggcaagcttatttgaaaaaatttagaactaattagaattagttattagaataattagattagtaattagaattactaattagaataactataacaattttggaaaaagaagaaagtgagaggaattaattgaccagatgtcaaaacttagtatatagttacattaatcaaaacattgtagtactggggaactgataga

SEQ ID NO: 458748 - DNA, 586 bp, Homo sapiens
taattagaattactaattagaataactataacaattttggaaaaagaagaaagtgagaggaattaattgaccagatgtcaaaacttagtatatagttacattaatcaaaacattgtagtactggggaactgatagacccatagagcaatgaaatagaatagagaatccataaacagactgacacagatatgatcaatcaactgacatttgtcaaatgtgcacaagcaattttgtggaaggaggacaatgttttccaaaaatggtattggaacaactggacatccatgggggccagaggaaggaagcctggatctaagcttcccaccttgtacaaaaattaactcaaaatagattatatgtttaaatgtaaagcattaaaaatatcaaacctttagaagaaaacacaggagaaaatatttgggacctaaggtttggtaaagagttcttaaatacgacaccaaaaccatgaggcataaattaaatcrattagctacatgtaatcaaaaataaaactttagttctagaacatagtgtgttatgagaataaaaagactacaaactacagaattaagcatttgctaactgc

SEQ ID NO: 458749 - DNA, 499 bp, Homo sapiens
gatcataaataacttccgctgtccctgcaaagggcaggattaaggccccattattaggaggaaatggaggcttaggcarttgcagcaaattatatgaggctttggccaagtggcagtgaaaattaccttgtctggtttatagtggcttttcttgggcatgaaaataattgggaatggctaaaagtacctaatagtttgacaaagtttctttctaggaaactaattcaactcttaagccacatcatattcttaaagagcctttttttctggttacgttccaattcctgcctcaagagtcaacacaatgttccagaaattaatttcattctcataattcctgctcattgtatagttacaatggtacataaatggtgtatattggcagtctggatactttctggtgtcatgtacacatcctcgctgagttctacatgtcatgtcaacacaacttttattgtacaaagcattcatgattttttccctttatttttgtctccct

SEQ ID NO: 458750 - DNA, 499 bp, Homo sapiens
gatcataaataacttccgctgtccctgcaaagggcaggattaaggccccattattaggaggaaatggaggcttaggcagttgcagcaaattatatgaggctttggccaagtggcagtgaaaattaccttgtctggtttatagtggcttttcttgggcatgaaaataattgggaatggctaaaagtacctaayagtttgacaaagtttctttctaggaaactaattcaactcttaagccacatcatattcttaaagagcctttttttctggttacgttccaattcctgcctcaagagtcaacacaatgttccagaaattaatttcattctcataattcctgctcattgtatagttacaatggtacataaatggtgtatattggcagtctggatactttctggtgtcatgtacacatcctcgctgagttctacatgtcatgtcaacacaacttttattgtacaaagcattcatgattttttccctttatttttgtctccct

SEQ ID NO: 458751 - DNA, 576 bp, Homo sapiens
ctgaggccctgccaggaagagtacaggcagagcagggcggagaggagccacttcttctttggctaatctagttaccctcacagccttagaaggcccaatcataagattctgatacccaggaagcaggccctgccttcaggctggtgccagtgactgcagctgcagaggcaagccctccattcccagtggggtaggtgtcactgtctctgtgcaccgacactaggtcatcggtttcttagccacccagrgcaggagaagagctatgggagcccctcccatcatacatctgcccagcctcctgtctgcagtgagatctgttgtctgtagaggagcacccagatgactcactgacagagaaaaaggagagaggcggggaaggcagagcggggctgcgaggggcagtgtggagcacagagaggaagatgttccctcgacccatgaggaccctcgacccatgcggagaaaggacttgtcagcagccaggctggggcagccctgcctttaggaggagcagagcaaggcctgaggccttcattcagtgagttaagatttactgagctcctactgtggggcagg

SEQ ID NO: 458752 - DNA, 576 bp, Homo sapiens
ctgaggccctgccaggaagagtacaggcagagcagggcggagaggagccacttcttctttggctaatctagttaccctcacagccttagaaggcccaatcataagattctgatacccaggaagcaggccctgccttcaggctggtgccagtgactgcagctgcagaggcaagccctccattcccagtggggtaggtgtcactgtctctgtgcaccgacactaggtcatcggtttcttagccacccagagcaggagaagagctatgggagcccctcccatcatacatctgcccagcctcctgtctgcagtgagatctgttgtctgtagaggagcacccagatgactcactgacagagaaaaaggagagaggcggggaaggcagagcggggctgcgaggggcagtgyggagcacagagaggaagatgttccctcgacccatgaggaccctcgacccatgcggagaaaggacttgtcagcagccaggctggggcagccctgcctttaggaggagcagagcaaggcctgaggccttcattcagtgagttaagatttactgagctcctactgtggggcagg

SEQ ID NO: 458753 - DNA, 510 bp, Homo sapiens
tctcacaggggcctcctgagggagctcgagttttagatgatggaggcagatcaacagtgaagagatcaagagaggaaatgcagaaactggttctagacctggcactgccctgtctgtgtcaacttgggtggctccccaaagccctctgagtttcaactcccttaggttaaccccttcctttccagccattctcctggccctgcgtttgactagccctatggcttaacctctctggtccttagtttcctctcctatrgacagaagtagaactcagtgattcccacagtcccttttacctctaagaatcacgtggtcctcctctgtgagactgttgagatgtgctttgagagccataaatggcagcagtgttaaaactcacagagagaatggattttcgcaggctgttcacatcccaagtgctggggcagatagcgcacctgggacctggaggaactttattttcaggactgccacaaagattccgggccagttgaaagcaccctgacccct

SEQ ID NO: 458754 - DNA, 606 bp, Homo sapiens
tattccatgcgggaagaaatgtgggtggtgcaaagcgttttcaaacatgtgacactgagctgatcacagatgagaaaaagttggacagattcagttcctcttttctgcatgaggttagcactaggcaaaattgggaagctgcatctttacacagcttgcaagcaatggtgaaatagaacagaatggtcaggctagtgtgggacctgtggcatgtggaggcggggggccatagaaaggaagggggaccccataacctttacctgcctgggtaaagttacctgggctcaaccatcctggctctcctgagacagcactgctagtggaggtggcttctggcggaggagcatggagacctgcagccaaaaccctcagttcgaatcctggctctgccaagttgctagttgtagcatcttgggaaattactttgactgctttgygactccattgcctcatctgtgaaatggagctaattataaatcctgccccacaaggtgtcatgagactaagttagttcatttacattaactattttagaatagcgcatggcatgcaataaatatgttactggtattttttcaaggggcacaatctgatctttgtatcatc

SEQ ID NO: 458755 - DNA, 562 bp, Homo sapiens
caaggcaacatattaggtactggggtgatacaaagatatgaatctttcccccaaatctctctgtactcattattatttcccccactttatggatgagraattgagacacaaagaggttaagcagcatgctcaagctcatgcagcttaattaatcctggaacgtagctacagtgtagttcttaagggaggtaaccccaagaaaataactcaagattggggtgctcacaataaaggagaggctggcatttggcattttattggtcagtgtcaacacttagccacagggcttgcttgcctcaccctgggctggctgttcagggaaagaaaggcaaggaagaaagtatggtgggcaacagccaggtggagtaggggccaagtccactccccactccagttccctggtggatgctacatgtgtccacagatgctaaagttggctgcagacagcagatgaggccaaggtcccaccacaacctgggagacagagacacacacaggatgtgtgccaggctgggtgtggagggaatcactggaagcctttcgcaggagtgacttaacccac

SEQ ID NO: 458756 - DNA, 562 bp, Homo sapiens
caaggcaacatattaggtactggggtgatacaaagatatgaatctttcccccaaatctctctgtactcattattatttcccccactttatggatgaggaattgagacacaaagaggttaagcagcatgctcaagctcatgcagcttaattaatcctggaacgtagctacagtgtagttcttaagggaggtaaccccaagaaaataactcaagattggggtgctcacaataaaggagaggctggcatttggcattttattggtcagtgtcaacacttagccacagggcttgcttgcctcaccctgggctgsctgttcagggaaagaaaggcaaggaagaaagtatggtgggcaacagccaggtggagtaggggccaagtccactccccactccagttccctggtggatgctacatgtgtccacagatgctaaagttggctgcagacagcagatgaggccaaggtcccaccacaacctgggagacagagacacacacaggatgtgtgccaggctgggtgtggagggaatcactggaagcctttcgcaggagtgacttaacccac

SEQ ID NO: 458757 - DNA, 562 bp, Homo sapiens
caaggcaacatattaggtactggggtgatacaaagatatgaatctttcccccaaatctctctgtactcattattatttcccccactttatggatgaggaattgagacacaaagaggttaagcagcatgctcaagctcatgcagcttaattaatcctggaacgtagctacagtgtagttcttaagggaggtaaccccaagaaaataactcaagattggggtgctcacaataaaggagaggctggcatttggcattttattggtcagtgtcaacacttagccacagggcttgcttgcctcaccctgggctggctgttcagggaaagaaaggcaaggaagaaagtatggtgggcaacagccaggtggagtaggggccaagtccactccccactccagttccctggtggatgctacatgtgtccacagatgctaaagttggctgcagacagyagatgaggccaaggtcccaccacaacctgggagacagagacacacacaggatgtgtgccaggctgggtgtggagggaatcactggaagcctttcgcaggagtgacttaacccac

SEQ ID NO: 458758 - DNA, 583 bp, Homo sapiens
acttaataagagtattccaacaacaacattgtgagtgtattttggcttaggaggggtcaactgacctgcccaagatcacctagctattaagcagctaagttgggccttragcctgggactggctgtctctaaagtacatactcataatctttacaactgcctcctttcttggggtttccaggcaatcatcttcctgttctctcccagccatgctccaccaccttctttatggccactcctgcccactgaagccctcactgccagtaagccctcagctcctacatacctcatgatcaaggcacaatgataggcatatgatagatgctcaacaaacacttcccgaattaaatatctgggatcaacttgaattggattctccaacatgaagagtgaggaagctcaatcccaaaagattgaaccaaagccattgatgagcacagaggaatgctgaagtgggacacttttccacaaggctctgaggaacactgaaatagagccacagttgctcttgggccatcactggtctgccagcatcagaaaactgattcattaactgtatgacaacccccattctgtcaccact

SEQ ID NO: 458759 - DNA, 543 bp, Homo sapiens
gtccctggccatcctgaggatcatccgcctggtgagggtcttccgcatcttcaagctctcgcgccactccaaggggctgcagatcctcgggcaaacactgaargcgtccatgcgggagttggggttgctcatcttctttctcttcattggagtcatcctcttctccagtgcagtctactttgctgaggtggatgagccagagtcccatttctctagcattcctgatggcttctggtgggcagtggtcaccatgacaactgtaggctatggggacatgtgcccgaccaccccaggggggaagattgtgggcactctgtgtgccattgcaggggtcctcaccattgccctccctgtgcctgtcattgtctccaacttcaattacttctaccaccgggagactgagaatgaagaaaagcagaacatcccaggagaaattgaaagaatcctcaacagtgtaggctcaagaatgggcagcacagactctcttaataagaccaatggtggctgttccacagagaagtctaggaaatgatcagtccaggg

SEQ ID NO: 458760 - DNA, 538 bp, Homo sapiens
aacctgggttgatagagtgagacccgtctgtttaaaaaaaaaaaaaaaaaagaaaaaaattaatgtatataaattcaagaccattatcaaaaatcaaaatgcaagtgagttggattatctaagctctaagcatgtaaaaaacttaagattacagcaggttacttactatatgcattgaactactgaattcaaatttcccagtttttcattttaagatttaatgattttctttactaataataacctatatgctatgatttgtaacttgcattttacaaagcaagttaaatgtggaacttgtgcgtttgtttaccttargattaggctttactggcatcacagcatttttcagtaattactagatttcttagcatcttggatttcattgaaaaatgctcgttcagaagtaatgtatgaaaggacttgcagatacaatataaaaagtgagaaatcagggattgtgaaggtttttattcccaaaaaccttgctagttaaaataagacttgctgtaacatagcgtgtatagtttagagttag

SEQ ID NO: 458761 - DNA, 560 bp, Homo sapiens
gtaatggttcccaaattaggctgcttattaggctcccctgagaagcttttaaagttacagcttccttgactccctccccattacccagaatcaaagcaatagttgatggagcctagaaaactgaatttttaggccgggcacagtgggtcatgcacgtaatcccagcattttgggaggccgaggagggcggatcacytaagttcgggagagaccagcctgaccaatgtggagaaaccccatctctactaaaaatacaaaattaggcatggtgcatacctgtaatcccagctacttgggaggctgaggcaggagaattgcttgaacccgtgaggcagaggttgtggtgagctgagatcacgccattacattccaccctgggcaacaagagcgaaactccgtctaaaagaagaaaaagaaaactgaattttaaaataaacactgggttaatttaagtatttataaactgcagatttagggagagtacacagaagggaagaggaactctgaagtggacattaaggaatgtgagttttatcattaacagtctgattattagagtg

SEQ ID NO: 458762 - DNA, 556 bp, Homo sapiens
aatttagcagtacctggcacatacatgtttcgctactggtggttattcattttgaaaaaatagtattgaagttctgcgtatcaagtcttaggaacatagtgttaagcaaagtcacttgggttttgctcttatggagtttgtattttaagaataatacataactaaaaggagatgctttgggatctcagatttgtgatatgaagctttcattcaattatgacgaaaaataagaaactgcaacaaaaattactatctaggaaaggggagtaaacaccaggacgtcaccatatcaacatatggtactaggcagggatgatgtaaataatgcaatcaacagatcttgggagaattacttactgactcaagattggccattttttaaagttcttccaagtaatagatactaaagttcagctaatattgagaagcataccctaaaccctttacctgtgtctggcgaaacttcaacctgarttaatccaaccattcattttctgagcacctctgagcagttgcatgctgctgaagattataaaataatagaatatactgattc

SEQ ID NO: 458763 - DNA, 575 bp, Homo sapiens
tcagcagctttacttgtgatacagttttccaacatcactttcatcaacttcaaaaaatttctcttttgcaaaatctagaattaccctgtaaaaccaaatcacattgcactcatagtttattgtggagaaatcttaaatctgggagagactaagcaacaaaaatatgacytgatggatgaaaacatgcaccaagattaagcaagcagagatgtttaagtagggactgatttcataaatgagcatttttttgttagtaaataattttatgttataaaacatttaccttcccaatgttaccataactatgggaacttgaaataggaatactcagaaaatgataagagttaggagccactaacatgggttaagtgtcccaagcttcacttcaccaagcaaagaatgaaaggaatgaatatcctggcacgtctgtaattcattctattggtagaccagttgggaaattctgccatcagtgatggaatcctgagttaaaacaatcccgatgggctggaacactggccccagtccaacgtataacatttaactaagttaagtgttgaattattgcaattagg

SEQ ID NO: 458764 - DNA, 574 bp, Homo sapiens
tgcagcttccctataaggcagatgttaatgttatttccgttttaaagatgacagaaacaaggcccaggcaggttcagtgacttgcccaaagtcacacacctgcttttccattagggctaggatcagggtgagggcctcctgtcttgtagtccaaggcctggttattgccttatgtagawatcagagccaactgttcatctgatggttatttatggagcatctattatattctcaaggccctgtgttgggtgctcagttagagcaggaaagacagtcactgctgtgatggtgtctacattcaaaaccagcgctatccaaaaaatgtataatgtgggccatatgtgaaattcaaaattttttagcagctgcagtaatttaaaaaaagtaaaaagaaacaagtaaaattaattttaatgatatagtttatgtaataatatatctaaaatattctcttattgatatataagcaatgtaacaattactgagatattttacatctttcttttatatttgaaatttagtatgtgttttatagataacacagatttcgaatgttcagtagccatatgtagcc

SEQ ID NO: 458765 - DNA, 565 bp, Homo sapiens
gggcttgtcatatggtcttcattctgggcagaaaattttcagtttcagccagtttggtaaaatttagactgaaataggacagttggttttctaagacacagaaaaattaacaaaatcagtaattgatcaaaattgcctgttctgtggggaaaaacttggggacttttaaaattttcactgtttaygtttagaaaaacaatactggtctcttactgacaatgttttatgtgtggtagatgcctagtaaatggtggttggatggatgactggaggagtgagtatattcatgagttattatccattttcctaactcttgggaccattttgaatgtcccagttgcagaaaagatgtccctcccatgagcatcttatgtagaggcttgatgccctttggattgtcaaccatttccatggagcaaatttgtcttcggtaacatagggtgtttctaaacagaaaattactcttcaagttcaaacaggagcctacacagcacatgtatttttctgtgtccatacttaaaaatgtgccagatacaacaacctgtcccacagaagaattaagtat

SEQ ID NO: 458766 - DNA, 535 bp, Homo sapiens
cacacactaccatttctaacacgttttattcagtagaaatcagtcactaggtatagttcacactcacctataggggaattagattccaactcttgaaggcaggaatatagaaagatttgtggacatcttttaaaactacaggttgaatattccttatctgatatgcttgagaccagaagtgtttcagattttggatwtggatttttggcagattttgggatatttctatatatacaatgagatatctctggaataggacccaagtctaaacatgcaattcatttatgtttcgtgtataccttatacacatagcctgaatgtaattttataaaatattttaaataacatatgcaacccatcacatgaggtcaggtgtgaaatttctacttgtaggagttcaaaaagttttaggctttggagcattttagattttggattttctgagtaggggtgttcaacctgtaccactaacaccatccattggttctgttacatagatcagcagattttccctgcttcccatcttgtctatgga

SEQ ID NO: 458767 - DNA, 535 bp, Homo sapiens
cacacactaccatttctaacacgttttattcagtagaaatcagtcactaggtatagttcacactcacctataggggaattagattccaactcttgaaggcaggaatatagaaagatttgtggacatcttttaaaactacaggttgaatattccttatctgatatgcttgagaccagaagtgtttcagattttggatatggatttttggcagattttgggatatttctatatatacaatgagatatctctggaataggacccaagtctaaacatgcaattcatttatgtttygtgtataccttatacacatagcctgaatgtaattttataaaatattttaaataacatatgcaacccatcacatgaggtcaggtgtgaaatttctacttgtaggagttcaaaaagttttaggctttggagcattttagattttggattttctgagtaggggtgttcaacctgtaccactaacaccatccattggttctgttacatagatcagcagattttccctgcttcccatcttgtctatgga

SEQ ID NO: 458768 - DNA, 495 bp, Homo sapiens
gctgggattacaggcgtgagccaccatgcccctccaggaaacttttaaagacaaaaaaagaagtccacataaggtattttgaaacaaagaccataggttacaggggcttgttgcaggagctggcatcaattcattggtggagacacttgttgctagataaatgtccttgtgccagtggttacctggaatacagcagtcttgaggaagttcttgtgataagtcctgttactggtctatgtgcaggaatttcttgtggtaagtcttgttatgaggatgtatgcataagggcttctttttcatggcctcccctgactccattttgttagaatttgacataaatgactcccttttggtactggcaactttcacagcttcttttaagaaatgctgtatctcagtgctaacaatggtacagagaraaatattgtaaatggacacctctgaatttaaatgcagctcagaagagtcagactataaagaggcattttaggacta

SEQ ID NO: 458769 - DNA, 495 bp, Homo sapiens
gctgggattacaggcgtgagccaccatgcccctccaggaaacttttaaagacaaaaaaagaagtccacataaggtattttgaaacaaagaccataggttacaggggcttgttgcaggagctggcatcaattcattggtggagacacttgttgctagataaatgtccttgtgccagtggttacctggaatacagcagtcttgaggaagttcttgtgataagtcctgttactggtctatgtgcaggaatttcttgtggtaagtcttgttatgaggatgtatgcataagggcttctttttcatggcctcccctgactccattttgttagaatttgacataaatgactcccttttggtactggcaactttcacagcttcttttaagaaatgctgtatctcagtgctaacaatggtacagagagaaatattgtaaayggacacctctgaatttaaatgcagctcagaagagtcagactataaagaggcattttaggacta

SEQ ID NO: 458770 - DNA, 605 bp, Homo sapiens
gcttggctttagaaattcattgcagaagatggagaactttgatatagggccaggacaatgacattcagcacccagatcttaatttctgaattgattctccaactcagcccctgttctgtttgcagagatgacagaagagacatccaggagtagatttcaatgcacagcagcagctgagagaagccagctgtgaaaaagtgagtgatccccacacccatgcacatcatttattataaagacactgccatcatttttatcaygaaacttctactcagacaaaagatttaacatcaaagaagagcattggtgaggcttcaagttgctatgattattgagaaatcctatagtggcttgaatcgactctggcaaggtaaattcaccaagatcccagggatgcgtctcacatttgtcccacttgtcagaggaggtcaggcaggaaatgccaaacgagagaaattctcctaaatgaggtcaactggtacgctgattagtgtgtaggcaaacactgatgatgcagacaggaaagggggtgaggagaaaatgttacccttgactagaggggagaggaggccttccctcccaaccctattcagttgcagacttca

SEQ ID NO: 458771 - DNA, 438 bp, Homo sapiens
agacatcagccacccaagaactgttcccacaagatctgttcccatagacccagactatacttcccatgctggtatgcctgatgagtgcctgcatctttaaaaatcttcttaaagattattaaattcctcttcaaaagttacaaaagcaacatggttgytgacagtataggaatataaggaaaacttgaataatgtccccagccccatactgatcactcctgaccctgggagccacgtctttgttcacagcccgaggtgtttccttccgcacattcttgtgctcatgtgtcttttgttctttgatttatttgtttctacaaaatgtattccattcacctacaactcctcttgtccttcacctccattttctccttaacatttctttgtgaacatccctaaatcaacaggtaacagatagaggcagataaagcatggtct

SEQ ID NO: 458772 - DNA, 584 bp, Homo sapiens
atgaaaatgaaaacctgtatttaaaggtggtcttgactcagatttcctgctttgatttccttccatctaatgcatctgctgtctgctaaccaggaagctcccagagctaggcctcacgactgcccagcctccacacctgcacaatactctgctccgaagatgcccgtcagctattcataagtcggctgaattactgtattctcttttcacttcagctcatcagtgaaacagaatggagggactctatgggctgaactgtgttcccccaaattcatatgttgaagtcctaacccctagtccctcagagtgtggctgtagttgcagaaaggaccttgaaggaggtgataagggttaaatgaggtcattaggttaggccctattccaattatcactggtgttcttgtaagaagagcagattagaacagaaacatatacagagaaaagamcatgtgatgacatagggaagagacggtctctgcaagccaaggagcaaggcttcagaggcacctgccctggagataccttgatctcagctttcaagctccagaactacgaaaaattaaatctctattgtttaagccccc

SEQ ID NO: 458773 - DNA, 636 bp, Homo sapiens
taaccctggagatgaccccatgactctggctttagtgataaagggttgaactagatctctttcaatcaccttatggccctaatggccttcattcaagaagcgtataacctggtagaagacacaaggtgagtacaaaatcagttgtcagcatcttctccattgttttaattcctgtcctcacccacctcgatggccccaggaaacactgaactgaaaaagtagaaggtatggatggatggcttccacagaacttctctgttttggagaagcaagcacatttttttccccttttattatttattttattattatttattattttatttatttttgacacacaataattgcacatatttatgggatacagagtgatattttgaaatgtgcacacaacgtataatgttttaaggagtcaactacctctggcctctgtgaattcaggccatcaaagtcctggccagctctatgcccacacgccctggggcagccttttcccttgcagggctgaaagrattccctggtcctgaattggtcttgatggctccactagcaatggtttcccagacaggaaggcctctatgagccacgggcctgttctgaaagtcacatttctgtgacacccagacgttttcagta

SEQ ID NO: 458774 - DNA, 650 bp, Homo sapiens
cagtgtctggcacataaaatatggggaatacacattctctgatattactatttttcgtgaatgttgttgtttttgttgttataattcgtatgcccaattgattccagtgcataatctagagaatgagatccacttaaaccccccataagcatccatcctcagaacctcacctccctgggccaggcagcagaatgaatgtgccccttcccttgaaatcagagtctgctgtctccccaggaggtgcctgcgtggagctctgcctcttcagattaaatgctgctgttggcagtgaaacacacagatttatttagtcatcatatttgttgggttgctctactgaaaaatgatggctcctaattaacatatcaacacatgaatcatttctggagttctagctgcacaaactgcccagctgctggtcatttctcccagaaaacaatcaagggaaayataccaagctgtggttctccacctcgtcctctatcctcccccacccatgcccacgtctcccctgctgttcccatgagcatgacaggctccatgggacaggagaggtgccagctgagagcaggctgggggctgcagggaatgacttggtcttttcatgacaattgttctcaaccagattagaggactctaacggaggcagg

SEQ ID NO: 458775 - DNA, 618 bp, Homo sapiens
catcttcttttcccatcaacctatcagtccagtggctttttgggtccattgataatccctgcctgaatcaatgattacaattagagttacaaactggttattttttaattctatcacactatttgtgtatatttgcccacactcatctattaaaaaagctccccttttgttctcttcctcataccccttatatttaaaaatacatcagtatgggcttataaatatcagttttattcactactataaactgttaccatatttttccttatttttggtgctcaaatttgtcccccattgaccagtgggaagccctgaagtccagctcctattcacgttggacgtgccacattgggctttgagcacttttctacttcctgtcacatataaaagttctaagtatgcctcgtgcttttcctgccctgggcccagaatgcattccttcacagagtccaggtaacttatacggtaaatggctttaggaagcaagacctggcactgtgtgtgstcactacaactgggtgccattgcttctaggcccttccagttgtcaaagtgaagaattttttttgtcttttaggccacaaatgtataccgttatctccaatttcacttaaacac

SEQ ID NO: 458776 - DNA, 578 bp, Homo sapiens
acacagagcatacaatgatatatatgcgatatatagtatgcattagcatacaaactatacacagatacacataccacaagatttgcyttagcatataaaaagatagtatgttgaagactccaaggattttaggaattgcatgccagaaacctaaacaaaaaacaaatacatatttcacaatatcacagtaaattacttaggttcttggaacttcagttttgtcatacttaactagtgagcatgaagttttcctcatgaggttactatgcagatgcaatgaaataatgtatgttcagcccttagcacagtgcctggcacatagtaagtgttcaacaaatgtgcatgagagttcatattagcactaggtggtgaggcccatgtgttgtaaatatggtttgtgagatgatgttatgcttttcctttaaaggatggatttcctggctgaatctctggcttgtgcacttgtgcaacttctaaaaaccctccaccaggggcacttgcctgtgctctgtgaaagtggctttaactcattcatgcctgtatggcggtgcattctcccactgcaggctcaaggtggg

SEQ ID NO: 458777 - DNA, 557 bp, Homo sapiens
aaaataaaataaattgtgtatatattagtgtatctatggatgcatacacacatatatgcatgtataaacatgcaaacaaaacataaatgtgtgcatcaaactagtggctcagtgttgtagattttggctactattgcttcatttagagctgtgtgcacaattagacccagaaattctgcttctagttatttatcttaaggagatgctcacatatgtatgcaaagatgcatatttcacaatattcattrcaacgtggtctgtaatagccttctgaatgtccacagataggagacagggtaaataaattcaggtagaatgaggtgactgcatataaataaacaagcaccatgaatcaagataaatctacacttgccgatgtgggaagatcaccaagactcgttgctttgtgaaaaatgtaaggggctttgtattttgaaaaagatgctaggggtatgcgtatatgtatatgtgtaagtgcacgtccttttgttatttaaattctcactgtgtttcattttcatgataatgtaagaatgtccggtttcattcaataattt

SEQ ID NO: 458778 - DNA, 589 bp, Homo sapiens
cataacattgaatgtaaatgtattaaactctccaattaaaagacaaacattggctgaatggatgaaaaaacgagaccaaattatctgttgcctacaagaaacacacttcacctataaagacacacatagactgaaaataaagggatggaaaaaggtattctatgcaaatggaaattaaacaagagcaggagtagctatacttatatcagataaaatagtttctaagacaaaaactataaaaagatataaagaatatcattagataatgataaaggggtcaattcagcaagatgatataacaattgtaaatatatatgcacgcaacactagakcacccagatatataaagcaagtattagtgctaaagttaaagactccaatacaatgaaagctggagacttcaacaccccatattcaggattggacaggtcgtgccaacagaaagtcaagaaaggaacattgtacttaatctgcactatagattgaatgaatctaatcaatatttacagaacatttcaggtgacaactgcagaatacacattcttctcagcacatggatcattctcgaggataggctatatgttaggcc

SEQ ID NO: 458779 - DNA, 589 bp, Homo sapiens
cataacattgaatgtaaatgtattaaactctccaattaaaagacaaacattggctgaatggatgaaaaaacgagaccaaattatctgttgcctacaagaaacacacttcacctataaagacacacatagactgaaaataaagggatggaaaaaggtattctatgcaaatggaaattaaacaagagcaggagtagctatacttatatcagataaaatagtttctaagacaaaaactataaaaagatataaagaatatcattagataatgataaaggggtcaattcagcaagatgatataacaattgtaaatatatatgcacgcaacactagatcacccagatatataaagcaagtattagtgctaaagttaaagactccartacaatgaaagctggagacttcaacaccccatattcaggattggacaggtcgtgccaacagaaagtcaagaaaggaacattgtacttaatctgcactatagattgaatgaatctaatcaatatttacagaacatttcaggtgacaactgcagaatacacattcttctcagcacatggatcattctcgaggataggctatatgttaggcc

SEQ ID NO: 458780 - DNA, 603 bp, Homo sapiens
acaactgcagaatacacattcttctcagcacatggatcattctcgaggataggctatatgttaggccacaaaacatgtcctaagaaattcaaagaaaataaaattgtatcaagtatctcatctggccacaaaggaataaaactagaaatcaataacaagaggaattttggaaactatacaaacacaaggaaattaaacaatatactgctgattaatgatcagtggtgtcaatgaagaagttttaaaaaaattaaagtttctggaaacaaatgataatggaaacgcaacataccaaaacctatcagatacagtgaaaggaatactaagarcatttatagctataaaagcctacatcacaaaagtagaaaaatttcaaataaacaacctaacaatgcatctgaaagaactagaaaagagcaagccaaacacaaaattagtagaagaaatagtaaagatcagagcagaattaaataaaattgaaacaaagaaaactatacaaaagatcaacaaaataaaaagttggtttcttggaaagataaacaaacctgacaaaactttagccagagtaaccaagcaaaaaagagagaagactcaagtgagtaa

SEQ ID NO: 458781 - DNA, 641 bp, Homo sapiens
cgttgctttgtgaaaaatgtaaggggctttgtattttgaaaaagatgctaggggtatgcgtatatgtatatgtgtaagtgcacgtccttttgttatttaaattctcactgtgtttcattttcatgataatgtaagaatgtccggtttcattcaataatttaaaattgcttctttaatggcaaagatagtggagatggctgtgtctaaggctcagactctcaggggtttaaactgacgcatctgatgttggtatgttttgcaagcaggaggtgcacaggctttggaagtgaagtgaaatgaactctttcctgtctggggcagcggatctcctttgagaccccttcatgacgcatcccagcctttgagtctgacagtcatttggcaccyccatgcaagtgattctttcagaccaggtgacaacatgccccattgtctcccaatgcttctatctgctgggtatttagtcaatatgtgtttttcagcacttaccagtaacgaagcactgggctaggaatatcaggtgagcaaaattagatgtggctctgccctcctggagaccacagtccagagggaaagacggaatttcatcaaaggacctcgcaaatcaaatgtcaattgacaagtgtgggaattgctgcaaa

SEQ ID NO: 458782 - DNA, 497 bp, Homo sapiens
gtacgtagtgaagtggctctatgccttgggaagtgtatgctgatgtatttactatgaaatgtgaagcccctattctatagtctgctgcaaagcactccagttcttctgaatgttctgtacrgtacataatttgaactgtaataagacaattatttgtatgggatttgcaaatattttcatttatagttgtctttgtgacattctaacatcaccacatgtgaaggtcactaaaacaatgtacctaaaaatgcgtattaatattaataaagattcctaagtaatatatcatataccatgttcacctctgggctcatagaacatttggtctttgttttatttagttttagatttcaatgactctgacatgactggacgtaaaccatacataatagtaaaattctattctggagcctaggatttgcagcctaaggcattctgaccgggagtctgcccccatcttctttgtctgctccaccctttcctccactgcagacaag

SEQ ID NO: 458783 - DNA, 566 bp, Homo sapiens
cctgttcctttacactgaatgatgagttggacatgcccatggtaagtctctgagctcrtaaggccttaatgaaaggttgcacatgggcactgaagacctttgaggtaatgaaggtgaggaagagtactccagatggagggaacaggcatgctggagctcagaccccagagacgcattagaaatgctggaagccccatggaagggcagtgtctgcatgctattgacgtgagctgaggagtccaaggggttcttgtaaaatacactgccccgtatctggatctgaccatctgacttcgagtcccctgtcctttcaatgtctccacccggcccgcctcagacctcccacctacttccactcctggagggacaggctctccaccctatgttgtgtcctgtctgtgactgagccctaagtctcaggccacacctttgttctcgtcttcatttcctgatcctgtccttgcccacgtcctgcacccagatcagaccccaaacctcctctggtatttttgtcttcaccaatgtcctggtgtgggacagctggtctacctggtaacagcaaagcc

SEQ ID NO: 458784 - DNA, 566 bp, Homo sapiens
cctgttcctttacactgaatgatgagttggacatgcccatggtaagtctctgagctcgtaaggccttaatgaaaggttgcacatgggcactgaagacctttgaggtaatgaaggtgaggaagagtactccagatggagggaacaggcatgctggagctcagaccccagagacgcattagaaatgctggaagccccatggaagggcagtgtctgcatgctattgacgtgagctgaggagtccaaggggttcttgtaaaatacactgccccgtatctggatctgaccatctgacttcgagtcccctgtcctttcaatgtctccacccggcccgcctcagacctcccacctacttccactcctggagggacaggctctccaccctatgttgtgtcctgtctgtgactgagccctaagtctcaggccacacctttgttctcgtcttcatttcctgatcctgtccttgcccacgtcctgcacccagatcagaccccaaacctcctctggtatttttgtcttcaccaatgtcctggtgygggacagctggtctacctggtaacagcaaagcc

SEQ ID NO: 458785 - DNA, 558 bp, Homo sapiens
gtaaaatagtgcccaaacatcaaaattctatcctgaatggttttgttttcctgaaaaatagatatggaagaccacaaaataggttgcattgaatctgttgatgacagttccatcatacaaaatagataatgcctcagagagaagcaaataagtagcagagcccatggcaatgaatgcctcctgtattgaagcagtactttgccttacccacagttcacagaatgagaacatcccatcacttggtcacactgtgctgagcttccctttgtgtttccagaggcgtatgagccaggcatgagaagcagttctttactttttcattttcattgacagtcagaatcagagaaatcaggatattatycaacaatgtctttagatccaggtgactcatatcagggtgaaagtaaatatgttcattccttgaggtatataagaaacacaacacatattttggatgccttgaagatcagtgaagctgatatgtatgtttcctaagacgtttctcatgataggtaagtttttctagctaaagccattagaccttacttgtcaccaggt

SEQ ID NO: 458786 - DNA, 553 bp, Homo sapiens
gcaattggccatggggaaaaataaaagacccactgatgggacgaagcttcccaaggggtaggacttacaagcaagtcatggtgctcaaggtttgtagggaggtttgtgacctagaatctcagtgatcctggcttcagccttctactcttttgataatttctgtatggtttggctgcgtccccacccaaatctcatcctgaattttagctctcataattcccatgtatcgtgggaggtaactgaatcacggggkcgggtttttcccatgctgttctcatgatagtgaataagtctcacaagatctgatggttctaaagagcagttcccccgcacgtgctctcttgtctgccgccatgtaacacgtgactttactcctccttcagcttctgccatgattgtgaggcctccccagccatgtggaattgagtccattaagcctctttcctttataaattacctagtctcaggtatttcttcatagcagtatgaaaatgaactaatacaatttccttgatgaaagaggatttctcctttgctagcaaagggaacacag

SEQ ID NO: 458787 - DNA, 523 bp, Homo sapiens
gccaaggaacaccacacctacttacagctctgtggtcatcacagagaaagttagtgggaaaagggcctggagctggctgaaggtgcatgctggcttgaggctggcacctctacccttgggatgttggcatctgaccttgtacttgggaacctcrccacagagaagcagatggacctggggctgaagcagccaagagactctgcttctgcatccagagtgtttgtggccaagtgagtctctaattcacaatgtcaaatgagcttgccttccacagcctcacctcccttggtgaaggacaggggctctgcgccagatatacttcagaatgtacaaagtggagcctctgtctgagccccttcctgagagctgagtggatgctctacaaggtgtgtcaatagctggctgcacaggtgacctctgctgggaccctggagaagtccctttggctgacgtggcaggaggtggctctgggacacagtgacatgtcccctgacaggcctaagtgacagagggttgctcgttg

SEQ ID NO: 458788 - DNA, 526 bp, Homo sapiens
aatttgaggttttttggtcatatgattgtcttttctgtaaaaatgggagttgtcagaataaacagagaggcagactgattttcccagggggagtaggaactcctgccggtcatgggagatccagcagaggcagctgggggtggggctgtggctgagagtccagaggaggcagtggggcccatctcgtgccaggtctctcaccttccaggtgaaagtcaatcatggctggaagcttgcccagtgccctttgtgtctagtttttctccataagttactggggtacaggtggcgtttggttacatgagtcagttctttagyggtgatttgtgagatgttggtgcacccatcacccgagcaaacattgcaccatatttaagcctcctggccttggtgtctatttttattgaaacggttggactcccgcttttggctcctggatgcactggttaccataagaagctctctcccggacgtgcctctgacttgttaaatcagtggactgccggatgtagcgggagctctttca

SEQ ID NO: 458789 - DNA, 469 bp, Homo sapiens
ctggccttggtgtctatttttattgaaacggttggactcccgcttttggctcytggatgcactggttaccataagaagctctctcccggacgtgcctctgacttgttaaatcagtggactgccggatgtagcgggagctctttcaagctatctgcatgtgagggctggcttgggttgagataatgaccactcataatgaccccagtctgggccgattacggattcgatcttccccttgataagcagggttgtcagtgcgtcactgaggccagcacatgctcatcagggaagcctggccttggctgagaactagtgctggggaagggaagtgtttagggcttatggcttgaaaggagagacagctaatatgtcagtacagggcctgttgtctgtcactgtggctccataggccggggaacctgcagaggaggccgggtctctcccacctcctcccatcactctcactcac

SEQ ID NO: 458790 - DNA, 587 bp, Homo sapiens
ttatgcagtgtagttaaaatgcactttttattgtaatgaatattagttattgaacaaattactatgtattaaacagcttgctatatgttttatatggtttgcttcccttaataggtgtcttaataatacatttgcaaagaatgcataatttatttaagaaaggaatttgcagcttctaggggtagcttatacgatacaggaagacatgaagcagattttggtttcaaagtggtttgcactttcattacagtgtagaggacttgtttagtttttgaatgtgcatgggaacttcacaatttttaagaatttaaaatgatgcaatataagcagtttggttttatttatttaaaaattattttaaaaacacgtatttttgtgttttatatagctttttctatttyttcttttcctgtatcctccctcttaaagtcttattgaataacttgccattactcttctttctctcttttgaagcaatctatttcatttttcttctagccttacaatttctatttctttacagatccaggtttactattcaataaacttgtgaaaatcttcatgagcaatgatgaagcaaagcattt

SEQ ID NO: 458791 - DNA, 545 bp, Homo sapiens
  misc_feature (1)...(545): n = A,T,C or G
ctcgggtcactgcaacctccacctcccaggttcaagtgattctcctgccttagcctcccgagtagccgggactacaggcccrtgccaccatgcctggctcatttttgtatactaatttttagctagatgagggttcaccatgttggccaggctggtcttgaactcctgccctcaggtaatgcgccggcctcggcctcccgaagtgctgggattacaggcgtgagccaccacacctggcctgttttcatttttgagacaaggtctctgttacgcaggctggaatacagtggcacaatcatagcttactgcagccttgacctcctgggcccaaccgatcctctcgcctcagtctcccaagtcctggctgatttttattttttgtagcgatgaggtctccctatgttgctcaggctggnctcaaactcctgggctcaagcaggcttctggccttggcctcccaaagtgctgggattacaggtatgagccactgtgcctgacctggtccctcttcttttaaagcttggggtttagtaaatgcattatca

SEQ ID NO: 458792 - DNA, 545 bp, Homo sapiens
  misc_feature (1)...(545): n = A,T,C or G
ctcgggtcactgcaacctccacctcccaggttcaagtgattctcctgccttagcctcccgagtagccgggactacaggcccgtgccaccatgcctggctcatttttgtatactaatttttagctagatgagggttcaccatgttggccaggctggtcttgaactcctgccctcaggtaatgcgccggcctcggcctcccgaagtgctgggattacaggcgtgagccaccacacctggcctgttttcatttttgagacaaggtctctgttacgcaggctggaatacagtggcacaatcayagcttactgcagccttgacctcctgggcccaaccgatcctctcgcctcagtctcccaagtcctggctgatttttattttttgtagcgatgaggtctccctatgttgctcaggctggnctcaaactcctgggctcaagcaggcttctggccttggcctcccaaagtgctgggattacaggtatgagccactgtgcctgacctggtccctcttcttttaaagcttggggtttagtaaatgcattatca

SEQ ID NO: 458793 - DNA, 625 bp, Homo sapiens
aaagccacagattaatgatgctgagcattttatcctatatctgttggccatttgtatatcttcttttgagaaatgtctattcagaacttttgcccatcttttaaattgaattatttggttttttttttttttgctattgagttgttagagatccttagatattttgtttattaaccccttgctagataggtagtttgcaaatattttcctgttatgtacgtgggytcttaactttgttgactttttcctttgctctgcagaagttttttagcttgatgttacccttttgtcaatttttgctgtgattatctgtgctttcgaggtcttattcaagaaatctttgcccagcccaatgtcctggagtgtttcctcaacgtttttttccagtagtttcatattttcaggtcttccattgaagtgtttaagccattttgttttgatttttgtataaggtaagaggtagggacttactttcattcttctgcatatgaatatccagtttcctagcaacatttattgaagagattttcctttctctaatgtatgttcttggttactttgttaaaaatgagttgactggaaattcattgatttatttctggattcttgaatctttttcattggt

SEQ ID NO: 458794 - DNA, 509 bp, Homo sapiens
attgtaatcctgaatcaatgactcctgtatgtatttgtacccctcttaaatttaaactagaacttcctagaagtgatcatatcataccctctgcaagggtccacagactcctgttgggaccttttgtgggggttccccaggcagaaggctcacagattttgtgcagcataaatctactgtggcactactggctgtggtgggggacagacattgtatgggggtgagagaatggcctgcactggaaatgccccagtttagaatggggcctgggatgggcccctcatggttttttccgaaatcaggttcccttctttatcaaacttagagtgacactgattagcccaatgttttccttttttatattttggacatatttcagactcagcagttttcttttttcccctrtctggcagcctgactcgctgattatttctacattcttttttagtatgaatagcttgtttaaattctttgagtaatttaaaaggaaaaggctcaaatgtagctat

SEQ ID NO: 458795 - DNA, 617 bp, Homo sapiens
gagtctggtttagacacatacaaaatagagagcaccatttgtctcccaggaagagcaatgggaaagtaaacagtttattagaatctttgacataatccctaaagcacttacatacctaataataataatatatatatatattatgaatagaaaacctaactggaagaatattcaccaaattgttaactgtgactttcacgggcagattacagaggactttcacattctatgttacatacatctagattgttcacaggagcacatattccaattataaccagaaaaaaaatgtaggtttcaatatctccatggtgtgagtataagcctactctttattaatgaaagagcccataaccatgaaagtagcaaccaatgcagtttcagttcttaaattttataagatgcttcactggggtaggaagacatagggggatccaatggaaatattagtaaatttattttaaaaagatgtactttcaatgctcaggaatttatgaaagagaayactacagaaataaattcaaaaaaaaatttacctatgcagaaatgtcttccacaactacctaggtaactaagaaactttgggaaaaaagtcatcaatggaggaaaaggcaagc

SEQ ID NO: 458796 - DNA, 480 bp, Homo sapiens
tcaggcatccaaacactatcattaatataaacctcaactgggggttccaactatgtgataggcctaattaaaggcrgaaatgggacatatgcctaataggtataattttggtctgctgtagccacagggagacttaccgccatagtaattactgcaattatagccaccatcaggtgacttgcggttagtggtttttgttgtgcttttcgttttttttctgcaagctgggtcagcctcttgatctgtcctcaagtcggtgggcttgcttgatgggttttgttggtcttcatctggtcggctgaaacattcattcgagccatcaggcatgctgggaggtggagatcttggttccaaaatccttttctcttctttggaattttgctcatggtagagtttaagacgtcttgtaggtacctaaactggaagctggttttctcctggggaaatacaagcaaaccctcttccccaagttataactct

SEQ ID NO: 458797 - DNA, 586 bp, Homo sapiens
aatccctgcaacctgtgaaggtaaccttctgtgrcagaaggactttgcagatatgatcaaatcaaggaatttgggatagggagattatcctggattatccaggtaggccctaaatgtaatcacaaactccagagggagtgcggccctgcctataccttgatccgcacacagcaaaactgatttttggatttctgacctccagagctgtaagataataaatgtgtgttattttaaaccaccgagtttgtgggagtttgttttacaggcctgggcaactaagagatagacacacaaattggattaaggagatcctggaagactgggaaggaggtgggagatgtctgccggcacaagggcaggccttgggcagggagaagctgaaggaagtggaagccaggcctcctggtggatgggtagggattgcgggacaggccagggaagcaagctgagagcctgcaggaccaggaatgtccctgccccatgctcaaatccttgagaggtccaaggtccacaagaacctcagtgctgtgggagttgatttgagtggaaaaagagaaaatcaaggtaatcaagaatcagatccagg

SEQ ID NO: 458798 - DNA, 559 bp, Homo sapiens
atcctgataatactgccaccaaaccaaagctgaaaattaatcccacattctatttccaatttctaattcagccagtttcatttcagcctcattgtctggtacagcctatcagaggttctgtgatgagttcaaatgaatcagaaggatgctccaaaaaccagtttcaacaatgtgccctgcatttgaatataaactttctcccattaccaaattctcaggaagtaaagtctgagaattgctctaatcatttattctaaaatgcatatcttttcctcattttaacrtctctgcaatctggatgcatcttaaaatcgatgtcatcttacaattgtctgacaggtagcatttgtgacctagttttgtgaaaaaccttccattgatccttcagataagattttttaaaaaccaacatgaaagcatatgagattaaagaaaacaggggtatattaccttgcaaactgaaatccaaggggattatgacccaaaatttattctccccaatttcaattctagctagaggattatagatgcctggtcatcaagatctcattttccattt

SEQ ID NO: 458799 - DNA, 581 bp, Homo sapiens
aggttcttctgaatttttctctgagagtagtttcagctccacagttttattaaattggtttggatttggtttttctcctcaacctcaaaacagtgagcctttctcctcaacccacttccaattgtaataggcatttctgaatttactataaatagttctagaaatgcccttgtttctggaaacacagtagtgagagggacacactctgattgtttcagcagcatccctttgcctcttaacaccttccttccagaacccatatttctatttggggagccgctccttccatattgcacagcaattgtgcrgttgggtgaactatttccccgccctcagatccaagggtgggtcccaaaggataagtcccaatcagcttccatcttatctcctttgcaacaaagattgagctaggtttaatcagaacaaagctaaagacttttattcagtgactgtgggaagttgtgcttcctctgttctctccatgaggaaataggaggtcagtcacggtggcacatgcagtcatcttccaaccatgacagaaccaacttaagaacaaagatgacactaggacagagcagggt

SEQ ID NO: 458800 - DNA, 584 bp, Homo sapiens
acactataatttataccatttgttcctacagctttctctctcaggtcacattaactgatattcataataatgaccatcaaccttcaaaacaaggttcatttttactcagtacatccagtttaasaacacagtggggctgggcatgcgggatcatgtctgtaataacagtacttcaggaggcgtaagcaggaggatcgcttgaagccagaagcttcaaggctgcagtgagctatgagtgtgtaactgccctccagcctgagcaacgaaacaagatcctgtctctaaaaaaacttttttagttaaaaaaaaaaaaaaaagaacacagcaggacctctcccccaacttatttttcctttaacaaatacaggggaaaatacgtaactatgtcaagaggcaaaaagaaaaaaagtttacacatttttaataaaacaaaataggctattatccagaatttcctttcctctagtgtttcaaagagctgtaattttcctgaactgttatttaactcttgtcagcaatttttcaggtatgttcaaacctagactcctcaagtactttaagtctcttaaagcaaatgttggcgg

SEQ ID NO: 458801 - DNA, 584 bp, Homo sapiens
acactataatttataccatttgttcctacagctttctctctcaggtcacattaactgatattcataataatgaccatcaaccttcaaaacaaggttcatttttactcagtacatccagtttaagaacacagtggggctgggcatgcgggatcatgtctgtaataacagtacttcaggaggcgtaagcaggaggatcgcttgaagccagaagcttcaaggctgcagtgagctatgagtgtgtaactgccctccagcctgagcaacgaaacaagatcctgtctctaaaaaaacttttttagttaaaaaaaaaaaaaaaagaacacagcaggacctctcccccaacttatttttcctttaacaaatacaggggaaaataygtaactatgtcaagaggcaaaaagaaaaaaagtttacacatttttaataaaacaaaataggctattatccagaatttcctttcctctagtgtttcaaagagctgtaattttcctgaactgttatttaactcttgtcagcaatttttcaggtatgttcaaacctagactcctcaagtactttaagtctcttaaagcaaatgttggcgg

SEQ ID NO: 458802 - DNA, 584 bp, Homo sapiens
acactataatttataccatttgttcctacagctttctctctcaggtcacattaactgatattcataataatgaccatcaaccttcaaaacaaggttcatttttactcagtacatccagtttaagaacacagtggggctgggcatgcgggatcatgtctgtaataacagtacttcaggaggcgtaagcaggaggatcgcttgaagccagaagcttcaaggctgcagtgagctatgagtgtgtaactgccctccagcctgagcaacgaaacaagatcctgtctctaaaaaaacttttttagttaaaaaaaaaaaaaaaagaacacagcaggacctctcccccaacttatttttcctttaacaaatacaggggaaaatacgtaactatgtcaagaggcaaaaagaaaaaaagkttacacatttttaataaaacaaaataggctattatccagaatttcctttcctctagtgtttcaaagagctgtaattttcctgaactgttatttaactcttgtcagcaatttttcaggtatgttcaaacctagactcctcaagtactttaagtctcttaaagcaaatgttggcgg

SEQ ID NO: 458803 - DNA, 496 bp, Homo sapiens
ttatgctttctataatcctacaaattcatctaatattagtctaagttaaagtggtagttgggggagactttactatgacttgggtttgagccgccacaaatttttctgtttggagaatagcatgctttcattcatggcccatttgttcactttgagatagaatggaagcctctttgtatgtcatttccagaaaatattgacattggccaccaagcgtctatgttaagcatggtgyttatgtgatcattttaaactctttgatattctacctgttgagaggttggatctatgtccctttacttgaatctgggcaagtatagacaatagagtttggtgaaaattcttttgcaagattaggaatagggtgaatcaggggaggtgcctagggtgcaaaattgataggcactcactattagggccatgaaagtgcaggtattaatgtgtgatacaaaaatccttatgcatgtgcccatgtctacatccagccacatgccct

SEQ ID NO: 458804 - DNA, 496 bp, Homo sapiens
ttatgctttctataatcctacaaattcatctaatattagtctaagttaaagtggtagttgggggagactttactatgacttgggtttgagccgccacaaatttttctgtttggagaatagcatgctttcattcatggcccatttgttcactttgagatagaatggaagcctctttgtatgtcatttccagaaaatattgacattggccaccaagcgtctatgttaagcatggtgcttatgtgatcattttaaactctttgatattctacctgttgagaggttggatctatgtccctttacttgaatctgggcawgtatagacaatagagtttggtgaaaattcttttgcaagattaggaatagggtgaatcaggggaggtgcctagggtgcaaaattgataggcactcactattagggccatgaaagtgcaggtattaatgtgtgatacaaaaatccttatgcatgtgcccatgtctacatccagccacatgccct

SEQ ID NO: 458805 - DNA, 569 bp, Homo sapiens
atttgtgctctagcctgccttaacacataatgaccaagtgagaaaatgtatacaaaagcactttgtaaatgacaggtttttctacaacacaaaggaatcatagaggtggctatttgggggaaaatgaggtatgtgcaaagcttccttttaaaaggtgacttttatgtctagcatttttgtgtgatttaagttcagcaattagaggatcattatttaataccctaagaaaatactgttatattgtgtcttccaaatgaactatttctgtttttactgtcacttggaatgttctccatgaaagaaaagtatttaaaggaaaaattacctggaagataatgggtgagatttttataagtgccttctgtatggggacaaagggctttttctgctacacctcctgaacagtttgatttatttgacaatataatacattttttcaaataagatgaggaaataggtgttccagcaagtgatatgggggtggcagagyggggaggtgttaaggggagggtgtcagggagggaggagaaaagaatattgggaagagctgaccaggagaagtctcaggc

SEQ ID NO: 458806 - DNA, 418 bp, Homo sapiens
cacaggaacatggatgaatcttgtaatatgctgaatgaataacctatatacaagagagtatgtttgtcatgatttcatttaaatgaagtttttgaatcaacaaaaccaatttatggagacagaaagaacaatggttgcctcagtggggtactattagtttgttaagggatatgarggaactttctgggattatggaaattatgtcttggttggtattgccattacatggttttaaaaacaatttgtcaaagcttattaaactttacacttaaaaccatgcgttttattatatgtaaattatgtctcattgaagttgaactcatcgacgaaagctactgggcctagagttctgtttatgcaaaggcttttaatttctgaagcaatttaatcatagttacagtataacttggttgtccta

SEQ ID NO: 458807 - DNA, 418 bp, Homo sapiens
cacaggaacatggatgaatcttgtaatatgctgaatgaataacctatatacaagagagtatgtttgtcatgatttcatttaaatgaagtttttgaatcaacaaaaccaatttatggagacagaaagaacaatggttgcctcagtggggtactattagtttgttaagggatatgagggaactttctgggattatggaaattatgtcttggttggtattgccattacatggttttaaaaacaatttgtcaaagcttattaaactttacacttaaaaccatgcrttttattatatgtaaattatgtctcattgaagttgaactcatcgacgaaagctactgggcctagagttctgtttatgcaaaggcttttaatttctgaagcaatttaatcatagttacagtataacttggttgtccta

SEQ ID NO: 458808 - DNA, 559 bp, Homo sapiens
aaggccatattattgggtgtacattattttgaatatgtgcaactttttattacatacgatagaactttatgtgtatagttgttcccttggtttatacatgggggattggttccagaaccccccaggaataccaaaatctgcgcatactcatatcccctagtcagccctgtggaacccatgcaaactagaagttggccctccatatatgtgagtttcatatcctgtggatactgtattgtccatttaaatttggttgaaaaaaaatccayatataaatggatgcagttcaaacccatgttgttcaaagttcaactgtatacttaatatgtattttacatgtttatatataatggaaattgttgttaaaacaagatacctcctttatctctagtagagataaacttgccttagagcaagtttttatgttattattataactataccattttttattctgtttcatgtttgcttgttatatcttttaaatctgtttactcttatcctctatctttatgttttaaatgactcttataaatagcatgtagccagagtttataat

SEQ ID NO: 458809 - DNA, 603 bp, Homo sapiens
ttcaagattaagagatcctattgccttcaaatataaactgcattctccagtatttaaaatattgatactttttaataaagtcttcaataataaaaatattatttttattctcccttgtctttctcaattggttcagaatataagtgaggaaaacaggatgtcatttattaagccccctcaaaacccaaaattagacataatctaaataaactttagaattgtttatgaaaatattttgcctctaacattaaaaaattcttaagagagaaacacagaggtacctaattaaattaaaactataataagaattgtagagaaagactgaaaccttctttttttcttcttttttgtttctgcattagactgaaaccttctccaaatctccaaatgacaaaattttgaaatttttagctaaaatgcttytgaattaataaatagcaagaaacaatttagaaaatgaaattgtatgatatatgtaaaatgttattttcctacttataaacaaaaaatcatttctaagtagaagttagaaaatgaattggtattttaaaactatgagaattatatgctcttaccttgtcttttttttctttaagagtagct

SEQ ID NO: 458810 - DNA, 579 bp, Homo sapiens
ggtggctgaactttcagtgcgtttaaattagagtataggataaagaggcaactacatgtactataaaaaaatcattgaactaggagccaggtacatcatatggtcttttctcctagatctttcctatctttccggattatttaagtaaatcttcaagtatctccaagcttaaatttattcatctataaatcaagaggctaaatgagatggcttatatctttcctgcgyaattctagtgatctgtcatttcataatcctttttctagcaagtatgaattttttcagaattgcatttctgtatccttttccctacatatttatacatcatagttgatgacaaaattttgatgagagcaatttttttactgctctctggattcatcaggggtaaactttggaaccgccaaaatgtaactgctttaatggacaaattgttcctccctacaggtaggagaatgacaatttaaggtcactgcaccaccttgtggccatatctggaatttgacatttcgctggtagcctaaagaaaattctcatgtgacaatactgaactatccctttccagaaaattcacaattt

SEQ ID NO: 458811 - DNA, 506 bp, Homo sapiens
ttttcctcgtctggagatcttggtaaagtctcttctaatataatatatgtttccaaggtatgaaacagctcatacaagaatgcgtatctttagtggtagctaaataatcatcagttcccttaaaccaaagagatggccagaccactaaggttcctatttaatctgaataagtaagatattcctataatacggcctggcaaacagagagttgacttgatcaccagagtagagaatgacaaccttgtaaccaaattttggatctaaataaacgtatcagcctatagccttttgaataaaaaggaagcctggtactctagtggaaaagttctgaaataatatcacaaatacatactgcatccttcctactatcttgtgcaccaaggattaaaatattaagacmtgggtaattgcacatcaactaacattaattattgggaatctataatgccactattttttcactggtcagagtgcaagcatatcagcatcaagcaataattagaatt

SEQ ID NO: 458812 - DNA, 569 bp, Homo sapiens
cttggctgtttcagtaagtcataaggagctgtcagagcaggggttccaattactgtatgtcccagcaatgttgctagcagacaggggaaggtttggaggtcatgcaagctagtagtgtaaaaacaagtataaatctcaggggatatctgtaagggagcctgtgtctttgctgccacataaacacagtaagagctgcggaacacaaataacagggagtgtgtgtttaagaagccatgtggcatgcaaagtgaaagcaaaagaggcaaacttgcccctgtggtggatggtctggtgggtgtgtaaggtcatttctgaaaacacacagagaaaataggagaataggcagtatgggttcttggaaagagctgattttagttgaaaaggcagaagaaaccccagacattgccyggttttaggctttagccctctcactcttgagagtttcctgtccagaagggccattagtgcctcagttctactcggtgtggaccccaagttccttcccacccctatgagccagggtgaactgagagatcagcacggggagcagaccactgtggctgagaggt

SEQ ID NO: 458813 - DNA, 440 bp, Homo sapiens
cagtgaagccatcaggtcctgggtttttctttgctggaagactttttattatagctttgatcttatyacttgtttttcgtctgttcaggttttagatttcttcatggttcaattttggagggttgtatgtgtctaggtatttatccatttgttctaggttttccaatttattgatgtgtagttgcttagagtagcctctaatgatcctttgaatttctgtgatattggttataatgtctcccttttcatctcctttttaaaatttattttggtcttctctctttttttcttagttcgtcttcctaaagttttgtcaattttatcttttcaaaaaaccaactttttgttttgttgatgttttgtattgttttctttaatttcatttatttctgctctgatctttattattctcttctactaatttgggtttggtttgctct

SEQ ID NO: 458814 - DNA, 440 bp, Homo sapiens
cagtgaagccatcaggtcctgggtttttctttgctggaagactttttattatagctttgatcttattacttgtttttcgtctgttcaggttttagatttcttcrtggttcaattttggagggttgtatgtgtctaggtatttatccatttgttctaggttttccaatttattgatgtgtagttgcttagagtagcctctaatgatcctttgaatttctgtgatattggttataatgtctcccttttcatctcctttttaaaatttattttggtcttctctctttttttcttagttcgtcttcctaaagttttgtcaattttatcttttcaaaaaaccaactttttgttttgttgatgttttgtattgttttctttaatttcatttatttctgctctgatctttattattctcttctactaatttgggtttggtttgctct

SEQ ID NO: 458815 - DNA, 440 bp, Homo sapiens
cagtgaagccatcaggtcctgggtttttctttgctggaagactttttattatagctttgatcttattacttgtttttcgtctgttcaggttttagatttcttcatggttcaattttggagggttgtatgtgtctaggtatttatccatttgttctaggttttccaatttattgatgtgtagttgcttagagtagcctctaatgatcctttgaatttctgtgatattggttataatgtctcccttttcatctcctttttaaaatttattttggtcttctctctttttttcttagttygtcttcctaaagttttgtcaattttatcttttcaaaaaaccaactttttgttttgttgatgttttgtattgttttctttaatttcatttatttctgctctgatctttattattctcttctactaatttgggtttggtttgctct

SEQ ID NO: 458816 - DNA, 447 bp, Homo sapiens
gattgagttgtaagcttgtcattccactatatctgttcttttactgcaagaaagaacaccctcttcataagtcatcacagaggtctttggttctcacacttagccttaaactgctaacggtcctcagtcttctttattcttttgaagggcatcagtacaacctagcatcaataccactatgctgtttttgtggacattgctttcccacgtgttttcaaatgcctgaatgrgcacatcagccacagcattctcctccatgggaacgttttctcaggctactaccagggaaatccttagcaatggaggcattaccttgtgccaggtactatctgtcccaccaatgaaccaagatggtgtcttcttttttgctgggtggtgagtgaccaagttcagcatcatcatcttactgcatgtcttatcagacagaccactcttgggtccagtacc

SEQ ID NO: 458817 - DNA, 447 bp, Homo sapiens
gattgagttgtaagcttgtcattccactatatctgttcttttactgcaagaaagaacaccctcttcataagtcatcacagaggtctttggttctcacacttagccttaaactgctaacggtcctcagtcttctttattcttttgaagggcatcagtacaacctagcatcaataccactatgctgtttttgtggacattgctttcccacgtgttttcaaatgcctgaatggrcacatcagccacagcattctcctccatgggaacgttttctcaggctactaccagggaaatccttagcaatggaggcattaccttgtgccaggtactatctgtcccaccaatgaaccaagatggtgtcttcttttttgctgggtggtgagtgaccaagttcagcatcatcatcttactgcatgtcttatcagacagaccactcttgggtccagtacc

SEQ ID NO: 458818 - DNA, 542 bp, Homo sapiens
aatagctcaaaataaaattacatatgtctgtgtgtgtgggtgtatatatatatgtatgtgtgtgtatatatatatatgtgtgtgtgtgtgtgtgtgtgtgtgtgtgtgtgtgtgtrtatatatatatatatatatatatatatattttttttttttttttttttgagacggagttcccaggctggagtgcaatggcacgatctcagctcactgcaacctccccctcccgggttcaagctattctcctgcctcagcctcccaagtagctgggattacaggcatgcaccaccatgcctggctaattttgtatttttagtagagatggggtttctccatgttggtcaggctggtctcgtactcctgacctcagatgatctgcccacctcagcctcccaaagtgctgggattacaggcgtgagccattgggccaggccatgtctataattttgtaacaaattgctaattaacaattttattgaagagggtgtcttaaaagtcatagacacagaaataattatcagtgaaaacactgtataataata

SEQ ID NO: 458819 - DNA, 626 bp, Homo sapiens
tgtgcagagagtcaggaaaatttcaggtaggcaattgttaagcttatgtgggaamaataattttttattaacagcaaaaattttcttaatttttgtctatttgtgaactgcttgctttcacattcagtaatcagccagtaactccttcattttggtatgctctgttttcagatgtgttgaaagccttagtttttctttttcattgtaatttcaaaatatttgttcaactctctcagcaaaacaattcttcctttactaccccttggggagactggaccaaactgtcactagttctttctttgaaatgtcaattttgctgtttgaatagttaagccatcatggaggaggtcagaaaaagaaaagcatccactaactttattcttttgtcattctcttctgcccctctttctgctcccgcttatggtgtagtttctatgtctgggtgcatctgtgtggctgggaattggctagactttagaactgttgactgtccctgcctggtgccctggtgtcacctgtatcatctttgcccctggccacggaagatggagcgcctctgtttctcccagtacttccagttctttatgagcttaccttctccactcgttccagttaaaagtcagtct

SEQ ID NO: 458820 - DNA, 609 bp, Homo sapiens
actgcctaaatccaatatgaaaccacaggtgaacacaatcaattcatggttccaggcacacaaacacaagtaaaactcttcatggaatctgaaaactcattccttaagagtacttgcccccacagagaggaatgggcttgaactctcttacgaaaaatcacacaaaacaagaacaataaaatacattatagttcaatctgtactctttttaatgtaaataaatgctcaacatttaattaatttttaaaaatgatatacaagacatcagggaatgttaccttgattaaatggaaaaaatagtygacagaaacagagcaacagataacccagatttgggaattagcaggaagaagtttaaaaggactataataagtatattaaataattatgaagtaaagcaatgaaacaaaagaaataaattaggagaagagatggtgaaatacagaatagaaaacaaactacataaatgaaataaaaaatctaaaaagtaaaaatacaacatataaaatgtaaaatgtattcaaaattagaaacttaaagcagtctaaaacattcttcccctcctgtcctttgtgaacattttgagcacagtttggacacagcagaaag

SEQ ID NO: 458821 - DNA, 609 bp, Homo sapiens
actgcctaaatccaatatgaaaccacaggtgaacacaatcaattcatggttccaggcacacaaacacaagtaaaactcttcatggaatctgaaaactcattccttaagagtacttgcccccacagagaggaatgggcttgaactctcttacgaaaaatcacacaaaacaagaacaataaaatacattatagttcaatctgtactctttttaatgtaaataaatgctcaacatttaattaatttttaaaaatgatatacaagacatcagggaatgttaccttgattaaatggaaaaaatagttgacagaaacagagcaacagataacccagatttgggaattagcaggaagaagtttaaaaggactataataagtatattaaataattatgaagtaaagcaatgaaacaaaagaaataaattaggagaagagatggtgaaatacagaatagaaaacraactacataaatgaaataaaaaatctaaaaagtaaaaatacaacatataaaatgtaaaatgtattcaaaattagaaacttaaagcagtctaaaacattcttcccctcctgtcctttgtgaacattttgagcacagtttggacacagcagaaag

SEQ ID NO: 458822 - DNA, 609 bp, Homo sapiens
actgcctaaatccaatatgaaaccacaggtgaacacaatcaattcatggttccaggcacacaaacacaagtaaaactcttcatggaatctgaaaactcattccttaagagtacttgcccccacagagaggaatgggcttgaactctcttacgaaaaatcacacaaaacaagaacaataaaatacattatagttcaatctgtactctttttaatgtaaataaatgctcaacatttaattaatttttaaaaatgatatacaagacatcagggaatgttaccttgattaaatggaaaaaatagttgacagaaacagagcaacagataacccagatttgggaattagcaggaagaagtttaaaaggactataataagtatattaaataattatgaagtaaagcaatgaaacaaaagaaataaattaggagaagagatggtgaaatacagaatagaaaacaaactayataaatgaaataaaaaatctaaaaagtaaaaatacaacatataaaatgtaaaatgtattcaaaattagaaacttaaagcagtctaaaacattcttcccctcctgtcctttgtgaacattttgagcacagtttggacacagcagaaag

SEQ ID NO: 458823 - DNA, 533 bp, Homo sapiens
acccggtgaaaggaaatgaggaatggcccattcaatatgaaatggggataatggatatagggttttctttggagggtgatgaaaatattctgaaatcagatagcagtgatatttgcacaaacttttgaaaatactataaaactctgaatgtcacactttaaaaggataaattttatgacatgttgattatatcacagctgttaacacattgcacaggaggtttgaaagggccaaaataaagattacaggagaagtataatcaaacaagcatttttatttctactatctattgaaactctcaaaaacgataaaaaagttttagttaaaaactcagtaggttgatatcatggtatgtgaattatatctcaaggaaacagttttcaaargtataaacatgtcaaaattaagagaacagaagaaataatattggatgagttttgtcaacaaatttttgaaggttggaaatctggaaaatgactggcaactaagtcaacagaacaaagaaatttgaagtctaaaggtttgcagaaggg

SEQ ID NO: 458824 - DNA, 655 bp, Homo sapiens
atcagaacctcctgaggctgtgtcattgggaagataaactttctaaattgattgagactgatcttagatatttggggttcacaattataagaatttgtttttatgctgctttggtgatgggggtaaaattaatgagtttaatataaaattataatccttcagattgtataattcctctgtgatcaatttcatcttccttccaaacaaagcaccttgatgtaaaaactgtgaattgttaggtaaaggaagacagaagcacaagtgtaatttggatgtaaaataaacaaagcagtgaatttgccaagcaaagaaacgcagaaatgccctacagtagaatttcagactaacccagcttcaagggataatgacccttgagcaacycttaacaggaagtcacaaagtcagattgtgaaatccagagagctcagaggaattctagaattggcagccaattggatggcctcgtacctgccctggttatattctaagagctctgattctttagatgaaagaaagaaccagaaatctctggactgtgacaatccttcaagtaaagtgagtaacaatgggggtttgtttcagaacagagcccaccctgagccgagggctacaaagggaaagttggaaaagaatatacagaatatcagagtgtcag

SEQ ID NO: 458825 - DNA, 495 bp, Homo sapiens
cttaggccccattgcatcttaatgtaaactgtgtgcaccttaaagtgtaaggagtactggcctaaggctcattccaraactccagtcattgaaagataaaccaaatgcaaatcagaaagctgagacaaaaagctgactcaatagattgtacaagaactgtctatgagcccactcccctgggttcatccaaatgactttagattcctggcttatggttgtataactattttcaaacactttttgtagagctaagataatgactattctgctttgctccaggttgtctaggtaacatttatgtgtagcatatatacaaacaaacaaataacatttatcaagcacttactatttgtctgacactaaattgtgcagttaataggcatttttaaaatgatttcacgtaagtgattttcaaacaagttcctttagaatcagtttttactgatgatataattgatcctcaacaaggacaaaaatcatgcccaagaacacatg

SEQ ID NO: 458826 - DNA, 575 bp, Homo sapiens
aaaataaaagcttgaaggcagacttaagagggcttaagaaaatgatttttaaagttcttgggggcaaaaggaaccctcaaaactacacagatacatggaaattaaataatctgtttctacatggtatctgggttaataatgaaatcaagatggaaaaattatctgaatcaaatgataataatgatacaagttatcaaaacctctggagtacagcaaaagaagtgccaagagcaaagtttacagcactaaatgtctacatcaaaaagtctgaaagagtgcaaactgacaacctaatgtcatacctcaaggaattagaaaaacaagcacaagcacaaactaaacaagactctgtctcaaaaaaaaaaaaaaagaaataacagaaattgcagcaaaactaaatgaaattcaaacaaacaaacaaaaaaagcattacaaaagatcaatgaaacaaaacatkggttctttgaaaaaatagatagactattcactagaataaccaagaaaagagagaagatccaaataagctcaattagaaatgaaactggagaccttacaacacaaaccagagaaataaa

SEQ ID NO: 458827 - DNA, 595 bp, Homo sapiens
tgcaggtggatttgttcttgtacaaggaatagcccygtacaagtgggcaggtggaggtgttcatgcgcactctgaatagatgctggtggctgttgggatgtcctaggtcactgtgaggttctgtgattgtgcttttgaagtagatcaagtaggatcctagttaacttttggcttttcctttgtcctccaaatgtctttggggatggtaatgtctgttctactggtttcctgaagagtgagctgccttctaaattttatatagtaaaatccttaagatcatttaaatttcccatatggaacttcgtatttttggatctcaactgcatgctcctttctttcccctccaaacaaaagtctcctgtttgagtttttaatgtcagaacttgaggggcttactctttaagtaagtgtatttgtaatttcttgtattcacctggttactaaagctatcacagatcagaaacttggaataccatggtttttggtcttcaaaatgctttcgtcagcattatttcgtgcaagcctcacctcccccacctccggaaaggaggttgggtagattttttatttttatcatcatttttccacagatggg

SEQ ID NO: 458828 - DNA, 595 bp, Homo sapiens
tgcaggtggatttgttcttgtacaaggaatagccctgtacaartgggcaggtggaggtgttcatgcgcactctgaatagatgctggtggctgttgggatgtcctaggtcactgtgaggttctgtgattgtgcttttgaagtagatcaagtaggatcctagttaacttttggcttttcctttgtcctccaaatgtctttggggatggtaatgtctgttctactggtttcctgaagagtgagctgccttctaaattttatatagtaaaatccttaagatcatttaaatttcccatatggaacttcgtatttttggatctcaactgcatgctcctttctttcccctccaaacaaaagtctcctgtttgagtttttaatgtcagaacttgaggggcttactctttaagtaagtgtatttgtaatttcttgtattcacctggttactaaagctatcacagatcagaaacttggaataccatggtttttggtcttcaaaatgctttcgtcagcattatttcgtgcaagcctcacctcccccacctccggaaaggaggttgggtagattttttatttttatcatcatttttccacagatggg

SEQ ID NO: 458829 - DNA, 535 bp, Homo sapiens
cttctgggtctgcctgtcctggcatcttattcgtgctgctttgcctccacgtcctttctcctataataaccagtggagctgctcaggatgtctccatggacactgctgagaacaggctctccccatctggccaggctgccccatagcctgctgtgaaacacctgctgtagaatcacagatgctgcccggtgasgccttctgccactttctggagatgccagacctgttactaacacggccttcccatccccataccccatgtttctctaagcctcagcctatccttttctctctctgtagctgaggacttctctgctgtgaaccagtgtagattcttcctgggaaaccagcctggcaggaaacaccgaatggacagtggatggcaggggtgcagcatggtagaaggcagtgggggtttcagtcctggctgtcacttaacagttgtgagacataaatcaccttgcctcatgggtctctgtttcttttcctttctttttgagacagggtcttactctgtcgcctaggctggagtgca

SEQ ID NO: 458830 - DNA, 509 bp, Homo sapiens
aagctctctttattcctggagagaacataatgggtttactggattatggttgtactcttcaataatttttctgcccagggcccctgctcctctcattgccttttcaatcctttcttactggaagtgcaggaattagatctgtgctgggagaatcacgactgcagcccagttaggggaagagggagcgagtgtggagccccaggcagccagactggaagagaacaagctctacctgaacccttctgctcagcccctgtctgtcagcctggacttttcatsttatttccgggcatcagaagaaggcctctgggattcctgggttggttgactagtcaggaaagagaggccgagctacaagcagctgaagggagctttgcagctcctccgggttccccaaggcattttgtgctgtggttctccagcccagctgtacatatgagaatcaactgggaggttaaaaaatacccatgcctcagacagtagaatcagaagctttgggggtgagcaag

SEQ ID NO: 458831 - DNA, 509 bp, Homo sapiens
aagctctctttattcctggagagaacataatgggtttactggattatggttgtactcttcaataatttttctgcccagggcccctgctcctctcattgccttttcaatcctttcttactggaagtgcaggaattagatctgtgctgggagaatcacgactgcagcccagttaggggaagagggagcgagtgtggagccccaggcagccagactggaagagaacaagctctacctgaacccttctgctcagcccctgtctgtcagcctggacttttcatcttatttccgggcrtcagaagaaggcctctgggattcctgggttggttgactagtcaggaaagagaggccgagctacaagcagctgaagggagctttgcagctcctccgggttccccaaggcattttgtgctgtggttctccagcccagctgtacatatgagaatcaactgggaggttaaaaaatacccatgcctcagacagtagaatcagaagctttgggggtgagcaag

SEQ ID NO: 458832 - DNA, 454 bp, Homo sapiens
ggttccacaagcagcccaaagtgcctgaagggctcattaacttctctttggctggaagcacctccactttgctggacaggctggagaaaccasagtccatctgtgcgaaacactggcacagccccttcctgagcaacagctttactcctaaaaggacatgtatctacggccattggttatatctgcaacaggcatgagccacccggcactgcacagttgatgcacattcacaaaatcaacaatcaatcagctcaagaataggcttcccccaaccagccagcagcccgcaaactatctcccctccacacgaagaatcaaaatcaactactgttataacaatagtttcaattctgttgaattgagtaaggaaaattctgttctatgatctaaaattaataattccacaaccaacaacttaaagcattttaggagtttacacaataataattagcag

SEQ ID NO: 458833 - DNA, 454 bp, Homo sapiens
ggttccacaagcagcccaaagtgcctgaagggctcattaacttctctttggctggaagcacctccactttgctggacaggctggagaaaccacagtccatctgtgcgaaacactggcacagccccttcctgagcaacagctttactcctaaaaggacatgtatctacggccattggttatatctgcaacaggcatgagccacccrgcactgcacagttgatgcacattcacaaaatcaacaatcaatcagctcaagaataggcttcccccaaccagccagcagcccgcaaactatctcccctccacacgaagaatcaaaatcaactactgttataacaatagtttcaattctgttgaattgagtaaggaaaattctgttctatgatctaaaattaataattccacaaccaacaacttaaagcattttaggagtttacacaataataattagcag

SEQ ID NO: 458834 - DNA, 503 bp, Homo sapiens
tggctaagttgcaaatgatggtagagtagattctcaggactgtattttcatgctgtttcctttctttcaatgtaggagacaatgacttggcccagcagctagcagttctctgtggcagagagatccctgggcccatccggtctactgagagtacacattcatccgcttcaccttggactccagtgtaaccagggyaggcttcaatgcatcctttcacaagagtaatgagtttaaatatttttttaatcccatgttatcccatctcctctcctttcctctctctttctctcttcttaatatagttttctgggcaccaggacgcaaggcaagtcagaggacatgggtctctgcccaggttctggatggctggctccccttatgtcaatgctgagtcctgatccaaagcactgtggccaagtagtacaaaagtgtcctgccttaaggtctctgggtggggcatcttcactccagaggaggtgtgtccatggaatgcatgagagaga

SEQ ID NO: 458835 - DNA, 588 bp, Homo sapiens
  misc_feature (1)...(588): n = A,T,C or G
ttgcccaggctggtctcgaactcctaggttcaagcaatcctcctgccatggccttccaaaatgctgggattacaggtatgagccactgtccctggctattgttattaactttgaaaaatgtatgtcacatatgccataatcatttccaagtctttcaaagatatttttttaaatttcagctsaaaatattagaatgaatgcacactcaagactaaagaaggtatattctatgctcaagaaaatgacaaatattgatttttttttctttttgtgatggagtcttgctctgtcacccaggctggagtgcagtggtgtgatcttggctcactgcaacctccgcctcccaggttcaagcaattctcctggttcatcctctcaagtagcttggattacaggtgcctgccaccacacccagctgatttttgtatttttagtagagacggggtttcgccatgttggccaggctggtctgaaactcctgacctcaggtgatccatccacctcagcctcccagagtaaaaagattacacgcaaaaaacaccatgcccaaccancgagggaaaattctatccatggtttggtgaaaac

SEQ ID NO: 458836 - DNA, 588 bp, Homo sapiens
  misc_feature (1)...(588): n = A,T,C or G
ttgcccaggctggtctcgaactcctaggttcaagcaatcctcctgccatggccttccaaaatgctgggattacaggtatgagccactgtccctggctattgttattaactttgaaaaatgtatgtcacatatgccataatcatttccaagtctttcaaagatatttttttaaatttcagctgaaaatattagaatgaatgcacactcaagactaaagaaggtatattctatgctcaagaaaatgacaaatattgatttttttttctttttgtgatggagtcttgctctgtcacccaggctggagtgcagtggtgtgatcttggctcactgcaacctccgcctcccaggttcaagcaattctcctggttcatcctctcaagtagcttggattacaggtgcctgccacsacacccagctgatttttgtatttttagtagagacggggtttcgccatgttggccaggctggtctgaaactcctgacctcaggtgatccatccacctcagcctcccagagtaaaaagattacacgcaaaaaacaccatgcccaaccancgagggaaaattctatccatggtttggtgaaaac

SEQ ID NO: 458837 - DNA, 560 bp, Homo sapiens
aatccataactaataaggaaagaactattatgtttaattgcatatggagattgatttttcaaattacttttcaaggtatttaaaaatatctgcttgctggtcatggtggctcacacctgtaatcccagcactttgggaagccgaggcaggtggatagcttgaggtcaggagttcgagaccagcctgaccaacatggtgaaaccccatctctactaaaaatacaaaattacctgggcacagtggtgcatgcctgcaatcccagctacttgggagggtgaggcaggagaaacgcttgaacctgggaggcagaggttgcagtgagccgagatcatgccatcgcactccagcctgggcaacaagagcaaaactgcatctcaataaataaataaataaataaataaataaaaattaaaataaacaaaaacatctgctttattatatacatcaaataatcagaaactaacatttaagcttcctttccaaataacraaagtcctgatgcattgttaagaaaaactgcccatcagtgagctctgcacaccacattgtaagcacgatgg

SEQ ID NO: 458838 - DNA, 474 bp, Homo sapiens
gacaagcatatgatatgaggcaatgcatatataaatagtgtgatttaaggcattccacgatggatgatacatatatcagaaatatcatgttgtacatcataggtatgtacaatcttcatttgtcaatgtaaatattaaataaatactttttttaattaaaaaaaataggatgggcatggcggctcacacctatactcccagcattctgggaggctgaggtaggaggatggctcgagctcaggagtttgagaccagcttgggcaacctggcaaaaacccatctctgcaaaaaatgcaaacattagtggggtgtgatggtgtgcacctgtggtcccagctacttgggaggctgaagtggraggattgcttgagcccatggaggtcgaggctgcagtgagccaagatcgtgccactgcactccagcctgggcaacagagcaaggccccatatcaaaaaaataaaaaataaaaataaa

SEQ ID NO: 458839 - DNA, 632 bp, Homo sapiens
ttttcttctgtttagctcagcaatagggataaagacctgatctcactgcttaaggaaattggggagcttacccagcttaaagagctccacattcagaggaaccgcctcactgttctacgcccagaactaggtaaagttgctgatgaatgaacttagttctgggtttcatgaataacaattatcccaatgtagcaattctgaacaacctccctcctcttcttggcaactactctccacctagacacccaatgtctcaacaatgacaaatgttgagaaacatttgtcattgaccagagttcagctgttataggtttgaccttccccgatgctgtgttctgcagctgtagtgtcccgtgtcttagaaactgctgatgaaagatgaccctgctcagctccctgcataatgtagtggaaaaagcatggggttagtagtaasagccttatgcatgggtcctcgttgactagctgggtaagctttctgggtcttggttgttattgataactttatcgaagtatcactcttactttttaaccccttacttttttattgacctagaaaaacttttaccaaagaattaaagtagttgttacggctacttgaagttgttgatacctctgctggtcgtgaattt

SEQ ID NO: 458840 - DNA, 632 bp, Homo sapiens
ttttcttctgtttagctcagcaatagggataaagacctgatctcactgcttaaggaaattggggagcttacccagcttaaagagctccacattcagaggaaccgcctcactgttctacgcccagaactaggtaaagttgctgatgaatgaacttagttctgggtttcatgaataacaattatcccaatgtagcaattctgaacaacctccctcctcttcttggcaactactctccacctagacacccaatgtctcaacaatgacaaatgttgagaaacatttgtcattgaccagagttcagctgttataggtttgaccttccccgatgctgtgttctgcagctgtagtgtcccgtgtcttagaaactgctgatgaaagatgaccctgctcagctccctgcataatgtagtggaaaaagcatggggttagtagtaacagccttatgcatggstcctcgttgactagctgggtaagctttctgggtcttggttgttattgataactttatcgaagtatcactcttactttttaaccccttacttttttattgacctagaaaaacttttaccaaagaattaaagtagttgttacggctacttgaagttgttgatacctctgctggtcgtgaattt

SEQ ID NO: 458841 - DNA, 525 bp, Homo sapiens
acttgctttcatattagtctttatacctatcaaaaatgagatgtaagttgagtctcttgtgtagccrttcattcatttatttattcaggttaagttcctactttagggcagacctttgagtccaaggaactttcttttccagtaaactaagattcacttattcaacaactgtttgttgagcccctggtatttgctaagggttatgacaagagacagaacacccgttattgatgatgttctagtgggagaggacagaaaaaaggaagagagaatatgaatgacagacacgtgatattaagagttctgggaaaaaattgagcatggaagggagtgtccggctggggaaggggtaatcagagaaaccctcactcatacggtggtgccctttatgcagagacttaaaggaagaagagaggtctcctgatggagagaacagtaagtgcaaaggtcctgggtgggcttgtgttgaggaagagcaaggccagtgtagctggaacacagtgagtgaaggggagagagttgtaa

SEQ ID NO: 458842 - DNA, 631 bp, Homo sapiens
atattaaatacagattgaaatatgaaagtattttgattagtctccaagagtccttacaatcctaaaattccatgtgcttttaattttagctatagaaaaatggggctggtggaaagaataaaatcatacacgaaaagaacaccgaggaaagcagagaagaaagtaaccaggaaaagactatagaaaagtcatggaagaagaaaaaagactctaaaaaaaaatgaagagtgcatgcaactaggcagggtactgctttgaagaaaaactaaactgggaagtcagtaaatagagaaatctataagaaatagcctctaaatatgattaatataacatatctatatgtagatattctccactaagagtaaaataattcatctataggattcaccaggtcttgcttatgaaacaaaaacctatgtcttgtggccacagctaagtaaggtctgctctaaaaactytggtaataaaaacaaggtactggttatcactttgactattaaacatattagaacaaagtcttggattaaccagtgttctaagggaaaactctaaaaagaggtaacatataacaaaatgtgactttgtgaattgatcccatctggacctgtaccttgattctagtgatgcacag

SEQ ID NO: 458843 - DNA, 428 bp, Homo sapiens
gcacgaggggtcttgcaataactcactcactatcataaggacagtaccaagaggggatggtgctaaaccattcatgagagctccgcccgcaratctaatcacctcccaccaggccccacctccaacaatggggattacaattccacatgagatttggtggggacacagatccagaccatatcaatggagtctgatggagcctttagacccagaaccatggggttctcttcccagcttggccactaacctcaggggtgaccaggacccagtcccttagcccctttgaaaaggcttggcttcctctgtataaaatgaaagcactaaaacctgctttccctacctcacaaatgttaagaggatcaagtgctgcaaagcaatacacgaagacaggttatcattattattatttaccgctccccggttctgca

SEQ ID NO: 458844 - DNA, 605 bp, Homo sapiens
gtctggcacatgttagatgtttcacgaatacatgtttttatttttctctttttrtgaaggcttgctctacttttctgaagttatgtcttaagaatcaattgcatactttatctaatgattgttttcatttaaaaataacaaatatatattttccttatgaatctttcattttattcaagcagttatcagcaaaaacttatcaaaattattcttaagcctttgttttcctaaatgaaacagatttagagttcttttcctactccgcatgacatactctgaaaattctcgtgccatgcatagtttttaacaaaaattctgtaattatgcatatgtcaaatgtttaatcatattgtattttgtttgcaatgccctattatttttggtgaggactacagtgtaaggcagatactttgaagttaattccttttgaaatatacacacgtgaatttttttgtgaatatgatttatttttcatgctcagtaacccagtcaatagccacatgaagataaaagataagcgtgttctacagagcatatgcaaggttttctcttgaaatgtcttggttttcaatatgtgaacagcctgaaatctaattgcctttaaa

SEQ ID NO: 458845 - DNA, 593 bp, Homo sapiens
ccgtcaatgtttgtctttcctccctacctacccagtctgaaacccttgattgtttcctgtattcattcagttgaaaacattattcagtcatgacaaacactgggtcttactcacagccactccagctgctattatgttccagctggtgcctagtgttctgtaagtggcmcgctgagtggtccaccatgatcctcattgtcttagcttcatgaagcagggggaaaaggcttcacccaaaggaccttgttccacttggctctaagtccttccagtaagggtaccactgggtaatagggattttgtcctgaaaaccattaccaacagaatgatgatagtctagcatcttgtccatcttgagagcttgggagctcatctcagcatctaagctttgcacaaaactgagcaagtccagggcctattcagctgccagcacctctcacacctctccacattggagtcagacaaacgggacttttctctccccagcaagaccaggtgagaagcaggggaccccagatttataatgaagaggaccctgaaaactcagaagacaacaaatgggactctactattccagcacatggggcttgaac

SEQ ID NO: 458846 - DNA, 593 bp, Homo sapiens
ccgtcaatgtttgtctttcctccctacctacccagtctgaaacccttgattgtttcctgtattcattcagttgaaaacattattcagtcatgacaaacactgggtcttactcacagccactccagctgctattatgttccagctggtgcctagtgttctgtaagtggcacgctgagtggtccaccatgatcctcattgtcttagcttcatgaagcagggggaaaaggcttcacccaaaggaccttgttccacttggctctaagtccttccagtaagggtaccactgggtaatagggattttgtcctgaaaaccattaccaacagaatgatgatagtctagcatcttgtccatcttgagagctygggagctcatctcagcatctaagctttgcacaaaactgagcaagtccagggcctattcagctgccagcacctctcacacctctccacattggagtcagacaaacgggacttttctctccccagcaagaccaggtgagaagcaggggaccccagatttataatgaagaggaccctgaaaactcagaagacaacaaatgggactctactattccagcacatggggcttgaac

SEQ ID NO: 458847 - DNA, 593 bp, Homo sapiens
ccgtcaatgtttgtctttcctccctacctacccagtctgaaacccttgattgtttcctgtattcattcagttgaaaacattattcagtcatgacaaacactgggtcttactcacagccactccagctgctattatgttccagctggtgcctagtgttctgtaagtggcacgctgagtggtccaccatgatcctcattgtcttagcttcatgaagcagggggaaaaggcttcacccaaaggaccttgttccacttggctctaagtccttccagtaagggtaccactgggtaatagggattttgtcctgaaaaccattaccaacagaatgatgatagtctagcatcttgtccatcttgagagcttgggagctcatctcagcrtctaagctttgcacaaaactgagcaagtccagggcctattcagctgccagcacctctcacacctctccacattggagtcagacaaacgggacttttctctccccagcaagaccaggtgagaagcaggggaccccagatttataatgaagaggaccctgaaaactcagaagacaacaaatgggactctactattccagcacatggggcttgaac

SEQ ID NO: 458848 - DNA, 579 bp, Homo sapiens
tgaatttatatacacaaaaagtttacaaacatcaacaaccaatgagtgcgttcagcaaggctgcaggatacaagatcaacatacaaaaattaattatatttctgtatactaacaatgaaagtgtggacattgaaactaaaacattaccatttacaatcaccaaataaaatgaaatactccaattgaatctaaacaaacatgtacagaacatgtatgccaaaactataaaatgccaatgaaagaaatcaaagaagaaagagtggagcaagaaggccaaatagaagcctacaccattcattcctcctgcaggaacaccaaattttcacagctaactacacacataaagcaccatcacragaaccccagatcaggtcagcaatcacaatatctggctttaacttcatattgctgaaagagacattgaagatggtagaaaagaccatcttgtattgctgatgccaccctctcccctatcccccagcagcagcacacagcacagagaatctgtgtgctttggagagggagagcacagcagttgtgaggctttgcattgaactcagtgctaccttgtcacagtgg

SEQ ID NO: 458849 - DNA, 579 bp, Homo sapiens
tgaatttatatacacaaaaagtttacaaacatcaacaaccaatgagtgcgttcagcaaggctgcaggatacaagatcaacatacaaaaattaattatatttctgtatactaacaatgaaagtgtggacattgaaactaaaacattaccatttacaatcaccaaataaaatgaaatactccaattgaatctaaacaaacatgtacagaacatgtatgccaaaactataaaatgccaatgaaagaaatcaaagaagaaagagtggagcaagaaggccaaatagaagcctacaccattcattcctcctgcaggaacaccaaattttcacagctaactacacacataaagcaccatcacgagaaccccagatcaggtcagcaatcacaatatctggctttaacttcatattgctgaaagagacattgaagatggtagaaaagaccatcttgtattgctgatgccaccctctcccctatcccccagcagyagcacacagcacagagaatctgtgtgctttggagagggagagcacagcagttgtgaggctttgcattgaactcagtgctaccttgtcacagtgg

SEQ ID NO: 458850 - DNA, 596 bp, Homo sapiens
atctggctttaacttcatattgctgaaagagacattgaagatggtagaaaagaccatcttgtattgctgatgccaccctctcccctatcccccagcagcagcacacagcacagagaatctgtgtgctttggagagggagagcacagcagttgtgaggctttgcattgaactcagtgctaccttgtcacagtggaaagcagaaccgggctgtactgagctgacatctacccacggaaggagaattttgactggtcctggccagaggggaatttcccacctcaggagttagagcttgagttccaacaagccttgctaaagtaccctggggccctaagtgaacttgaggggctgttttggccataaggtttgcaattcccaggcacatcccagtgctgaggtgggctcagagccagtggactggtggagcatgcaacttactaaacacaagctggggcagctaagggaatgyttgagccatcccttccccagctcccagtagagccatgcaatgtagagaaatctgttcacttgggaggagagcacagtgattggaggaatgaactcagtgctgctatgtcacacagagacctgtcagg

SEQ ID NO: 458851 - DNA, 673 bp, Homo sapiens
acgcattctacacgtatagagaatatatatagaatgtgtagaatacatatattacataaatattggatcatttgttagagtcctacaggcccatgaggctctattatatcaagatttttttttttttcagtatatattctttttttttttctttttttttttgagacagagttttgctctgtcrcccaggctggagcgcaatggcacaatctcggctcactgcaacctctgcttcccaggctcaagcgattctcctgcctcagcctctctagcagctgagactacaggcatgcaccaccgtgcttagctaagtttttgtatttttgatagaaatgggtttttcaccatgttgcccaggctggtctggaactcctgagctcaggaaattcacccactttggcctcccaaagtgctaggattacaggcatgagccaccacacctggcctcagtatatgttctttctgttgcccaaattgagtaaattctattgttttatctatcagttaattgattttccctttgtcctctccattctgctgttgaatcattccactgttttaaaattttaatttactctatttttcagttccaaaatttttatttggttcttctttatgttttctctatcttggctgaaactttctattttttgctgagactttatttttaaaa

SEQ ID NO: 458852 - DNA, 673 bp, Homo sapiens
acgcattctacacgtatagagaatatatatagaatgtgtagaatacatatattacataaatattggatcatttgttagagtcctacaggcccatgaggctctattatatcaagatttttttttttttcagtatatattctttttttttttctttttttttttgagacagagttttgctctgtcacccaggctggagygcaatggcacaatctcggctcactgcaacctctgcttcccaggctcaagcgattctcctgcctcagcctctctagcagctgagactacaggcatgcaccaccgtgcttagctaagtttttgtatttttgatagaaatgggtttttcaccatgttgcccaggctggtctggaactcctgagctcaggaaattcacccactttggcctcccaaagtgctaggattacaggcatgagccaccacacctggcctcagtatatgttctttctgttgcccaaattgagtaaattctattgttttatctatcagttaattgattttccctttgtcctctccattctgctgttgaatcattccactgttttaaaattttaatttactctatttttcagttccaaaatttttatttggttcttctttatgttttctctatcttggctgaaactttctattttttgctgagactttatttttaaaa

SEQ ID NO: 458853 - DNA, 608 bp, Homo sapiens
gtaattgcttattgaagcatttttgtgatggctgctttaaactctttgtcatatagttctaatatctctgtcattttaatgttrgtatctattgattttctttttaaatttaagttgagatcttcctagttcctggcataacaagtggttttcagataacacctggacattgtgggttttatgttatgaggcactggccttatttaaaccttacattttatctggctttctttgacactgctctggccgagtaaaggggacatccacctcattactgccaggtgaagctctaagttcctcacttgacctttcaaccccatcttagtagcaaaatgcaatatggaactttataaacttggggaattatatgtactccatttttaaagattttcatggaggacactttcagacattttcatatgacaatatttggacacataatgaaagagtaactatgatgcttgtataataaatttctatttccaacagtgcccaattagcagccaccagggatcctagagggacattggtctctagatggctttgttctcctaataatgtctggtgtgtctggagtctgcccgttggtcctggtggatcctgactgg

SEQ ID NO: 458854 - DNA, 458 bp, Homo sapiens
tcatatcacttttatttctgctttcaatagtgtggttattcttcccagtctggagaggtcagggagtggcaaactcagtgtgcttgcatgcactttggagagatattatttatgtatgagacaccagtttaagtgaggatgttgttgtctcccaccctgccctggagtatttgcccascaattactgtctcctgctggtgttggcagacacaggaggaggatggtggtctgggggaacctagggcctacaaagagagtgtgaaagctttttggaattccaagtgatctcactcccaggttcctgcaggatgttgggaaagtatgctctttgctttctttcccaggatttcatcaagcaaggtggccatgaagctatcactttcacttatctcagtttaggaaagctctgaattcattgatgaattatgcttagcaggcatgatgcacatgttgaactt

SEQ ID NO: 458855 - DNA, 580 bp, Homo sapiens
tcatatcacttttatttctgctttcaatagtgtggttattcttcccagtctggagaggtcagggagtggcaaactcagtgtgcttgcatgcactttggagagatattatttatgtatgagacaccagtttaagtgaggatgttgttgtctcccaccctgccctggagtatttgcccaccaattactgtctcctgctggtgttggcagacacaggaggaggatggtggtctgggggaacctagggcctacaaagagagtgtgaaagctttttggaattccaagtgatctcactcccaggttcctgcaggatgttgggaaagtatgctctttgctttctttcccaggatttcatcaagcaaggtggccatgaagctatcactttcacttatctcagtttaggaaagctctgaattcattgatgaattatgcttagcaggcatgatgcacatgttgaacttttctccrggacaaattagggacatctgagatggaagtgtgtattttcttacacatccaatggcctggaacagcatcttggttttttggaaagcaggggctagagctctggttgctgtaaact

SEQ ID NO: 458856 - DNA, 565 bp, Homo sapiens
cgtgtagcctgactggaaaacacctcccagtggtggccaacagacaactcaaacaggtgggtacccttctgggatgaagcttccagaggaaggatcatgcagcaatatttgctgttctgcagcctccaatcatagtacccatgcaaacagsgtctggagtggacctccagcaaactccaatagacctgcagctgagaggtctgactgtcagaaggaaaactaacaaacagaaaggaataacatcaacatcaacaaaaaggacatccacaccaaaaccccatctgtaggtcaccaacatcaaagaccaaaggtagataaaaccacaaagatggggagaaactagagcagaaaagctgaaaattcccaaaaacagagtgcctcttctccccaaaaggatcacagctcctcaccagcaaggaaacaaaactggatgaagaatgagtttgatgaattgacagaaataggcttcagaaggtcagtaataagaaacttctccaagctaaaggagcatgttctaacccaatgcaaggaagctaaaaaccttaaaaaaggttagatgaatggc

SEQ ID NO: 458857 - DNA, 565 bp, Homo sapiens
cgtgtagcctgactggaaaacacctcccagtggtggccaacagacaactcaaacaggtgggtacccttctgggatgaagcttccagaggaaggatcatgcagcaatatttgctgttctgcagcctccaatcatagtacccatgcaaacagggtctggagtggacctccagcaaactccaatagacctgcagctgagaggtctgactgtcagaaggaaaactaacaaacagaaaggaataacatcaacatcaacaaaaaggacatccacaccaaaaccccatctgtaggtcaccaacatcaaagaccaaaggtarataaaaccacaaagatggggagaaactagagcagaaaagctgaaaattcccaaaaacagagtgcctcttctccccaaaaggatcacagctcctcaccagcaaggaaacaaaactggatgaagaatgagtttgatgaattgacagaaataggcttcagaaggtcagtaataagaaacttctccaagctaaaggagcatgttctaacccaatgcaaggaagctaaaaaccttaaaaaaggttagatgaatggc

SEQ ID NO: 458858 - DNA, 580 bp, Homo sapiens
gacacagctgtgcaccaccacacacaactaatttttaattttttgtagggaaggagtcttgctgtgtctcctagtctggtgttgaactcctagcctcaagggatcctcctgtcttggcctcccaaagtgctgggattataagtgtgagccaccacctctggcctatttttaaaatcattggataatctctacctttgaatatatggataaatacttttacatttaatgtacttactgatacattttttaccactctattttgaattttttctttttcttttcttttcttttttttttttttttttttgagatagtcttcgttctgtaacccaggctggagtgcactgatgcaatctcaactcactgtaacctctgcctctgggttcaagtgattttcctgcytcagcctcctgagtagctgggattacaggcacgcaccaccatgcccagctaatttttgtatttttagtggagacagggtttcaccatgttggccaggttggtctcaaattcctgacatcaagtgatccccctgcctcagcctcccaaagtgctgggattacaggcatgagccaccgca

SEQ ID NO: 458859 - DNA, 597 bp, Homo sapiens
tttaaattctgaatagtgctttttcactattttgtctgtttccttgttggagaattcctgttggacacttaaatcctctcagtcattctctgtggatgttaatgtgtgtcatctttctgcactgtgttcggggcagatttctagcagttctctgcttctctctgtctcagatctgggcatatatcattcattgaaggtttttttttttttaactcaatgccttcattttttttcatttatatctgcttttattttaatctctcacacttttaaaatggaagttattcatttatctcattgggcgactgaacatacctattttaaagtgttgccagctggatccacacacttaatttcctctgaggcgtattcatgttttgaaggttgattttgctggctgtctttctcagtattcgatttcttcttctgttttggaattttgctttgcaggcttattttgagtrggatgcttctgtttttgtttttcttctttctgtgttcacctctcctgggccgggggttttgtggtcacctttgtgcagctgttcaggactccctgccctaaacctggcagtgctgcagtgctcctgtcccaca

SEQ ID NO: 458860 - DNA, 581 bp, Homo sapiens
cccctgcacaagccctcttgcctcccaccatgtaaaasgtgactttggtccccctttgccttccgccatgattgtgaggccaccccagccacgtggagctatgagtccattaaatctctttcctttataaattacctagtctcaattatgtttttattagcagcatgagaacagactaatacattgtgtatctgtaaataatatcaaacctgtgataagaatgcatttgattagatgaagagagagctcctggtgttggctcagtgagcagtgctgctgacctgcagcctcgggggggcccagggagagaacaggcctttctgcctctgggtgtcccacagaccacagcacccaccccatgcccagcttggaccctgtaactcaggaccctgcttatcaatcctgagcacttgctaggttttctcttcagctgcatgcaccacacagttaattactgagatgaggagaaaatgcccccttccatggaaattatggaaatgctatcagatgttaaggattaatgagtattagacgcaggtgtgagattagatgcagctgaaaagaacacggcatggtggctg

SEQ ID NO: 458861 - DNA, 594 bp, Homo sapiens
taaaaacaacaacaaaaaacaacttctgggagcctggtcttaaggggtctcctgtactttgctgagttttacctccaagagccctatcggtttctcagggtgaaaaaattagataggaaaaaaaaatccctttgtgcttcatggaaggggagaagagcaaccactgtgaaataaggccaaagtattctgctctccttaacaaaggagaaatgattttagcagagcctaggctacctgggttttaccagagcctgaccaataggaagtaatggaaatacccaactccagccygctcacaccttcctgtctcacttgggggacatgcagggaagctgagaaacagctgtgaaggtcacagccaaggctcactaaaggacagagatctaagcacaggattacagagcatttcccttttcccgatcctgtcttgtcagaagggctcctataaaataacatggaattatggcagaacttcaatgctcacacagtatttaaggattcaacagggaaactctaagacaaaaggggaggaaaaaacaaggaagacaaaagagaaaatgttaccctctgacacccacagctacaaaaatgtga

SEQ ID NO: 458862 - DNA, 596 bp, Homo sapiens
aatcccaaaacatctggtcattaacaatgtatttctaaataacacgtcaaagaaatctcaaaaaattttttwaaatattttaattaaatgaatatactacttatcagaatttgtgaagtgcaggggctgggcgcagtggctcaagcctgtaatcctagcactttaggaggccaaggcaggcagatcgcgaggtcaggagatcaagaccatcctggctaacacagtgaaaccccatctctactaaaaatacaaaaaattagctgggcatggtggcgggcgcctgtagtcccagctacctgggaggctgaggcaggagaatggcatgaacccggcaggcggagcttgcagtaagcggagatcacgccactggactccagcctgggcgacagagggagactccgactcaaaaaaaaaaagaaaaaattgtgaagtgcagcaaaatcaatggtaaaggaaatttatagcattaaatgcatgtattacaaaacaagaaagttctattaggttggtgcaaaagtaatggctaaacggcaattacttctgcaccaaccttataaaatcaataatccaaacttctaccctaggaaacaagaaaa

SEQ ID NO: 458863 - DNA, 596 bp, Homo sapiens
aatcccaaaacatctggtcattaacaatgtatttctaaataacacgtcaaagaaatctcaaaaaattttttaaaatattttaattaaatgaatatactacttatcagaatttgtgaagtgcaggggctgggcgcagtggctcaagcctgtaatcctagcactttaggaggccaaggcaggcagatcgcgaggtcaggagatcaagaccatcctggctaacacagtgaaaccccatctctactaaaaatacaaaaaattagctgggcatggtggcgggcgcctgtagtcccagctacctgggaggctgaggcaggagaatggcatgaacccggcaggcggagcttgcagtragcggagatcacgccactggactccagcctgggcgacagagggagactccgactcaaaaaaaaaaagaaaaaattgtgaagtgcagcaaaatcaatggtaaaggaaatttatagcattaaatgcatgtattacaaaacaagaaagttctattaggttggtgcaaaagtaatggctaaacggcaattacttctgcaccaaccttataaaatcaataatccaaacttctaccctaggaaacaagaaaa

SEQ ID NO: 458864 - DNA, 615 bp, Homo sapiens
atgttgactttcatttccacccagcaactgcaactcttttagacccggaatcccactgtgcttggagcggttcaacagcaggkacagaaatatcttcatttgccacctgctccacccatgggctcctgtgctatgcatctgaaactggcacttgctcttttttgacaatttgtttgtcacatgtttgttctcttgttcctcttcccccacctccccgcccacgcatagcttcgagttagaaaattgtgtgttcagatgccttgatccttcaagagacattttgtgactatgagcttggccaagttggatctttcaaaaccttaaaaaaaatgtcatctatagatgccggtcagaaaatctcagccagttaccacgaccttgcttctacttaggtcctaaatacactgcttcaatttctttcaggtatctcaaatacaatccatccattctggaataaaatgaatatatctctattgatatctctttatcccaaacagctgactgcacgaatctttattgagtctttgttatatagtggcactgcagtttacatacagtatttaatcttcacaacaaccctatgaggtggatattattaatatcccctttcaacag

SEQ ID NO: 458865 - DNA, 580 bp, Homo sapiens
accagctgagttatttgtggacagtgcgttgcagctggaattctctatctgcccaatcctgttcctcccaccttcccattggagttgatcccaaagaccctccccagtaaacttcttgtgtgcaaatttccatgccggagcctgattgctgaggaacccagcctgacatgatggtaataagagatatgatacctgttatcatagagcttttgggccagctttgtccatcataactacctttgtttgtcccctaggacaagcaaaaactatccaggcccaacagggctctgctcatggtgacacttggcagtgtcctgagcaaagacctttgtagctacaccactccatgcagccatcattaaggcaagagcagaagagcagaaccagctttgcagctggcaatcactcatattagttccataaacctgttattgagtgtcttctgtctccctgtgctggtgccagagatagagatacctaagatrtggctctggatttccaggaccatctcatggaggggaaaatgaacaagtaatcagacaattgaaaacgtatgggacaattcaagatctgcaaagtg

SEQ ID NO: 458866 - DNA, 559 bp, Homo sapiens
cttatttccacctgccattagaaccttatttgtcgtctttttcagaatcccttgggtccttaaactctgtgcccaggacatccctggcagcctggaaaaagtatggatctcttctgaaagtaaggacttgaaatcattaaaaaaatacatagtattgcaaaggaaaacaatgatgttaagagacggttatcaaaataactgaaagtgtgatacggttattaacatgcttctttagtaacacatcaaaaaacaagctctagcatcaggtctratgccattggaattttgaagttataatgagtgtaagtgctattctaagatatcttcaacaaaagtgatgtgttataaaaatatctgtgatttctactgatacaaggtcaaggtgctattaatactactatggtttgttgtctgcatgcatacttgaagaaaatgctagatttcagtgtgaattcagtgaggattttgttttctttttaatttgccatctctgaattctatccactgaccttttcagggatccctgcaccccagtttaagaacccctgctagtcaaact

SEQ ID NO: 458867 - DNA, 577 bp, Homo sapiens
aagattgtatctgccttatatctacctcttccaaaaacagagaagatgatttagagtccaggagacaggcggtacctatgggaaaattgaaggcacaatttttttcattatctctttctttccctctctctctctctctctctcaattaaactttgccaaagacaattttaaaaatatatattttttattttctaacgctggcaacattttcagcttagaaaacaagagtacttaactgctaaaatgacctggtttttatttcaaacttggagaygcatcacaaataggttgaggtcaaaagatgcatttctaccttagataatgaggaagtgcagcagtgggcagatggctgtagcggaaagaacatcagaactggggtgaggatgcctgggttgaaattcctgttttgtttttcattagctatttgacagtgagcaaatttgttcacttgtctggttcttaatttccttgtatgtaaagtaataacagcaccatctattttatagaatttcatgtccacattatatggactgcttatatattcagtatatttattcttgatgtagctgatgaatt

SEQ ID NO: 458868 - DNA, 593 bp, Homo sapiens
ctacacaattttcctatttgtagatagtctaattctcccgctttaatttccaggttggtcagtcaaaacagtacagtatttaaagccagagagacaaggtctaaggtttcagggacacttactgtatgtctgggttgggacaagttacttagactgtcagagccttggtttacttatatatatataaaaaaaaaaactgcaggcaactcacatagctgttgtaaggattgaatgtgagtagactctcaatatatgtgactgcatttgaatatgatatttaggtcatgttctgtgtgatgcttttgtgmcaaaatcacactttatattaggtcaccttagcatacgcgtgaccccagagaaaggaaacacatgagggagtgcatccatgtcactgcatagctaattgagtgtggcaataagaactttcgcaattctgaggatgaaacatctggtgactgttgcagggataattactgtcctttataattgcaggtattcctagacataatatttcctagcattcttgaattcacacaaagtagcaatggttggaataccttttggacgtttatatttcatggtatacttttatg

SEQ ID NO: 458869 - DNA, 593 bp, Homo sapiens
ctacacaattttcctatttgtagatagtctaattctcccgctttaatttccaggttggtcagtcaaaacagtacagtatttaaagccagagagacaaggtctaaggtttcagggacacttactgtatgtctgggttgggacaagttacttagactgtcagagccttggtttacttatatatatataaaaaaaaaaactgcaggcaactcacatagctgttgtaaggattgaatgtgagtagactctcaatatatgtgactgcatttgaatatgatatttaggtcatgttctgtgtgatgcttttgtgccaaaatyacactttatattaggtcaccttagcatacgcgtgaccccagagaaaggaaacacatgagggagtgcatccatgtcactgcatagctaattgagtgtggcaataagaactttcgcaattctgaggatgaaacatctggtgactgttgcagggataattactgtcctttataattgcaggtattcctagacataatatttcctagcattcttgaattcacacaaagtagcaatggttggaataccttttggacgtttatatttcatggtatacttttatg

SEQ ID NO: 458870 - DNA, 593 bp, Homo sapiens
ctacacaattttcctatttgtagatagtctaattctcccgctttaatttccaggttggtcagtcaaaacagtacagtatttaaagccagagagacaaggtctaaggtttcagggacacttactgtatgtctgggttgggacaagttacttagactgtcagagccttggtttacttatatatatataaaaaaaaaaactgcaggcaactcacatagctgttgtaaggattgaatgtgagtagactctcaatatatgtgactgcatttgaatatgatatttaggtcatgttctgtgtgatgcttttgtgccaaaatcacactttatattaggtcaccttagcatacgcgtgaccccagagaaaggaaacacatgagggagtgcatccatgtcactgcatagctaattgagtgtggcaataagaactttsgcaattctgaggatgaaacatctggtgactgttgcagggataattactgtcctttataattgcaggtattcctagacataatatttcctagcattcttgaattcacacaaagtagcaatggttggaataccttttggacgtttatatttcatggtatacttttatg

SEQ ID NO: 458871 - DNA, 601 bp, Homo sapiens
aaaggctgctgtcctcttgttaagggctgtgcctcagccaagtgcagaagtgatgtcaatgcctttctgccctgcctgtctcagagttctttcaaaacaggctttaaaaacatgctgaggtcacagagaatgtgttaacttgtttggtggattattatcattttatcactcttgtgattggctagaggagatgagctctacagtacttaagagagcatgggaatttccatgctctagaattgataaatgggaataatcaaagaaaagatcagtagcaagtccttgccttcagaaagaacaagacccctaagtttttcccatagtactcaaaatcagtagaaagaaggttttggcttttgaattttaaatagattcattgattttaaataaatcgatcacaataaattttgcataagaaagaaatcctaaataaaaagaattccactccaactctacaaaagagttgtcttctataatgaagacccaatgagagccagctgtggtcaaaatgtcttcagttgttgtcctggtagcaaatggaaattgtccttccttcaactwctcttacctctcctcatctgaacattttcacaggtgctta

SEQ ID NO: 458872 - DNA, 636 bp, Homo sapiens
ttaatacatactgattttttccaagtgtcagacactttgctggagatacaatgatggataagaaaaacacaattgcccccctcagagacagaggcatttcagggttgttgctgtgcgtattcagcgataytgagcacacatgtagcatggcacatggttgctgagaaaaaaatatcagtgtgcatctcttccaccttaagatgagcagttgaacttgagcaaacgatagtctaactacgggaaatttagcagcaccaggcctaggactgaagggtattattttacaaaacatcagaagactttaatagcaaacacattgaaaaagccaacggactttggaatcatagagagctagcccagcatctttgccttgtccctcactaactatatgtcagtgtgtaatttgcttaatctctttgaggctagatttgtaaactggagatattgttagagatacctacctgaaattgatgttacaggtaataaaggaaatattacgcattaaaagcatttgttaaaaggtaaaatgatatccacatgttagttattattgattattttcattattattgagtaatcaccagccatgacaccactccctgtgtggtgtctctggggctggtgttctagactgag

SEQ ID NO: 458873 - DNA, 612 bp, Homo sapiens
atccttccgtttgggtccatggctccctccctccctccagatcaccccatgtagagtaggcctgtcgtgtctgtcccctagtgggggtggtttttggcaaaagtcattcttctcagagttaatgctttcagaagaaacaaaaagaaatgacaaaagtaasaatgatgtctctgctcttccaaaaacacaaacaaaaaaagttgttttcagtgttcctattagtatgtgtttccttttttttttttttttttttttagcattctgatatttgtctttctggtgtctccagaaaacctgcctccattgtgttcttccagaaaatgtatttgtccttatccaaaactgtcagcagatttctcagtagggctgagttgttgccactgtgatgcgtgggactaagtgaaaacagatcttcgctaagggactgacttttgatggactaactcacagactgggatgtggcctccaccactctgtgcccctgagatcccaagaaagacagaaaaagaggagtgactgcgtggaacaggcaatattggcaaacactggtcagagatgatgcccttgtggagccaggctgtctagtgggggttggcttagtccctttgggct

SEQ ID NO: 458874 - DNA, 535 bp, Homo sapiens
cagcatagactagatgcttctcagatacacagtggctgcctcatttactctcaggaggggaaaagaaaagcaagactctggctctgaaaaacctttggaaagaagtcttagaacagaacatatttcccagtaacaaaaaaacaggctttctctcagggccatggactcaaatccttccgtttgggtccatggctccctccctccctccagatcaccccatgtagagtaggcctgtcgtgtctgtcccctagtgggggtggtttttggcaaaagtcattcttctcagagttaatgctttcagaagaaacaaaaagaaatgacaaaagtaacaatgatgtctctgctcttccaaaaacacaaacaaaaaaagttgttttcagtgttcctattagtatgtgtttccttttttttttttttttttttttagcattctgatatttgtctttctggtgtctccaraaaacctgcctccattgtgttcttccagaaaatgtatttgtccttatccaaaactgtcagcagatttctcagtagg

SEQ ID NO: 458875 - DNA, 612 bp, Homo sapiens
atccttccgtttgggtccatggctccctccctccctccagatcaccccatgtagagtaggcctgtcgtgtctgtcccctagtgggggtggtttttggcaaaagtcattcttctcagagttaatgctttcagaagaaacaaaaagaaatgacaaaagtaacaatgatgtctctgctcttccaaaaacacaaacaaaaaaagttgttttcagtgttcctattagtatgtgtttccttttttttttttttttttttttagcattctgatatttgtctttctggtgtctccagaaaacctgcctccattgtgttcttccaraaaatgtatttgtccttatccaaaactgtcagcagatttctcagtagggctgagttgttgccactgtgatgcgtgggactaagtgaaaacagatcttcgctaagggactgacttttgatggactaactcacagactgggatgtggcctccaccactctgtgcccctgagatcccaagaaagacagaaaaagaggagtgactgcgtggaacaggcaatattggcaaacactggtcagagatgatgcccttgtggagccaggctgtctagtgggggttggcttagtccctttgggct

SEQ ID NO: 458876 - DNA, 539 bp, Homo sapiens
ttactggactagaggttaacagaacacaattaatcttaacggttcattacatattttgatccttagtttttgcacgactcacttttacttattttagtagccatttagttatttttttaaatgtatgcattcacatttaaaaccacctctaacaactaaaattagaacttccataataaccatctaactccatggttcctctacaaactctttctcctctcttctctcacacagagtaaccatcaccctaaatcctatattcttcattcccttgattctcttagtatatggttttattgtatctatgtgtattcctaaaaagtatgtgtacttattagattttgtttctaaacttayaaaagtagtgtcatgtcataattatttgaaatctaattatatttaatattacattactaagacgtatcactttatttattttgacttgtatacattaaactttattccttttcttttcttagacatgtcctgatgaatctcctttccaagtcttaagtaaatttatttagttgcctatacac

SEQ ID NO: 458877 - DNA, 539 bp, Homo sapiens
ttactggactagaggttaacagaacacaattaatcttaacggttcattacatattttgatccttagtttttgcacgactcacttttacttattttagtagccatttagttatttttttaaatgtatgcattcacatttaaaaccacctctaacaactaaaattagaacttccataataaccatctaactccatggttcctctacaaactctttctcctctcttctctcacacagagtaaccatcaccctaaatcctatattcttcattcccttgattctcttagtatatggttttattgtatctatgtgtattcctaaaaagtatgtgtacttattagattttgtttctaaacttataaaagtagtgtcatgtcataattatttgaaatctaattatatttaatattacattactaagacgtatcactttatttattttgacttgtatacattaaactttattccttttcttttcttagacatgtcctgatgawtctcctttccaagtcttaagtaaatttatttagttgcctatacac

SEQ ID NO: 458878 - DNA, 555 bp, Homo sapiens
gctgatgacaaaaggtcacaaccagatgagaacatctcagtggatgctagtgtgactggatgaccaaatcagactatgcttcccatgctttggcaccttgaaaggaagagccctagaattccaacagaatgccaaggaaaatgggggaactgtgaattgaccgcaattaactttctgccactctggctgartagggcaaaatacaggaattcaagtgagttaaagaaaattcaagttctgtttcttgcacaccagaaactggaaccagctacactctgtccacaggccttgtgtcatatgccccaccccctcccatttctccactctcatctgcctccctctcccccaatagccacagtgttactattattgtcccaaatccccaagctttcccatcccaggacctttgcacaggcagtttcctctgccttgtcctggctttttaaatgacaggcttcttctcagtttaactactttcctgctgggtggggtggctcaagcccttaatcccagtgactggggccaaggcaggaggattgcttgaggccagaagtt

SEQ ID NO: 458879 - DNA, 555 bp, Homo sapiens
gctgatgacaaaaggtcacaaccagatgagaacatctcagtggatgctagtgtgactggatgaccaaatcagactatgcttcccatgctttggcaccttgaaaggaagagccctagaattccaacagaatgccaaggaaaatgggggaactgtgaattgaccgcaattaactttctgccactctggctgagtagggcaaaatacaggaattcaagtgagttaaagaaaattcaagttctgtttcttgcacaccagaaactggaaccagctacactctgtccacaggccttgtgtcatatgccccaccccctcccatttctccactctcatctgcctccctctcccccaatagccacagtgttactattattgtcccaaatccccaagctttcccatcccaggacctttgcacaggcagtttcctctgccttgtcctggctttttaaatgacagscttcttctcagtttaactactttcctgctgggtggggtggctcaagcccttaatcccagtgactggggccaaggcaggaggattgcttgaggccagaagtt

SEQ ID NO: 458880 - DNA, 576 bp, Homo sapiens
ctttctcctattctgtacttgaaatttacctgatattccttgtatcaagagatagagactagtaaatagtcaatcatttaatgtgttgaatatgctcagggttatgttggtcagtaatgtctctgaaaagggttatttaagagggtgkcagatgactagggagaaaatgtgactatgaatgttgggatttgggaaaagagatggtttggggatacttggggaaaaaaaatgttcagacgggagaacaaacatcatgtattaaggtccagagataaggaaagtatggctgctcccaggaactgaaaattgctcaggatagctatataggttgagatatcagatgaattaaagctgaagagaagtagcactgactcttgtaagactttataaactatgttgcagggtatgaacagtatcctaagaacaacagagagttactattttaagctaaataattatattccctttcctttcacaatggaaaaccatttttagcataactctttgttattagacttaaaatgtaaaattgtactcatacttatttgtatctcatataatgctacaaaggttttg

SEQ ID NO: 458881 - DNA, 552 bp, Homo sapiens
ggtttattaatcgaatagaatgtgttstgttttcctcaagaaaatagagattttaccacttgtccagatcttctatttaaatatataatcactaaactttttttaaaaattgcattttcatagtcagttgtttccttaatttcattgttttatatacatttgctttgttctgtcatctttctcagtatgattctgtgatgtattttatcaattttcttttagtcattggaagagtgtctttatcagacaaacaagtggctgcatttctggtctaatttgaagaatactgaaatgtcccagaatatagaggaagagagaagtatataaaaccctggctttgagggaatttgagctaagaacttaattttctttatttggttatgttgctgtgaaatcagaataaaagagaatattgcaggaattttgcaacaaagatgtagtttatggatgttaaagaattaacaaaggataacccatatctggattttttaatactttttttaaaaaaagaaatctgtctttcctatctttttttttttttttttttttttg

SEQ ID NO: 458882 - DNA, 556 bp, Homo sapiens
gttgcagtgagccaggatcacaccaatgcactccagcctgggcgacagagccagactccaactcaaaaaataaataaataaataaagattcttccattctgactcccccagtgtcctaaggacagtgcatctgacccctggcctggaaccaaggcaggtcctgggaatgctggtcttaaccaccagattgattgtcagcctggataataagagatgatccttgttggctgaagcactgctggagaaaatcgtacactggtgcaggaggtcctggtacaagtgctgagtctttagcttctacaggtcttgcagtgttactccrtaatcctgttccttgcttaattcactttacctttcacctgagtggccaccaaaccttcgcaagtcttcaaacctcttgcccaacctaactttcaggttcctaactctcaggggaatccttacctcctaccaacttagttgtactgattcttattatcatctccttccctcttgccttagacggtgagatcccttcccttggtcaaggcctccatctatgtcctcaacccctttc

SEQ ID NO: 458883 - DNA, 614 bp, Homo sapiens
aacttaaattgaaacatgaattgacataaacacacccatgacagctgcttccggaagggaagtgtgcagataacaaaattgtgttraagggatattttgactagtttcataatgccaaatgtcatttttttccggtagtacttgcacagattttttttatttattaaaataacagctacaacttacattaagcttgtagaaaaaaaaaaagcatttcttcttaacattcagtgtaaatggcgtgagtctttataagaatctctttttctagccctctaccctttataagtccataaaaagctaggagtgcctttagcccaagggggagtgtcttgcaaatatgagagaaaaccaaaacttgatcccctggcgggcaggatatttttctctttaaaggaagtgattttgtttggttagatggtgccactggccaccttggcaacatccggggctccttgttcctgctggtcagctagtggtctgtcaaattgcagagggggatgaagctgagtgttcatcatgtgttggttcacccctgtgttactgttccttcatggcccttcctttgcctatatttgttttgctgatttatttgtttggccaggtatgttttc

SEQ ID NO: 458884 - DNA, 614 bp, Homo sapiens
aacttaaattgaaacatgaattgacataaacacacccatgacagctgcttccggaagggaagtgtgcagataacaaaattgtgttaaagggatattttgactagtttcataatgccaaatgtcatttttttccggtagtacttgcacagattttttttatttattaaaataacagctacaacttacattaagcttgtagaaaaaaaaaaagcatttcttcttaacattcagtgtaaatggcgtgagtctttataagaatctctttttctagccctctaccctttataagtccataaaaagctaggagtgcctttagcccaagggggagtgtcttgcaaatatgagagaaaaccaaaacttgatcccctggcgggcaggatatttttctctttaaaggaagtgattttgtttggtyagatggtgccactggccaccttggcaacatccggggctccttgttcctgctggtcagctagtggtctgtcaaattgcagagggggatgaagctgagtgttcatcatgtgttggttcacccctgtgttactgttccttcatggcccttcctttgcctatatttgttttgctgatttatttgtttggccaggtatgttttc

SEQ ID NO: 458885 - DNA, 614 bp, Homo sapiens
aacttaaattgaaacatgaattgacataaacacacccatgacagctgcttccggaagggaagtgtgcagataacaaaattgtgttaaagggatattttgactagtttcataatgccaaatgtcatttttttccggtagtacttgcacagattttttttatttattaaaataacagctacaacttacattaagcttgtagaaaaaaaaaaagcatttcttcttaacattcagtgtaaatggcgtgagtctttataagaatctctttttctagccctctaccctttataagtccataaaaagctaggagtgcctttagcccaagggggagtgtcttgcaaatatgagagaaaaccaaaacttgatcccctggcgggcaggatatttttctctttaaaggaagtgattttgtttggttagatggtgccactggccaccttggcaacatccggggctccttgttcctgctggtcagctagtggtctgtcaaattgcagagggggatgaagctgagtgttcatcatgtgttggttcacmcctgtgttactgttccttcatggcccttcctttgcctatatttgttttgctgatttatttgtttggccaggtatgttttc

SEQ ID NO: 458886 - DNA, 500 bp, Homo sapiens
gttcaatttatcaatatgtatatctataccaatatcgcacaatcttgattactacagctctatagtaagctgtcaamtcacattgtatgagtcctccaactttgacctttataaaaatcattttggcctttctcactactttgcctgtccatataaatttcagaaacaggtcattgatatctacaaaacatgtgattttgattagaactgcattgaatttgtggatcaattggtagagaattgacatcttaacaatatcaaatgttctgattcaagaacacactcttgctcatttatttgcatcttctttcctttattttatcagtgttttatataatccagtatgcaaatactgcacatattttattaagtttatacctaattacttatttggggggtgctattattattgtttctttaaaacaaattcaaatccaattgttgctagtgtgtagaaacacaattaattttggaatagtgagcttacatccagcaaactt

SEQ ID NO: 458887 - DNA, 453 bp, Homo sapiens
attgatcttcaaactagttgttctgctcattattgagaagaaagtatggcaatctctgtctgtcattgttgaattgtctacttctctcattatttccgtcagtttttgcttcatgtattttggtgctctgttgttaggttcatttatcttcctgatggattgaactttttgtcattataatgtgtccatcttaatcgctagaacttttttgcattaaagcctattttgtcttatgttactagagtcacttcacttcagctttcttgtggttgttatttgcatgatatatctttttgcatccttttgctttgaatctatttgcacatttgaatctaaattgtttcttctctagttagcatatagttagatattattttttaaacccagtctgacartctgttttttattagattgtttaatccattcacatttaatgttattatcaatatagct

SEQ ID NO: 458888 - DNA, 598 bp, Homo sapiens
ccaccgtgtccagcctcctttgcccatttttctattggagactcatttaaaagctctgtgcttgattaattaaaaggccataaaacaattagtaagcatattgagaacaaatacaagcaaccataattcaaaacgatttttattttcaaatatcaccttccagtgatttttcattatgaaagmtcattgttgcatgatagcagctgtaatatataattttgtattatggtttttggatttattttacatcaaatattaaagtatcatttaaatttttatcataaaataaaagtggtgagaagaagactgtttgaaaagatggcatttgttgagatacagtccaaggtgaaaagaaagctcttacagttttactatacttctttccccctctttacttcctgggttactgtttttgtctctcatactgctttgctattccctccagaaatggtccagggcagtccaagattaaataacacagcaaagccaccagcctttctcagtaagttctcacaggggacaggaaacttgcacacctggaaaaatataagcagggcactatgttggctccctagcaatgctgacactttgtataaac

SEQ ID NO: 458889 - DNA, 490 bp, Homo sapiens
tcttagtctgggtgctctaataagcagaacccaaggtaaggattagagcactgctgttttatttggtacaaacccatgagagtgaaagtgagaaagaaaaagggcaatgaggcaagcaaaaataagtgacataatttgttactgcattggccacagcttgatgataagccaagaaactagagcataggtaacttggcatctatgtctctttgtaccaggattcctctggaaggtgcaagaagaaaccacatgtcacagcagtccatggaagggaraaaggaggaggaatttatatgatcagctccctcatgcctcctgttttccattggccaaggtttacctcacagagaactaacgcccctttacttctagattgtgtcatccagccccttgtcagtctttcaggaagccagatgccccctgagtgtggtgtttcatccaagtctgaaaatggagtggatgttgtcatggattagcccagagtatgggt

SEQ ID NO: 458890 - DNA, 587 bp, Homo sapiens
gtatagatatgaatattcatgaagggggaactcatacatgcataataagcaaatatatatgttacacgcatcccatgttcactttgggatggagacttaacatttaaatgtattacaatttggccctatatgtcaaaaggtgaaacaaagaacacagaggtgtcttgtgtacaacctttataaaccagctaaaaccagtccatggaaagaagaacataaggaagaaacacaaggtataactggtcatttgctgtgtcaaaaccacaaaaagggaagggagtctggttgcagcatcaggcgattggatgaagtcagtgatggaacaaatcttctgttttttgtttttttcagggttggtttctgtttaactcaggaaataatctgggaaaggttagcgaggaaggggttgtactgaggtgtgagcaaacctctgtcttttcatggccagggaacttagttttcagtttttctgggatccccttggccaagagtaggggcttaggrttctattttaatttcacaccaaaacccaattctgctggcatcttgatcttggacttccagccttcagaactgtgagaaaataa

SEQ ID NO: 458891 - DNA, 619 bp, Homo sapiens
gtagttataaaattatgtgttatgggatctcaggccacaaatggaagattcctgggactaatggcacacacttgctctgttggagatgtacagggaccagcacacctgaacacagatgtagcttattgatacttctgctgaagagctatgagatttatttgtttttttgggaagagcacatrtgagtccagtattgtactctactggatgtcaccaatggatgaccaatttaggggctacacaactgtcagtccaaaggtagcataatcatgacttggtcttggcctgtccatcactttctagccataataacactctattctattgcatatttcatttattctatcttttaacatatcttataggttactaatttactatttacatttaaacacttttatatattctgcctgtatcacaaactacatgcttatttattacttacacttaacacattctataaattttgtctgtattttataagcttctagcttactatttattgttaacacttcttatgactttcttctattccatttaattttcttttctatagcagagttgaattattgaattatggcagaaatatgaattatattattatcctcaaataatacaa

SEQ ID NO: 458892 - DNA, 587 bp, Homo sapiens
tatagcactataggtttatattagacatgagaaaaggtcttaaaacagtmcaacttgttacctcaagaaactggaaaaagataaagtaaacccaaagcaagcagaaggaataaaacatcagcagaaatcaatgaaattaaaaactagaaaacaatagagaaaaaaacaagtgaaacaaaaatctggctcttcgaaaaaagtcaatagaattgataaacttctaacaagactgataaatagagaaaagatacaatcacaagtatcaggaataaaataagagacatcaatattaattttgcagctatcaaaaagataacaagcaaatactacaaataactttttgttcatgaatttgtcaacttagaagaaatggatcgatttctcaaaagctactaaaactccatcaagaggaaatagataatatgagtagctgtgtgacgattaaagaaatcaaatttataatttaagagcttataaagaagaaatctccaggaccaaatggtttgctggggaattcaaccaataatttaaagaagaattaacaccagtatttcacaatctcctccattttatgaggccagttatta

SEQ ID NO: 458893 - DNA, 587 bp, Homo sapiens
tatagcactataggtttatattagacatgagaaaaggtcttaaaacagtccaacttgttacctcaagaaactggaaaaagataaagtaaacccaaagcaagcagaaggaataaaacatcagcagaaatcaatgaaattaaaaactagaaaacaatagagaaaaaaacaagtgaaacaaaaatctggctcttcgaaaaaagtcaatagaattgataaacttctaacaagactgataaatagagaaaagatacaatcacmagtatcaggaataaaataagagacatcaatattaattttgcagctatcaaaaagataacaagcaaatactacaaataactttttgttcatgaatttgtcaacttagaagaaatggatcgatttctcaaaagctactaaaactccatcaagaggaaatagataatatgagtagctgtgtgacgattaaagaaatcaaatttataatttaagagcttataaagaagaaatctccaggaccaaatggtttgctggggaattcaaccaataatttaaagaagaattaacaccagtatttcacaatctcctccattttatgaggccagttatta

SEQ ID NO: 458894 - DNA, 587 bp, Homo sapiens
tatagcactataggtttatattagacatgagaaaaggtcttaaaacagtccaacttgttacctcaagaaactggaaaaagataaagtaaacccaaagcaagcagaaggaataaaacatcagcagaaatcaatgaaattaaaaactagaaaacaatagagaaaaaaacaagtgaaacaaaaatctggctcttcgaaaaaagtcaatagaattgataaacttctaacaagactgataaatagagaaaagatacaatcacaagtatcaggaataaaataagagacatcaatattaattttgcagctatcaaaaagataacaagcaaatactacaaataactttttgttcatgaatttgtcaacttagaagaaatggatcgatttytcaaaagctactaaaactccatcaagaggaaatagataatatgagtagctgtgtgacgattaaagaaatcaaatttataatttaagagcttataaagaagaaatctccaggaccaaatggtttgctggggaattcaaccaataatttaaagaagaattaacaccagtatttcacaatctcctccattttatgaggccagttatta

SEQ ID NO: 458895 - DNA, 600 bp, Homo sapiens
gctgaggctggcggatcacgaggtcaggtgttcgagaccagcctggccaacgtggtgaaaccccatctctactaaaaatacaaaaattagccaggcatggtcgtgggtgcctgtaatcccagctactcaggaggctgaggcaggagaattgcttgaacctgggaggcaaaggttgcagtgagccgagattgcrccactgcactccagcctgggtgacagagcaagactcagtcttggaaaaataaaaaagagaaaaaacttcacgaagacaagacacatgaggaattgctgacataccttatctccccttctcacttctgatggacaagagactagtccttaacaagttactcttatctgtaaggtcccccaaaataaatgtgcgcacagaagacaactatcaagagaacagttattactcagagctctccactgggccacgtgaagcctgttgcctaattcttcaaaaagctatcctgatttttgtaaagaagtcagttgggcatttgtaacttcctgctctttaggactttgctactaaactggggaccatgaattgacagaataggcataactcaggaggttcctagaaatgtagat

SEQ ID NO: 458896 - DNA, 636 bp, Homo sapiens
ttttgtatctggcaagagatagagatctaatttcattcttctgcatatggatatctagttttcccagcatcatttcttgtggaaattgtcctttgcccaatgtatgttcttgatgcctttgttgaaaattagttgactataaatgtgtggrtttatttgtgggttctttattctgttccattggtctatgtgtctgtttttatgccagtatcatgcagttttgattattacaggtttgtagtataatttgaagtcaggtcatgtgatgcctccagctttgttcttttttctcagaatcttatatttagaaaaacctaaagactccaacaaaaaacctgctagaactgataaacaaattcattaaatttgcaggatacaacatcaacatacaaaattcagcagcatttcaatatgccaagagcaaataatcttaaaaaaaaagaaagaaaaaaaaaacaagaaataatcccatttataatagctacaaataaaataaaacacctaggaataaaccataccaaagaagtgaaagatttctacaatgaaaactataaaacactgatgaaagaaattgaaaatgacattaaaaaatggaaaggtattccatgttcatggattgcaagaatcaatattgtt

SEQ ID NO: 458897 - DNA, 566 bp, Homo sapiens
gttcctttctttgtgggtgacttttgttttgaagtaaaacctgcaaaataacaggacagggtggaagggagatgggatcccctctttatgaagaagcagcagtcctgttttatcacctcttcattttctgttattgagaattcaagaagaaggaggaggaagagttcacatccacagactggtgtggttgaatagttgtctctactgtattccaaatagcagccaatgaggctgttacagtgaagccagtcccaagataattgttctgtacccctattctctaagaagctaaattgtgttagactgaaacccataaggaaccattgttcaaagttggcttgytcaaaagtaaagatttttaatagtttctcttaattagattattttctaagacatagaattatgattactattttatctctataattttcatctctataacgtttacaaatactgaaataacctttggaaaaaattggcttttagctttacttttgcaatattttattttatccccataaaagcctaggaaattggtactatgacttttagtatgttcatttaat

SEQ ID NO: 458898 - DNA, 400 bp, Homo sapiens
tttaagagaaaggatgttatggtacagaccaagtagatgacataaatgaacaccaccttaaatcagagttttaaaaataggccctgaactgaagcaagaggtaaactagrgaagcctcaggagaactgagacttctccagagagaagtatctgggatttaacttctttctaatgaggcttggttttccatgaacttttcctttaaaccaaggggggtattgctcatctttctgttgagccccgtttgtcataattgtaaaatgggtggttacatccttctggtgatctaggagccctattttcgtcctagcatacagcatttttctaaaatttgctgttagctttcatgattcttaccctaactattctttttctaaaaaacatttgtttcagctttacc

SEQ ID NO: 458899 - DNA, 400 bp, Homo sapiens
tttaagagaaaggatgttatggtacagaccaagtagatgacataaatgaacaccaccttaaatcagagttttaaaaataggccctgaactgaagcaagaggtaaactagggaagcctcaggagaactgagacttctccagagagaagtatctgggatttaacttctttctaatgaggcttggttttccatgaacttttcctttaaaccaaggggggtattgctcatctttctgttgagccccrtttgtcataattgtaaaatgggtggttacatccttctggtgatctaggagccctattttcgtcctagcatacagcatttttctaaaatttgctgttagctttcatgattcttaccctaactattctttttctaaaaaacatttgtttcagctttacc

SEQ ID NO: 458900 - DNA, 400 bp, Homo sapiens
tttaagagaaaggatgttatggtacagaccaagtagatgacataaatgaacaccaccttaaatcagagttttaaaaataggccctgaactgaagcaagaggtaaactagggaagcctcaggagaactgagacttctccagagagaagtatctgggatttaacttctttctaatgaggcttggttttccatgaacttttcctttaaaccaaggggggtattgctcatctttctgttgagccccgtttgtcataattgtaaaatgggtggttacatccttctggtgatctaggagccctattttcgtcctagcatacagcatttttctaaaatttgctgttagctttcatgattcttaccytaactattctttttctaaaaaacatttgtttcagctttacc

SEQ ID NO: 458901 - DNA, 505 bp, Homo sapiens
aatggaatcacctacagaaagaataggttgaaggcaagtcctgaaaaaatctagataagccatagaaatggtccaaattaaagctatgctgacttctccaaggaagaaagagagttttgaagaatccttggggaatgctaatgatttcagagaggtggaaggtggagtagccagtgcctgggacaaaaggaacaatcacaaacagaaggaaaatcagaaatcattgtgttatggaagtccaagtcaggggactgagtttcaaggagactgtggtaacgaacataacacatttcaaaaggtgaagataggccattgaatttggcaattaaaagccatgggtgactttaaataaggtagctatgataaaaagatgaagacctaaactacattgtacaaggttmaggagtaagtagaagaagccctcttcaatactaaaaatatgttgataagaacagagtgacataatgataacttgatagaattgatggtcttgcttgtttttcat

SEQ ID NO: 458902 - DNA, 515 bp, Homo sapiens
aatatgaatacataatctctaaggaccccaggagctctaaaattccataattctatgaggaaatttcatggagcaactgaagagatacagacaaagaggggaataagtgaaaatttaatataattatcaactgaattcattgcttttgaagtgttcttatgacacttatggaattgtaaaactattgaaagttttatatagtttaatctattaatgatttattgtcatgaattctgccttaggtatcatatttagaaagccttttctcattctaatataaaaatatgtacctacattttctttgggttttgatattgttctgtttgatatttaaatccttaatttacttgtaaattctttggtatttcaaatggggtatttagctttattttgtttcaaatatttagtcaattttctaatgttatccaaaaaataattcatcctttacccacaaatcyttcatttaaaaaaaatttttttaagagacaggatcttggagcttctatatagctgaa

SEQ ID NO: 458903 - DNA, 659 bp, Homo sapiens
gagctactctgatgtggaccttttccattttgctaatatgcaagtggtctttcttctagaagctatacatgttaaggccagctcactgtcaccaatagtaacataaataattaagatacacattctcttctagtaaaatgtggttttacaaagacctaatagtacttttaagtgggattaattgtgaaatctcttttctttctttgtattcatttagcctactcctctagaatcccatgtaaccaacaaagaaatcccagctgtactgtgaatgggaaaaaaatcttactgtctgaccctaaagatgtcagcaacttactctatcaaatctctaacttyattcaccttctgtttctgccttcctataatcaattggatttattctaaaatcatggtgcacttcaggatatttacttttaaatcatagaaacaataaagaaggtcttactagatgcaaggctcaggatttttttctattattgtattgccatcactattttttaagaaaaatatcagactttgttgataatgggatttttctcttgatgttattatatatatatatatatatatgccttttatatgttttcaaaatattccttgtttcactgtaatattttagtactctaaaatagttacagaaataatcattatcacat

SEQ ID NO: 458904 - DNA, 538 bp, Homo sapiens
aatgtcagataaaaaggaaaaatgtggcagatgcaaaaacattctaattgataaacaacagtcttctggcaaacccagtcatttgtatggctgccaagaatcttttaataaacaaaaactatgcgatactgctgaaatgattattacaagatggaagtactaaaacttctgaactttgcccctaagaagacatctaggacatttactcacaggtcattgagtttaaatttatacataattatttctaaatgtcataacctttgctattattataaggatgattcaagctaataaattcatcaagaaaaatatataaccaataagtaaattagtggaagagrgaaaatgtttattcccagtgaccaaatataaccattttcattttggagtaattcttctagtcttttgaagaccatacttttttgtttatttgttttagaagtttaaaaacaataaaaatttaaaaatatataacagttgcttaaatattatttttgcttctatagtcccaaagtttgcaaaactctgtaagtgactg

SEQ ID NO: 458905 - DNA, 538 bp, Homo sapiens
aatgtcagataaaaaggaaaaatgtggcagatgcaaaaacattctaattgataaacaacagtcttctggcaaacccagtcatttgtatggctgccaagaatcttttaataaacaaaaactatgcgatactgctgaaatgattattacaagatggaagtactaaaacttctgaactttgcccctaagaagacatctaggacatttactcacaggtcattgagtttaaatttatacataattatttctaaatgtcataacctttgctattattataaggatgattcaagctaataaattcatcaagaaaaatatataaccaataagtaaattagtggaagagagaaaatgtttattcccwgtgaccaaatataaccattttcattttggagtaattcttctagtcttttgaagaccatacttttttgtttatttgttttagaagtttaaaaacaataaaaatttaaaaatatataacagttgcttaaatattatttttgcttctatagtcccaaagtttgcaaaactctgtaagtgactg

SEQ ID NO: 458906 - DNA, 595 bp, Homo sapiens
ggatttttaaaaaataaaagggaagggcttatacctatatttaaacaaaytgaaaaggcatggttatatttgtttgtgagttggaacacacaagcttactataataaatcaattgagcttatctattcagtgtgtgatttagtatttatgaaatagcaagtaaatgtaagcactatgtagaaatttctaaagttttttaagctgacaacttacttcttaatttacttactttacttaatttactttacaatttactttccaggtattttggaaagaaatcaataatctagttccaagtaaaagttgaaaggaacccacactaataaaagctttgaatttgtcattgaacttccactaaagtttccaattttaagagaataaatcatgtgaaagtgcaatatttcagtttagggaaatattttcattatcaccactatcatcagtaacaaacatatattcattagtattttagattgacaggcactttccaagctcagaacaggcagttagcatcagtcagcatatactaaaaaagtatcaaagaactcataggagatcaaaaatgccaccaataggcaaataattacagtatcta

SEQ ID NO: 458907 - DNA, 648 bp, Homo sapiens
agtgtgtcaaacagggaagtagaacatactcaagatcttaatggacaatcagagacaatagtatctcccttccccatttgatccttcatgaggatcaaacggagtaacatatatcaaggaactagtgccaaccatgcagtgcgtagggatgtgcgtgactgtaactcatttgagaagatgaggcaaccctgactcctaaatcctgaaaccagaaggaatttggaactagcagtatggcagaggaaactaattcacatgccaaagggatttgggttgctgtcaactttggcacagtaacctttgtttacaccagtggttaaaggcagaaatggaggccaaataacgacaatttacctctaagccccacatgagataccagataatggaggcacacgtgcctcagttttctgcttcactttgtatgcctgtggagcttaagccgtaactgaatctctttcatctcccagcatgaagaagggtagggaaaactaagttgctacccagcataatatagaagtttcagttctattagtttggatttatcctcaaatcctttcaaaamaaatgatattttgtgttgtccaaatcctaagatctgttttagtggagtgggaaatttcatgccaattaaacaaatgtggagtaaaa

SEQ ID NO: 458908 - DNA, 531 bp, Homo sapiens
tcatcacagtatataaatactggtcataaaaaaatttacttaataaaggtatttaaacatgtttttaaggtatttaaaattattagcctttagtatctgttgataaatcttccaaaagttgtttgcatataagcttgccattgtgagttagtagatgtccattttccaggygagaaaaagatgtgagcttttctcattgtctcaggagcaatgatacttcatttctatgagatgctccctgttcttcatgacactgaaatttttcattctcaccaactctagaacagacattgaatcctttggatagcaacggcatatcataattgtgtgttcttttcaaagcactggttttagtcatgccaagtggaaacaaattttcaaccatgactttacctttcatattaaaaaaaaaaatcagacacagaatcatcagaaacaccaaattaatggtaatgatttcaggtcctactccagacccacggaagcaaagattccaggtttggggcctaggactttgtattttcatgaggt

SEQ ID NO: 458909 - DNA, 531 bp, Homo sapiens
tcatcacagtatataaatactggtcataaaaaaatttacttaataaaggtatttaaacatgtttttaaggtatttaaaattattagcctttagtatctgttgataaatcttccaaaagttgtttgcatataagcttgccattgtgagttagtagatgtccattttccaggtgagaaaaagatgtgagcttttctcattgtctcaggagcaatgwtacttcatttctatgagatgctccctgttcttcatgacactgaaatttttcattctcaccaactctagaacagacattgaatcctttggatagcaacggcatatcataattgtgtgttcttttcaaagcactggttttagtcatgccaagtggaaacaaattttcaaccatgactttacctttcatattaaaaaaaaaaatcagacacagaatcatcagaaacaccaaattaatggtaatgatttcaggtcctactccagacccacggaagcaaagattccaggtttggggcctaggactttgtattttcatgaggt

SEQ ID NO: 458910 - DNA, 531 bp, Homo sapiens
tcatcacagtatataaatactggtcataaaaaaatttacttaataaaggtatttaaacatgtttttaaggtatttaaaattattagcctttagtatctgttgataaatcttccaaaagttgtttgcatataagcttgccattgtgagttagtagatgtccattttccaggtgagaaaaagatgtgagcttttctcattgtctcaggagcaatgatacttcatttctatgmgatgctccctgttcttcatgacactgaaatttttcattctcaccaactctagaacagacattgaatcctttggatagcaacggcatatcataattgtgtgttcttttcaaagcactggttttagtcatgccaagtggaaacaaattttcaaccatgactttacctttcatattaaaaaaaaaaatcagacacagaatcatcagaaacaccaaattaatggtaatgatttcaggtcctactccagacccacggaagcaaagattccaggtttggggcctaggactttgtattttcatgaggt

SEQ ID NO: 458911 - DNA, 579 bp, Homo sapiens
ggatttttatatttgtgtctgcattcaatctactgcaataacagcaataaaagacaaataatgcattcatatgattatgaaagtactttaagttatactttattaaaatattcataatcaattaaagaattcattatgtatatcatagaattagtccaacttgtcctatcacatctacgtcacttcatttatacattaatgtttgttgggaatcctagatttgattcatatacagctacccggagcgaratataaaaactgatcatttctggtgctgttttatatggtattagtttgacatcacccataatcctttctatattctcctctgtttagaaggggagcatgtttgaattctctttcctatgatgtgtttctgcttttgtcttaatgaaagggttttcattcattggggcagttgtgagcaggtgcacaggctgataacagaaacttatggtggcttctgggtgaactcctgggaatcacccacacagtgctgcaggcacctgaaatctgccatcatggctccccttttattcctgagcttcacttgcagcaactcccaggaaagttcctgta

SEQ ID NO: 458912 - DNA, 590 bp, Homo sapiens
ggattcctaagatatccaactccaggctctgactcctggatgacatcgctggacccgcttggggctgagggtaactcaccaccttgaaaggaaggacacaaggctggctggcttcatcatctgctaatcgtagagccctagggccatgaataaacataggcggcagccaggtartggttacagcaggccttgggcgagactcagtgctgtgctggcttcaggtctgacccagcacagtcccagtggcagtggctacagggtagtgcttgtattacccacccctcaacttcaggaagctcagcacagagacagaccctccatttgtttaggggaaagtaagggaaaagaacaagatactctgcctggtaatccagagaattcttctggatcttatccaaaaccaccaaggtggtacctctataagtctgcaagagctacagtgttactgggctaagggtgcctcctaacgcagatatggctgcagtgaccaagaacttagatcacagcactcaagtccctttgaatacctagaaagccttccaataagggtgggtacaaacaagcccagactgtgaagactacaacaaata

SEQ ID NO: 458913 - DNA, 590 bp, Homo sapiens
ggattcctaagatatccaactccaggctctgactcctggatgacatcgctggacccgcttggggctgagggtaactcaccaccttgaaaggaaggacacaaggctggctggcttcatcatctgctaatcgtagagccctagggccatgaataaacataggcggcagccaggtaatggttacagcaggccttgggcgagactcagtgctgtgctggcttcaggtctgacccagcacagtcccagtggcagtggctacagggtagtgcttgtattacccacccctcaacttcaggaagctcagcacagagacagaccctccatttgtttaggggaaagtaagggaaaagaacaagatactctgcctggtaatccagagaattcttctggatcttatccaaaaccaccaagrtggtacctctataagtctgcaagagctacagtgttactgggctaagggtgcctcctaacgcagatatggctgcagtgaccaagaacttagatcacagcactcaagtccctttgaatacctagaaagccttccaataagggtgggtacaaacaagcccagactgtgaagactacaacaaata

SEQ ID NO: 458914 - DNA, 568 bp, Homo sapiens
attcaaagaaagaaaggcttagacaacacctgagaattggcaacagtcaatacactagacaygagtggggtgcaacccacatttctgtctgcgcatgttcctaagggctttcaaatgattggttggctccctgcatatgcatgctcaataacttgcatgctcctgacaagcaaaaatttaaatcaagttctcagtacaacaaatagaaaatgaaacaaacagaaaagcaactgctacccatgaaagaaaaaaaaattactagtgaatgtatactccaaacgaaagagtcatttgcttttcacaataaatctttcaaatatttatattagaaccttgttttctctgagccttctgagtgccaattaaaataagaatctcattttctctccttaatacatgaagcttgggattcaagtgtacttcttagactagtcttgttcatttggaaagtttcagatactggccattgtaattctaagttatccttggtgtaattcgtccatcagtttcaaacacgtaggtgaggatggatcataatgtttgaacatattgaggtctagagttcctg

SEQ ID NO: 458915 - DNA, 568 bp, Homo sapiens
attcaaagaaagaaaggcttagacaacacctgagaattggcaacagtcaatacactagacacgagtggggtgcaacccacatttctgtctgcgcatgttcctaagggctttcaaatgattggttggctccctgcatatgcatgctcaataacttgcatgcycctgacaagcaaaaatttaaatcaagttctcagtacaacaaatagaaaatgaaacaaacagaaaagcaactgctacccatgaaagaaaaaaaaattactagtgaatgtatactccaaacgaaagagtcatttgcttttcacaataaatctttcaaatatttatattagaaccttgttttctctgagccttctgagtgccaattaaaataagaatctcattttctctccttaatacatgaagcttgggattcaagtgtacttcttagactagtcttgttcatttggaaagtttcagatactggccattgtaattctaagttatccttggtgtaattcgtccatcagtttcaaacacgtaggtgaggatggatcataatgtttgaacatattgaggtctagagttcctg

SEQ ID NO: 458916 - DNA, 568 bp, Homo sapiens
attcaaagaaagaaaggcttagacaacacctgagaattggcaacagtcaatacactagacacgagtggggtgcaacccacatttctgtctgcgcatgttcctaagggctttcaaatgattggttggctccctgcatatgcatgctcaataacttgcatgctcctgacaagcaaaaatttaaatcaagttctcagtacaacaaataraaaatgaaacaaacagaaaagcaactgctacccatgaaagaaaaaaaaattactagtgaatgtatactccaaacgaaagagtcatttgcttttcacaataaatctttcaaatatttatattagaaccttgttttctctgagccttctgagtgccaattaaaataagaatctcattttctctccttaatacatgaagcttgggattcaagtgtacttcttagactagtcttgttcatttggaaagtttcagatactggccattgtaattctaagttatccttggtgtaattcgtccatcagtttcaaacacgtaggtgaggatggatcataatgtttgaacatattgaggtctagagttcctg

SEQ ID NO: 458917 - DNA, 590 bp, Homo sapiens
gcttcattttgttccttttgtggtaacatgttttcctaattactccttatgcttgtattgttgcattggtatctacacttttgaagmagcagatatatcttacatctttatagactggtttcagcaggaaaagcccttcccccctcaacccatctagacattctgggaaggccatctggtggggtccatggatgggcttgctgctgaacttctcgggtggactgacctgatgccagtgtttcttgggtaagcctggagcctgggtttatatgtacaggcatgcatcacaggtctacaggtaaaagtttagatcctgggtccatgggggcctgcctgacaagagagtccacagggacgggtctagcaacaaggtccacatgagaaatcctggagactgagtctgcaggggcaggactggagacatggcatctgggtccataaagatgggtctggtcctgagttcttaggatccacactgggatccacagtggaactcgttccatcagggctggccggttgtgattaggattcaggctggtgcttggattagggttaagcttatacaaaaatacttttttgtcatcattcac

SEQ ID NO: 458918 - DNA, 617 bp, Homo sapiens
ttctgtccatttcaaacaatacagataatcaggttctctataccaaaccaaatttccctttaagacagcacaaattccacatgggctattttgaaaactagtgtttttcatcatcatgacatagactgggttcaaacacttgctcgttgtgacacagaacacatataattgatactaggactcagaggcttctgaatgttaatcgtatatacctcagcattctactggatatagtccttaaaattaacaaacatacaaaatgcccaaatttagtgaccatcatattgagtcatattcttgcagttattatttgatattgaacagtttttgacaattagaacatataagctaagacatacagtttaatgagtggaaaaatattagtgaaacctgaaaaccaggtttgtttagataataacagtatcagctcctttctttggagaaggggtatatattaatataaaaatagagataatctctgatttctggtaatctttaaatgaaytaaagtaaaacctgaggtccttcgaaaagaataattgatgttaatgattagcacaattttcagattttgggtaattgcattcagggccagggtcttgatcctctaagtggct

SEQ ID NO: 458919 - DNA, 611 bp, Homo sapiens
actccaacctgggtgacagagcaagactccatctcataagtgaataaataaaacaaaaagtaacaattctgcttayaaaatgaaacctgggagaatgacaaattcatctttgcctacttttccagcaaattataaacgttttaaatacagaaaaatatttttgtgggttattcccctgcaaaaaaaaaattgtatgtgtttgtcaacaaatgctgggggaaaaaaatgtaagaatttgcttctaaaagccaattgttggccttatcattggccttttaatcttttgacaatgatggcaaaaactatgaaatttctgatagatatctttagactgcatttgggaaactagcacataaacatgacacagaacagaaatgtacctacctcattaaagaataaacagcataacataacaatgtaaagctagaaggaattttaggcagtccaatccctactcccatttttccacggaaaagacacaagccttctttaaatgcaaagtttcaagcaagattttaatagagtagatggtatgtacatctatttctcttgatgccaatgctgccacagctttagagtctagattcttaaaaattcttatcagttcagat

SEQ ID NO: 458920 - DNA, 443 bp, Homo sapiens
tataaagaaagcaccaaaaagttcatacaaaaacaacaaacatagaaaatgcttttctaattttatggcaccgagaagagcagttaattttcccgctgctttatatataaaatgtcttcaaattctaataaggatattaaaaaaaattrtgttattttaagtcaaactcatttataataatttactctttgtcaagaataacaactgggaatcatggttccagcaagttttcaagaaaatcattgttgtattatttttctatcttcaaaaaataaaaaaagttaagtaaataaatgaaacctaagcagctcactttccttgaggaaactaaaattgaaaattactaaaatgctaatattttttaataatgttgtttattgaaacattcatttaacattattttgttttatccaatattgatatatttaatagataatatatat

SEQ ID NO: 458921 - DNA, 565 bp, Homo sapiens
ggattctttttctccatgcactgagcaactgagtcaacctttcttcaatacatgtcatacatatttcactcttgaaaaaaattacctaaaatatttagtcatttccaaatgattttactrtccagttcttaaaatctgaaatgataatatatttctatcagaatcaatattattccttatttaatattcctactgccatctaatcttcttatatcaatttgcaattgtggaagcaaattttaggaagattttttaagatgttcctaagtgagagcccatataagaatttaaaaaaagaggccaggcatggtagctcacgactgtaattccagcattttgggaggccgaggcgggtggatcacctgaggtcaggagtttgagaccagcctgaccaacatggagaaaccccatctctactaaaaatacaaaattagctgggtgtggtggtgcatgcctgtaatcccagctactcaggaagctgacctaggagaatcacttgaacctgggaggcagatgttgcagtgagccaagatcacgccattgcaccccagcctgggcaacaaga

SEQ ID NO: 458922 - DNA, 568 bp, Homo sapiens
caaagaaacatattgagatgtaatgggcctaattctatgtggtttatctaccaatggtgaaataaataaataataaataacttcctcttctctttcttttttaatggtgactttactccaggacaaaaatgttttatgcatctattgtgatacaaaatactgtttttttttcttttttttttttttttttaatatggaggtttactatattttctcagtagttgggtctatggtatggaagtagccatggttaatatgaaccacttaaaatattgttagtgcttaacattaattcttatttcaaaaragaaacaattttaggcaaatgaatatgctattttaagtatctgagcatggtttcttaatagcctatcatccaaagcgcattcactttatactattttctggggaggctaacagatttcttctgagctctctagttcttcactgttaggctgaggatcatgctggaaatatagttaactgcagttaggtatacaaatcagtgaaatgttttgttctataaaaaaataaatatttcattgccttttatttcatttttttccaa

SEQ ID NO: 458923 - DNA, 568 bp, Homo sapiens
caaagaaacatattgagatgtaatgggcctaattctatgtggtttatctaccaatggtgaaataaataaataataaataacttcctcttctctttcttttttaatggtgactttactccaggacaaaaatgttttatgcatctattgtgatacaaaatactgtttttttttcttttttttttttttttttaatatggaggtttactatattttctcagtagttgggtctatggtatggaagtagccatggttaatatgaaccacttaaaatattgttagtgcttaacattaattcttatttcaaaaaagaaacaattttaggcaaatgaatatgctattttaagtatctgagcatggtttcttaatagcctatcatccaaagygcattcactttatactattttctggggaggctaacagatttcttctgagctctctagttcttcactgttaggctgaggatcatgctggaaatatagttaactgcagttaggtatacaaatcagtgaaatgttttgttctataaaaaaataaatatttcattgccttttatttcatttttttccaa

SEQ ID NO: 458924 - DNA, 581 bp, Homo sapiens
gtcccagtacaaaaggatagcatgtgtttgggtgcacatatacagcctgtttgtccatcaatatagaggacttattaataaaagaatgacactaatgtaacactagtgcctcagaacaattatatttactgtcccctgaaatgcatttctcctttcttcaaatatattaggcatatggtcatatatcctgttttcataaaaatatttcctgtttcttctaaaataaaaatcagagagtgatgttagcaagatggcaagatggcagtctttgtcaccctacaataaacaatgacttaacaatccacaaataataataaccctgggtaggttcaagagtccaattaagagcaacagcaaaacattggagcagaaaacagaaaaaacaaacataagggattactaggcatacctgacatctggaaacagctagaaacaaagaagggtgaggactatcagtatcagctatacaatgggtgccaccacgrttcctggtggcctactctgcagagggctgtggcagcctttgttacagagaatctcaacagcccatgcagcatctatggattcctcacaacttttac

SEQ ID NO: 458925 - DNA, 522 bp, Homo sapiens
atttgaatggattattcaaggattcattcgttcagctcctgcacatcagggctcagaattcaktgccttctgccgcctggagttctttctgataaatcatggtaacttcatctggcttagggggataagcttcagtcaggcagtaagattctctggagcctttttgcagtgctagggatatgacaactaagcaaagacttctgagaaattgtcaagggagtccataaatttcagtggaagtagacctaggttagccatttaataatgagagtttttgccttggttttgtcagttattttttcttgtgactatttaagagactcagagacccagttgctttatccctaaaatgggcacaacttcctggcctgtaatttcattaggtggtttaaagaatacatgagatgatgagttaaaagtgatttgcacttctaaaggtgctatattgacctagcatgatgctgatttgtatttgggtatgagttgtccttataattagggtagaggttagaacaaaggaat

SEQ ID NO: 458926 - DNA, 639 bp, Homo sapiens
aagattctctggagcctttttgcagtgctagggatatgacaactaagcaaagacttctgagaaattgtcaagkgagtccataaatttcagtggaagtagacctaggttagccatttaataatgagagtttttgccttggttttgtcagttattttttcttgtgactatttaagagactcagagacccagttgctttatccctaaaatgggcacaacttcctggcctgtaatttcattaggtggtttaaagaatacatgagatgatgagttaaaagtgatttgcacttctaaaggtgctatattgacctagcatgatgctgatttgtatttgggtatgagttgtccttataattagggtagaggttagaacaaaggaatacattctccctcatagatgagtcaatccataatctccaggaacttgtttttttgttgttgttttttgtttttgtttttgttttttcccctaaaagtttcaggctgtggtaatgcagtagagtgattgcataattgattccaatctttcattgtcctcaatccatttcccctgccctacaactatgtaacatcctcccaatcagactctgaactcaaccacatgacttgatttagccaatgggatattaacatatgtgacac

SEQ ID NO: 458927 - DNA, 634 bp, Homo sapiens
agactgtgagtttcctctagttcaatgtgtaatatgaactcctagcataatgcttgccacatagaaagctctaaaaatattccgtttatctttggtgaaaggctggagggaaaatggtatattcaacattaataaatatttaacatttaaaaaatttttccttttgtaatttaccccattgtctacctccagtgaagactaattgctagaatacttcagcctgccaatgagaaaacatgttcagcmagggaagtcgggatagtaatgtcctgtattacccttgctggagggttctgtaactatccattttgtcttacttctgcccggccatttcactccactgactggttctatcatatttccatttcccaataggactcttctttccattaaatccagtggctttgctagggaatgaaaagacttgggttatgacatagggttgtcatgggcttacattgcagctgcacctctctaacttaattgggtgactccaagattcctttgtgtttttaggatcttttctttaatgatatctaattccttgggttgtcctatgtaattcatgtgtaataaacatggaattgtgcaagaccccaagttgaaagcatcagttaggagttagaccatgtaa

SEQ ID NO: 458928 - DNA, 597 bp, Homo sapiens
tacatttaatacaaataaagacaatttaaaacaggataaaaccttcttctttccttctatttattagtttgttgttttaatcataagttgatttacaagcatcctgcattggtaaacagttatttttttacttttgtattattttgaaggcatggatttttaacatatttgatgtatttcaatccattgatgttattgcctgaattgtccaacattcagccagttggcttctgatgctgtgagtgcctgggctccaggttggatcatgagtactcttgatgggccctacttttcttactatctgttatgaaaatgtttcaggctcatcttatacaccagacctaggattagccatttgtctaagaaaccctgcttttttgtttctttacttgcttgtttctttacttgtttttagtgaaaaaatagcattgcaagcccataaatagtgtgggaagggtggtctgtttaatattttaactagaaatggaatatatgagacattatatacaataagacactttgtgaaagaaatacagacatacacaagcgcacagatcacaaatataagcttagaaractgacaaaaaagtttctaaa

SEQ ID NO: 458929 - DNA, 459 bp, Homo sapiens
tccatggtgtatatgtaccacattttatttatcaagtctaccactgatcaaacatttgggttgatgctatgtctttgctattgtgaatagtgctgcaatgaatatacacatgcatgtatctttataatggaacaatttacatttctttgggtatatacccagtaatggtattgctgtgtcaaatggtatttgctatgcatccatcaaaaagaatacaatcwtgtcctctgcaggaacacggatggaactggaggccattatccctagcaaactaacacgggaacagaaaactaaatactgcatgttgtcacttataagtgggagctaaatgatgagaacacatggacacatagaggggaacaacacacactggggcctattggagggtggagggtgggaggagggagaggatcgggaaaacaattaatgggtataggcttaatacctgggtgatgaaat

SEQ ID NO: 458930 - DNA, 581 bp, Homo sapiens
tttgtatttcatgaggtaatggaagatctaaatggaaacttcctcatcctcccaacaactaacctcaaaatccatttcctcaatgtctgtcttctcattttgcccttctgttaaaattaactcagtgatctgccttctaccaatggccagtgcgttcatagtttgattcctttcatgcatacttgctcaatgatttggccatttatcccttctttctgttgaaacatacatatccctttcttaaatggtcattgataacattttataaaygtagtttagaatttctcatttttgaaaaagaaagaaaaatcttatttccttctcatttatttcctgctaccaccctatttcttctacctgttgtttttcctataccaatatttctctaagaagtcatttatatattctgtcactaacctcctctcttcattcttcaaccattgcaacttggatttctctcagaccactgtatgaagctgctcttgtcaaggtcaccaaattcagttgccccgtatttgtcttcatcttctcacctcacagcttcatttgacacatttgatgatgttctcctatttaaaaca

SEQ ID NO: 458931 - DNA, 603 bp, Homo sapiens
gttttgggttttccagttatctttactgattttcaatttaatttcattgtgatctgagagaatacttcacatgatttctgttcttttaaatgtgttaaggtgtgttttatgatccagaaagtgatttatcttggtgaatattctgtgctgtcttgagaatatgtattctgatgtgattgaatgaagcattctgtcgatgacaattagatctagttgattgaggggggtgttcatttaaactatgttcttactgattccctactgaaaacaccagcacaaggttaacaagaattacaagcctgactttaggaaaaattagagtcaggcattggacagrgtgtgctggtacactttgacccacttccctgcagctgctgcataacccagagtcacatagcacactaaccacctgctccttcattgttcctatagatagaatctctgacaccgaacatttttacccaaaaattgctaaaggtgttcttcatatcctgaatttcagcagaacagcagacaccaagcaatctgaaaacccccaccaagcaagtgactcagcaccaaaacgttgtttcttcatctccctgtcctgtgacttcattcctc

SEQ ID NO: 458932 - DNA, 610 bp, Homo sapiens
ctgctttttgttgttgttgttgttaactttgctgctttaaaatttacagtatgccatcatttttacctggcctttaaaatgtattgaaatatttggccaggcaccatggctcacgcctgtaatcccagctctctgggaggctgaggtggacggatcccctgagctcaagaatttgagatcagcctgagtaacatggcgaaacctcgcctctaccaaaaatacaacaaattagccgggcattgtggtagacacctgtggtcccagctacttgggaggctgaagtgggagaatcgcttgagcctgtgaggcagatgttgcagtgggccaagatggcaccactgtgctccatcctgrgttttgtatttcttcccaacactcccatgcttaaaatggatcctaacccttgaattcaagaaatatgctagatcccaatcacatttctcagttttgcttaaaccagatttgtctattccaattctccaccatattctctgtctcatgcagacttgcatgtgtaaaataaccttaactgtaatatctagagaaattgagaggaaaagacatagaggtgaggagatgtcagctcctgaaagatttttaaccatcataa

SEQ ID NO: 458933 - DNA, 411 bp, Homo sapiens
gcatctaccagccttaccaagtaggtagtagtagctccatatcactgcaaagggggagaaagggactggggtgattgtgcactgacttacacaaacgtcaacagctagtgagtgacagagccctaactagatctcaatgagcctgagacttcctgtggcccaatttgacaagaaaatagaactcaatggtctatctcttcagggctcacagtccactggcatgtacagtgataccagttgttaaaayactgaaatacttctcaatcagttggtaaatagctacaggttctctggatgccacatgaccacccctgtggctactctggccctttctctaggtcctcagatcttcccgctattcaaagactaaagagttaacacatggcacatcagtgaacagctaggattctt

SEQ ID NO: 458934 - DNA, 631 bp, Homo sapiens
cctcatattagcatatgtggagcagcagaggccctcacaccctggcagctagagtggaagcttgtattattatctttggaaaacaacttggcattaccttaggaagacatagatgaacattctgtgatccagtggttatattctagtggtctcatttaacacggcaaaaagaaaaacaataacaaaactggaaacaacacaagtatccactagaatatatcaacaatttgtgccatatccttgtgaaaatggccatactacccaaagtaatttatagatataatgctattcccattaaactaccattgaagttcttcacataattagaaaaaactactttaaaattcatatggaaacgaaaaagagcccttatagccaaggtatgcctcagcaaaaagaataaaactggaggtatcaaactacccaacttcaagctatacraggctactgtacacacaaaatccgagacagacacacaacttacaaagcataccagcatagtactggtacagaaacagacagatagaccaatggaacagaatataaatctcagacacaagaccgcacatctacaacgatttgatctttgacaaacctgatgaaaacaagcaatagggaaaatagtccctat

SEQ ID NO: 458935 - DNA, 590 bp, Homo sapiens
ttggggtctttggagctttagaactttagtcaagctggagtctttagattatggggagagaacctttcaaataactacgtgggttctgatgcctgcagaatgagatagaatagaaatcatgggacaaagaagatgaaagaagatcaaacgaaggtggtagtaaragactgcagagtggtttaggtttgatgcactgtattagcctctcctaaccaagaattgcttgtagtttgatatgaagccatttgggttcaggtcttttcttcaagtatttttaagttattttatgatcgcctttataaatccaaaagatataagtattctttctagttctgttaattgttaagaagaaggttctagattagttcaagctaacccatataccatcactctctcaaggcccaatgaacctggtcacaactgtcttcctttttcctcatcccaacccacatttatagaaaggtgcacctgatggcttctcttgtcttctacccctacaatttataacaatgtaacattataaaatccaacactctatccaaccatcatctgacctgcatatggaggaaaagtgagtaattaatgatgtg

SEQ ID NO: 458936 - DNA, 491 bp, Homo sapiens
tcaaataatgcatcactaaaagcacattttatatatatatatatatawaatatatatatatatttatatttatcatcctttcttaaaattaatgagggatttaagattcccaagtactaagttaggtttaatatttcatggatttattaaacattctattacatatatttctcattaaaaagcaccaacctggtacattgggttcattgtaaaattaaacttatattaaatattatatatgtatatagtatatatatatatgtatgcatatgtgtatacatatatttaatggtagaaaccatagcaaatatagacttataatttcctggaataaaagttgttaaaaattacctggatttaaaaaaattaacacaattttaattgataaatattttatgctgtaatttacgtttccagtttcataagtcagagtatgaggttaccatgcattccagaggcaaagagatattccactgtgacttaattgctca

SEQ ID NO: 458937 - DNA, 608 bp, Homo sapiens
tcccccagaattggaatcatcagatatcacagaaaagtatgctaagacattgcccagttttccactgaaacacatttttcccctacatggctcaaacaggatgaagccatgggttcaactattgaagtttaagtgagtgtatccatacctaattttcctttctttcttttttcttaggtgaactctactagacgatgaagtaatgcctgcatgtttttctgtcaatacaaaataatcaataatttgctttacagttttgagaaaacccattgatgctatgacaaaggttgcctgccttttccattttgctgctgttttcatattttttcttttttcttctaaacatcttaatgagtcagaagtatcatgatagaaaactgttaagctggtattatatgataccagatacccttgaaaatatctcatctatgcagtttcaccaacatttacacmagacttgaaaagcacccaaggtctgtcatagccagagaatattttctcctccagcactttctgtaaggtgtgagatcatttgatttgtgcatgagatcaaaataccagatcaagtgcatcagtgaatttctaattcttggaatgccttgtgacag

SEQ ID NO: 458938 - DNA, 608 bp, Homo sapiens
tcccccagaattggaatcatcagatatcacagaaaagtatgctaagacattgcccagttttccactgaaacacatttttcccctacatggctcaaacaggatgaagccatgggttcaactattgaagtttaagtgagtgtatccatacctaattttcctttctttcttttttcttaggtgaactctactagacgatgaagtaatgcctgcatgtttttctgtcaatacaaaataatcaataatttgctttacagttttgagaaaacccattgatgctatgacaaaggttgcctgccttttccattttgctgctgttttcatattttttcttttttcttctaaacatcttaatgagtcagaagtatcatgatagaaaactgttaagctggtattatatgataccagatacccttgaaaatatctcatctatgcagtttcaccaacatttacacaagacttgaaaagcacccaaggtctgtcatagccagagaatattttctcctccagcactttctgyaaggtgtgagatcatttgatttgtgcatgagatcaaaataccagatcaagtgcatcagtgaatttctaattcttggaatgccttgtgacag

SEQ ID NO: 458939 - DNA, 385 bp, Homo sapiens
acttccaagactgggtcataaaggacaccacagctgttctttgctctctcaggtcattctgtctggggaaagccatctgccatgtcataaggacactcaagctgtcctgtggagaagcctacatgacaaggaactgaggactccttggcaatagccagtgacgagtttaggcctttagccagcagtcgtgagtgtgccattgtggaagcagagcctttggcccataattttcaaccaaaggtgattttatacccccatggacttgtcaatgtctagagacattttggttgtcacaactgggaggtgggggtaatactagcgtgtaatggktggaggccatggatgctggcctcatagatatatgaggtatatattcatccccaaa

SEQ ID NO: 458940 - DNA, 562 bp, Homo sapiens
ccttaactgtgggctgtacatagtgaattctatctaaagaatacagtacagaaagggaggaaagagtaactttatggagaaaactgacaaacactacttcaattaggtaatcaaggtcaacatcaacagtcataaataatgatgatagtatggcaccttgcctttgtgaccttcctccttaaaatccataaccccagcgtaataatgagaaaaacatcagataaattctctaagagtggggcatcttaaaatatacctggaccagtactcctcaaaactgtcaaggtcattaaaagcaaggaaaagcctgagaaactacaaagtctagaagagcctaaggagacataactaaatgtaatttggtatcctggatggaatcccggaacagaacaaggacatcatataaaaacacaggaaatctgaataaacaayggacttagttaataataacatactaatactggttcactaattgtaacaagtgtaatatactaacgtaagatgttaataatgggaaactgtgcaggaggagggatatatgggaactctctgtactgtctgc

SEQ ID NO: 458941 - DNA, 613 bp, Homo sapiens
attaacagtttgcagaagagtcacccagatgatttcttcttcttcttttttttttttttaaataagatagggttttgctttgttgcccaggctggtcttgaactccaggcctcaagcgatacttttgccccagcctcctttagtgctgggattataggcatgagccactacactcagtccagatttcttctatgtattcactaatcttctttttaacaaaaatgggattgtgattttttgttgttgttgttgttgttaagagacagggtcttcctctgtcacctaggctcaaataatcctcatgcctcagctacaggagtagctgagactatgggtgtgtgccaccatacttgactaattttttgtagaggtggggtcttgctatgtcgcccaggccagtcttgaactcctggcctcaakcaatcctccaccttggctttttaaagtgttgggattacaggcatgagccactgccagccaaggactgtgttatacatagtgtacataatttgcttttccacataatacctctaagattcatctttccaagtcagaacatataaatctatctcatactgacaaacatcatagctgttcatttttattttctttt

SEQ ID NO: 458942 - DNA, 492 bp, Homo sapiens
gtagggaaggcacagacaagatttcatccaccctggacagctttcctgagcctagtgggactggctttccctgaatcttaggcctctgttttcccttgctgcctgtgtgtaagtaataaacactcttcgtgtaatttgtgtgtgagagcattctttctctctggggtctggaaagcaacaaaagtgtagcccaagatgcagtggtctgaagtgcaaatcagggcacagtgaacctgttccacactgccttgtgattctcttactggggaatgtcaggagctccacagagcatctgtatctaccataggctcttcaggagcaactgggtctgcttagtctatggcccaagcagcaggaagcttttatcatgggcttgttctgccacagaaccctctctttccctggccccagctttacagattacatagtaaacggaatagagtagcacaatcaaatgcagtatatccraagtttaattcaaagtccaaagac

SEQ ID NO: 458943 - DNA, 606 bp, Homo sapiens
gaggaactgtccagaatagccagggctctgttccagtcccttctagaaatagaatgtccttcagtgctttgccaagcatgtcaagttgctctgtgatataaaacccagggtggctgctctctgaggtcccccagtggcagtgcaagtagggaaggcacagacaagatttcatccaccctggacagctttcctgagcctagtgggactggctttccctgaatcttaggcctctgttttcccttgctgcctgtgtgtaagtaataaacactcttcrtgtaatttgtgtgtgagagcattctttctctctggggtctggaaagcaacaaaagtgtagcccaagatgcagtggtctgaagtgcaaatcagggcacagtgaacctgttccacactgccttgtgattctcttactggggaatgtcaggagctccacagagcatctgtatctaccataggctcttcaggagcaactgggtctgcttagtctatggcccaagcagcaggaagcttttatcatgggcttgttctgccacagaaccctctctttccctggccccagctttacagattacatagtaaacggaatagagtagcacaatcaaatgcagt

SEQ ID NO: 458944 - DNA, 336 bp, Homo sapiens
ccaatcagcagctggcctggcatactgggtgtgtgctggcaaacacttggtgagccatgttgactggaaaggttccattctgcaacatgtctctgattcttgataggaacatttggactatccccttttgtcctgggagrtaagaggacgcacctaataggttgttgtgacaatgaaatgagcaaatgcaggtaaatttcctagagcagttgacagcacagatgtacactgccttgctggtccttcagggtcttagatttcaaccctctcatcccactgtgacagggatgcttgtagggtcctttgccctaactcactatggctccagatagttgt

SEQ ID NO: 458945 - DNA, 584 bp, Homo sapiens
aggtggcagactgaagatcccagagaactagacagaggtcagtggagagtggagacaggaggacataggctctctctctggggtgtgggaagggacaggaccaccatcaggttcacatctgcattttttggggaccaaaggcttcttgccctgggagagagaaagcaggggcgggacagttggtcccctcccatccaccctgcccaagcctgtcctgagtggtgtcttctgactttcttgcactgtcgaggggacrataaccacacaaatgacaacagatgccggcctgggaatggaacagcatttcctaagcaagggctggacttccctctcttttgtgccagatctagtgtctccaggttagactgcattgggtgctcttggtctgaaatgttcaaatcctggggctccctggaagggtctggagtggccatctggagccctcttactcttgcatatgtggagctgatgcactgtgagcacctactgtgtgcacagcctgtgcaaaaggttttatctgcgcagctagttaactgaggagtcttaatgctttatgggtaaaaccaggatatggttttcatttt

SEQ ID NO: 458946 - DNA, 536 bp, Homo sapiens
gtgtactatacaaagtgcttacgtgaatttaatcctcacaacaaacctacaagatagttatccccacatgttatttatccattactgtgtagtcaattactccaaaacttagcagcttaaaacaacaaacatttattatctcatgcagcttctggggatcagcaatctgagagtggcttagctgaatggctttgggtttcccgtgatgttgtagtcacctgttggccaggactgtggtctcacctcaagacttgactggggctggaggacgtgcttccaagctcatccaagtggtcactgcaggcctcagttcctcactggctattggccatgtgggcctcttcacaagctgcctgaatggactcagggcatggaactgacttcccccacagtgaatggccagagagagagagakaacctaaaacagaacccacagcatctctcataacctcacctccaaagatactaacatcaattctgctatattctatgggtcacacagaacaaccctgggacaatgtgggaggagattgacc

SEQ ID NO: 458947 - DNA, 562 bp, Homo sapiens
tctaggagtgaggtctggggcccctgacagagttttcaaagcttcatggacgatgcccgggtgcagctggggctgagaacccatcatctcacctctagaacagtggtcttcacagtgtggcctcacagaccttggaacttgttacaagtgtaaattcttggcctctactccagacctgctaaatctgaaactctgggagtgggcccagcaggctgtgttttacaaagccccctagctgattgtgatgcagctcaagtgtgagagccaagctctggaatgttcctccaaattccctcctggaagaaatcactcacagggacccctgctgcccctaaatgaactcagggaaagtcaggttgctgagrgcctggagagtagaaagcaaagctcctggggtatcaacagcacagtagaatcaatacttgcaggggatcaatttcctgagatgggcactcagtacttcttaaataacagtgttcttgggcaattaatgctcctacaatcacaatttccagagcttgaggtcccaataatccttaaagatcagtattcctggggcatt

SEQ ID NO: 458948 - DNA, 572 bp, Homo sapiens
atccgtgcctggaaaatggggccggcatttgtgtcttgcatacgtcttggctgttgcaagscttgtgtcagatgagagcaggtatacgagtgctttggaaactccaaagctgtgttttttcaaatgtgatccatggaccagaagcagcagaaagtggaaaccttctggaatgcagcctaagcctctcccagagggcagcaggatcagggcaagaaggagacagccctttagaaaggcagctgcccagtgaagcctaaggaagtgtggcagcgccgtccaccctgtgtgtgacatggtggagggtctgtccctgagccggcagcctgtaccccacgcctctcagccccctcagaaagcctcctgccccctgcactcccagcctctcccttgtgcccattcccattgctagaattgttggcaacagtgcagcagcagcgatgacagcaggtagcgcccattttgccatgtgcaggcacggggttgttttacgttcattcatttaacccaatggagagtatctgtgttccaaacatcaaaaagggacagtaaaaatacggtcctataggactgcc

SEQ ID NO: 458949 - DNA, 572 bp, Homo sapiens
atccgtgcctggaaaatggggccggcatttgtgtcttgcatacgtcttggctgttgcaagccttgtgtcagatgagagcaggtatacgagtgctttggaaactccaaagctgtgttttttcaaatgtgatccatggaccagaagcagcagaaagtggraaccttctggaatgcagcctaagcctctcccagagggcagcaggatcagggcaagaaggagacagccctttagaaaggcagctgcccagtgaagcctaaggaagtgtggcagcgccgtccaccctgtgtgtgacatggtggagggtctgtccctgagccggcagcctgtaccccacgcctctcagccccctcagaaagcctcctgccccctgcactcccagcctctcccttgtgcccattcccattgctagaattgttggcaacagtgcagcagcagcgatgacagcaggtagcgcccattttgccatgtgcaggcacggggttgttttacgttcattcatttaacccaatggagagtatctgtgttccaaacatcaaaaagggacagtaaaaatacggtcctataggactgcc

SEQ ID NO: 458950 - DNA, 536 bp, Homo sapiens
atgtgcagcaactgcacagggctgaaatgattgactgattaattaattaaagaatatggccaatgagaccatttattgatatcattatcaatattatcaataatatcactatcctatatcaccactggtaccgttattgtgattataaatcagatagcatttatgtatctgatatcattactgtatgtccaatacctggcacactgctgaaataattaattgatttgtcaattaattaaaagaataggtcagtgagatcaagtgactttataaaggacattttatgttttcttccaagtaawgctcttttctatattctccctatattatatcatttctataaaactacaaaaaagggtgagaataataaaagaaaggaaagtgttcttagcacttctggtagccctcacattatttcaattatctatacaaaccacactcttttcaatataaattaatattccatattagcccatgaaattcacttgtctggccacactcacaactttcacctttattcacatcaccaatccact

SEQ ID NO: 458951 - DNA, 578 bp, Homo sapiens
atcaaaacatgtcattacaaaatatacactaaatacaagggagatagtattagaggaaatgagtaacaaaaacgttataacatcgaaaaacaaccaaaaaatgataatggtaagttcttctctattggtcttttaaatgtaaatggattaaactctccaatcaaaaaacagattggcagaatgaattttataaaggaacacatctgatgcaactatatactatctacaaaagacttcaagycataaacttttacaagagacaaagaagaaaatgggaaaatgataaaatggtcaatttgccaagtagacataacaattatacacatatatgtaccaaaatttagagctccaaaatatatgaacaaacactgacagaactaaaggggaaaacagacagctctacaataatagtagatttcaatatccacagtaatggatagaacaatgagacagaaaatcagaaataaaggacacgatcaacactatagaccaattggatctaacagacatatacagaatgctgcacccaacagtgacagaatacacatttttctcaagtgcacaggaatattcttcag

SEQ ID NO: 458952 - DNA, 588 bp, Homo sapiens
gagtgtactggggaatggcaggctgtggagaccagtctggggagatggggggccaaaacatcaaccaacgctaacccagatttccttccatcctttctaatttggttcttttgtgtgcctgtgtgattggccagtgctagaaactctcaggtgtgtgctctttcctaaaagcagccagatccgctttcataacctagctgattaatttccagatggtgttttatcctaaggagtcaacattcattgcagaaactgctatccttaacccaaaccacaggctatgcagaggcagaacaaatctagcagcaggagggaggctgactcccaggatgtgtgtgtggccaagcactatcccttcatcaaatcaccaccatctggctctcaagattgatctgtggtccccaggtttccttagcaataggaaaaaccaacagcgaggagatttctggtctcccttctggagtgaagtacacagaaaaacataacaaatataaagttcaactaaatccactcagtgaaaactattatagttcccactagagactgtgaaccrtccacttacaatactaatacatccacagagaaggc

SEQ ID NO: 458953 - DNA, 612 bp, Homo sapiens
ctataaactacatttatttgtattattttacttcattttatttatatatgtatatcattttactttatatatacatatattacatatttacacatatatttacatatatgtacatataaagttaaataacatacatatgcaaatatgcaaatgtatatatttacatataaatatgtaaatgtatgtgtgtacatgtatttatacatatatgtgtatgtatatwtatagcccaggctggtctcaaactcctaggctaaagcaatccttccacctcaacttcccaaagtgctgggattacaggtgtgagccactgtgtctgaattttcttttaatataaagtcccaattacagttttatttatcagttagcagcttgtttttgtcatttaccataaagttttgctcctaattttaagagaaataaacctgaaagtctgttatataccagttaccctccattagggtcttttattaccatgtgccaagcagcatcctaggaattttacatgaatagacatcttgaaataacatttaaagctcagagagattatgcaatttgcagagttgagcgaagattcaaacctaggacttgtttaaccattgtacgaggcca

SEQ ID NO: 458954 - DNA, 605 bp, Homo sapiens
ctgcatttacatttgcctctttcacatgacctctttctaggcaacagataattcttcaacaattgatccataaaagatcaaatacttctaaccctttaagcatacatataaacatacaaaaatgtgttgtcttttttcatctctgacttttcagtaatgagtgaaaataaattattatatatctagggcattttaacgatggaaatttacaagattgttttatccaatkacccaatttcttacatcaaatatttactgaacatcttctctatgcccagcacagtgcattgtattgagcactgcaagtgaaaaaatggaaaagacagatatggccccagccttcaagttatttacaacctttgggagagacagacacacgaaaaaaatgaaaaactaataaaatacaagttattttatgtgctgttaagacacaatgtggatctagagaatgactgaggtgaggaggtcatctgcttcagttggtgtactgggaaggcctctctgagcaattgaccttgaaattctggcttgaaggtcagaaaggaatcagacatttatgccaaaatggaagagtgttccaggcagagagaacaatttgtgcacag

SEQ ID NO: 458955 - DNA, 605 bp, Homo sapiens
ctgcatttacatttgcctctttcacatgacctctttctaggcaacagataattcttcaacaattgatccataaaagatcaaatacttctaaccctttaagcatacatataaacatacaaaaatgtgttgtcttttttcatctctgacttttcagtaatgagtgaaaataaattattatatatctagggcattttaacgatggaaatttacaagattgttttatccaatgmcccaatttcttacatcaaatatttactgaacatcttctctatgcccagcacagtgcattgtattgagcactgcaagtgaaaaaatggaaaagacagatatggccccagccttcaagttatttacaacctttgggagagacagacacacgaaaaaaatgaaaaactaataaaatacaagttattttatgtgctgttaagacacaatgtggatctagagaatgactgaggtgaggaggtcatctgcttcagttggtgtactgggaaggcctctctgagcaattgaccttgaaattctggcttgaaggtcagaaaggaatcagacatttatgccaaaatggaagagtgttccaggcagagagaacaatttgtgcacag

SEQ ID NO: 458956 - DNA, 540 bp, Homo sapiens
atgtttatatcagaaagtccttgccccactaaactaattatttatttcacattttcttctagttttctaccggcttcctttattatgtttagttcctcatttggaatttaattggggcatgttataagctgaagctcttgtttattgtttcaagtaattagccaatttcccatataatttatgawataaatgcatcccttccctatgtacattctattttcaaataaatttcagggctgttcattctgtctgctgattactttgccacagccatgcagttttcattattgtagcattctattacatcataatgtctgttagggtaatttcccaacacaaaaaatcttacatgtcaatggactagtattttctgctgccagaacacttggaagaatggtccaatgacctaggaaactatttggagtttgaggattttgtgtcatttcccaaatgttgttacgtatgaatctgtttcttttgcgtgccctggatttttaagagggaagaatatatgttgtacacaatatactggcaggatac

SEQ ID NO: 458957 - DNA, 552 bp, Homo sapiens
tatttaataatcaaactcccaaaggttaaagataaagaaaggatcctaaaagtagtgagacaaaagaagtaaattacataaaagggagctccaatacatttggcarctgaatttttagtggaaaccttacaggccagtagagagtggcatgacatatgtaaagtgctgatggagaaaatattttaccctagaatagtatatctggcaaaaataccctttaaacatgaaggagaaataaagactttcccacacaaacaaaattagggattttatcaagaataaacctgtcctacaagaaatgctaatgggaatacttcaattaggtagaaaagtattttaatgagcaataagaaatcattttaaggtacaaaatttgctagtaatagtaagtacaaggaaaaacacagaatattataatactgtaactatggtaaattatggaagactaaaagatgaaccaatcaaaaacaataactacaatcatgtttcaagacatagacagtacaagaagatatggacagaaacaacaaaaagttaaaaagcagaataatg

SEQ ID NO: 458958 - DNA, 586 bp, Homo sapiens
aaacctaaacaactccacaagaaaactattagaactgataaatcagtaaagagtgcaaaatcagygtacaaaaatcagtagcatttctatatgccaacaacaaacaatgtgaaaaaggaatcaagaaagtaacaccatttacaatagctacaaataaaataaaatgcctaggaattaaccaaagaagtgacagatctctacaatgaaaactacataactgatccaagaaattgaaggggacaccaaaaaatggaaagatattccatgtttatggattagaagaatcaatattgttaaaatacccacactacccaaagcaatctacagatttaattgcaatccctgtcaaaatatcaatgacattcttcacagaaatagtaaaaacactgctaaaatttatatggaaccacaaaagacccagaatagccaaagccatcataagcaaaaaataacaaaactggtggaatcacattacttgacttcaaattatactacagaggcatagtaacccaaacagcagggtactagcataaaaacagacacatggaccaatgggacagaatagagaacccagcgataagtccat

SEQ ID NO: 458959 - DNA, 586 bp, Homo sapiens
aaacctaaacaactccacaagaaaactattagaactgataaatcagtaaagagtgcaaaatcagcgtacaaaaatcagtagcatttctatatgccaacaacaaacaatstgaaaaaggaatcaagaaagtaacaccatttacaatagctacaaataaaataaaatgcctaggaattaaccaaagaagtgacagatctctacaatgaaaactacataactgatccaagaaattgaaggggacaccaaaaaatggaaagatattccatgtttatggattagaagaatcaatattgttaaaatacccacactacccaaagcaatctacagatttaattgcaatccctgtcaaaatatcaatgacattcttcacagaaatagtaaaaacactgctaaaatttatatggaaccacaaaagacccagaatagccaaagccatcataagcaaaaaataacaaaactggtggaatcacattacttgacttcaaattatactacagaggcatagtaacccaaacagcagggtactagcataaaaacagacacatggaccaatgggacagaatagagaacccagcgataagtccat

SEQ ID NO: 458960 - DNA, 550 bp, Homo sapiens
gaataattattcaattgcctattccttttaaaattcctggagaccacgttaaaaagccatttagtttttattctgggagcttttctggaagaggaagtactgaagactgacataaggaaatatttaagacaggaaagggtaagttattrtttcttttccaaatttcctggtcctagagggatccttgctatattccccagctttatctgtttcttcctgagttgtccatcttggatggacacagctaccagtatattcctttacgagacctttccttctagcactgacagggacatttcctttactttttattttagccaagataagatgggaattttctaaaataaaatcttacttagaatataagcacaaatgatgtgtgcgcacacacacacacacacacgcttcatgtaaaaaaaacacaaaaacatagaaacaaataaatgtccacatatattaaatatacaccaatattaaatatatatcaatatattaaatatataaatatccagacactagcccgtcttgcctattacagcttattaaatac

SEQ ID NO: 458961 - DNA, 550 bp, Homo sapiens
gaataattattcaattgcctattccttttaaaattcctggagaccacgttaaaaagccatttagtttttattctgggagcttttctggaagaggaagtactgaagactgacataaggaaatatttaagacaggaaagggtaagttattatttcttttccaaatttcctggtcctagagggatccttgctatattccccagctttatctktttcttcctgagttgtccatcttggatggacacagctaccagtatattcctttacgagacctttccttctagcactgacagggacatttcctttactttttattttagccaagataagatgggaattttctaaaataaaatcttacttagaatataagcacaaatgatgtgtgcgcacacacacacacacacacgcttcatgtaaaaaaaacacaaaaacatagaaacaaataaatgtccacatatattaaatatacaccaatattaaatatatatcaatatattaaatatataaatatccagacactagcccgtcttgcctattacagcttattaaatac

SEQ ID NO: 458962 - DNA, 550 bp, Homo sapiens
gaataattattcaattgcctattccttttaaaattcctggagaccacgttaaaaagccatttagtttttattctgggagcttttctggaagaggaagtactgaagactgacataaggaaatatttaagacaggaaagggtaagttattatttcttttccaaatttcctggtcctagagggatccttgctatattccccagctttatctgtttcttcctgagttgtccatcttggatggacacagctaccagtatattcctttacgagacctttccttctagcactgacagggacawttcctttactttttattttagccaagataagatgggaattttctaaaataaaatcttacttagaatataagcacaaatgatgtgtgcgcacacacacacacacacacgcttcatgtaaaaaaaacacaaaaacatagaaacaaataaatgtccacatatattaaatatacaccaatattaaatatatatcaatatattaaatatataaatatccagacactagcccgtcttgcctattacagcttattaaatac

SEQ ID NO: 458963 - DNA, 590 bp, Homo sapiens
gacaattcacctgtgttgaaatgcaaatctgagagttactgttaaaaagtatgtttaagatcaaagagaaaaaaagcggaattacattcccccaaaagaaaaaatgaatagccagacataaaaagtcagatatgaaaagagtgattaacaaaaaaccactcaccaagtaagaaattatataaatgaaaactatagatgttgatgtataatagatatcagcacgaaaaaaatattggtatataagatatctagactaggcccagttctatgagaaaattagtgaattgggaaacaattttgaagaattcattcagaatatagcagagattgataaatgggtgacaaacatgacagagaaattgcaagacatgygaggtaaaatacgaggttccaacatttatgtctcagaaataaaaagtgaaaagaatgagagaggatcaatatttaaaagaacaactgaaaaatttccataactgagtacatcatgaattctcatactgaaagcatattctgaatttttaacaggataaacaagactacatcttgtgtctcagaatcagaaagtgttgagcataacactgtgcccaata

SEQ ID NO: 458964 - DNA, 380 bp, Homo sapiens
taactgagtacatcatgaattctcatactgaaagcatattctgaatttttaacaggataaacaagactacatcttgtrtctcagaatcagaaagtgttgagcataacactgtgcccaataatcactgaaacttacagcacaagcatgagaatctaaatactgtgtagtgcaaccattctcacgatgtttgaacattgagagacaattatttatgggtctctcaaatttctgcatgtcttatattagcttttgttccagactatattttcaataatgtttgtatagcaaacagccttggaaattaaaaatactaggacagatggaaatcttatctggtgtccaggatggtaaagctaatgtttcctccaaggcaaaatttg

SEQ ID NO: 458965 - DNA, 601 bp, Homo sapiens
ggcaatttatttcattgagcttaaccaaaaatatatttccccggaatgctaaaatatgctaaggaataagaatgccagtgtctaaaaaataagaacaagtgctcttagttttccattaatttaacagaatgcattaatttctgacatctgtagtaattgtatctatgtattcagaagaggcacatatgaaattattttattcaygcaaaactttatcaaatctttaatgtgtactaggcactctgctagacactggagttactctgctagacactggagttacagtgacaagtaaggcacattcagtgccctagagttgcttactgtctagttatagagaaagatgtcaaaacaggtaagctaaatacaactggcaatgttactagaggaagacaaaccaaatcaatagcaaccaggacagaatactaactgcttggcagaaaccaggaaatgtttctcagaggggaaactgcaagaaatacgtcagacactaagttccattgaggatctgtgtggaagcatctacaactccataagcaaaggagaaatatgatccttttcagacaagcaaatgctaagggaatttactacaaccaggcct

SEQ ID NO: 458966 - DNA, 550 bp, Homo sapiens
atagcaggagggaatatctttggttttttaaaagactgtttttactcacttgcttatgaagtcattgaattctgctgaccatagctcaggctgccttagttttgggggtggattcctagaaaaataagaatcaatgttggattctgtatattggtcagtcagtgtaaaatgagaggcagagccagatagactaatgcaatcctaggttctgccagttgtaatcaaggattccatcttttccyaattccaagacagataaatcattactcatctttctttatacaaaatgacacggtctttgtttctctgtaagcacttaacatatgacctgatttttccaactgttattattttttcttttaaagagtcttcttgcttttacttagctctagggggaaacatcaatacttaacagaatagaaacaatagatactggggaaaggtatttttttcctatgagtcccaatgaagtctctgaggaacatccagggaacacagaagtggcctgtttggaatatggaggaaggtgtgccagggagtcgcacagtag

SEQ ID NO: 458967 - DNA, 549 bp, Homo sapiens
atcctaggttctgccagttgtaatcaaggattccatcttttcccaattccaagacagataaatcattactcatctttctttatacaaaatgacacggtctttgtttctctgtaagcacttaacatatgacctgatttttccaactgttattattttttcttttaaagagtcttcttgcttttacttagctctagggggaaacatcaatacttaacagaatagaaacaatagatactggggaaaggtatttttttcctatgagtcccaatgaagtctctgaggaacatccagggaacacagaagtggcctgtttggaatatggaggaaggtgtgccagggagtcgcacagtagaatgcccttatgagttgttgttctgttgttactggacacacggcaggaaacatgttasaaagtgtcaaggaactgaaaaatactattagcgataaagctgtgaatacaactttaacaattttattaattcctttcagtttaagctgaacaaatatattttttggcacattcgttgaatacaaaggaacatcatttga

SEQ ID NO: 458968 - DNA, 549 bp, Homo sapiens
atcctaggttctgccagttgtaatcaaggattccatcttttcccaattccaagacagataaatcattactcatctttctttatacaaaatgacacggtctttgtttctctgtaagcacttaacatatgacctgatttttccaactgttattattttttcttttaaagagtcttcttgcttttacttagctctagggggaaacatcaatacttaacagaatagaaacaatagatactggggaaaggtatttttttcctatgagtcccaatgaagtctctgaggaacatccagggaacacagaagtggcctgtttggaatatggaggaaggtgtgccagggagtcgcacagtagaatgcccttatgagttgttgttctgttgttactggacacacggcaggaaacatgttacaaagtgtcaaggaactgaaaaatactattagcrataaagctgtgaatacaactttaacaattttattaattcctttcagtttaagctgaacaaatatattttttggcacattcgttgaatacaaaggaacatcatttga

SEQ ID NO: 458969 - DNA, 596 bp, Homo sapiens
gcaatgacaggaaacagtttagttataagcatatcagtgtgattaaaaagtaaaaagaaggcaatgataaacacaacatatcgggcaacagacactcttgagaggaggcaaggagttgggatagaggaagrgatagaggccaatgcatgctattggtaatattctggctctggcgtggatggcgagtttatgggcaaataagaagaccattaaccaattcatttctaagtacctgaaggacaataataaattatgcatgtgcatatatgtgcatatatatatgtctatatataaagacagaatagtttctcaacttaagagttagtttgatgggacatcatcatacacagtgcttgttaaccttttctatgaaagtatttttaatatcacatgagagtgaactgctgaaatcagagagcacagcctgaagtactgagggaaacagtaaagtcctaagttttacattaaaaattcatgtggcaaatattcataggaatattgctcataataacaaaaagtgataaacacccaaatgttcatcaactgacaaatggataaacataatgtggtctatacatacaatggaatattattca

SEQ ID NO: 458970 - DNA, 555 bp, Homo sapiens
cattattttatcccttttaatggctgagtagtattccatggtgtatacatgcaacattttctttatacattcattagttgatgggcacttaggttggtcccacatctttgaaattgtgaatagtgctgctataaacaaacaagtacaagtgtctttttcatataatgacttcttttcctttgggtagatatccagcagtggaattgctggatcaaatggtagatctacttttattaatagctctttaaggagtctccatactattttccataraggttgtactaatttacattttcaccagcagcgtgtaagtattcccttttccccatatccctgccaacatctattgtattcacactttttagtaatggccattcttgcaggattatggtagtatatctcattgtggttttaatttgcatttccctgatgattaatgatgttgaacagtttttcatgtttgttggtcttcatatattttcttttgagaaatgtctattcatgtcctttgcccactttttaatggactttttttttattggtaatttgagttcc

SEQ ID NO: 458971 - DNA, 533 bp, Homo sapiens
aaatatagaaatctaaagcatataaacaaattctccccatgaaatttgttttgtggcttgaatgtcacctgataaattcccttaaaatgttattagttatctgagcaattcaactaagatagtaatttcctacataggatctataattctatattctgtaatattcttatattcttatttatattagctaagtattttatagaaataataaagtacaattttaggtggtatatgacttcatttgatatggtttggctatttccccactcaaatctcatcttcaatttccatgtgttgtggaagagacctggtgggaggtaattgaatcatgagggcaggtctttcctgtgctgttctcctgataatgaagaagtctcatgatatttgatggttatagaaaggggtgtttccctgcacaagygctcctctctttgcctactgccatccacgtgagatgtgacttgctcttccttgccttctgccatgtttgtgaggcttccccagccatgtgtaagtacaattaaacctttttc

SEQ ID NO: 458972 - DNA, 577 bp, Homo sapiens
ttactggctttgttgtttttcaattgttttttgtttattctaataatgttttaaggccattagcttagtctgactatattctgtgtgaggctacaaaagcagaaactgtgattttcyaatattcattcccgttttcactttgctcattataaaagtgctatcaatattcatgcttgagtcttttggaaacactaatctttagcaaatgcctacaagtgaaacttctggatcatgtggtaggcgtatatgtcacattataagacactgctgtatgtttccaaagtaactgaactgttttacactgccataagcagtgtataagagtacaattggctctgccacctcaccaatactcagtactatcagtgttttaattttagccattttagcaaatgtctaattgcatttcattgtggttttaatttaaatttccccaaagactaaagattttgaacatatttcatttatatggttttgtacaatgtccaaagttctagcttactacctttaaattgggtgggtacactttattagataaaattcccactattcctagtgtgctgactgtgtttatcac

SEQ ID NO: 458973 - DNA, 597 bp, Homo sapiens
aaataattcacattcttactgagttaaatcaagtttgatttcaggcagcttttaagatttgtctatttccccttcagaattagcagaattagaaattttggtctgcttaaatcacattgaggtgaaaataaaagctaaaagtcagaaaatggtagtgaaatactaccatatcagacatgattgaattccaaagccatatactgatcaaaaaacagattatcattcaagtctaaatagaaaaaaatacttatgagtagaggcatatgtttttcaaatgtatttgtaatcaatttcakgtataatttgtgacaatttatgtattacacttttgcattttcccctaaaagtgaaaaaatggtcatttttttccatatataaaatagtattcgattatttaaaaatccatacaaatgatatttattactatttcttgtttaagccctcatgtatcttctctattgtatttttggattctgtaaacaaattactgtatcatgaccaatacttgctcaagatcaacattgaatcatggatttggtgtcactgagtgcaagccatgtgaggtctacatgtgctgggacataccattcaccaaac

SEQ ID NO: 458974 - DNA, 622 bp, Homo sapiens
ctgtctgaaaaagaaaagggaacttatttaaagttctgtgtaatttttaactgttgtttggccacatttttccctcctttcacaaagaggaaaagttactttcatacactcagatggtaagagtgtaaattagtataacgtctccggaatgtgattctgcaatgtgtttaagaaccttataaaagtggccattccctttgattcagcaatcctacttcttggaatgcaacttcgagaaacagaaaaaaatttatgcacaaagatattaatctcaaaaatgttatttgtgttatcaaaaactgaaaatagcctaaatctcaatattaagagactggttaagtagtgaggtctatctgtatgatgactatcatgtggttattaaaattaatgtttacaaagaattttaaataacttgggataatgtttatgataaatgttgctacttaagttacataaaaacccatccaaaaagactggaagaaaatttgcaaaaacgttaaggatgcyggttataagctgggcatggtggtgtgttcctgtagtcccagctactctggagactgaggcgggaggatcacttgagcccaggagttaagagtccaccctgggcaacataatgaga

SEQ ID NO: 458975 - DNA, 574 bp, Homo sapiens
atagtttaaatttttttaagttttcatatattgccaaaagaatttcacatatgcatctgaaatccacttgaaatattatatttaacaaaacatatggtctttgtaaatgaaaacagacacarataagtatatcaagtccatcatttagcaacttaatttcagaatagggggtaacaggatgataggctttacttgtaaaaaaaatttacacgaacaaatcatattcacaaagcacatttaaattgatggaggcagcatattcacataatgtggcaccagtaccgctaatcctccacattgtctactagagcagtaggacttaagatgttgttgagataactggcttccattagcaagtatgtgattggcaggatgataaagtcttttcaatcacaggtcagctatttccttttccttagaagagggcaatcccgatgatctatcttttagctagtctctcatagagtcccaattctcttgccttcagctttgatatggttctaactttcctcttgtatcagctcatacttgtcatcaactcctctattcagaacagcaaatatcaggagtttga

SEQ ID NO: 458976 - DNA, 603 bp, Homo sapiens
  misc_feature (1)...(603): n = A,T,C or G
gcagttttaatttttagtgattttaagtgagaaaaatgtgaaaacattagtttggagacttgtagctaaaaaagaatttaggatttgttctaaattgcaggcaaataataaaaactcaaaaataatggacaaggctagaatctaatacatgtatactatggtttttcctttaatatgtattttttctagtcccccttttaaaaaaatcaaatacwaattatactaggaccaatttatttgtaaaataaattttagtcttaccatatttggcctgattatttgtatagtgcagcaagaatagtgattcaccatatggactttttaaaaacggacttcactggaacttttaataaggaattttggattagacttttaaaagcctcaagggtaggaaagcaagctgagcatttgccatcagcctgaacctctaatatcggtatgaaaaagagtgaaattttcacttttcaaggtccttgaagtatcttgaggttctcaggcctgccagaaagtgacattttttactaatcccaaggtcaggaaccttataagggaactgtgtggatagggtacagggccagttnttttttgtttttttgtaataaa

SEQ ID NO: 458977 - DNA, 603 bp, Homo sapiens
  misc_feature (1)...(603): n = A,T,C or G
gcagttttaatttttagtgattttaagtgagaaaaatgtgaaaacattagtttggagacttgtagctaaaaaagaatttaggatttgttctaaattgcaggcaaataataaaaactcaaaaataatggacaaggctagaatctaatacatgtatactatggtttttcctttaatatgtattttttctagtcccccttttaaaaaaatcaaatactaattatactaggaccaatttatttgtaaaataaattttagtcttaccatatttggcctgattatttgtatagtgcagcaagaatagtgattcaccatatggactttttaaaaacggacttcactggaacttttaataaggaattttggattagacttttaaaagcctcaagggtaggaaagcaagctgagcatttgccatcagcctgaacctctaatatcggtatgaaaaagagtgaaattttcacttttcraggtccttgaagtatcttgaggttctcaggcctgccagaaagtgacattttttactaatcccaaggtcaggaaccttataagggaactgtgtggatagggtacagggccagttnttttttgtttttttgtaataaa

SEQ ID NO: 458978 - DNA, 606 bp, Homo sapiens
ttggctccctgatcttggactttccagcctccagaaccatgagccaataaatttctgtttattgtaaattacctagtctcaagtattccattatagtagcacaatatggactaagacacctcctaaaggcccatctccaataccattgcattgagggttagggcttcaacatatgaattttggggttatacaaacattcagttaataacgaaagtccagaaacaaacccaaaatctatggtcaatttattattacaagggtatcaagaccatccaatggggaaagagactactatttgacaaacagtgctgaaacaactggatgtccacatacaaaagaatacagtttggccaggtgcagtggctcatacctgtaatccaagcactttgggaagctgagscagtagaattgcttgaggccaggagttcaagatcagcctggaccacctagtgagaccctataaaaaataagtaagttggacccttattttataccatacacaaaattaaaatggataagaggcctaaatgaaagccagaaatctcttacagaaaaacatatgggtaaatctttatgaccttgatttggcaatggtttcttagatat

SEQ ID NO: 458979 - DNA, 618 bp, Homo sapiens
acaagggtatcaagaccatccaatggggaaagagactactatttgacaaacagtgctgaaacaactggatgtccacatacaaaagaatacagtttggccaggtgcagtggctcatacctgtaatccaagcactttgggaagctgaggcagtagaattgcttgaggccaggagttcaagatcagcctggamcacctagtgagaccctataaaaaataagtaagttggacccttattttataccatacacaaaattaaaatggataagaggcctaaatgaaagccagaaatctcttacagaaaaacatatgggtaaatctttatgaccttgatttggcaatggtttcttagatatgacaccaaaagcacaaacaaggtaagaaaaaaatagataaattagacttcattaaaattaaaaacttttgttcctcaaagaacattatcaacaaagtgaaaataatacccacaaaataggagaaaatatgtggaaatcacatatttgacaaaggactagtatccataatatacaaataactcttgtaaatgaacaacaacaacaaaataggcaactaaattggatagacatttctacaaaaaagatatacaagtggccaacaagt

SEQ ID NO: 458980 - DNA, 578 bp, Homo sapiens
ctatagttaggaataagcaaggatgtcaatatcatctctattaccagcattggactataaatcctagacaaggtaatatgacaagaaacagaaaaaagctgcttggagtctttaagatgctggaagttttcagtgtcctctgcacaaaggtgttagttgaagccttaagcataggtgactggaagaagcatagataagtcaagccttaactttgaaaactcttatgtatatgtggygtacgaagtggagaatggagaataagaaaaaggaaggcttaagaagaaccacatgatttattattatagaagtattggaagagttttagcaaggagggagtggtcaggatgtaaattctatggagaggctgaagagaacaaaagctgaaaaccctgttttctttgtccactaaggttattggtgagctttaagaaaatggtctcagtggagggagtagaaactggtttgaaggggagatgtgggaaggagaggcagtggtgcagaccattcctttgaaaagctgggtggtgactgatagcagtggtgccacctgagatggcttgtgtggcaggggtgtggac

SEQ ID NO: 458981 - DNA, 562 bp, Homo sapiens
taggccaggcacggaggctcatgcctgtaatcccagcactgtgagaggctgaggcaggtggatcacctgagatcaggagttcgagaccagcctggccaatatggtgaaaccccgtgtctactaaaaatacaaaaattagccgggcatggtggcacacgcctgtaatctgagctactcaggaggctgagacaggagaattgccwgaacccaggaagcagaggttgcagtgagccaagattgcgccactgcactccagtctgggtgacagaacgagactccatcttaaaaaaaaaaaaaaagaaaagaaaaaagaaatccttattgtttaagcatacagctttagcatctctgtcagggcacactctgagcctggttctgactctgtattattctctgtgctcagtaatgaatccctaactgcaaacctgtgcagctacaagagcagcaaagtaggagtaaaaaagtcagttggaggtggctgggtgcagtgtaatccagcactttgggaggcggaggcgggcagattggttgaggtcaggagtttgagacaagctggccaaca

SEQ ID NO: 458982 - DNA, 565 bp, Homo sapiens
ggagtaccagcaccttcccaactcacataccactgtctcttccctagaagccccagaaggccaactcctaccacgcccacaggtaaacacctgaccacagctgggtggatcacattctctctcccaggaatttgaatttggccaaagaaacagcttaccagtctcagcaagaggacggaatgaggggtagatctatcyagtaaccccagcctagccaggtcatgccttatggtcctggaattgagaaaaccatgaattctgtgaacatgtctgagcccattctatgggccagatctggagaatcaaggacatcctgatagtatacatggacttggtcttccaaggctctaggcttgctgaggaggcagacatgataccagatcattggcactgtcctggaggggctatgccagtaacactgggaggacttgcaagcacttcccccttggacctcagttcctcatctagaaaacaatcgaaacgactcttctggttttactgcctatagcttctgaagacaaaagccacctgattagagttgggaggctggaaggcagattttaat

SEQ ID NO: 458983 - DNA, 565 bp, Homo sapiens
ggagtaccagcaccttcccaactcacataccactgtctcttccctagaagccccagaaggccaactcctaccacgcccacaggtaaacacctgaccacagctgggtggatcacattctctctcccaggaatttgaatttggccaaagaaacagcttaccagtctcagcaagaggacggaatgaggggtagatctatctagtaaccccagcctagccaggtcatgccttatggtcctggaattgagaaaaccatgaattctgtgaacatgtctgagcccattctatgggccagatctggagaatcaaggacatcctgatagtatacatggacttggtcttccaaggctctaggcttgctgaggaggcagacatgataccagatcattggcactgtcctggaggggctatgccagtaacactgggaggacttgcaagcacttcccccttggacctcagttcctcatctagaaaacwatcgaaacgactcttctggttttactgcctatagcttctgaagacaaaagccacctgattagagttgggaggctggaaggcagattttaat

SEQ ID NO: 458984 - DNA, 588 bp, Homo sapiens
atatttaaaaacatgattcattttccccattattccttgtctggtcattcttgcctttttctaggactctcctaatgtttgtcataaatgaatgaaatgattctgtcattcttacttgccctgtaagtaactttttagatacttgctagaagaataagctcaggaccttgcattccaaatgaaatttctgaatttttgtttctcctttccttagatttcacaaggctttagtattgccattgtttttcactttatttttttttaggtaacaaggctagcagattccataatctaatgttgaygttagtcaatcagcttcaaaactggatatgctatttggtcattagccttgttacatgtgcttttggatatgggttttatcaaccctcaaattataattctttaagtacaagatatgagtatatgtgagcaattttcaagcagtgctttcaaataagtggtacactgattaaacaatgaaaatccctggttgacaattctatcaggcaccacagttgataaattgaaaatcagtggggcacaagaaggattataaaatatttgtctgaggaaaaatttgcaataatg

SEQ ID NO: 458985 - DNA, 560 bp, Homo sapiens
gaaatagatgaagggtagggaacaatcagaggaaagtgtgccagacaggaaggcaagttcttaatccggtctaaggatttaacttgtagtttggctttcaggctttttaaactgtctttggcttgcaagtgaggtttcactggggacccacccctatctgcctaggcatttggctgccttctgatgctctccactgtctttgccaagcttctttactgcaggtgactttctctccagagactccatggtcctccttccagtctggccccctttggaaagctttttccaggctctcagacaggatttaacatgaccaaacctaagtggtgagccaagttcaagtctctcctcaggtcccaagtaaataagatggagttgagcccctagtgttcagttctcctaaatatggtccacgaaagaaaagaagtttccatagcattttatcataagagccccttgtgccctgcacatacagaagccctcaggagatggttttctctatatcagtcccaagcaccatattccacgtygaaacagccacagtccctacaattctgaga

SEQ ID NO: 458986 - DNA, 581 bp, Homo sapiens
taaactgttgtttaaaatggcttctaaatggattaacatgattttaagtcataatgaaaatatgtcatgtactcagaaaggcatagaaatacagcattagtttatacattggacattgttaaagcaaatattcctcattggaagaytgacaacactctcatatgttcctcttccagagcagcaagcaaagacttaacagcaaataagaaaggaagctgcccactagcagaagaaactgtattacttttgctcctgaaatgcattcagacaattgactaatgcaagataagtagataagtatgcaactaaagcctgaaaaactatcaaatctctggaggtattggatgaaattttaaatcaaggagacatataaattataaataagagaaggaactgtagaatgttggggaaaacatacaacagtcactgtcttttatagaagactgtatggctgttggcaagtttaatattagaaatgttcaaatataagaaaaatgaaaaattgaggttattttaattttattaaattctaaatatttttaaattttgcatttttttctccatgacccctgaaatattca

SEQ ID NO: 458987 - DNA, 436 bp, Homo sapiens
gcacataagctttgtcctattgggacagtgacagagttaagatctttctttgctttaggatattgttcctttattaccaaagagagtattcaccaagctcataaagattttcttgaaaatgtgggggaaaatactgcgttcgtagatattgaaccatttctctaaacaattcrggagttgatatgattatgaacccccaggacagattctaggaaaatcaatctgaattttgttttcatatttgaggaagatatttcatctcctcttagtctgatgctttagccccatttttaaaaagcataccatctagcaaaattggaattacttttgtcctattctatcttggttgaattttatcagtaactgctttgagatatctggtgaaaacacaactatttggctattgaaaaatgttgtgaatggattatttattttt

SEQ ID NO: 458988 - DNA, 586 bp, Homo sapiens
ttttatatcaagatacaaaattctaaataatacaatatcaaatattatccagcattttgtttaaagaataatgacagatatggttgattcagagaatgcacatatggtttgtactgagatcctataaaatctatactgtatgggtaataacctaaattattattgtaatcccaatctcagaaagaaataagcattacattaaaaaatacgtggcccatgaagatattgaccagacttgactacatacaaatttaaaacatccatatattttcctgtaataaccatcaatatcaatttgctgtgcatatttttagatttttttktgtgtgtgcagcatacacctattcacacatgtacatgcacctgtagcaaatctggtcaatttttctgtattatttagcttttactgtcttacagaaactcccaaactttgtttttcaaatataatacacacttattattgctcaagagttaacaggtccgtggaaagtaggggaggtggcactgctgaacttattgaagctttcctgcatatgaaggaaaccagaaaatgtcaccctaaaatatgtcttattgacataaaaat

SEQ ID NO: 458989 - DNA, 620 bp, Homo sapiens
gatacaggcttattctgattttatgttccttcttgagagtgtttgaatacacagcatcagtatgagagaattttaagggatgatgaatattttctttattctaactttggtgttggttatcctaattcctgaatgtggtaaaatttatagacttgtgtgagaatatactatttcaaattacgaagaagctttgtcagtgagagtttcaggtcttctctgagaaagattcatttccgaaactcactctgaacatacctggttctcttcggtttttagtgggttttcttgtcctgggtctcagctttggaatatgctcataaaattactaggataggtcctattctaattaaacttttgaaaaacttgtttggttttatggttaaamctctttcctttcattattttctgctgacctccaccttagcctaaactattcagtactcagcacccagaagctcagtctctgaattcaggctctcagtcctgcttgaagttggctcctttcctgaatttggacatccttacctggccatgcacctaggcatagcacaagattccttccttccacaatatagagaatcatatttttcttagaaatttaacctccttccaactagtga

SEQ ID NO: 458990 - DNA, 578 bp, Homo sapiens
tcattttcattcaacacactgatgaagtgggaacatttgttcatatgctaaatatcaatagcttatttctgaacaatcaatacataagagagtcttggtagataaattatagaatgaaagtraatctccttttttgagttgggaaattaaaatagaaaataaagaaaaagaaatgggtatttcatggataaagagatatgctaatattgttctggtcattgttgtggctaagattttttagtcatttgagtttcatttcttgcttcacttctaagtgaaggtctactccagaccttgcataaagtataggaaagcccatgatgtaaaatttttcagtctggcataattagagtccaataatataaataaagattcactaaccacaagctgagccaaccaacccagctgggacactgtgatttgaaaggtactcttgagaggatgatgcttcatatagtcacttcctaaggacctcttcaaggagagctacaaaccactactcaaggaaataagagaggacacaaacaaataaaaaaacatgccatgctcatggatgggaagactctatatcatgaaaa

SEQ ID NO: 458991 - DNA, 548 bp, Homo sapiens
atattcaacacccatttatgactaaaagtcttagcgcaccaggaactggtgatgtccttaagttcataaagcaaatctcagagataatgttcaattatacaaagctttatctctgcaatcagaaataagaccaaaaaagttcacagtcatggttttatttcaacattcaatgttatactagaaattctagccaattaaataaggcaagaaaaaaataaataaaaggtataacaactggaaaagaataaatacaactatttgctgacaacattgttgtttaagatacagaatcctaaatcacctacagaaaaaaactagtggcattaataggagaacttagcacgatccacctgccatcgctcagcttgttatactagaacattttcccgttttcagtgggcatgatattaagctttgtccattagagggctctgaatggatcctgaaggataaaaaggctgtttttttgtgtgytttgtttgtttgtttgatcctttctgaatctagtgtggttatttgggcagacatgtgttggccaacagcatata

SEQ ID NO: 458992 - DNA, 490 bp, Homo sapiens
aacggagtagcgaggtaagtattcagcatatagcccttgacaagtggagatccaggcccagtttaggacgtgttaagtaaggaaaagaggaggagcaagaatcagtagagagcgtgggacaggcataatcaaagaccatctgctattttgacactgtctgcgcaacttctagggtaaggatctaaatactttgcccagcactcactgtaaacacgtccttctagtggcttaaagtctagatgggtggctataattatcatcaaaatatgtatttatataaacacagcctaaataatacatataaacatttgtcaccgtaaatttgtcaaatattacatggtagaactaaaatatatcasagatgttctggtcaaaaagacgtgcttatatacagaggaaaggggacatgctatgtgtagagaggaaatccaataaaaacttgactccatttatttttctattcaatatttgtttatgccatgcctactgt

SEQ ID NO: 458993 - DNA, 623 bp, Homo sapiens
attaacattggtacaacattattatctaaactgttgactttatttagatttcaccagaatggtgtaaattgtgaccctgttgtgtgtttcaggactcaatccagcattccacattgcatttaggtattatgtcagcttagctacaaaaataaagaaataatcaaataaacaaataagcaaaaactgttgttaaaaagaacaactctgggaggtggagcaagrtgacagaatagaaagctctagtcatcattccccctagcaaggacaccaagttatcaactatctacacagcaaaaacatcttcatgagaacaaaaaatcaggtaaacattcttagtatctggttttaacttcatatcactgaaagaggcactaaagagataggaaaaacagtcctgaatttccaaccaccactcctaccccaccccccaccagctgtgcagcaaggtgcagaaagcatctctggacagtgggaccagggagaacacagcaattgtgagacattgaactcagtgctgtcctgttagagcagaagggaaaactggcccaaattcagctgatgcccacccacagagggagcatttaaaccagccctagccagaggggaatcttccataccagcaa

SEQ ID NO: 458994 - DNA, 519 bp, Homo sapiens
attccacattgcatttaggtattatgtcagcttagctacaaaaataaagaaataatcaaataaacaaataagcaaaaactgttgttaaaaagaacaactctgggaggtggagcaagatgacagaatagaaagctctagtcatcattccccctagcaaggacaccaagttatcaactatctacacagcaaaaacatcttcatgagaacmaaaaatcaggtaaacattcttagtatctggttttaacttcatatcactgaaagaggcactaaagagataggaaaaacagtcctgaatttccaaccaccactcctaccccaccccccaccagctgtgcagcaaggtgcagaaagcatctctggacagtgggaccagggagaacacagcaattgtgagacattgaactcagtgctgtcctgttagagcagaagggaaaactggcccaaattcagctgatgcccacccacagagggagcatttaaaccagccctagccagaggggaatcttccataccagcaat

SEQ ID NO: 458995 - DNA, 623 bp, Homo sapiens
attaacattggtacaacattattatctaaactgttgactttatttagatttcaccagaatggtgtaaattgtgaccctgttgtgtgtttcaggactcaatccagcattccacattgcatttaggtattatgtcagcttagctacaaaaataaagaaataatcaaataaacaaataagcaaaaactgttgttaaaaagaacaactctgggaggtggagcaagatgacagaatagaaagctctagtcatcattccccctagcaaggacaccaagttatcaactatctacacagcaaaaacatcttcatgagaacaaaaaatcaggtaaacattcttagtatctggttttaacttcatatcactgaaagaggcactaaagagataggaaaaacagtcctgaatttccaaccaccactcctaccccaccccccaccagctgtgcagcaaggtgcagaaagcatctctggacagtgggaccagggagaacacagcaattgtgagacattgaactcagtgctgtcctgttagagcagaagggaaaactggmccaaattcagctgatgcccacccacagagggagcatttaaaccagccctagccagaggggaatcttccataccagcaa

SEQ ID NO: 458996 - DNA, 622 bp, Homo sapiens
caaaagagaactcttccttctgcttgaagagggargagcggggagaactttgtcttgcatcttggataccctctgagtcacataaggatagggcactggtcagagctatgaagcccctgtttcaggccctagctcccagatcacatttctatgcacaccctgggacagaaaggaatctgcttgccttgaaggaaaggacccaattctgcttgcatccatcacctgctaactaaagagccctcaggctctgaataatcaacagcaatgcccaggtactacattgagagccttggtaagcctctgagatttgctggctttatgtgagactcagcacattatcagcagtggttactagagggcaagactccttctgcttgagaaaagcagaaggaaaagtaaaggggactttgtcttgtactttaggtaccaacactgccacagtggggtagagcaacaaacaggctctcggggtccccaactccaggacttgactcttggatggcattttgaacctgccttgggccagaggggagcccactgccctgaagggtgagtcccaggccagtcagcattcaccacaagctgacttaatagatcttaggccttaaggaaacattggtga

SEQ ID NO: 458997 - DNA, 622 bp, Homo sapiens
caaaagagaactcttccttctgcttgaagagggaggagyggggagaactttgtcttgcatcttggataccctctgagtcacataaggatagggcactggtcagagctatgaagcccctgtttcaggccctagctcccagatcacatttctatgcacaccctgggacagaaaggaatctgcttgccttgaaggaaaggacccaattctgcttgcatccatcacctgctaactaaagagccctcaggctctgaataatcaacagcaatgcccaggtactacattgagagccttggtaagcctctgagatttgctggctttatgtgagactcagcacattatcagcagtggttactagagggcaagactccttctgcttgagaaaagcagaaggaaaagtaaaggggactttgtcttgtactttaggtaccaacactgccacagtggggtagagcaacaaacaggctctcggggtccccaactccaggacttgactcttggatggcattttgaacctgccttgggccagaggggagcccactgccctgaagggtgagtcccaggccagtcagcattcaccacaagctgacttaatagatcttaggccttaaggaaacattggtga

SEQ ID NO: 458998 - DNA, 622 bp, Homo sapiens
caaaagagaactcttccttctgcttgaagagggaggagcggggagaactttgtcttgcatcttggataccctctgagtcacataaggatagggcactggtcagagytatgaagcccctgtttcaggccctagctcccagatcacatttctatgcacaccctgggacagaaaggaatctgcttgccttgaaggaaaggacccaattctgcttgcatccatcacctgctaactaaagagccctcaggctctgaataatcaacagcaatgcccaggtactacattgagagccttggtaagcctctgagatttgctggctttatgtgagactcagcacattatcagcagtggttactagagggcaagactccttctgcttgagaaaagcagaaggaaaagtaaaggggactttgtcttgtactttaggtaccaacactgccacagtggggtagagcaacaaacaggctctcggggtccccaactccaggacttgactcttggatggcattttgaacctgccttgggccagaggggagcccactgccctgaagggtgagtcccaggccagtcagcattcaccacaagctgacttaatagatcttaggccttaaggaaacattggtga

SEQ ID NO: 458999 - DNA, 622 bp, Homo sapiens
caaaagagaactcttccttctgcttgaagagggaggagcggggagaactttgtcttgcatcttggataccctctgagtcacataaggatagggcactggtcagagctatgaagcccctgtttcaggccctagctcccagatcacatttctatgcacaccctgggacagaaaggaatctgcttgccttgaaggaaaggacccaattctgcttgcatccatcacctgctaactaaagagccctcaggctctgaataatcaacagcaatgcccaggtactacatygagagccttggtaagcctctgagatttgctggctttatgtgagactcagcacattatcagcagtggttactagagggcaagactccttctgcttgagaaaagcagaaggaaaagtaaaggggactttgtcttgtactttaggtaccaacactgccacagtggggtagagcaacaaacaggctctcggggtccccaactccaggacttgactcttggatggcattttgaacctgccttgggccagaggggagcccactgccctgaagggtgagtcccaggccagtcagcattcaccacaagctgacttaatagatcttaggccttaaggaaacattggtga

SEQ ID NO: 459000 - DNA, 516 bp, Homo sapiens
ccctcctcccaatgctaaccactatatttttcacctaatttttatctttatttcctacatgtggatgcacaggttctcttccattttattggctggcaattttgaaatctgtaagtggtaacgggatttgagcatggtttatgttggctattatgccttgtctgggttgaatgctgtgtaaggtgtagggatgtctgcaaggtcaggcttcagaacttttattagcctcggatctyatttggttccaagctacatgctgatagagcctttcttcttggtgatatttccttttgaaagaagatgctttccatatttcaatcctcagaagtgcactgcatgaagcaacacaaaagaaatgaatcatcgtttgctgttttatcaccaagactcattacataactaatatggggttttacagtaaatatgcacaatggtgtttacaatgagttgaccagtaagcatgtgaaacttccatgccacaaattgtcttaaatgccattaaagaagtaatgacct

SEQ ID NO: 459001 - DNA, 606 bp, Homo sapiens
agcaatatacataacatgtgaaagataaggtttcattcaagccattttcatttttcttactgtaaaagtttagggtcacgtttggtggttttatagtcctgctgcaagtagaggatattaaaatacaactaagaagacatattatgtggcttcaggctgcagctccaaatttattaagtgtctgtaatagtctgatacaaagtcttgtagaactcagaccttgacaagaagggcttggacactttcccttcctaaaaaaaggacgtaatgatgaggtttaattgcaatacaattagrgcttttgatagcaaattaattttcattgatagcgttggtcttggcagagagtgtagaatttatgaaattaaagccccatgagcatatgtacagtcgcttatagctttttatgcaaattgaaattcgtgcttcattttccatttctggaaccaaagattaaggataataaagctttttaacttagctaaattagttaaaggcattttattgtatcaaaccatattttatcgaaggccacgcttgacaaattctctccactttacataattactcacaataaatttataaaatttgtttgtgtagaaagat

SEQ ID NO: 459002 - DNA, 542 bp, Homo sapiens
gatctcctggtctgcaggtagcaaagactgtggggaaagtgcagtgtctgggccggagtgcacggtacagtccccaatggcttcccttggctgggagagggagttccctgaccccttgcacttcccaggtgaagcgactccccaccctgctttggctcgccctccttgggctgcacccactgtccaaccagtcccaattagatgaaccaggtacctcagttggaaatggagaaatcaccygccttatgtgttgatctcactgggagctgtagaccagagctgttcctattcagccatcttgccagcaacccccaattttgcctactttaatgttacaaatatattggcctaagctttcttgtagaactatgttgtccaaaatgatagtcactagccacatatcactgtttaaattttagcattaattaattacatttaaattatattaaaattcactttctcagtaatactagccacatttcaagagctcagtacccacatggtggctagtagctaccattttggacagtgcagatatagaa

SEQ ID NO: 459003 - DNA, 621 bp, Homo sapiens
  misc_feature (1)...(621): n = A,T,C or G
ctgtttaaattttagcattaattaattacatttaaattatattaaaattcactttctcagtaatactagccacatttcaagagctcagtacccacatggtggctagtagctaccattttggacagtgcagatatagaacatttcaattatcacagaaagttctattgcatagtattgttctatagagcagtgttcagagtgggtgcttttatgcataagtcgatggtctatcttgaacttacttttgtataataaagttastgagtcaaggtttaatttttatcatagtcagctgttgtagcactatttgttgaaaagactattctctatttattgaattaccttggtatatttctaaaaatcaattgctcatttatatgcagaattattttgctgttttgatctagttttctatccttatcccaatacggtttggacttgattactataaatgtgatcntcatcttgaatttagaagatgtgtgtctccaccattttcaggattgttttggctcttgatcttttacattactgtatactataactttaccaatttcttttaaaaactcttgcaaattgttaaatttgaaaagaaatgacatcttaacaatactcagtctc

SEQ ID NO: 459004 - DNA, 615 bp, Homo sapiens
cctgtgccctctgtgtattgctaaagttgaagaatgtaytgtgccttctgctgctttcatttcccgggtcccaagtcccgtctccagaatatactctttatttgatgcaaagacactgggagcttgagtggtgctggcagatctgtgattcatgcataggagaaaatggccatctttcccaggtaggacagcagctgcccaggatggcgaatcaccctgacaccatctgcttggctgacccactaatctgccagccggttttcatgaacaccagaattgtttcccattggagatttcttcagacatcttttacatcagttaaagactaaagaacagatggtgatttcttgagacagtgaaggatttaactgattcattactcatgtagggaacagtgataaccaattcggcatcatatgctttgacttacttttcttttaggttttcaattcccagtgtgttaggagattacagattataagaatgtaaatgtgcttctatgcttctaattatgaatatttatcaggatgcttcaggaagtcagcaagcacagggatctgtcccagtaccgtcaatgtcagggccttaaatcaatggaaagggtgaccatcacca

SEQ ID NO: 459005 - DNA, 494 bp, Homo sapiens
cttttttaaaaaaattgtgttttattctttcaggtttagtcttaatttctgatatttattaatcacactttccagcatttggtgatcttatttctgagtttcattcattttgattcataattctatttcatgtcttatatcttctcaatgtcttttagctcattttgaaatagtaggtaacatttttggtttgtttggtgggctcatcttgcactcatcgtctatagggcacttctccagctcctggttctcacgtttttttcttgtaataactttgattcagatttaacmttgacacttctttgttgctccaaatataagtgtgttttctgttgttgttatctttgttcttttacaagagagagaaataaacttctgtctataatgtgagacttttgtgtttttctgtgaaattaacttctctgatttaactttttagaatgagacaagtttcaggaaagcttttctaactttgcggaactccctcttcagtg

SEQ ID NO: 459006 - DNA, 503 bp, Homo sapiens
cttttgctgtcactcaaatcaacagcaaatagctgactgtaataggaaagaaatgtcactagccctttatagaagtgatagtctggaacttctgaatagcattcattttatttggaaaaagaaaaaacgttaaagtattttgaaagagttgaagctgtttatacaaaattatgatcagtgtggatgaggggtggattagacacaaaactgaggtggcaaagtgtgaattcttcattgaaaaattgatatgaaaaaatattttatttgtaacctgcaatgagcagttcatattgaagcatctgacaggggtggggacacatygacatacttcagccttgagtgactactccccttcttacgtgtcagctgtttggcccggttctagctagactaataaatgctttacattttatataacttttgactaatcatatgtcccaatggaaaacatatgctaaaattacagaatctttaccttggtggcattttcacctaaatcctca

SEQ ID NO: 459007 - DNA, 503 bp, Homo sapiens
cttttgctgtcactcaaatcaacagcaaatagctgactgtaataggaaagaaatgtcactagccctttatagaagtgatagtctggaacttctgaatagcattcattttatttggaaaaagaaaaaacgttaaagtattttgaaagagttgaagctgtttatacaaaattatgatcagtgtggatgaggggtggattagacacaaaactgaggtggcaaagtgtgaattcttcattgaaaaattgatatgaaaaaatattttatttgtaacctgcaatgagcagttcatattgaagcatctgacaggggtggggacacatcgacatacttcagccttgagtgactactccccttcttacgtgtcagctgtttggcccggttctagctagactaataaatgctttayattttatataacttttgactaatcatatgtcccaatggaaaacatatgctaaaattacagaatctttaccttggtggcattttcacctaaatcctca

SEQ ID NO: 459008 - DNA, 589 bp, Homo sapiens
taaattcaggttcatacattctacttagttgacctgataccttggggggggggtttagtttaacttttatttttatttatcttttatttcaggagtgcatgtacagatttgttacataagtaaacttctgtcatsagggtttgctgtacagattatttcatcacccaggtgttaagtctagttcccactagttatttttgctgatcctctccctcctccatactgcaccttctaatagtccacattatatgttgttcccatccatgtgtccatgtgttctcaccatttagctcccacataagtgagaacatgaggtatttggttttctgtttctgtgttagtttgctaaggataatggactgcagctccatctgtgttcttgcaaagtacataatctcattctttttatggttgcatagtattccatggtgtatatttacattgttttaaatccaatccaccattggtgggcatgtatgttgatccatatctttgctatcgtgaatagtgctgcaatgaacatacatgtgcatgtgtctttgtaatagaactatgtatattcctttgggtatgtgtttagtaatgggat

SEQ ID NO: 459009 - DNA, 607 bp, Homo sapiens
ctcctggttggcatcccagtgatacatatccttccagaaggcaagcagccagttcatacaaagtaagtagtgccgtgtatgtttatgtgtttatgtgtgtgtgtgtatatacatatagagaccacaattatttattgcccaaaatcagtaatttacaattacctgcaaattgtattagcgtaccttaacactgttttcttcttgaattgttccctcttgtagttcagaatttttttagggcaagaaatggtttcacagtayggtctcttgcatttagaattattcttgtagagatacaagacagcattgccgttacagctggctttagtacattgtttagtttctatttgaaaaacagtgaagggcaagtggccaaacacgttagccccctctctactgctgtgtccaccacatatggattttccaaaagcaaaatgtaaatatgatcaatcctttaaagcagggctggcaaaactttttcctgtgaagggccagatagtaaatgctttaggctctgtatgccatatggtttctatcacaactatcaattctgccactgtagggcaaacactgccacagacagcttgagtaagcaagaataagcatg

SEQ ID NO: 459010 - DNA, 585 bp, Homo sapiens
accaagatcaaaatcaagatttgtcctgaggaatggaacaatcagtactattattaactgtaattgagaacactagcaggttaacagataggtggtagtgaaaggcagtgattcaggagtttcattaagctagcactgcttatttatacctaagtctagatgtcagctaggcaattgtatttaggggtctatattttaagaaaaaagttggaattgaagacataaatttgggtattattagattatagatgtgatagtcagcctccagaatggcctcaaatgtttcctgcttacttgtattcacagccttatttggtctcctcattcattttaccaggttggtacatgcgactaatagaaaatggcaagagagatgccatgccacttccaaaattaggttattgtatcatcagggttctcaagagaaacagagcccaaaatatttatgcwtgtatgtgtgagcgcatgcacatatgtgtgcacacacgtgtgagcacacacaaagagagagatgtttattttaaggaactggctcatgcagttatggaggctggaaagtccaagatctgcagcatagatcattag

SEQ ID NO: 459011 - DNA, 585 bp, Homo sapiens
accaagatcaaaatcaagatttgtcctgaggaatggaacaatcagtactattattaactgtaattgagaacactagcaggttaacagataggtggtagtgaaaggcagtgattcaggagtttcattaagctagcactgcttatttatacctaagtctagatgtcagctaggcaattgtatttaggggtctatattttaagaaaaaagttggaattgaagacataaatttgggtattattagattatagatgtgatagtcagcctccagaatggcctcaaatgtttcctgcttacttgtattcacagccttatttggtctcctcattcattttaccaggttggtacatgcgactaatagaaaatggcaagagagatgccatgccacttccaaaattaggttattgtatcatcagggttctcaagagaaacagagcccaaaatatttatgcttgtatgtgtgagcgcatgcacatatgtgtgcacacacgtgtgagcayacacaaagagagagatgtttattttaaggaactggctcatgcagttatggaggctggaaagtccaagatctgcagcatagatcattag

SEQ ID NO: 459012 - DNA, 543 bp, Homo sapiens
tatggatgcatgaatggaatttgtattartctgttcttacactgctataaagaactacctgaaactgggtaatttatgaagaaaagaagtttaattgatccatagttccacaggctgtacaggaggcatggctggggaggcctcaggaaacacaatcatggaggaaggtgaaggggaaggaggcacatcttcacgtggcagcaggagagagagagagggaaggggacatgctacacacttgtaaataatcagatctcttgagaactcactcactagcatgagaacagcaagggggaaatctgcccccatgagccattcacctcccaccaggtccctccctcagcattggggattacaattcaacatgagatttgggtggggacacagagccagatcatattagaagtagtcacaaagtttgaagactttgtaatgtatattaatgtctatcagaaagcatgaacaatagaatgaatactgaaatacacagtagtccaagtaactaattatttggcttcagtcagcccttgtgttcttccaccc

SEQ ID NO: 459013 - DNA, 543 bp, Homo sapiens
tatggatgcatgaatggaatttgtattaatctgttcttacactgctataaagaactacctgaractgggtaatttatgaagaaaagaagtttaattgatccatagttccacaggctgtacaggaggcatggctggggaggcctcaggaaacacaatcatggaggaaggtgaaggggaaggaggcacatcttcacgtggcagcaggagagagagagagggaaggggacatgctacacacttgtaaataatcagatctcttgagaactcactcactagcatgagaacagcaagggggaaatctgcccccatgagccattcacctcccaccaggtccctccctcagcattggggattacaattcaacatgagatttgggtggggacacagagccagatcatattagaagtagtcacaaagtttgaagactttgtaatgtatattaatgtctatcagaaagcatgaacaatagaatgaatactgaaatacacagtagtccaagtaactaattatttggcttcagtcagcccttgtgttcttccaccc

SEQ ID NO: 459014 - DNA, 543 bp, Homo sapiens
tatggatgcatgaatggaatttgtattaatctgttcttacactgctataaagaactacctgaaactgggtaatttatgaagaaaagaagtttaattgatccatagttccacaggctgtacaggaggcatggctggggaggcctcaggaaacacaatcatggaggaaggtgaaggggaaggaggcacrtcttcacgtggcagcaggagagagagagagggaaggggacatgctacacacttgtaaataatcagatctcttgagaactcactcactagcatgagaacagcaagggggaaatctgcccccatgagccattcacctcccaccaggtccctccctcagcattggggattacaattcaacatgagatttgggtggggacacagagccagatcatattagaagtagtcacaaagtttgaagactttgtaatgtatattaatgtctatcagaaagcatgaacaatagaatgaatactgaaatacacagtagtccaagtaactaattatttggcttcagtcagcccttgtgttcttccaccc

SEQ ID NO: 459015 - DNA, 537 bp, Homo sapiens
tcctttcctgcccacagggcctcagatagcacacttctaagaatattcagaatatttgatgtatctgcatcaacaatgaattttgcataacaacagagcagaccaagggatcaacttttaccaaaggagatgtgttggtggacatatgatcatgggtgtcatattacatatgatgccaccccaaaactgctgccctaatgcagcaagggactagcctcttaaagacacagctgagatatcagcttggaaatggtggcawgtaaaatttctagtaggtggaataaataaatccagaaactacggaggtagaagtagtagcagcttgtaattacggttaatcccaataacttaggtaggaaatttgtgcttccattctctacgaccttagaatctggggattgagagattcttgttcccagaggagtaacacttctgccgggtcctagagttagaatcctctttaattttattttcaggctttttcttgctcacttcaagttctttgcactaagagaccagggagaaagagagaagtca

SEQ ID NO: 459016 - DNA, 592 bp, Homo sapiens
gaaatggtggcaagtaaaatttctagtaggtggaataaataaatccagaaactacggaggtagaagtagtagcagcttgtaattacggttaatcccaataacttaggtaggaaatttgtgcttccattctctacgaccttagaatctggggattgagagattcttgttcccagaggagtaacacttctgcygggtcctagagttagaatcctctttaattttattttcaggctttttcttgctcacttcaagttctttgcactaagagaccagggagaaagagagaagtcaacattcggcctggggtaatacacccagatcatcactgggtactagggctaacaggagtaagaatgaataaattcagtgcccagatgatccatttaggagtcttttggtaattctttactcaatgtttatggtaactgaacaagtacagcaaagcctgctaaaaaattttcattttctaatttacccaaggaaaggtgatcaactggaattctggaagaacttttcttagacgaatgcacttactacacaaactcaagtgacccatgttgtggacgatagtgttgtcatatttcactgccct

SEQ ID NO: 459017 - DNA, 537 bp, Homo sapiens
tcctttcctgcccacagggcctcagatagcacacttctaagaatattcagaatatttgatgtatctgcatcaacaatgaattttgcataacaacagagcagaccaagggatcaacttttaccaaaggagatgtgttggtggacatatgatcatgggtgtcatattacatatgatgccaccccaaaactgctgccctaatgcagcaagggactagcctcttaaagacacagctgagatatcagcttggaaatggtggcaagtaaaatttctagtaggtggaataaataaatccagaaactacggaggtagaagtagtagcagcttgtaattacggttaatcccaataacttaggtaggaaatttgtgcttccattctctacgaccttagaatctggggattgagagattcttgttcccagaggagtaacacttctgccgggtccyagagttagaatcctctttaattttattttcaggctttttcttgctcacttcaagttctttgcactaagagaccagggagaaagagagaagtca

SEQ ID NO: 459018 - DNA, 600 bp, Homo sapiens
attcttttatttaggaaaaatatctagtaaactacaataagaattagttctatattaaaagtccaacatttttattcctatcctttaaaatcacttaaatactacatttattttgctcttctcggraaagaatggccattgtaacaaattcaggaataaaatgtcggtatacagacactcaaaggatccaagactctatgcctgacagattgtagcacactaagtttcacagaacagccagtgcagaggttgtaggtattggtccgtttggggctggataacagttcagagaaatctggtcaattgtctgttatgaccatcaagacaaacaactggtctatcaataggctgaatatgtattgtagtttttacgcaatagaagaaatacatataacagctgaaaaaaatcacaaagtctattcatgtcttgtgttcttaaggtgaaactgcccccctcccaataccttagtcagacttaccaaagaaatccgattcctttgactctttcttatggttttccacctgaatgcacaagatgatgggaggcaagaattcatatttaaacaagtaatatttaagaccacagaaggcaaaaaagca

SEQ ID NO: 459019 - DNA, 600 bp, Homo sapiens
attcttttatttaggaaaaatatctagtaaactacaataagaattagttctatattaaaagtccaacatttttattcctatcctttaaaatcacttaaatactacatttattttgctcttctcggaaaagaatggccattgtaacaaattcaggaataaaatgtcggtatacagacactcaaargatccaagactctatgcctgacagattgtagcacactaagtttcacagaacagccagtgcagaggttgtaggtattggtccgtttggggctggataacagttcagagaaatctggtcaattgtctgttatgaccatcaagacaaacaactggtctatcaataggctgaatatgtattgtagtttttacgcaatagaagaaatacatataacagctgaaaaaaatcacaaagtctattcatgtcttgtgttcttaaggtgaaactgcccccctcccaataccttagtcagacttaccaaagaaatccgattcctttgactctttcttatggttttccacctgaatgcacaagatgatgggaggcaagaattcatatttaaacaagtaatatttaagaccacagaaggcaaaaaagca

SEQ ID NO: 459020 - DNA, 569 bp, Homo sapiens
cacctgtaatcccagtactttgggaggccaaggtgagcagatcacttgaggtcacttccaagatggccaaataggaacagcttcagtctgcacctcccagagagattgatgcagaagacgggtgatttctgcatttccagctgagctctgaagagagcagtggttctctcagcatggcgttcaagctctgagaatggacagactacctcctcaagtgggtctctgatccccacatagcctgactgggagacacctcccagtgggcaccaacagacatctcaaataggtgggtgcccctctgggacaaagcttccagaggaaggatcaggcagcaatatttgctgttctgmagcctcctctgatgatacccaggcaaacaggatctggtgtggacgtccagtaaactccaacagacctgcagctgaggggcctgactgttagaaggaaaactgacaaacagaagggagtaatatcaacataaacaaaaaggacatccacaccaaaaccccacctgtaggtcaacaacatcaaagacaaaaggcagataaaaaccacaaagatggggagaa

SEQ ID NO: 459021 - DNA, 476 bp, Homo sapiens
aaaggggtagcggagtgggctgcagatggccaggtaacggtcataggccatgaaggccaggagaaagcactcggtggcgccgaggaayacgaagaagtagagctgtgccatgcaggcagagaaggagatggcttggccccaggacagcaggttggctaggagaaggggcacagtggtggacgtgtaccagacctccagaaaggagagatgctggaggaacatgtacataggggagtgcagtcgcaggccctggctcaccacggtgatgatgacaacattccctataatggtcaggcagtagatgagcaggaaaatgacaaagagcagggcctgccattcaagaaggttctggaatcctaacagctgaaagttagtcacagtggaggtattttggggctccattgcctgtgggggatgaaaaacattctggaaaagcacaggatgcaaggcgcaaatttatcactggtgatgcttgg

SEQ ID NO: 459022 - DNA, 577 bp, Homo sapiens
ttctaataagaaaatttacagcaccaatgcctacatgaaaaataaagatttttttttttttttttgagacggtgctttactcttgttgcttaggctgaagtgcaatggcactatcttggctcactgcaacctccgcctcccaagttcaagtgattctcctgcctcagcctccccagtagctgggattacgggcatgcaccaccacgcttgggtaattgtttttggggtttttttttgtatttagtagagatggggtttcaccatattagtcaggctggactcgaactcctgacctcaagtgatccacacacctcggcctcccaaagtgctgggattacaggtgtgcacsaccgtgccgggcccaagaaagatcttaataaaacctaacattatgctcaagaacctagagaaaaaagagcaaactaagccaaaaattagtaggagaaaggaaataacaaagaaaaaagcagagaaaaataaaaatgaagtccagaaagacaatagaaaatagcaacaaaactaagtcccctttttaaaaatcataaacaataacagcaacaacaaaaacacccagtca

SEQ ID NO: 459023 - DNA, 577 bp, Homo sapiens
ttctaataagaaaatttacagcaccaatgcctacatgaaaaataaagatttttttttttttttttgagacggtgctttactcttgttgcttaggctgaagtgcaatggcactatcttggctcactgcaacctccgcctcccaagttcaagtgattctcctgcctcagcctccccagtagctgggattacgggcatgcaccaccacgcttgggtaattgtttttggggtttttttttgtatttagtagagatggggtttcaccatattagtcaggctggactcgaactcctgacctcaagtgatccacacacctcggcctcccaaagtgctgggattacaggtgtgcacgaccgtgccgggcccaagaaagatcttaataaaacctaacattatgctcaagaacctagagaaaaaagagcaaactaagccaaaaattagtaggagaaaggaaataacaaagaaaaaagcagagaaaaataaaaatgaagtccagaaagacaatagaaaatagcaacaaaactaagtcccctttttaaaaawcataaacaataacagcaacaacaaaaacacccagtca

SEQ ID NO: 459024 - DNA, 639 bp, Homo sapiens
tgttttctctaggagttaatagagagagaaaagtgaggaactgtgggactattcttttcagtggtttcctaagtttctaccagtcctttctttcctttcacctggtccaccacattctttccgcagtggatgtaaagctggatcccgccacggcgcacccgagtctgctcttgaccgccgacctgcgcagtgtgcaggatggagaaccatggagggatrtccccaacaaccctgagcgatttgacacatggccctgcatcctgggtttgcagagcttctcatcagggaggcattactgggaggttctggtgggagaaggagcagagtggggtttaggggtctgtcaagacacactgccaagaaagggggaaaccacgccatctcctgagaatggggtctgggccctgtggctgctgaaagggaatgagtacatggtccttgcctccccatcagtgcctcttctccaactggaaagtcctcgctgcattgggattttcttggactatgaagccggtgaaatttcattctacaatgtcacagatggatcttatatctacacattcaaccaactcttctctggtcttcttcggccttactttttcatctgtgatgcaactcctcttatcttgccacccacaa

SEQ ID NO: 459025 - DNA, 523 bp, Homo sapiens
tggaaacagccccaataagatgaaatcagttgatgtttgattgtaattttccatggagcattcctacaatccattcggaagggagacacaagagtaatttacgtacagtaattcgcccttatctgcaggggatgcattccaagcccccccagtggatgtttgaaactgcagttgatactgaaccctaaatacactattatttttgtctatacatacttctgataaagtttaattaataaattagacaagtaagagattaacaagagtaactgataataaaatagaacaattatacagtatactataaatatgtgaatatgatctctatctttctcaaaatcttttattgtactgtactcagacttctttgttctgatttttacctattttgaaaaaagaaatcttattttcttacccagagtttcayatttgatgagatcaacatttgttactagtttttttctgagaaatatgtaaatttataagaaagatacctctattacaacttcaatagaatatgaat

SEQ ID NO: 459026 - DNA, 278 bp, Homo sapiens
atctcaataaagaaaagtgcataacgagaaggctccattggagaataataccaaacatttcaagaataattttatttttttgagaaaaggtctcacttctgacacccaggctgaagtgcagtcatatgactgtggctcactgaagtcttgatttcctgggctcaggtgattctcccacctcagcctcctaaacagctgagacyacaggtgcacatcaccatgcctgcctaatttttgcgttttttgtagagatgggttttcaccatgtagtccaggct

SEQ ID NO: 459027 - DNA, 505 bp, Homo sapiens
tgtctgtttgcatcacttttgtggccattaccttgttctgagtcatcttgtggttatttggaagttccgtttttttaaaaaaattcttcagtaaactgcataagtatgaatactgcattctactcatctctgtattytccaaagctttaatgaagtaccattaatttgattatatttaatgtatatttgttgagatgatatttttgcctagctatcaataaagaccaggactaattccttagatatatacaaatcatattatcaacctttcattctagttacgttgccaggaacacaattaagctcatgaactatccaattctcagtaatgagaagacaggtttgacagtgtgggatgattaaaatgcttaatgttcaattagccttcttggattaagtctagtaaaggaaaaggtaggtaatttaaagttgtattatggagaatattattttacaaaaatcttaagagggcaatttgaaaaagacattgattgctctaaactta

SEQ ID NO: 459028 - DNA, 528 bp, Homo sapiens
ctgctgtttgcacaacagtagtatgccactgtagctgtgatgtggaagcagggggaatgtaacaggaaatgaggcaagagatttggccccaggccaacccatgcaggatctcgctgagaggtcaagtgtaatgactgagaagatgytattggatttaacaattaacagggcattgatgaccaccgcgagagtaattcagtcaagtgttgtggaaggaagccaaatagactgcaggagttgagaagtggattgcacaagagaaaggagagacggctagtacaaattctccttccagatatgtgtcaatgaaggaaaggagaaaaggcaggtgcttgatcagattgcacggttgagagaggataggtaaactcctgtgctaagagtgtgagaattggatacatgtgggagcctaggaagggtggagaaaagatacaaggagaacaagtggcctggaaccaggaaaggggttgggagagtggcggcccacacctaagacatgtgcaaagacagaaatcctgcaagacagct

SEQ ID NO: 459029 - DNA, 577 bp, Homo sapiens
accctctctgaaagaaaataatatcagccagaaccaaattatttctgtattttttcatatatgaaaaaaaacacaaaatctaaaaaataaatacataaaaatcaactacacaaactagtagaagaaacaaagtaaatagcagacaataagacaatgaacatgaagctatgagaaatataaatattggrgttatcatatataaaacaaaaattactgtgtctagtatactcaagaaaaaaatacagtatgataaaaattcagcagataactaaaaaattaaataggaattctataattgaaaacttcaaaaattgaaaaaaaagaactcaatataagagtttcatagccagctagacatagctaaagagaggactaaagggtgaactaaaaggtaggtcagtagtgaatatctaggctgaagtacaaaaaaagactaacatacttgttattgaagtcttagatgaagtagacagtaagaatatttatatatggccaagaaattttctaaaacaagaaaacatcaatccatgggttcaagaagtactttaaattctaagaaggaaaaatataaagaaaa

SEQ ID NO: 459030 - DNA, 521 bp, Homo sapiens
acaaatcagcttatagttatctatmcaactctataagagatccatatttggaaatgatctcaaaatgagagtcatctttggaaataataacttctacttatatgccaggcttattaaagggctgtgtatctcattcagttcccccaatactttatgaggtacataatgttactatcaccatctcatatataaggaaattgaagcactagagagattaaatagcttacccatggtcacacagcttttgacgaaatgagattgaaaccaaggcagtttggcccagagtccatacctatctggggaaggctaataaatgtaaccaataaccccccaaatttcagtagcttaagagaataagatttgtttctccctcaaacataaattctacatagatgctcctctccaaccagcttgtttccaagggtgactcagatacaaagacaccttccatcatgtggctttgccctccttgaggtcctttgagtcctctctattcggcctgctaaaagggaaagagcaaa

SEQ ID NO: 459031 - DNA, 521 bp, Homo sapiens
acaaatcagcttatagttatctatacaactctataagagatccatatttggaaatgatctcaaaatgagagtcatctttggaaataataacttctacttatatgccaggcttattaaagggctgtgtatctcattcagttcccccaatactttatgaggtacataatgttactatcaccatctcatatataaggaaattgaagcactagagagattaaatagcttacccatggtcacacagcttttgacgaaatgagattgraaccaaggcagtttggcccagagtccatacctatctggggaaggctaataaatgtaaccaataaccccccaaatttcagtagcttaagagaataagatttgtttctccctcaaacataaattctacatagatgctcctctccaaccagcttgtttccaagggtgactcagatacaaagacaccttccatcatgtggctttgccctccttgaggtcctttgagtcctctctattcggcctgctaaaagggaaagagcaaa

SEQ ID NO: 459032 - DNA, 631 bp, Homo sapiens
gcaaacaccagtcaagagacagctgatatatctggaccaatatcaaagtagacttgaaggcaaaaaaaaagaattactttttcatgataaaatggccaatctatcaaacagacataacagttttaaatgtgtattcacctaataacagaccctcaaaataaatatacagagtgaaaactgacaggaataaaatgagaagtgaacaagttcacaatcctactgagagattttaacaaactatgctcagtaacatagaaaaagcaattgaaaaatcaatgtagccaaaagttggttattttgaaaaaacaaatatcaataggctgttttgattcgtgagtcttatcaaggaacagaagatacaaattgccagcatcaaagattaaaaggggataacactgcagatcttagagatagtaaaaagttacttaaagaatattatgagcagattaattcctatayattaaacatttaagatgaaatggacaaatttccaccaaatgataatttatcagggatcttgagccccctcaccccagaaagacaatataaaagagcatttagagggtgaagagagaatttggaggaaaaactgtgaagaaatttctttggtgaaagctattgccctgtttga

SEQ ID NO: 459033 - DNA, 541 bp, Homo sapiens
aggctgaccccaaaggctgagctcttttcaagttatcagaaagcataaggtcttcgggtagaagtaagaaggcagttggaggagcataagaaaatcaagctagaactttgacacaaacttgtttcaacagcccagtctaccacagccggagtccagagtatcctgtaggcttctgattttctcagatgctggttctcctgcttcaaatgctcagacttgccagagtctgagagctattaccaccgtatgatcacaagaagacttgcaatatgtaaaagatgagtgaagcggcaaagggaatgggaattgcagatgacctgagaataatgttmaataggtaagcaaagcagagggtcaagaggcagggactaatacttaggtataaatctaacgaaacatgttcaagatctatatgatgaaaactgcacaactctgatgaaagaaatgaaagactaaataaatggagaaattattccatgttcacagataggatgacccaatagtgtcaagatgtctgttcttgtcaacttgatatatagat

SEQ ID NO: 459034 - DNA, 557 bp, Homo sapiens
atcagacagtatcccccaaacacttgtatttctcccatcccagcacttattcaattgtttagaaatgcctatttaattgtatctctcattacactgtaaactccacaaaagcaggaactatgttggaattttttggcagtgaatcccttatacctagaagaatgttcagttctaatttgtacttcctgttcactctggtgttgagtatcttttcatgtgcttattagctgtttgtgcatcttgtcttgtgaagtgcctgttcaaattttttgtgcacttttaattgaggtgtttgtcttctaattgttgagttttaatatctatctatctgtttatctatctattatctatctatctatgtatcatctatctatctgatatgaacccttcatctcctatgtgtattgcaaaytttttccagtctgtggctgggccttatcattttcttaatagtctctttcaaaaaggattttaaaaatttgataaactctcatttgttaatatttttctttcatgatttttgctttttgtgttctaggaaatctttgcctaaccca

SEQ ID NO: 459035 - DNA, 474 bp, Homo sapiens
cgagcctctttaggtgtattatatgcagatgctatgttggcaatttcctgtatgacaagaaaattaaaatagactccccacttcttctttagagtggggttgaacatagraactgcagtgaggtggcttgaagatctttagaaggagggtagttaaaagctttccatatgatgttcaaatcactgagtctgaaaaagaataatgtgtaattgtatcagtctatgtccaatcaggagacagaaactgcacagtgataagtaatttgaacaaagttaaatatatagaattgttaagtataataatttggagtaatggggtttggagtaataaagggttaattaatataaaggaaacagaagtttaaagaatacagaatagcacatataagaagcagctactacttccagggctgagatagaacatccaaaaaagagcctgccccttgccccaacccctgggggtgagacacaaacc

SEQ ID NO: 459036 - DNA, 559 bp, Homo sapiens
gaggaggccttacaattatggtagaaggtgaaagccatgtctcatatggcagcagacaagagaagaagagaaaaaagtggaagcagaacccccttgtaaaaccattagatcttgtgagactttttcactaccatgagaacagtataggggaaactgcctccatgattcaataatctcccaccaggtccctcctacaacatgtgggaattatgggagtacaattcaagatgagatttgggtggggacacagagccaaatcatatcagaagttgtagaaaaaattttaatttggtaccctttttattcaggggttcaaaatgtgttatgtgacaagtgggttttcttatgtgaacctcacgatcaatttccttgtttgaccatatttactaccttctgtctttctcatgaaaggcrtttttaccgaacagagttatcattggttttttttcccctttaggatagcttgatactattgtctaatatcccctgaatttatttcttccaagaccattatcagcatagacaaccatcctcttgcttaacccaaatccatggtttc

SEQ ID NO: 459037 - DNA, 552 bp, Homo sapiens
ccaatagtatcttggcaaaagttcctagaataaaacttggtaccagaggagaggtgctacacacacacacacacacacacacacacacacacacaaaattagaccttttttttcccactcctaaggagacatttgaacattctgttgttgttgagggccaaaaatgttgctaggatatgagtggaagtagaaatactttgaagaaagtccccactaatatctctaygttgaaatatctagtcaattgatctcattgagatgcctatgacagccaagtcagtaataataaaataacaataataaaaagcaataaaaattattatttattatttaaattattattattaattattttcacatgtctggcagatccagacacttcagaagcatcttacaggaccagacacagagcaatggtaactctgatgatggccagatacagagagaggcagggattgctcttgtttttcccggactgtgtaaaatcccaacgttctgaaataacctaagagatagagcagactttatgaaaaatgagtgatactgaacttc

SEQ ID NO: 459038 - DNA, 616 bp, Homo sapiens
gacaaggaaggccagagttcagagaagtcatcctagcagagatagcagttgacctgagcgcttgagtctttcagatttggacaagtaagagttaattaaccaagagaatgattccgggataggaggtatagggaagtaagggggacacggcacagtcacagcccctgaatttctagatcattatagataaactgaataatttttctaggtgcagaatttttagtaggtaatggaatgacatcttaccaaattgtccatgaacaggcttatacatccccaggttattatgtaaggtatgtgatattcaaagactctatgtgtatacatatatacacatatatattataaatatgtttgtgtctattaatgatccttagctaattcatgtacatcaaaatcttgtttctcttccattagatagttaatgaatgtagatggttttggaatcagaggtactggcttattttccaacctttccatttagtagatgagtgaactcaagaaaatcacttmatatctgagagagtgcattttttcaggtgtacaatgatgggaataagaaatatgtcaaaaatttttttcatcaagattaaattagtatttaggtaaagatggt

SEQ ID NO: 459039 - DNA, 624 bp, Homo sapiens
aaaaaaaaaaaaaaacctagttcatcaacctcactatctcaattgatggcgacttctattcactcaggcaaagagtgattatgaatcctctctttctcttaaacccctatatccaatccaccaacagaatcaaaagttatccatggtacaaccatggtacaaccaaggtggtaacactctcattgttaccaccttgacacaagccaccatcatctctcatctggattactgtaataacatcctatctagtcttcctgtttcacacttgcaaaacactcctctgcttaaaacacctcaatgccttctcatcccacacagactaaaagctaaagtccttacaatggcctactggaccctgcatgaattgggaccygttacatttccaaccaaatttcctgttaaccctctcttagtcccagctctctaaccacactagccttgttcataaaacatggcaggtatggcccaccacaggacattttcacaggcccttcctgatatgcttttcccataaatatcctcatcacgaactctcacctcttcttcaagaccttgctcaaatattgccttctcactgaggctaccttagtgacccaattctaaattgcaacattccctgcctta

SEQ ID NO: 459040 - DNA, 624 bp, Homo sapiens
aaaaaaaaaaaaaaacctagttcatcaacctcactatctcaattgatggcgacttctattcactcaggcaaagagtgattatgaatcctctctttctcttaaacccctatatccaatccaccaacagaatcaaaagttatccatggtacaaccatggtacaaccaaggtggtaacactctcattgttaccaccttgacacaagccaccatcatctctcatctggattactgtaataacatcctatctagtcttcctgtttcacacttgcaaaacactcctctgcttaaaacacctcaatgccttctcatcccacacagactaaaagctaaagtccttacaatggcctactggaccctgcatgaattgggacccgttacatttccaaccaaatttcctgttaaccctctcttagtcccagctctctaaccacactagccttgttcataaaacatggcaggtatggcccaccacaggacatttkcacaggcccttcctgatatgcttttcccataaatatcctcatcacgaactctcacctcttcttcaagaccttgctcaaatattgccttctcactgaggctaccttagtgacccaattctaaattgcaacattccctgcctta

SEQ ID NO: 459041 - DNA, 426 bp, Homo sapiens
agcataattgacccaagagtcccagctgtttcactctgaaatccattcctatgtttgcttcaaggctatgcttcccaggggctactcccagccagtgactgagcatggcaagaatgctaaaattcctgagaaacactggactactttggttgctgacaactgatgtgtctcatcatgtgtttattcattcatttagttgacaatactaatacttgttaattttttaagcatttgttattcattctgcacatatttattgagaacctctgatgtgtcaggcactgtgttaggtgtctgaacaaaatttctcctctcctggaacttacattctggtagacaataaaagattaagtaaacaaaatacagtagatgtggaaatgatgrtgttattctggatcctataagaaacaaatgccaagatgggtt

SEQ ID NO: 459042 - DNA, 608 bp, Homo sapiens
tttatcatgttttggactgccatatacagttgtgcagattgtgtactgcacaaaggtacctgaaatgatggtgctaaaatcttgtccacattcctttgccagtcgtgcactctggttcagggatgcttatacctggagcaaaaggtttcaattttctctgcacaaaagtgctatccactttcccaagctgttcactggaaaaaaggggtgtgtgtggcatggagcagggctaggagttgggggaaatgacacattgtcctaatttgggaaattcaagattaaataaacaagataaatgatagttgttttaatttaaactacagtataattattctttaatctgggatggtcaagaaggcactattaaaggtatgggattcaagctgagtcttaactggtaagtagaatttayatggatgtatatagggcctttagtcaataaatatttattaagtacatattatgtacaagctatgaagctagacactaagaatataaaacaagtgaaatttggcctgcgtccttaagatggtaactgatacataaactcataataacagttattctgtgataaacactgtatgggaggcataaactgcacagggcac

SEQ ID NO: 459043 - DNA, 657 bp, Homo sapiens
gtgacacacattaaacaacataagcataaacatttacaaagtgttcctcctacatcagaatacacacatttcaaaatagttgtagtaactccctctgatattctttagctcctgaacctgatgatcattctcataatgtgctagcaagggaatttctgggacattttttacatcttaatattcaaactactcatacagagattttttttctgtatggatcttcttgcctagtaatatgatcacaatctcatgttaccaggaaacacaaaatacagtcaatctgaaaaatttttgatttccatgagtccgttcaattcaatctacraaaaaccaatttattcctactctactgtaacttctgggtagatatagaagtgctcaggaaaaccttttcctaaaaaaactgcagaaagacctatcacctgcatgtcacatattttcatttagttcatatggctttcaattctgaatttcattgtaaagtagattttattatactcattagcctcatccactaaagcacaagtctaaactgtgacataaaagcaaaataactcttttgattactacagtatatatgtgattgcatcatatatcattttgattgcacatccaaattgcatattttatatttaagttcaaagagttctccacgag

SEQ ID NO: 459044 - DNA, 592 bp, Homo sapiens
gaacacccatatattttctacctggattcaaaaattgctaacattttgtcatatttactttatttctgtgtacatacattgccccacatacatttgacttcactaactacctgatttatgaatcttttctaaayattaattaaggcccagattctgcttgaacaagttaagtagtgatgatctcagtctcactaaaggcaatctattcggttttgggtcacacttcctaacaaagttttttccttgattgcattaaaatctgaacttctggggtgttattaatgaatacaatttagctatcttttttttgaaataagatgctgaaacaaaaatttattcaattaagttaaactagggatattgcaattctagcttttatgttattaaaagtagtaataatattgcacatgtatcctagaacttaaagtaaaataaagataaataatttgattattcatgcaattatatacaattatatatgcccgtttaaagacaaatatgtataatgacattaaaataattaaataaaccaatcttcgtaaattctaaaacaatgtagtagtaataataaatctttggcagatttgtctaa

SEQ ID NO: 459045 - DNA, 592 bp, Homo sapiens
gaacacccatatattttctacctggattcaaaaattgctaacattttgtcatatttactttatttctgtgtacatacattgccccacatacatttgacttcactaactacctgatttatgaatcttttctaaatattaattaaggcccagattctgcttgaacaagttaagtagtgatgatctcagtctcactaaaggcaatctattcggttttgggtcacacttcctaacaaagttttttccttgattgcattaaaatctgaacttctggggkgttattaatgaatacaatttagctatcttttttttgaaataagatgctgaaacaaaaatttattcaattaagttaaactagggatattgcaattctagcttttatgttattaaaagtagtaataatattgcacatgtatcctagaacttaaagtaaaataaagataaataatttgattattcatgcaattatatacaattatatatgcccgtttaaagacaaatatgtataatgacattaaaataattaaataaaccaatcttcgtaaattctaaaacaatgtagtagtaataataaatctttggcagatttgtctaa

SEQ ID NO: 459046 - DNA, 592 bp, Homo sapiens
gaacacccatatattttctacctggattcaaaaattgctaacattttgtcatatttactttatttctgtgtacatacattgccccacatacatttgacttcactaactacctgatttatgaatcttttctaaatattaattaaggcccagattctgcttgaacaagttaagtagtgatgatctcagtctcactaaaggcaatctattcggttttgggtcacacttcctaacaaagttttttccttgattgcattaaaatctgaacttctggggtgttattaatgaatacaatttagctatcttttttttgaaataagatgctgaaacaaaaatttattcaattaagttaaactagggatattgcaattctagcttttatgttattaaaagtagtaataatattgcacatgtatcctagaacttaaagtaaaataaagataaataatttgattattcatgcaattatatacaattatatatgcccgtttaaagacaaatatgtataatgacattaaaataattaaataaaccaatcttmgtaaattctaaaacaatgtagtagtaataataaatctttggcagatttgtctaa

SEQ ID NO: 459047 - DNA, 530 bp, Homo sapiens
accacacctggctatgtaaattttttctttttagtagagatgggggtttcactatgttggccaggctggtctcgaactcctgacctcaaatgatccactgccttggccttccaaagtgctgggattacaggaatgagccaccacaccagggctatattgacttttttagagttaaactttaggggtcatgccgattcagatgagcaactgttaaaaaaatctctaagctttgctaactttaaaaaaaaatttaagttgacatatcatagttgtacatactttttggggtccatgtgatattttgatacatgtgtacaatgtgtaatgattaaatcagggtaactgggatagccaycacctcaaacatgtatcttttgtttgttttgggaacattaacaattctctttttctagctattttgaaatatgcaataaattatgtgtgtctatgttcatggtggatatcggtctgtagttttgtttgtttgtttgtctgactaactttatcaggtatttgtatcaaggtaatat

SEQ ID NO: 459048 - DNA, 624 bp, Homo sapiens
ttcttgccctcctgaggctaagtacttacattaacatgagagaacagagaaataatggagaggttggggagacttacaggcatgatttctctttttatttttaaggataaattaatcccatggatatttattagggtctcttttgccacctctggctaaactctgtcaatgtcaagcaagggagatgaataagatatgaattctgctaaaaacctataatctattgggaggytgaggtgggtggatcacgaggtcaggagttcaagaccagcctgaccaacatggtgaaatcctgtctctaccaaaaacacaaaaattagctgggcatggtggcatgtgcctgtatcccagctactcaggaggctgaggcaggagaatcacttgaacctgggaggtgaaggttgcagtaagccaagatcgcaccactgcactccagcctgggggacagagcagaactcaaaaaaaagaagaaaagaaacttaacaatctagtaaacaagatgtctaaaatgtagataactctgatgaaaattagatttcttttaaaagtgagagcaagtttattaagaaagtaagagaataaaagaatggctactccataggcagagcagcagcttgagctgct

SEQ ID NO: 459049 - DNA, 636 bp, Homo sapiens
ttctttggtatttgagcagggccagaaaaaattagtaatattttattcattcaacaaatattttatttatcttactgttttatttcatctcttttataccaacacataattagatattatgtagatgtataaatattatcatatagccacacctggagctatgacttggaattcagaacctttattttgaaagtgttaggaaaccatatacgcaaaaggcaagatgatattccacctttctgggacttgaggccctataaagctaggaaaatctagaatcatgaggagaggaagtatatcttggcaatggacaagtctacaacaacactgctacccatcagcwgtgagttccaaaggtcacaaaagccacaccttagttcacacaacccaccaaacccgaagtggagcaacacactcctagaccttgagagaatgatttgcctaagaaaacaaggacaacagtgggagtctgttagaaagagcttcctctatacgaccaagggaaaaagaacagaacagcttctgtttccagtgcagcgaccctttgtgagagaacatgctcacctttgttttcctacctttccaatctggctcttcttcatcaagctgaacctctttgatccctgccagcaggca

SEQ ID NO: 459050 - DNA, 599 bp, Homo sapiens
aaatcaaaagtgctcaatcccactactgtttrtgggcttctaatgccctctagaacattgttccaagtcacatatgctctaaagcaacatcaaagtcagacaacatcatcttgaccttcttcattgaatgcattcgaaatccagcactctaaccatataaactctaaaagaatatgctaaatgaaaaatcagtttaagtttttgtaaactgtaagaatcaaggaccctgggatgagacatagacagagtacgaagacagacattcgtagattagagcagtagttctcagctgggggtaattttgtcccccccagggcatatttggcaaaactggagacattttgggtcatcacaacttggaggaaaggaagatgctactgggatatcgtgggttgaggccagggatgctggagaacatcctgcaatgcaaaagataatccccttccccctaacaaataattatctggccccaaatgtcaatagttctgagactgagagaaatcctatactagagccatcaaaagttaacaggtcttttcagcaattgtgaatgttaaagtttaacaattccaatctaagttcacattttaagcccccct

SEQ ID NO: 459051 - DNA, 599 bp, Homo sapiens
aaatcaaaagtgctcaatcccactactgtttgtgggcttctaatgccctctagaacattgttccaagtcacatatgctctaaagcaacatcaaagtcagacaacatcatcttgaccttcttcattgaatgcattcgaaatccagcactctaaccatataaactctaaaagaatatgctaaatgaaaaatcagtttaagtttttgtaractgtaagaatcaaggaccctgggatgagacatagacagagtacgaagacagacattcgtagattagagcagtagttctcagctgggggtaattttgtcccccccagggcatatttggcaaaactggagacattttgggtcatcacaacttggaggaaaggaagatgctactgggatatcgtgggttgaggccagggatgctggagaacatcctgcaatgcaaaagataatccccttccccctaacaaataattatctggccccaaatgtcaatagttctgagactgagagaaatcctatactagagccatcaaaagttaacaggtcttttcagcaattgtgaatgttaaagtttaacaattccaatctaagttcacattttaagcccccct

SEQ ID NO: 459052 - DNA, 565 bp, Homo sapiens
cctaagaaagtacatgctaaaactactatatgcctggccattatctaaagagaagagagttcttaagaagaggtggttagagggaaaacagaggtgaaagaaatatattctagtttatttagttggcaattacttgtggggcatctagtatgttccattctcccaactggtcttataaaaagtatcccgcatattccctatttattctcccaaatatctttttacctttcccaaacaagaagcagaaattaattttgaaagggtctctcataaaaatggatgtataattcttttatgaatagtgtagctattattattttaaattatagcaaactttaagggacaaagtggtcagcacctcattaaagggtcaagtgatttattttgcctattctgctagtcaacatttgtggtcktgggttttgtttcattgcaggaactcagatttggatgcagatgcactattttaaatcctttttcccacctccaaatccacaaaaccttgaacctaatttaaaaagtctatgaggctgaaagtcaggggaaagaggacttatgatgtttc

SEQ ID NO: 459053 - DNA, 626 bp, Homo sapiens
aattttaaatggcaataacttaaattcaatatggtggtttataactgagtgttaagtactttaatttatagtcttcagcataatactcctgtaagaaaaacgttcagctacatttggaaaggcaaaaatataccacaaatataaggcagaagatgcttttgactttttatgatataacagctacrtctatctagatatacaccaggccctttgataggtttgtttgggatttttttttgtggtttttttgttctttcttgtcctttgaaaaattccaagtattttctttcactaacaagaaaagattattttccatgtttagcaagaaaatatttatcagcaccttctcccaacttagtgtcaaaggaggtgtcactctgaatcagttcccacaatcctgaagctagcctgcagtgagacatcaactttcacaccaaacttacatatgacttttagcaagatgccctctgccccagctttctttcaatgtagcaaggaaaaaacactactactttcctcctgggaactgggagaagtgtcaaaggaaatcttttcaatgaaaggaaaaagaacatatcacacttgtaatattttctctcttgctaagccatagttccatgaaaata

SEQ ID NO: 459054 - DNA, 585 bp, Homo sapiens
aaggaatacaaagcttaaaaaggtagcctttgtgtgttaacacaaataaatgatgtaagtggcagacactaaatgttttatgaggattatctcatttaatccttacaatagctgtgcaagtagatgtcattatcatcatttccattttacagacgagaaaatcaaacacaagaaggctaaacaaatggcccaggtaaaataggagtaaaatggagttggcagtctaattcttaaccaacttgctacataacttcatctagttagttctctctgttatgttcagtaacttctgtttgcttctagggtagaactagtaggctggcagcrgggctgaaactggggctggtgatggaagtcaaattcccaatgaaaaacatggagatacagtagtatgtaatgataaagagcattgggtgaaatcatggcttcaatattccctagttgtatgtgtgtatgcgtgtgtgtgtgtgtttcccaactttattaatgtttaattatatgtatttctagtgtataacatgatgttttgatataggtaaacattatgaaataattaaatcaagctaattaacatattcatcacct

SEQ ID NO: 459055 - DNA, 569 bp, Homo sapiens
tctgccaatctatgagcatgggatgcattttcatttgtttgtgtcatctatgatttgtttcagcagtgttttgtagttctccttgtagaaatctttcacctccttggttaagtatattgctaggtatttttttgtttgtttttgcagctgttgcaaaagggattgagttcttgatttgattctcagctcggttgtcgttggtgtgtagcagtgctgctgrtttgtgtacgttgattttgtaacctgagactttactgaattcatttatcaaatctaggagtcttttggaggagtgtttaggcttttctaggtatatgatcacatcactggcatacagtgatagtttgatttcctcttttgcaatttgggtgcttttatttctttgtcttgcctgattgctccatctaggacttctattgtttctatttcagaagaagaggaaaatgatgcacaaaaactgccaaagatttgattaagtttgcttaataatttgggctctagaagcaaaacacctcccagaaaaaggtttgttatccctaatttcatagcactggaagacttgtgaaatc

SEQ ID NO: 459056 - DNA, 569 bp, Homo sapiens
tctgccaatctatgagcatgggatgcattttcatttgtttgtgtcatctatgatttgtttcagcagtgttttgtagttctccttgtagaaatctttcacctccttggttaagtatattgctaggtatttttttgtttgtttttgcagctgttgcaaaagggattgagttcttgatttgattctcagctcggttgtcgttggtgtgtagcagtgctgctggtttgtgtacrttgattttgtaacctgagactttactgaattcatttatcaaatctaggagtcttttggaggagtgtttaggcttttctaggtatatgatcacatcactggcatacagtgatagtttgatttcctcttttgcaatttgggtgcttttatttctttgtcttgcctgattgctccatctaggacttctattgtttctatttcagaagaagaggaaaatgatgcacaaaaactgccaaagatttgattaagtttgcttaataatttgggctctagaagcaaaacacctcccagaaaaaggtttgttatccctaatttcatagcactggaagacttgtgaaatc

SEQ ID NO: 459057 - DNA, 569 bp, Homo sapiens
tctgccaatctatgagcatgggatgcattttcatttgtttgtgtcatctatgatttgtttcagcagtgttttgtagttctccttgtagaaatctttcacctccttggttaagtatattgctaggtatttttttgtttgtttttgcagctgttgcaaaagggattgagttcttgatttgattctcagctcggttgtcgttggtgtgtagcagtgctgctggtttgtgtacgttgattttgtaacctgagactttactgaattcatttatcaaatctaggagtcttttggaggagtgtttaggcttttctaggtatatgatcacatcactggcatacagtgatagtttgatttcctyttttgcaatttgggtgcttttatttctttgtcttgcctgattgctccatctaggacttctattgtttctatttcagaagaagaggaaaatgatgcacaaaaactgccaaagatttgattaagtttgcttaataatttgggctctagaagcaaaacacctcccagaaaaaggtttgttatccctaatttcatagcactggaagacttgtgaaatc

SEQ ID NO: 459058 - DNA, 569 bp, Homo sapiens
tctgccaatctatgagcatgggatgcattttcatttgtttgtgtcatctatgatttgtttcagcagtgttttgtagttctccttgtagaaatctttcacctccttggttaagtatattgctaggtatttttttgtttgtttttgcagctgttgcaaaagggattgagttcttgatttgattctcagctcggttgtcgttggtgtgtagcagtgctgctggtttgtgtacgttgattttgtaacctgagactttactgaattcatttatcaaatctaggagtcttttggaggagtgtttaggcttttctaggtatatgatcacatcactggcatacagtgatagtttgatttcctcttttgcaatttgggtgcttttatttctttgtcttgcctgattgctccatctaggacttctattgtttctatttcagaagaagaggaaaatgatgcacaaaaactgccaaagatttgattaagtttgcttaataatttggkctctagaagcaaaacacctcccagaaaaaggtttgttatccctaatttcatagcactggaagacttgtgaaatc

SEQ ID NO: 459059 - DNA, 591 bp, Homo sapiens
tttacatctgttgtcctactgtaattattagtagtatcccctttggctatcagaatgtcctgtttagtgagaaatgatatggttatcctaatatcagtgcaattgcaacctgaggtgtccttatttaagcttatgcagtgctttcaaatataaaacatctgtctctggagggactgggcttcctctcactggaagtgttcaagctgaagatagtcagcctcttgatgtttctttatgaggaaatctaaggcacaagaatactagtaggattgggtgacgtcaaagacctttctcctctcccttggagtaaatgagcttgttggaggttatcagtgattctgagagcttccatgaacatgacaygtattggacactgtaacctcccaaagaagaggctacgatctctgacctcaaggtcagaatctaatagaaaaacccaggacaacaacacatttggtaggtctggaacatcaggcatgaagcaacagtgatgagaaataatagcccaaatttacagaaagaaagaaagaaaggcccagaaagggaaagtaatttgcctgaggccatgaataaaggcagagggagggcatc

SEQ ID NO: 459060 - DNA, 592 bp, Homo sapiens
aatttcagcatgtggttcaattctgagcaaaattccggtgaaaatgctatccttctttattaaataggaatggtagccaggtgcagtggctcatactcatggtcccaatgctttgggaggccaaggcaggagaattgctcgagtccaggagtttgagaccagcctggtcaacrtggcaataccccatctctatgaaaaatgcaaaaattagccaggcatagcacagctgcacaccagttgccccagctactcaggaggctgaggtaagaggtcaggaggtcaaggctgcagtgagctgtgattgtaccactgcactcctaggtgacagagcaaggccatgtctcaaaattaattaattaattaatgtaatatgaatggcttgattagagagggagtgggaccctcaatcttgtcaaccatgagagaaaacaccacccaagagcaaatcaggacctcagtagcagagcatgggcaaacttaccccttgaactcttagtcatctgcctggagccaaggcaccacatactaccgagcaagcgcgtgtgagaacccacaacctccatccctgttttacctgcaacactaacctcag

SEQ ID NO: 459061 - DNA, 541 bp, Homo sapiens
gtccctgtgttgcccaggctggtctcaaacttctgggctcaagtaatcctcctgccttggcctcccaaaatgctgggattagaggggtgagccactgtgcccagccagttgtttgtttgtttttttttaactttttaatcatagccattctgactggtgtgagatagtatcttactgttttgatttgaatttctctaatgagtattgatgttgagcatttttycatatgcttgttggctgtgtatatgtcttcttttgagaagtgtctgttcatatcttctgccatttttaaataatttttgttgatttatttaagttccttatagattctggtgattagacctttgtcatatgcatagtttgcaaatattttctcccattctgtaggttgtctgcttggcatttctcttggacaatatagacagttgaaataccagactatttttattggtttcatgttgttatctttctgtttgctcatccttgagtaatttgagttgagttcaggacctgttttgccattgagtatttattaatgtgt

SEQ ID NO: 459062 - DNA, 541 bp, Homo sapiens
gtccctgtgttgcccaggctggtctcaaacttctgggctcaagtaatcctcctgccttggcctcccaaaatgctgggattagaggggtgagccactgtgcccagccagttgtttgtttgtttttttttaactttttaatcatagccattctgactggtgtgagatagtatcttactgttttgatttgaatttctctaatgagtattgatgttgagcattttttcatatgcttgttggctgtgtatatgtcttcttttgagaagtgtctgttcatatcttctgccatttttaaataatttttgttgatttatttaagttccttatagattctggtgattagacctttgtcatatgcatagtttgcaaatattttctcccattctgtaggttgtctgcttggcatttctcttggacaatayagacagttgaaataccagactatttttattggtttcatgttgttatctttctgtttgctcatccttgagtaatttgagttgagttcaggacctgttttgccattgagtatttattaatgtgt

SEQ ID NO: 459063 - DNA, 496 bp, Homo sapiens
taaataattatctgtcctcagatatcaatggtgtgaagttgagaaagtctcacctgccttttcctgtttctggtcctggagatctgtaggtggcttctatgtccatttatctctgggctttttccttctgcyttgggtctgttgatatgcttatcttgccattgagcatgctatgtctttcagatttagatctaaactgtcatactgtgtgttaggcagtaataatggtattacttgatgtgaataaatttacactctggtttatattttttcaacctgtgaatttggttagcgtggtcctaccctttagagatggatcccctttctcaagctgaacaataaataggagttcctgagtctgtaatgttgaaggccatgccctggataattgtgaattcagcaagatcaattccattcaagagttaacctcctggagaatcaagccaacttttttcaagggacgacctactttcaactcactgctgagcaccatgtg

SEQ ID NO: 459064 - DNA, 411 bp, Homo sapiens
tagtctttctgattctgttttcttacataaaaatgaaggggctttcttcttttttgttttgaaatatatgctttgagaaattagtttgatagtatgcgtaataccctggcagagaggagtaggcccttattaaatgttattctgtccccactaccaccaccacctctcggaatctggtcaaagaaaaaaaaagttatttttawtgtttcacttattctatattactaatttcaaattgatgtacttgtgaaaaacctcagcctgatggaaggaaaaggacacatgtctctgcagttctaagaatgtatgggtgagaaagttgacctctttggattaacacttgaactctacatgttgggtctttgctctgtctctgtgccagatctcttagcaattgagataaatatatct

SEQ ID NO: 459065 - DNA, 493 bp, Homo sapiens
cctgtagtcctagctactcaggagactgagataggagggttgcttgagcccaggaggcagaagctgcagtgagccatgtttgcaccactgcactccagcctgggtgacagagtgagaccctgtatcaaaaacaagctaacaaacacacacacacacacacacacacacgaaagaaagaagaaagaaagagagagagagaaagaaagaaagaaagaaagaaagaaagaaagaaagaaagaaagaamgaaagaaagaaattaatttataaatcagcaaatagaatggaatctctgacctcaccccaaatctgtatttggtggaagctgaatgtaaataaacagatgaaccagaagaacaaggaagcaaacaacattcatgatcaggaaagagagtgaaatcaactagagtatccacagaatccagcctgtaacatcagcctcattagcacagccccaaggctagaggaaattatgttttggggcatctaggatga

SEQ ID NO: 459066 - DNA, 576 bp, Homo sapiens
tcttacgcagtaggggaaaaggactgtggagtcactgacctttgccatctgctcctgccagctcctcttgccagggcccctccagcaggccaagtcccatatccacctgctggctgcccagagctgcacacagaggacaagagccctctggctcattcattgttcactctactcttccatcttgaagattcttaggcttaggtcctcaggacaccaactccaaatgagttaattaaaaagacaaagaatataattgtcaacagagttcatgagttatccagcttcaggtagtgtrtatttcaacctaaaaaacaaacaaacaaaaaagaaaactgctagtttcaacaaaggctccagattcctctgaaaatacacctaacttatgtaggaaaatatagaatcctagacaggacaccagttcgtcagtttaacaaatgtgagattgaagggactgagccaccaagctctgcactttctcaaactgaagccagaccctcaagcagttgttaattttcagtttttgtccttgactcaatgggaacacaaatattctaaaatgcaagaccagataaagtt

SEQ ID NO: 459067 - DNA, 600 bp, Homo sapiens
caacgttcccaggctgtcagatcactcaggctcaaggttgctctgggtcaagtgtctgaagatacactgtccaatacagtagtcactaatcacatgtggccatttaaatttgaatttaaataagttaagatgaaatgaaatttgaaaatttakctcttctgttgtactaggcacatttcaagtgttcaataaacacatgaagctagtggttaccacattggacagtgtagatatagaacaattccacaacacaaaagttatattggatggagctggtctaaaacatataaatatacataaatgtccaggaattctctgattctttatgggagctatttccagactgaaaccccattcaggttttcaaacaattatttaaagcaattatacaggatttgttcttcctctgcacccagcctagaaatattttagggaataaggaaaaaaatgtcttattccttttatacagcaaattacattttgcgtggaaaaaatcaaggaaacccacacaccaggtttagtactcaagcatgcaaccctacaaaatgttggctaacaagccctttctttagaagtaatgcaatttgcacacataaatta

SEQ ID NO: 459068 - DNA, 600 bp, Homo sapiens
caacgttcccaggctgtcagatcactcaggctcaaggttgctctgggtcaagtgtctgaagatacactgtccaatacagtagtcactaatcacatgtggccatttaaatttgaatttaaataagttaagatgaaatgaaatttgaaaatttatctcttctgttgtactaggcacatttcaagtgttcaataaacacatgaagctagtggytaccacattggacagtgtagatatagaacaattccacaacacaaaagttatattggatggagctggtctaaaacatataaatatacataaatgtccaggaattctctgattctttatgggagctatttccagactgaaaccccattcaggttttcaaacaattatttaaagcaattatacaggatttgttcttcctctgcacccagcctagaaatattttagggaataaggaaaaaaatgtcttattccttttatacagcaaattacattttgcgtggaaaaaatcaaggaaacccacacaccaggtttagtactcaagcatgcaaccctacaaaatgttggctaacaagccctttctttagaagtaatgcaatttgcacacataaatta

SEQ ID NO: 459069 - DNA, 600 bp, Homo sapiens
caacgttcccaggctgtcagatcactcaggctcaaggttgctctgggtcaagtgtctgaagatacactgtccaatacagtagtcactaatcacatgtggccatttaaatttgaatttaaataagttaagatgaaatgaaatttgaaaatttatctcttctgttgtactaggcacatttcaagtgttcaataaacacatgaagctagtggttaccacattggacagtgtagatatagaacaattccacawcacaaaagttatattggatggagctggtctaaaacatataaatatacataaatgtccaggaattctctgattctttatgggagctatttccagactgaaaccccattcaggttttcaaacaattatttaaagcaattatacaggatttgttcttcctctgcacccagcctagaaatattttagggaataaggaaaaaaatgtcttattccttttatacagcaaattacattttgcgtggaaaaaatcaaggaaacccacacaccaggtttagtactcaagcatgcaaccctacaaaatgttggctaacaagccctttctttagaagtaatgcaatttgcacacataaatta

SEQ ID NO: 459070 - DNA, 481 bp, Homo sapiens
ggatacaatctcttaattctgagttcagggaggtatctgcctatccaatttgtctcttgactcagcttccattgggttcatgtcagagtgcccagtggagcaagaggctataagtaaaaacagaaacaccttkggactggggcagccctcctttggggaccctctaacagaatgtggcaaagatgaaggaaacagtcttcctccacacacctgacacctgagggcttgggatggcaacggtaaggaacttcaggagaattacagccatttacagaccagcacagagcagaacagcatttcagccatacctactgtcgtagtctgttcaggctactataacaaaaatgccatgagccaggtggcttataaataacaattatttctcacagctctggaggttgggaagtccaagatcaaggtgcccgcagagtcaatgtctggtgagggcctgtttgcttcctcatagacagcaccttctgtg

SEQ ID NO: 459071 - DNA, 608 bp, Homo sapiens
tttatctatataacaaacctgtacatgtaaccctgaaactaaaataagagttaaatatatatccacattaataacaatgtgatatggtttcaatctgtttccacccaaatctcatgttcagttktaatccccactgctggaggtgggtcctggtgggaggtgattgtcatgggggcagtttctcatgaatggtttagtaccatctcccttggttgtgataatgagttattgtgagaactggttgtttacaagtatgtagcacctccctggctctctctctcttcctccacctctggcaatgtgcagtgctggctctcccttcatcttctgccatgattgtaagtttcctgaggccccctcagaagccaagcagatgtcagtatcatgcttcccatataccctgaggaataatgagccaattaaacctttttaatatatgaattatccaatctcaggtttttctttacagcaatgtgagaatggactaatacacaatgtaaatggtctacacatccaaattaaaaggcagaaagattctctgattggattgaaaaaaaaaaaaaaaagcaagatgccacaatatactggctgcaagaaaactaccttaa

SEQ ID NO: 459072 - DNA, 518 bp, Homo sapiens
tgtgcagtgctggctctcccttcatcttctgccatgattgtaagtttcctgaggccccctcagaagccaagcagatgtcagtatcatgcttcccatataccctgaggaataatgagccaattaaacctttttaatatatgaattatccaatctcaggtttttctttacagcaatgtgagaatggactaatacacaatgtaaatggtctacacatccaaattaaaaggcagaaagattctctgattggattgaaaaaaaaaaaaaaaagcaagatgccacaatatactggctgcaagaaaactaccttaaatataaaggcagctaggttaaaagtaaaggaatgaaaaaagctgtrtcatgcaaacactaactaaaaggaagctggagtacctggtattcataagaacaccagacaaagtatgcttcggtacaggagtattacccaatatacagagtcattagataatgaggaaagggacaattcatcaacaagatacaagaatcctaaatgtatatac

SEQ ID NO: 459073 - DNA, 521 bp, Homo sapiens
attgaaaaaaaaaaaaaaaagcaagatgccacaatatactggctgcaagaaaactaccttaaatataaaggcagctaggttaaaagtaaaggaatgaaaaaagctgtatcatgcaaacactaactaaaaggaagctggagtacctggtattcataagaacaccagacaaagtatgcttcggtacaggagtattacccaatatacagagtcattagataatgaggaaagggacaattcatcaacaagatacaagaatcctaaatgtatatacgtctaacagcaaagcttcaaaatgcatgaagcaaaaactgatagaactcaaaggaaaaatagacaactccgtgattacagttggacacttcaataatcctctattaataaatgacacagaaagaaaactaggaagaacacagaagacctgaacrccaccataaagcaactaattaatatttaaagaaaaccctatccagaacagaagatgagacattcttttcaaatattaataaaacagtcaccaagat

SEQ ID NO: 459074 - DNA, 469 bp, Homo sapiens
tatatcctggttcaggttcagtggaggggagaccctgggccccctccttgagtgcctyatctatctatctatctatctatctatctatctatctatctatctatcacctgtctatcttatctattatctatcaatcatctatcttatctatgatctgtgtatcatctacctatcattgatctgtcatctagctagctagctagctatcatttatcttaactctatctgttaaaatttatttatttttgtcatctatctaaatctgtcttcattatcatcttttatctatcaaaatctatcaaaatttatatattatttatcatctattatctgtcacccacttatcaatcaaaatctgtcacctatctatccacttataatctatcatctgtctctatctgtccacctatcatatatcacctatctagctctctattatctatatctatctatccatccacctgtcatc

SEQ ID NO: 459075 - DNA, 599 bp, Homo sapiens
tattataaataacactataatatgctcctacatatatcttgtacttacttacatatatctcgtatttcatgaaattttgaggggtaatctgtagagatggaactgcttggtgtaagactacccatatctcaagacttstgagatacactgctgattgcctttcaaaaagtgcgtactaattattatgttcttagcagtgaacaagagtgtcaatttctaaacgccttcaatgagttatagtctttgccaactttaaggaaaacatacctcatcttaaacttttaatttgaatggttttgattaataatagagttgaacatttgttcatataatttactgactatatttattgttttgggaattggttccatatagttttcccatttttataaggtagggctattccttttctcattgcactataaaatcttctaaatatattaaagatattaattccttacctatcatatatgttttaagttttctagtttgtcactgttttttctcttcagtacaaatgctctttattttctgatagttctgtgtatcagtatttctccttaagttttctgactttgttaaggagaccttatgtgtgt

SEQ ID NO: 459076 - DNA, 387 bp, Homo sapiens
tggacatcacatctggaagacttggggtagaatcttggtattacctggacaaytttagacaagtcacttaatctgtgtgacactcattgacctcatctgtagaatggaaataagaataaaacatttaccaaagaatttaaattatacctaaaaacataatacctggaacagagtaagtacttaaaaagtgcaatgttgatatattttgcaaaacatagtaaaacaatgatactttttataaattgagaggatatatttccatgacaggcatcttttcataaatctcattgtcagaggaagggctgtaggaagcacaggatgcttcccagggcattgctgtgggtgagaacattggaaaaaaaaccaactaaattaacatctcttgac

SEQ ID NO: 459077 - DNA, 387 bp, Homo sapiens
tggacatcacatctggaagacttggggtagaatcttggtattacctggacaactttagacaagtcacttaatctgtgtgacactcattgacctcatctgtagaatggaaataagaataaaacatttaccaaakaatttaaattatacctaaaaacataatacctggaacagagtaagtacttaaaaagtgcaatgttgatatattttgcaaaacatagtaaaacaatgatactttttataaattgagaggatatatttccatgacaggcatcttttcataaatctcattgtcagaggaagggctgtaggaagcacaggatgcttcccagggcattgctgtgggtgagaacattggaaaaaaaaccaactaaattaacatctcttgac

SEQ ID NO: 459078 - DNA, 387 bp, Homo sapiens
tggacatcacatctggaagacttggggtagaatcttggtattacctggacaactttagacaagtcacttaatctgtgtgacactcattgacctcatctgtagaatggaaataagaataaaacatttaccaaagaatttaaattatacctaaaaacataatacctggaacagagtaagtacttaaaaagtgcaatgttgatatattttgcaaaacatagtaaaacaatgatactttttataaattgagaggatatatttccatgacaggcatcttttcataaatctcattgtcagaggaagggctgtaggaagcacaggatgcttyccagggcattgctgtgggtgagaacattggaaaaaaaaccaactaaattaacatctcttgac

SEQ ID NO: 459079 - DNA, 543 bp, Homo sapiens
tgctgatcacttgagtccaggagttcaagaccagcctaggcaacatagggagacccccatctctataaaaaaatacacaaaaaaattagccaggcgtggtgacacacacctgtggtactagctcctcgggaggatcacctgagcccgggaggcagaggttgcagtgagctgagatcatgccactgtaacttcagcctgggcaacagagacccccatctcaataataaataaataaatagccagtcagtcagcattcattttaaaggtacccgctggatgcaaaatattaccccaaaacccagttccaaacctaagctcaaggccctccaccagtcccttcacataagatagtttttctcatgaatgttgaggaactagaatccttcaagtaccgcaggtgaaactatttggtgtccttggtaaattttttttatattcttgacttgaagtggcagcaaaatgtactcagaagatgatgagatkctggttccaaaagctggaatttgaatcttaactttgtcctggttatttactatgtaaact

SEQ ID NO: 459080 - DNA, 530 bp, Homo sapiens
taaacatccctgcctgacagctctgaagagagcagtggttctcccaacatggtgtttgagctctgagaacagacagacttcctcctcaagtgggtccctgacccccgtgtagcctaactgggagacatctcccagtagggaccaacagaaacttcatataggcggctgcccctctgggatgaagcttccacaggaaggatcaaggagcartatttgctgttctgcagcctctgctggtgatacccaggcaaacagcatctggaatggacctccagcaactccaacagacctgcagctgagggacctgactgttagaaggaaaactaacaaacagaaaggaatagcatcaacatcaacaaaaaggtcatctacaccaaaaccccatgtgtaggtcaccaacatcaaagaccaaaggtagataaaactacaaagatgggaagtaaccagagcagaaaagctgaaaattctaaaaatcagagtgcctcttatcctccaaaggatcacagctccacgccagcaacggaacaaaa

SEQ ID NO: 459081 - DNA, 555 bp, Homo sapiens
ctaaatattgtaccatgcacatcaccgcaccccatggcaaagaattacatagcaatagtgccaagattgaaaaattcttctctagagaaaccactaaaaaaacacaaggacatatagggcaaaagatgatasaggcaataaaatggaacgcttaaaaatactcagttcacccagaagaaagcaggaaagaaaaaacaaagggacaaataaaaaataactgccaagattgtggatttcaactaaccatatcaatgattgcattaaatgtacatagatgaaacccaccaattaaaacgcaaagataatcagactagatttaaaaagcccaattatatgctgtttttgagaaatatgcttttaaatatactaacacagacaggttgaaagtaaagttgaaaaaaagacaaactttgcaaacattacacataggaaagctggtgtgaccatatcaatcacaaaaacataaacatgaaaaatactatcaaaactaccaggtccaatgttcactatttggtacactagtgaacattagaagcccaatccccaccagcatgc

SEQ ID NO: 459082 - DNA, 555 bp, Homo sapiens
ctaaatattgtaccatgcacatcaccgcaccccatggcaaagaattacatagcaatagtgccaagattgaaaaattcttctctagagaaaccactaaaaaaacacaaggacatatagggcaaaagatgatagaggcaataaaatggaacgcttaaaaatactcagttcacccagaagaaagcaggaaagaaaaaacaaagggacaaataaaaaataactgccaagattgtggatttcaactaaccatatcaatgattgcattaaatgtacatagatgaaacmcaccaattaaaacgcaaagataatcagactagatttaaaaagcccaattatatgctgtttttgagaaatatgcttttaaatatactaacacagacaggttgaaagtaaagttgaaaaaaagacaaactttgcaaacattacacataggaaagctggtgtgaccatatcaatcacaaaaacataaacatgaaaaatactatcaaaactaccaggtccaatgttcactatttggtacactagtgaacattagaagcccaatccccaccagcatgc

SEQ ID NO: 459083 - DNA, 583 bp, Homo sapiens
aacattgaatataaatggactaaactcttcaatcaaaagacagtggctgaatgaataaaaaagcaagacccaataatctgttgcctacaagaaccacacttcacctatatatacacacacacagactgaaaataaagagatggaaaaagatattccatgcaaatggaacccaaaaaacaggagtagctatacttatatcagacaaaatatatttcaagattaaaaactctaaaaagagacatagtcattgtataatgataaaggggtcaattcagcaagaagatataacaattgtaaatatatatacatgcactactrgaacaccaagatatataaagaaaatattattagagttaacaagagatagaacccagtacaataatagctggaaacttcagcaccccactttcagcattggacagatcatccagacagataatcaacaaagaaacatcagacttaatctgcattacagaccaaatggacctaatatttacagaccatttgatcccagccacagaatacacattcttctcctcagcacatagattattctcaagaatagaacataagttaggccaca

SEQ ID NO: 459084 - DNA, 557 bp, Homo sapiens
tgcagccttttcagagatcctaaagcagaagacctaggtaagccatgcctggattcctgacccaaagaaagtgtgcacaacaaaatgtgttgttttataatgctaaattttgagatactttgttacacagcagattacagattrtgatgtgttgcatggacatcaaagtcacatgaagagtttttatgtttttagtcataatttccccccccaaatattatttttaaatttttcaagtgaaaaaaatcctttacattaaaacattttccaaagaaaaaacccacttttctccccaaaataacctctctttacccatttggagcatatccttctacatctttttcataaaattatatacagtaggccttctgtatctacgggttccacatccatggatttaaccaaccacaaatcaaaaatactcagaagaaaaatggtaaaaaaataacaatacaataaaaaaaatacaaatttttttacccaatacagtataacaactatttacatagcatttacattgcagtaaatatatatgtaatctagagatgacttaaagt

SEQ ID NO: 459085 - DNA, 557 bp, Homo sapiens
tgcagccttttcagagatcctaaagcagaagacctaggtaagccatgcctggattcctgacccaaagaaagtgtgcacaacaaaatgtgttgttttataatgctaaattttgagatactttgttacacagcagattacagattatgatgtgttgcatggacatcaaagtcacatgaagagtttttatgtttttagtcataatttccccccccaaatattatttttaaatttttcaagtgaaaaaaatcctttacattaaaacattttccaaagaaaaaacccacttttctccccaaaataacctctctttacccatttggagcatatccttctacatctttttcataaaattatatacagtaggccttctgtatctaygggttccacatccatggatttaaccaaccacaaatcaaaaatactcagaagaaaaatggtaaaaaaataacaatacaataaaaaaaatacaaatttttttacccaatacagtataacaactatttacatagcatttacattgcagtaaatatatatgtaatctagagatgacttaaagt

SEQ ID NO: 459086 - DNA, 573 bp, Homo sapiens
tggttgggaggcttagaattttatttttggtttacagaggccacccagcaaggcctgcctgtttagattcttcttggcctctctgtgtagcatttcttcctcccaggtatagggcaagacctttctggaatgcagattttatgacctactattggacaagataggtagaattttccttttggtttacagtttaatccaccaatgaggaccccatggataaggagggccaactgtatattgtaatttcacattgcagaaacccaatggacagaccaaatgtggggatcaggaatctagaaccaggcaccatcagaggccctagaaggcagagggcrtaggccaggcagcaggaatcccaagcctgaccacagtttaggggctcagtgtggaattccaggctctgggaagggactagagagggcaagtgagagtcctagtccctaaagacctagaatctaagcaggtcatgaaggtagaaacttggacatgagatgcacagaatccatgtcccagagttagaagaaaaaacaagaccaagtcaccaaaacaccactggatttcgttgccagaaca

SEQ ID NO: 459087 - DNA, 560 bp, Homo sapiens
cgctcgtcctgtgacaggcacggggccggcttctggagacactgacccaccccgccccctgggggktatgctcggaaggcgggaggacaccaacaggtgtggatggttctcagcggaagggccgcgggggcccaacggggttagcacggacttggggctccgaggagcccggccggcggagaggctgtgggggagctccgaggcccagcgccccaacccctcgcccgccccagcccgccccggcccatcgcggcctgcagcccattcgctcccgcgccctgcccctgcctggcagggggcccctcggccggggctggggtctcctctctggaccgggccgcccgtaggcaccggcgagaggcgagaccccggcccgctcggccccttaccttcccgctggcagtgccgccgctcacccctatcaggaagggccgctggtgcggacggtcggcctccggcgcggggctctcgcagtcttcgcctcccgccgaagccatctcggcctccgctcccgcgcatcgggtccccgcgcccgccccttccccaggcccggcgcgccc

SEQ ID NO: 459088 - DNA, 571 bp, Homo sapiens
tctaattctcgcctttggaggcaagattctccctgccctaagtcacccagggccaggtatcaggtgactagagaccactctgcagcccagagcctgctagaattactcaaactagccaattttaaactctttccctgccctgccaggccttttccatggaaaccccaagaaagcctcaggcctgggctctcccctcgcccctgcttctgcctcctgaccaaacctggggttctctactgagaaccgtgcatggcatgggtgccccttctctcaggaaatgcgatcaatcttgcgatggctttggcctctcctcatggtcattcagccgtacctctgtaaattaagccccaggcacagaacagtgcctagcaaacagccacgctgctggcttagatctgtccaggtgtgtgtcccaaaggtggccatcccccaagccarctttgaatttgtatcaagggagagttagacacggtttcttgccatttcttcccctgtggtccagccacgtagcgaaaggcagggaaactagcagagtctgaccaggggctgtccctgatacccctggcctggg

SEQ ID NO: 459089 - DNA, 630 bp, Homo sapiens
tgggaatccccactgtgtacccgcccccatcccagcccagcctaggaggccatactcgccgcaccctacacaagtcctttgcttccctcagggacctcaagcctcccacccccaccatcctgctggcctccagattttctgcctcctgaaacctgggcccaggccccagcaatggtcctctccccaatctgctggtggctcccacaggacagggaaattaacagcacttgagtgtgctctgaaggttggtacaacctggcggccccacactgcccatgycctcctagtggagccaggtgacttctgggcctgcaggggctgagcaggatgcatcttccagctctgggccacgaggaagtgatggcactgtcctctcttgtctcaccagcagatctccaggcccagtgaggctgaggctttgggggtgaggttgttggacacacagttcccagtgagtcctgatggcaccatggaccttacaggggctcagagggggaaagcagcttgcttggggctacacagtctatggatgaacagagccagggctgaggggacaacaggaaactctgttcatgggggcccgagttcccatcctgaccaatcttgggcaagtcattcacagttgagttt

SEQ ID NO: 459090 - DNA, 630 bp, Homo sapiens
tgggaatccccactgtgtacccgcccccatcccagcccagcctaggaggccatactcgccgcaccctacacaagtcctttgcttccctcagggacctcaagcctcccacccccaccatcctgctggcctccagattttctgcctcctgaaacctgggcccaggccccagcaatggtcctctccccaatctgctggtggctcccacaggacagggaaattaacagcacttgagtgtgctctgaaggttggtacaacctggcggccccacactgcccatgtcctcctagtggagccaggtgacttctgggcctgcaggggctgagcaggatgcatcttccagctctgggccacgaggaagtgatggcactgtcctctcttgtctcaccagcagatctccaggcccagtgaggctgagrctttgggggtgaggttgttggacacacagttcccagtgagtcctgatggcaccatggaccttacaggggctcagagggggaaagcagcttgcttggggctacacagtctatggatgaacagagccagggctgaggggacaacaggaaactctgttcatgggggcccgagttcccatcctgaccaatcttgggcaagtcattcacagttgagttt

SEQ ID NO: 459091 - DNA, 571 bp, Homo sapiens
aaagtgaaagaataaataacagggtgaaagtccaaaactcattaattcatttattccccaaacactgatgaartttgactagtatgtgaccttcatagagacatggaaggtttaatctgttcctgacattagaaagaaaaaacaaaacctgatgatatctttatgggaaaatctgtggccacatcgaaattatcaaaacgtttcgttaagacagttaaaacagctttaaaaagacagtgatgtccaccctaagaaaacggattaaaaagctcctttatccaatggtcacctgggttttatgttttataacagggcaggtcatatgtgggttcaggttgaaaagggaaccacggagggtgtgattgatcacaagactaaggtcaaggcttcactgaaggaaatcaggacagaatgacaaagtgaggtggcggctgggcaggatgggaccgggtgttctagtagaaccctgggaaggaaccaagacagcataaaacatggtgggtattttgtgggcatctccacagaaggattgaaagactctgtctagattgagtttaaaaattaaaaagga

SEQ ID NO: 459092 - DNA, 571 bp, Homo sapiens
aaagtgaaagaataaataacagggtgaaagtccaaaactcattaattcatttattccccaaacactgatgaaatttgactartatgtgaccttcatagagacatggaaggtttaatctgttcctgacattagaaagaaaaaacaaaacctgatgatatctttatgggaaaatctgtggccacatcgaaattatcaaaacgtttcgttaagacagttaaaacagctttaaaaagacagtgatgtccaccctaagaaaacggattaaaaagctcctttatccaatggtcacctgggttttatgttttataacagggcaggtcatatgtgggttcaggttgaaaagggaaccacggagggtgtgattgatcacaagactaaggtcaaggcttcactgaaggaaatcaggacagaatgacaaagtgaggtggcggctgggcaggatgggaccgggtgttctagtagaaccctgggaaggaaccaagacagcataaaacatggtgggtattttgtgggcatctccacagaaggattgaaagactctgtctagattgagtttaaaaattaaaaagga

SEQ ID NO: 459093 - DNA, 412 bp, Homo sapiens
tgcaggggcgtgggtgggagttgtgattagaaaggtcaataaaagcttctaaagacccacaggagagacccaaagtcttcaagcctggagttcctgcttggttcttcctgaggactgagcaccttctagactacatccagatctggtaagycactaatttctgtaaggacactcccatctgacctacagtcagtcggtctgggatggtgacagtgcagcctacgatggcacagagctatatcctgccctgttttttttcatatgaacaatttgaagcttgaatgttttcctctaaatgcagttctgtctttatttcaaaaaagttgattgtgctttggttgatgccattttaaaattcgtgaagggagcaataactcatgcctttaaccccaacactttgggaggccaaagt

SEQ ID NO: 459094 - DNA, 594 bp, Homo sapiens
aagagtgagagagggagagagagaaagagagagagaatgagagaagggatgcagggaaagaagacaagaaagaaagaaggcagagagagggggaaagaaagaaagagggagagagaggaggaaasaaagaaagaagggagggagagagggaaagaaggaaagaagaaagagagagaaagagaaagcaagcttaaataatgaaaagaaaacaaatagaacctgttctagggatgccccatgaatgttcccaacaagcttatttgtaggaactgaaaatgtgggcatgtaggcttgtgacattcccattcccattgttttagaaccttgagtaattagtaatttcccccaatggtaggaggggttcactttcaggttcctccacactcactagtcactggatggagcactggatagaaaggaagggctcgtggtggccctgcttcctcactgcttcggagacgctcatgctgatgcagcagaggcagaatgctggcttaatggccactgagtacagggcagaattggagtaaactgagggctgtttcaccattgccagagcagtgactttggccttgggagaagataagattgcat

SEQ ID NO: 459095 - DNA, 551 bp, Homo sapiens
ttccctgcagattcgtgaagatgagcatccggactccacccagactcctggagcttgcagggcggagcctgctgagggaccaagccttggccatgtccaccctggaggagctgcccacagaacttttccccccactgttcatggaggccttcagcaggagacgctgtgaggccctgaagctgatggtgcaggcctggcccttccgccgcctccctctgaggcctctgataaagatgccttgtctggaggccttccaagctgtgctcgatgggctkgatgcactgcttacccaaggggttcatcccaggtgaggtggcccaggtgggctggtggggagggcccaggtatccaaccaaaggaagagctgtgtcatgacaagtgaggaggcccaagggggatggtggtggtgaggaagccgagaggacttggccattcaccagctcctcagggaaagcactgctcaccacgcaaggtccatggaggtaacaggaacctctcctctaatggcactgaaaggcaccatgaaaagtgagaactgggccgggcacggt

SEQ ID NO: 459096 - DNA, 399 bp, Homo sapiens
aaatcatggtaacaggaatagccaccatctcaagaatttatcatttctttgtgttagcaacattccaattccattgttttaattatgtagaaatttactatgaactattgtcaacacgagttgccctattgtgctactgaaccctagatcttattcctgtctgtgtttttgttcccattaaccatccccttcttattctctatttcccagtacccttcctagcttctgataaccgtcattttactatttttaagtttcgtgttttttaattcccaaatatgagtgcaaacatccatgtttgtctttctgtatctggcttacttcactcaacataaygccctccagttccatccatgttgtcgcagatgacaggatttccttcatgtttacagctcaatg

SEQ ID NO: 459097 - DNA, 581 bp, Homo sapiens
tactaccacacaggtgttatagtaactgcaatggggaagcctgtttcacccaaacacaagtttgttcccatcatcagatgatggtctgtgtgcaaggtgctgcctgatgaagactcagatcattcaggggcagctccattttaggctcagtcctttcagccttgcttgtgtgattggttcaaggccacaaaatctttaaagcctctttactgcatctttcagcagacaacctcatctctgggccagaggagcccagtgggagatgtgcacaaagaactcaactgagcaaggtctagggacatcagctagggccacctgyctgcaaaggttccctgacgtgcccgcgtctgcaaaccacctatcactttataccactctcctgcctactccctcacctctgtccaagaagcatgcttttctcatgtcaactacttttcctggggttcaaaagaaccttttacagacagagaattagaggcaggatcattggtgtttactaagctgtgaggacggagcttctactgtgaaacgcacaggtttgatgcactttcccttctttcatactctcctctatatgaaga

SEQ ID NO: 459098 - DNA, 581 bp, Homo sapiens
tactaccacacaggtgttatagtaactgcaatggggaagcctgtttcacccaaacacaagtttgttcccatcatcagatgatggtctgtgtgcaaggtgctgcctgatgaagactcagatcattcaggggcagctccattttaggctcagtcctttcagccttgcttgtgtgattggttcaaggccacaaaatctttaaagcctctttactgcatctttcagcagacaacctcatctctgggccagaggagcccagtgggagatgtgcacaaagaactcaactgagcaaggtctagggacatcagctagggccacctgcctgcaaaggttccctgacgtgcccgcgtctgcaaaccacctatcactttataccactctcctgcctactccctcacctctgtccaagaagcatkcttttctcatgtcaactacttttcctggggttcaaaagaaccttttacagacagagaattagaggcaggatcattggtgtttactaagctgtgaggacggagcttctactgtgaaacgcacaggtttgatgcactttcccttctttcatactctcctctatatgaaga

SEQ ID NO: 459099 - DNA, 604 bp, Homo sapiens
aggggtgggaaatcatctcaatggtaaacttgaagtgggcattgagtaattctgcaccttactaccacacaggtgttatagtaactgcaatggggaagcctgtttcacccaaacacaagtttgttcccatcatcagatgatggtctgtgtgcaaggtgctgcctgatgaagactcagatcattcaggggcagctccattttaggctcagtcctttcagccttgcttgtgtgattggttcaaggccacaaaatctttaaagcctctttactgcatctttcagcagacaacctcatctctgggccagaggagcccagtgggagatgtgcacaaagaactcaactgagcaaggtctagggacatcagctagggccacctgcctgcaaaggttccctgacgtgcccgcgtctgcaaaccacctatcactttataccactctcctgcctactccctcacctctgtccaagaagcatgcttttctcatgtcaactacttttcctggggttcaaaagaaccttttacagacagagaattagagrcaggatcattggtgtttactaagctgtgaggacggagcttctactgtgaaacgcacaggtttgatgc

SEQ ID NO: 459100 - DNA, 642 bp, Homo sapiens
catgtcaactacttttcctggggttcaaaagaaccttttacagacagagaattagaggcaggatcattggtgtttactaagctgtgaggacggagcttctactgtgaaaygcacaggtttgatgcactttcccttctttcatactctcctctatatgaagagtaagtttcatcatattaacttcaaacgcacttcctaaaaaggaattcacaaatgcaccctccctagatctgaacccctgactaactagatccctgcatgtctctctctgtagcatctggcccgggccatccctctgcccttatttgagcgggtttgtgatacccacttcaggatatagagcactgaacagcataatgagttgacattctagcgtcccattccctgtgacatcaccagtggctggcacacagtagatgcccactagcgtttactgtgaaaaagaacaaaagtctgtggtatggtccgcagagaaagctcaccatcctttcttacctgagcaggtgctccaggtctttgatattattgacctttcttatataaagcatctgagggtaggacaggcagaggaatggacagtccaagtcaggaacgaactattgttggccgcttacatataactcactgtcataaccgaaggct

SEQ ID NO: 459101 - DNA, 642 bp, Homo sapiens
catgtcaactacttttcctggggttcaaaagaaccttttacagacagagaattagaggcaggatcattggtgtttactaagctgtgaggacggagcttctactgtgaaacgcacaggtttgatgcactttcccttctttcatactctcctctatatgaagagtaagtttcatcatattaacttcaaacgcacttcctaaaaaggaattcacaaatgcaccctccctagatctgaacccctgactaactagatccctgcatgtctctctctgtagcatctgscccgggccatccctctgcccttatttgagcgggtttgtgatacccacttcaggatatagagcactgaacagcataatgagttgacattctagcgtcccattccctgtgacatcaccagtggctggcacacagtagatgcccactagcgtttactgtgaaaaagaacaaaagtctgtggtatggtccgcagagaaagctcaccatcctttcttacctgagcaggtgctccaggtctttgatattattgacctttcttatataaagcatctgagggtaggacaggcagaggaatggacagtccaagtcaggaacgaactattgttggccgcttacatataactcactgtcataaccgaaggct

SEQ ID NO: 459102 - DNA, 348 bp, Homo sapiens
ctggggttcaaaagaaccttttacagacagagaattagaggcaggatcattggtgtttactaagctgtgaggacggagcttctactgtgaaacgcacaggtttgatgcactttcccttctttcatactctcctctatatgaagagtaagtttcatcatattaacttcaaacgcacttcctaaaaaggaattcacaaatgcaccctccctagatctgaacccctgactaactagatccctgcatgtctctctctgtagcatctggcccgggccatccctctgcccttatttgagcgggyttgtgatacccacttcaggatatagagcactgaacagcataatgagttga

SEQ ID NO: 459103 - DNA, 642 bp, Homo sapiens
catgtcaactacttttcctggggttcaaaagaaccttttacagacagagaattagaggcaggatcattggtgtttactaagctgtgaggacggagcttctactgtgaaacgcacaggtttgatgcactttcccttctttcatactctcctctatatgaagagtaagtttcatcatattaacttcaaacgcacttcctaaaaaggaattcacaaatgcaccctccctagatctgaacccctgactaactagatccctgcatgtctctctctgtagcatctggcccgggccatccctctgcccttatttgagcgggtttgtgatacccacttcaggatatagagcactgaacagcataatgagttgacattctagcgtcccattccctgtgacatcaccagtggctggcacacagtagaygcccactagcgtttactgtgaaaaagaacaaaagtctgtggtatggtccgcagagaaagctcaccatcctttcttacctgagcaggtgctccaggtctttgatattattgacctttcttatataaagcatctgagggtaggacaggcagaggaatggacagtccaagtcaggaacgaactattgttggccgcttacatataactcactgtcataaccgaaggct

SEQ ID NO: 459104 - DNA, 499 bp, Homo sapiens
agccactgcattccagcctgggtggcagagtgagactctgtctcaaaaaaaaaaaaaaaaaaaaaaaaagtaaagggaagccaagcatggcggcttacagctgtaatcccaacactttgggaagccaaggcagaacaatcacttgagcccaggagttccagaccagccagggcaacatagtgatagcccatgtctactagactctactagaatattaagtaattatctgagcattgtggcacatgcctatagtctcagctactctgcacatggaggtgggaggatggcttgagcctgggaagcagaggtttcagttatctgagattttgccaccacactccagcctgggcaacagagaaagaccctgtctcaagtaataataataataataataataataataataataataataataayaacacactttgggattgagtctaggggaagaaatggatcctacattcaaaacaaagactctactcttgaaaatagtgta

SEQ ID NO: 459105 - DNA, 604 bp, Homo sapiens
gaaacccaaactcccttgtacacaactcactctcctgaattggccctctcttgagtatctacctttgctttgcaatagacacttcttgccttttgcttcattctgcctacttcctaaactctttcttgcagcgatgacaagaatgtggacactggttggtgattgagtctctgggtacctggagatgacctaatcactatggcaatagtcagagtctaaaaatcacaccggatattacaattcactctggtttttcttgggggaaaaatccagtaactttggccccatttctccaagggcatcactcagcacaaactgataaacagcagtcctaccactgrgttgtaagtatatggccttatttctgggttctctattctgttccattggtctatgtcttgaccctcatactggcaccatgcagttttgcttactattgccttaccatataaattgaagtcaggtaatgtgatgcctccacatttgttcattttgcttaggattgctttggctctttagcctcttttttggctccaaatgaattttaggattctttttgtaatcctgtggaaatgatgtttgtattttggtgtatgcaattttt

SEQ ID NO: 459106 - DNA, 604 bp, Homo sapiens
gaaacccaaactcccttgtacacaactcactctcctgaattggccctctcttgagtatctacctttgctttgcaatagacacttcttgccttttgcttcattctgcctacttcctaaactctttcttgcagcgatgacaagaatgtggacactggttggtgattgagtctctgggtacctggagatgacctaatcactatggcaatagtcagagtctaaaaatcacaccggatattacaattcactctggtttttcttgggggaaaaatccagtaactttggccccatttctccaagggcatcactcagcacaaactgataaacagcagtcctaccactgagttstaagtatatggccttatttctgggttctctattctgttccattggtctatgtcttgaccctcatactggcaccatgcagttttgcttactattgccttaccatataaattgaagtcaggtaatgtgatgcctccacatttgttcattttgcttaggattgctttggctctttagcctcttttttggctccaaatgaattttaggattctttttgtaatcctgtggaaatgatgtttgtattttggtgtatgcaattttt

SEQ ID NO: 459107 - DNA, 573 bp, Homo sapiens
gggcacgccttctctagcagcaaagatggagctccagttcctcagacggtgatgagccacaggaagggcagggggtggggccaatgaagatcctcttgggctgcctgacttccctcagtgtacacatcagctcagcccgaagtggggtgaagatctcccaattgacacgaaccaaggaattcaaactctcctcaggggcaggatacgtctccaggcttaacttgctcagcccactggtgtggcgcagcaggtccttcagggcgtcaatagacatgcaattkctgccaaagtagaaggtggtgagctgggagcagcggctcaggccaggcaggatggcactgagttgggagtagtggatctgacagccctccaagatgagggttttgagagaggcagcaattttctccagcagagctccgaggggttcaagactgatgcggaacagcagcacgtagctgagattcagatgctttaggtaaccgaggcttgggtactgggagagacacttcatgtcttcttccaataggtagccataagttaattccaagttctccaaggggttctggaggcacc

SEQ ID NO: 459108 - DNA, 247 bp, Homo sapiens
ttgggtctctcctgtgggtctttagaagcttttattgacctttctaatcacaactcccacccacgcccctgcacatatccgctgckaccttccaatcaaaaaatgatatctgattgcatttgtgaagctccacccagttaatcctgattgggtttttggctctccccagattaccggattgaatcagatgtccattcatatcacatatctatattcacttcatgaagcaagaaatcgacagtgttag

SEQ ID NO: 459109 - DNA, 580 bp, Homo sapiens
ttatgaaaatgaaagcatacttggagaatcacgaataacaccaagtctatgaactgtaattgaagggcacaaaaacaaataacttcaaatgtcaagaaataaaaattcatgtcactgtaaatttttaatatatttttaaaaaacctgcttcgataagaattttaaaatgacaaaaaccaagcacaaatcacaatttgatggatgaagacaaaactacatttagaggaaaaatgaaagcctaaatctgttcatctcacgaaacagacagaaaaatattgtgtgccactttgggatgtgtgtcaccgtccctgactggctggctgctgatcagatgggcatgaccctaagcaggtggtgacttaccagcgctggactcacttcgcagagttctgggacctctcaggraaccaagcagtagcttcaggaatgagtgctgtgggtctcttctgggtaccctcaggagcttttatagacctttctaaccccacccttcccttctcaatcaccagcttccaatcagaaagtgatacctgattagatcttgcagtcacacccagttaatcctgattgagttttcagc

SEQ ID NO: 459110 - DNA, 580 bp, Homo sapiens
ttatgaaaatgaaagcatacttggagaatcacgaataacaccaagtctatgaactgtaattgaagggcacaaaaacaaataacttcaaatgtcaagaaataaaaattcatgtcactgtaaatttttaatatatttttaaaaaacctgcttcgataagaattttaaaatgacaaaaaccaagcacaaatcacaatttgatggatgaagacaaaactacatttagaggaaaaatgaaagcctaaatctgttcatctcacgaaacagacagaaaaatattgtgtgccactttgggatgtgtgtcaccgtccctgactggctggctgctgatcagatgggcatgaccctaagcaggtggtgacttaccagcgctggactcacttcgcagagttctgggacctctcagggaaccaascagtagcttcaggaatgagtgctgtgggtctcttctgggtaccctcaggagcttttatagacctttctaaccccacccttcccttctcaatcaccagcttccaatcagaaagtgatacctgattagatcttgcagtcacacccagttaatcctgattgagttttcagc

SEQ ID NO: 459111 - DNA, 580 bp, Homo sapiens
ttatgaaaatgaaagcatacttggagaatcacgaataacaccaagtctatgaactgtaattgaagggcacaaaaacaaataacttcaaatgtcaagaaataaaaattcatgtcactgtaaatttttaatatatttttaaaaaacctgcttcgataagaattttaaaatgacaaaaaccaagcacaaatcacaatttgatggatgaagacaaaactacatttagaggaaaaatgaaagcctaaatctgttcatctcacgaaacagacagaaaaatattgtgtgccactttgggatgtgtgtcaccgtccctgactggctggctgctgatcagatgggcatgaccctaagcaggtggtgacttaccagcgctggactcacttcgcagagttctgggacctctcagggaaccaagcagtagctycaggaatgagtgctgtgggtctcttctgggtaccctcaggagcttttatagacctttctaaccccacccttcccttctcaatcaccagcttccaatcagaaagtgatacctgattagatcttgcagtcacacccagttaatcctgattgagttttcagc

SEQ ID NO: 459112 - DNA, 605 bp, Homo sapiens
gaatcctgcacttggggtcttttctaccatgttctgtcgccaggtcttctcgaggtgctcatctgctgccaagctcagagcaagcttcaaaacccatctcaggaaacgacctgacctattctccaatcccagaatccacatgggattccaaagatcttatgaggcccttgcttaggctatctagaatattcatgagcctctgttttctcccccagcttgagctgatggggccggcgtcactttatgcatcccaaggccatcagcccatatatcatggaattaaaaaaagggccacaatgcagagagacccagcagtaattaagaaattttccccartttatattgagtgatgttggtgaacagggcaaggcacaaagcaggaaactccacagctgctgctctggacctaaagaggcaccctggacttctgggtggtgacaatgcctggcttgcagaggaagacctgacccctctggtcttccaatgctgccattatgttgacagagccttcgactggtgggggggcaggggccatcccttcccaggttcccctggtccagccttagagctgataaagatgcacctggaatgcagtaagtattttt

SEQ ID NO: 459113 - DNA, 605 bp, Homo sapiens
gaatcctgcacttggggtcttttctaccatgttctgtcgccaggtcttctcgaggtgctcatctgctgccaagctcagagcaagcttcaaaacccatctcaggaaacgacctgacctattctccaatcccagaatccacatgggattccaaagatcttatgaggcccttgcttaggctatctagaatattcatgagcctctgttttctcccccagcttgagctgatggggccggcgtcactttatgcatcccaaggccatcagcccatatatcatggaattaaaaaaagggccacaatgcagagagacccagcagtaattaagaaattttccccaatttatattgagtgatgttggtgaacagggcaaggcacaaagcaggaaactccacagctgctgctctggacctaaagaggcaccctggacttctgggtggtgacamtgcctggcttgcagaggaagacctgacccctctggtcttccaatgctgccattatgttgacagagccttcgactggtgggggggcaggggccatcccttcccaggttcccctggtccagccttagagctgataaagatgcacctggaatgcagtaagtattttt

SEQ ID NO: 459114 - DNA, 438 bp, Homo sapiens
tggctgctaccaaaacaaaagctggaggctttacacttaygggcaaaagaacaattagcaaagggacatattgagccttcattttcgccttgaattctcctgtgtttgtaactcagaaaaaatccggcagatggcacatgttgaccgacttaagagccgtcaatgctgtaattcaacctatgggggctctccaacctgggttgccctctctggccatgatccccaaagattggcctttaattataattgatctgaaggattgcttttttaccattcctctagcaaaacaggattttgaaaaatttgcttttactataccagccataaataataaagaaccagccaccaggtttcagtggaaagtgttgcccagggaatgcttaatagtccaactatttgtcagatttttgtagctgaagctcttcaaccagtcagaga

SEQ ID NO: 459115 - DNA, 438 bp, Homo sapiens
tggctgctaccaaaacaaaagctggaggctttacacttacgggcaaaagaacaattagcaaagggacatattgagccttcaytttcgccttgaattctcctgtgtttgtaactcagaaaaaatccggcagatggcacatgttgaccgacttaagagccgtcaatgctgtaattcaacctatgggggctctccaacctgggttgccctctctggccatgatccccaaagattggcctttaattataattgatctgaaggattgcttttttaccattcctctagcaaaacaggattttgaaaaatttgcttttactataccagccataaataataaagaaccagccaccaggtttcagtggaaagtgttgcccagggaatgcttaatagtccaactatttgtcagatttttgtagctgaagctcttcaaccagtcagaga

SEQ ID NO: 459116 - DNA, 438 bp, Homo sapiens
tggctgctaccaaaacaaaagctggaggctttacacttacgggcaaaagaacaattagcaaagggacatattgagccttcattttcgccttgaattctcctgtgtttgtaactcagaaaaaatccggcagatggcacatgttraccgacttaagagccgtcaatgctgtaattcaacctatgggggctctccaacctgggttgccctctctggccatgatccccaaagattggcctttaattataattgatctgaaggattgcttttttaccattcctctagcaaaacaggattttgaaaaatttgcttttactataccagccataaataataaagaaccagccaccaggtttcagtggaaagtgttgcccagggaatgcttaatagtccaactatttgtcagatttttgtagctgaagctcttcaaccagtcagaga

SEQ ID NO: 459117 - DNA, 438 bp, Homo sapiens
tggctgctaccaaaacaaaagctggaggctttacacttacgggcaaaagaacaattagcaaagggacatattgagccttcattttcgccttgaattctcctgtgtttgtaactcagaaaaaatccggcagatggcacatgttgaccgacttaagagccgtcaaygctgtaattcaacctatgggggctctccaacctgggttgccctctctggccatgatccccaaagattggcctttaattataattgatctgaaggattgcttttttaccattcctctagcaaaacaggattttgaaaaatttgcttttactataccagccataaataataaagaaccagccaccaggtttcagtggaaagtgttgcccagggaatgcttaatagtccaactatttgtcagatttttgtagctgaagctcttcaaccagtcagaga

SEQ ID NO: 459118 - DNA, 442 bp, Homo sapiens
atctctctcctcctcatttactctggcccccatcagctcctctgggccactccctttctggagtccccctggctccatccggcggcagtgagttcgcagatctccyggaccccaggctgctacaggcacctccctcaacatccactgtctgctctcagagtgaccttctcctcatatcttcattgcaggaaaaaagaggggaagcccctggtcttggggaagatagttataaatgcaatctggaataaaacccccttgaggactagaggaggccagcagggcctgaccagagatttttgactgttagaaatgcacagagggcaaacaccacaggaaaagcgctgactcagaaacagactcactgcattccaggtgcagcctcctcagctctaaggctgggccagcagagcctgggaagggatggcccccacactgggaccat

SEQ ID NO: 459119 - DNA, 614 bp, Homo sapiens
tagtacatttttaaaaacaccataaaatataatccttgcaacactcaattataccatctggtccratctatcagcagatggcacccgagacatacggattggaaattttgatcttattatgaatgaatccagtccagaaatgcccaccctgccccctgctggctcctggggctctgctctttgggggaatcatgatgaaattgtggcagagagtagaagttgagccccattgcatgccctgagttcttgttgcctctctattatcaggaaaaggaggtgagattgaaagatgaaaaatgctgggacttctgctgagaagagaaaaaagaacaagatgtattgatcttactgtatgccagaccccatgccaagccctaaacatgaaccatctcattggatcctaccaaggtcccataagctgttggatatcatcatcctcattttacaggaagctgaggctctaggctaacatccctgacagcaacaccagcccctgagtacacagcaggatccttcacttgggtgcccactatgcaggcttcctcaccacagggaaggtcactcatcacccacaggcacttgatcgttatccaccctttgatgatgtcagattc

SEQ ID NO: 459120 - DNA, 383 bp, Homo sapiens
gtggctgtctttactggctacaaccagtttaattcaagaagggctgctggtcatcaggrgaacaagcaagggttggtgctgcccagagtctccagctaatacacaatatggacatccccttccagggcagcgggaagagactggctccttgtgcagtgaagctgacatccaccaactaaggcttctggaagcatgtggagactcacagggagtgggcagggtctcagcatctggatagcggtgaaagacgctgagaagaaggtgctttccgtgtggattggctcactgttcttgcccagcaatgttccaggcctttggtgtccacctagtgtgtattaacccactgaacagccacagaaactaacaaggagttaacagacatc

SEQ ID NO: 459121 - DNA, 383 bp, Homo sapiens
gtggctgtctttactggctacaaccagtttaattcaagaagggctgctggtcatcaggggaacaagcaagggttgrtgctgcccagagtctccagctaatacacaatatggacatccccttccagggcagcgggaagagactggctccttgtgcagtgaagctgacatccaccaactaaggcttctggaagcatgtggagactcacagggagtgggcagggtctcagcatctggatagcggtgaaagacgctgagaagaaggtgctttccgtgtggattggctcactgttcttgcccagcaatgttccaggcctttggtgtccacctagtgtgtattaacccactgaacagccacagaaactaacaaggagttaacagacatc

SEQ ID NO: 459122 - DNA, 383 bp, Homo sapiens
gtggctgtctttactggctacaaccagtttaattcaagaagggctgctggtcatcaggggaacaagcaagggttggtgctgcccagagtctccagctaatacacaatatggacatccccttccagggcagcgggaagagastggctccttgtgcagtgaagctgacatccaccaactaaggcttctggaagcatgtggagactcacagggagtgggcagggtctcagcatctggatagcggtgaaagacgctgagaagaaggtgctttccgtgtggattggctcactgttcttgcccagcaatgttccaggcctttggtgtccacctagtgtgtattaacccactgaacagccacagaaactaacaaggagttaacagacatc

SEQ ID NO: 459123 - DNA, 383 bp, Homo sapiens
gtggctgtctttactggctacaaccagtttaattcaagaagggctgctggtcatcaggggaacaagcaagggttggtgctgcccagagtctccagctaatacacaatatggacatccccttccagggcagcgggaagagactggctccttgtgcagtgaagctgacatccaccaactaaggcttctggaagcatgtggagactcacagggagtgggcagggtctcagcatctggatagcggtgaaagacsctgagaagaaggtgctttccgtgtggattggctcactgttcttgcccagcaatgttccaggcctttggtgtccacctagtgtgtattaacccactgaacagccacagaaactaacaaggagttaacagacatc

SEQ ID NO: 459124 - DNA, 530 bp, Homo sapiens
ggattatctgaggtcaggagtttgagaccatcctggccaacatggtaaaacactacctctactaaaattacaaaaattagccaggtgcagtggtctgcgcctatagtccaagctactagggaggctgaagcaggaggatcgcttgaacccaggaggcataggttgcagttagctgagattataccactacaatccagcctgggaaattggctagattcaaaaaagagagagagagagagagaactacattggattagacttcttaagctccatccagttaatcatgattggatttttgtctttcttccagattaactatcaaattagatattcatccatgaaagtgaaatattyagggatatggtgaaagtccaggactcattcactgatttactccacaaacatggaattttagtaatatgtgacctttgtagttctgagtgtgagatagggaagagttgaatctcttcctgacattagacagaaagaaaaaaactcgaaagtatctttgttgagagatccttggccac

SEQ ID NO: 459125 - DNA, 547 bp, Homo sapiens
agggccctacaaggcaccaacgcaccaaagaatgcagttttgacatcctgatgacttcatccctcttaactctatatcaactttccagcmccttgctatccaggatccactggaaaccctcagtggatctcctccttggggagatgaatttgaggatctcctcctagcttctcatttagccaccctgtgatcattaaactctctgctgcaaactctgctgtctcaaaatattggtaagctactgtgcagcaggcataggaatctgatggtcctgtaataaaatcatgtcaaaattgcaaaaggaagtgagggtagaggatgggcttggttgagcttggtgttttaatgggatcctgggagtgaaccaagacttggtaaacatgttgggggttactgagggggtggaggaggaatctatccaatatttcactgatgcccctttggttttgattattaggaccaaggatgagcctttcaaaacaatttatataatcctccttatttttcctttcaaaaccttcatcttctatttttctcccaaaataat

SEQ ID NO: 459126 - DNA, 547 bp, Homo sapiens
agggccctacaaggcaccaacgcaccaaagaatgcagttttgacatcctgatgacttcatccctcttaactctatatcaactttccagccccttgctatccaggatccactggaaaccctcagtggatctcctccttggggagatgaatttgaggatctcctcctagcttctcatttagccaccctgtgatcattaaactctctgctgcaaactctgctgtctcaaaatattggtaagctactgtgcagcaggcataggaatctgatggtcctgtaataaaatcrtgtcaaaattgcaaaaggaagtgagggtagaggatgggcttggttgagcttggtgttttaatgggatcctgggagtgaaccaagacttggtaaacatgttgggggttactgagggggtggaggaggaatctatccaatatttcactgatgcccctttggttttgattattaggaccaaggatgagcctttcaaaacaatttatataatcctccttatttttcctttcaaaaccttcatcttctatttttctcccaaaataat

SEQ ID NO: 459127 - DNA, 547 bp, Homo sapiens
agggccctacaaggcaccaacgcaccaaagaatgcagttttgacatcctgatgacttcatccctcttaactctatatcaactttccagccccttgctatccaggatccactggaaaccctcagtggatctcctccttggggagatgaatttgaggatctcctcctagcttctcatttagccaccctgtgatcattaaactctctgctgcaaactctgctgtctcaaaatattggtaagctactgtgcagcaggcataggaatctgatggtcctgtaataaaatcatgtcaaaattgcaaarggaagtgagggtagaggatgggcttggttgagcttggtgttttaatgggatcctgggagtgaaccaagacttggtaaacatgttgggggttactgagggggtggaggaggaatctatccaatatttcactgatgcccctttggttttgattattaggaccaaggatgagcctttcaaaacaatttatataatcctccttatttttcctttcaaaaccttcatcttctatttttctcccaaaataat

SEQ ID NO: 459128 - DNA, 533 bp, Homo sapiens
tatgagcatggctcactgcagcctcaatcttctgggctcaattgtttctcccatgtcagcaacccatacagttgggaagacagatgcatgctaccatgcccggctaattaaaaaatatgtatattttgtagaggccaagcaccagtggctcakggctgtaattccagcactttgggaggccaaggcaggtggatcacttgaggtcaggagtttgagaccaacttggccagcatggtgaaaccccacctctactaaaaatacaaaaattagccaggcaagttggcagttggatgtaataccagatactcaggaggctgaggcatgagaattgcttgagcctgggaggcagaagttgcaatgatttgagatcgtgccactgcactccagccttggaaacagagcgagactccatccccccttcaataaagaatattttatagagatgggtttttgccgtgttgtccaggttggtctcagacccctgggctgaaatgatcctcccgccttggtctcccaaagtgttggggttaaag

SEQ ID NO: 459129 - DNA, 533 bp, Homo sapiens
tatgagcatggctcactgcagcctcaatcttctgggctcaattgtttctcccatgtcagcaacccatacagttgggaagacagatgcatgctaccatgcccggctaattaaaaaatatgtatattttgtagaggccaagcaccagtggctcagggctgtaatyccagcactttgggaggccaaggcaggtggatcacttgaggtcaggagtttgagaccaacttggccagcatggtgaaaccccacctctactaaaaatacaaaaattagccaggcaagttggcagttggatgtaataccagatactcaggaggctgaggcatgagaattgcttgagcctgggaggcagaagttgcaatgatttgagatcgtgccactgcactccagccttggaaacagagcgagactccatccccccttcaataaagaatattttatagagatgggtttttgccgtgttgtccaggttggtctcagacccctgggctgaaatgatcctcccgccttggtctcccaaagtgttggggttaaag

SEQ ID NO: 459130 - DNA, 533 bp, Homo sapiens
tatgagcatggctcactgcagcctcaatcttctgggctcaattgtttctcccatgtcagcaacccatacagttgggaagacagatgcatgctaccatgcccggctaattaaaaaatatgtatattttgtagaggccaagcaccagtggctcagggctgtaattccagcactttgggaggccaaggcaggtggatcacttgaggtcaggagtttgagaccaacttggccagcatggtgaaaccccacctctactaaaaatacaaaaaktagccaggcaagttggcagttggatgtaataccagatactcaggaggctgaggcatgagaattgcttgagcctgggaggcagaagttgcaatgatttgagatcgtgccactgcactccagccttggaaacagagcgagactccatccccccttcaataaagaatattttatagagatgggtttttgccgtgttgtccaggttggtctcagacccctgggctgaaatgatcctcccgccttggtctcccaaagtgttggggttaaag

SEQ ID NO: 459131 - DNA, 533 bp, Homo sapiens
tatgagcatggctcactgcagcctcaatcttctgggctcaattgtttctcccatgtcagcaacccatacagttgggaagacagatgcatgctaccatgcccggctaattaaaaaatatgtatattttgtagaggccaagcaccagtggctcagggctgtaattccagcactttgggaggccaaggcaggtggatcacttgaggtcaggagtttgagaccaacttggccagcatggtgaaaccccacctctactaaaaatacaaaaattagccaggcaagttggcagttggatgtaataccagatactcaggaggctgaggcatgagaattgcttgagcctgggaggcagargttgcaatgatttgagatcgtgccactgcactccagccttggaaacagagcgagactccatccccccttcaataaagaatattttatagagatgggtttttgccgtgttgtccaggttggtctcagacccctgggctgaaatgatcctcccgccttggtctcccaaagtgttggggttaaag

SEQ ID NO: 459132 - DNA, 528 bp, Homo sapiens
attttttgaaataaagacaaaactgcatttaraggaaaaaatgcaaagcttcaaattgttcatatgagaaaaaaaacaaaacaggatataactctatgccatcttaggctgcactgtcaccatcccagaccagctgactgtaggtcagttgggagtgtccttacagagagattagtgacttaccagatctggactcagtttggagggtgctcagacctcaggaagaactaagcaggaactccaggcttgaagactttgggtctcttctgtgggtctttagaagcttttattgacctttctaatcacaactcccacccacacccctccacgtatccactgctagcttccaatcaacaagtgatatctgattgcatttctgaagctccacccagttaatcctgattggggttttggctctccccagattaatggattgaatcagatatccattcatatcagatatccatattaagttcatgaatcaagaaattgacagtgttagggatagggtgggaatcaagaatgcat

SEQ ID NO: 459133 - DNA, 528 bp, Homo sapiens
attttttgaaataaagacaaaactgcatttaaaggaaaaaatgcaaagcttcaaattgttcatatgagaaaaaaaacaaaacaggatataactctatgccatcttaggctgcactgtcaccatcccagaccagctgactgtaggtcagttgggagtgtccttacagagagattagtgacttaccagatctggactcagtttggagggtgctcagacctcaggaagaamtaagcaggaactccaggcttgaagactttgggtctcttctgtgggtctttagaagcttttattgacctttctaatcacaactcccacccacacccctccacgtatccactgctagcttccaatcaacaagtgatatctgattgcatttctgaagctccacccagttaatcctgattggggttttggctctccccagattaatggattgaatcagatatccattcatatcagatatccatattaagttcatgaatcaagaaattgacagtgttagggatagggtgggaatcaagaatgcat

SEQ ID NO: 459134 - DNA, 511 bp, Homo sapiens
cactgtgggaacagaaaccggcctttactcagtggaaggtaaagggaatagaagtggggaccactcagaatccaaagggaaaagggattgataaaagacatagagaacagggagcactgaggacaggagcagctgatttatgggatgagaatgaaagcaaaggtcagggatgagtccytctaaattgctgagcctctcccttactttacccacaggaggtggaaacttcaagtgctggatttgcgggatgttgatgagaatttctgggccagatggcctggagcctgggccctgtcctgcttcccagaggccatgagtaagaggcagacctcatatgactgtccaaggacgggagagcaccagcccttaaaggtgttcatagacatctgcctcaaggaaataccccaggatgaatgcctgagatacctcttccagtgggtttaccaaaggagaggtttagtacacctgtgctgtagtaagctggtcaattatctaacgccaattaaatatc

SEQ ID NO: 459135 - DNA, 511 bp, Homo sapiens
cactgtgggaacagaaaccggcctttactcagtggaaggtaaagggaatagaagtggggaccactcagaatccaaagggaaaagggattgataaaagacatagagaacagggagcactgaggacaggagcagctgatttatgggatgagaatgaaagcaaaggtcagggatgagtccctctaaattgctgagcctctcccttactttacccacaggaggtggaaacttcaagtgctggatttgcgggatgttgatgagaatttctgggccagatggcctggagcctgggccctgtcctgcttcccagaggccatgagtaagaggcagacctcatatgactgtccaaggacgggagagcaccagcccttaaaggtgttcatagacatctgcctcaaggaaataccccaggatgaatgcctgagatacctcttycagtgggtttaccaaaggagaggtttagtacacctgtgctgtagtaagctggtcaattatctaacgccaattaaatatc

SEQ ID NO: 459136 - DNA, 588 bp, Homo sapiens
tgtgtttcaagttgatatgatgtcaaagagataatagaggagggtatgaaaggagggaaagcgcatcaaacctgtccatttcacaatagaacgtctgtcctcaccggcttagtgatcacgaatgatcctgtctttaattccctgtctgcaaaacgttgttttgaactccaggaaaggtaattgacatgggaaatgcgtgcttccgggatggaggtgagggagtaggcgtgagagtggtaaaaagtgacagttggtttgcagatgcaggcatgtcagggagcccctgccgacatgtagccctagctgatgtccctagaccttgctgagttgagttctttgttcacatctcccacggggtacctgtagcccagagatgaagttttctgctaaaagatgaaaaacaaaaaggctttagagattttatggccttgacccaatcacacaagcaatggtgaaagggctgakgctaaaatgggacagcccctgaacgatcagggtcctcatcatgcagcaacttccatgaggaccatcatcagatggtgggaacaaacttgtgtttggttgaagcaggtattttccttgaggtta

SEQ ID NO: 459137 - DNA, 588 bp, Homo sapiens
tgtgtttcaagttgatatgatgtcaaagagataatagaggagggtatgaaaggagggaaagcgcatcaaacctgtccatttcacaatagaacgtctgtcctcaccggcttagtgatcacgaatgatcctgtctttaattccctgtctgcaaaacgttgttttgaactccaggaaaggtaattgacatgggaaatgcgtgcttccgggatggaggtgagggagtaggcgtgagagtggtaaaaagtgacagttggtttgcagatgcaggcatgtcagggagcccctgccgacatgtagccctagctgatgtccctagaccttgctgagttgagttctttgttcacatctcccacggggtacctgtagcccagagatgaagttttctgctaaaagatgaaaaacaaaaaggctttagagattttatggccttgacccaatcacacaagcaatggtgaaagggctgagkctaaaatgggacagcccctgaacgatcagggtcctcatcatgcagcaacttccatgaggaccatcatcagatggtgggaacaaacttgtgtttggttgaagcaggtattttccttgaggtta

SEQ ID NO: 459138 - DNA, 527 bp, Homo sapiens
ctgcgtacacttcagagctgatgggagcctgggacaagagggagtcctggtcctcctgagttggcagggcagtagctccaaagacgcaactgaagttgtccaggtcacagttaccaaatgaggtcccccagtactctcgagggtccaggagatccccccttctcctgcagcttgggggtgtccgctctcactgcctcatctctcatggcacctgctctaattttggagtgtggttgtggtcaagcccagatgctgtcrcagcccaggtgggtctgtgcacactcgggtcagtgctgatgcaccatcccactgctgtcttgaaccctctggactttgggccttgatgagtgtaggagggaggctgaggggtgttgcggactgatcagcactggtctttggatgctccttggtacaagtgacctgggctccatggttggtggtgggaagcagacagaatcctggacaggaaggtgagggtcactggtgaagctccaccttctgatcaaggagggtctgaagcccgtggg

SEQ ID NO: 459139 - DNA, 364 bp, Homo sapiens
ccaagaaaacacaatagaaatcttcatgtatccartgatcacctgggtggtataatctcattttttttggtgtgggtgaagctgaatctcactttgtcgcccaggctggagtgcagcggctccatctcagctcactgtaacttccgcctctgagattcaagcaattctcatgcttcaaccttccacgtagctgggattacaggcatgcacccccacacccatgtctccattcgggaggaagaattacagtgaggatgtgattggtttaaaattaaggtcaaagattctctttggttaaggttttttgtttgtttgtttttgttttgtttttgtttttagcagggtcttactctgttgcccaggc

SEQ ID NO: 459140 - DNA, 364 bp, Homo sapiens
ccaagaaaacacaatagaaatcttcatgtatccaatgatcacctgggtggtataatctmattttttttggtgtgggtgaagctgaatctcactttgtcgcccaggctggagtgcagcggctccatctcagctcactgtaacttccgcctctgagattcaagcaattctcatgcttcaaccttccacgtagctgggattacaggcatgcacccccacacccatgtctccattcgggaggaagaattacagtgaggatgtgattggtttaaaattaaggtcaaagattctctttggttaaggttttttgtttgtttgtttttgttttgtttttgtttttagcagggtcttactctgttgcccaggc

SEQ ID NO: 459141 - DNA, 364 bp, Homo sapiens
ccaagaaaacacaatagaaatcttcatgtatccaatgatcacctgggtggtataatctcattttttttggtgtgggtgaagctgaatctcactttgtcgcccaggctggagtgcagcggctccatctcagctcactgtaacttccgcctctgagattcaagcaattctcatgcttcarccttccacgtagctgggattacaggcatgcacccccacacccatgtctccattcgggaggaagaattacagtgaggatgtgattggtttaaaattaaggtcaaagattctctttggttaaggttttttgtttgtttgtttttgttttgtttttgtttttagcagggtcttactctgttgcccaggc

SEQ ID NO: 459142 - DNA, 364 bp, Homo sapiens
ccaagaaaacacaatagaaatcttcatgtatccaatgatcacctgggtggtataatctcattttttttggtgtgggtgaagctgaatctcactttgtcgcccaggctggagtgcagcggctccatctcagctcactgtaacttccgcctctgagattcaagcaattctcatgcttcaaccttccacgtagctgggattacaggcatgcacccycacacccatgtctccattcgggaggaagaattacagtgaggatgtgattggtttaaaattaaggtcaaagattctctttggttaaggttttttgtttgtttgtttttgttttgtttttgtttttagcagggtcttactctgttgcccaggc

SEQ ID NO: 459143 - DNA, 555 bp, Homo sapiens
acatcacacactggggcctgttggggggtagggatggtgggggagggttagcattaggataaatacctagtgtagatgatggcttgatatgtgcagcaaaccaccatggcatatgtatccctatgtaacaaacctgcacgttctgcacatgtgtcccagaacttgaagtatatttagaaaatgcttaatgtggtgttgagtctcaaataaaatgacaccttcaaaactgattttraagatcaatgaataagaattgctcttatttaaaaatatttaagtttatacaattttggagctggaaggaagtgcaatatttttagggatatatgatttattttcttagagcagttataaggttgcagtgaagttgagcagaaagtggatcattcccacatacttcatgaccccactctagcgcggactcctaaaggatcaacgtcctgccccagcgtggtccatttgctccaatgcatgaaccacacgaaccatccttatcacccaaagttcataattaacattaagggttcacatctggtgctgtatattctatgagtt

SEQ ID NO: 459144 - DNA, 596 bp, Homo sapiens
tgcatggtgacagtttgaactggggtgggatgaaaaaatatttttatgaattttattaaataatccttgcatgtcatctccattgaagaatgaatagggtcttctccaaatatgtgctgagtatggatgcatcmaataaatgaaactattgtttatttcatatagtagagctatagatgcattctatttgcctcgagtttccaatgaacaaatgtctagtttcagtaagttctctgattatatggcagaggataacatggtcatgttctgattctgtgtctatgtcaatacttatagcatttcagtcttcataatgtgtgtcaaatgaaagagtttgattctagggggagtctgggacactacctagattagacccggttacactaatgtttcctatgcatggagataagttacaagtaatgaaatcaacaatagtcataggccacccatttgcatctatagcttctgctcagtgccaagtcatttaattatcaatattaaccaaccgtgtgtgagagcaggttctactattagttgtgatccttcccattcatctaaatgactccatagccagtaattgctttggttagtgagaa

SEQ ID NO: 459145 - DNA, 579 bp, Homo sapiens
atcaaataaatgaaactattgtttatttcatatagtagagctatagatgcattctatttgcctcgagtttccaatgaacaaatgtctagtttcagtaagttctctgattatatggcagaggataacatggtcatgttctgattctgtgtctatgtcaatwcttatagcatttcagtcttcataatgtgtgtcaaatgaaagagtttgattctagggggagtctgggacactacctagattagacccggttacactaatgtttcctatgcatggagataagttacaagtaatgaaatcaacaatagtcataggccacccatttgcatctatagcttctgctcagtgccaagtcatttaattatcaatattaaccaaccgtgtgtgagagcaggttctactattagttgtgatccttcccattcatctaaatgactccatagccagtaattgctttggttagtgagaatggctaaattttgaataggagaacttagaaagtgtttgctttgactggtgaaagtacgtaacaaaataaaatgtaggcttgatcactttgtgttaatacaaaacaaaaccaag

SEQ ID NO: 459146 - DNA, 596 bp, Homo sapiens
tgcatggtgacagtttgaactggggtgggatgaaaaaatatttttatgaattttattaaataatccttgcatgtcatctccattgaagaatgaatagggtcttctccaaatatgtgctgagtatggatgcatcaaataaatgaaactattgtttatttcatatagtagagctatagatgcattctatttgcctcgagtttccaatgaacaaatgtctagtttcagtaagttctctgattatatggcagaggataacatggtcatgttctgattctgtgtctatgtcaatacttatagcatttcagtcttcataatgtgtgtcaaatgaaagagttygattctagggggagtctgggacactacctagattagacccggttacactaatgtttcctatgcatggagataagttacaagtaatgaaatcaacaatagtcataggccacccatttgcatctatagcttctgctcagtgccaagtcatttaattatcaatattaaccaaccgtgtgtgagagcaggttctactattagttgtgatccttcccattcatctaaatgactccatagccagtaattgctttggttagtgagaa

SEQ ID NO: 459147 - DNA, 573 bp, Homo sapiens
tggcacctgtgctggcacctgaagctgcctgccccactgctgtgggagccagtgactgtccaaagtgaccagaccccctgctcactcasacacccctcactgctccagtcctgaccctcccttaataggcatgtgatccaggcctgaagcatgagccaagcatagtctaccagtctgagtgggcagaacaaacccagtgaaccccatcaaaactccggcaaaggtgcccccagccatagaggcttctggccagaaaagtcacatcccaaggatttcataagagaaaattacttaaacacaaagaaagacaataagaaaggaaggatggaagagagaagtctctaaccaaccagaaaacaagaaattaaatgggagtactaagcctttatcaataacaacaatgaagacaatatatctcagttctgcaagtgaaagtcttagggtcgttgaatgagtaaaagaataagaccatactatatgctgttttccagaaactcacttcacctataaggacacatgtagtctgaaagtgaaggggtagaaaaagatattccatgcaacacacctgtgttt

SEQ ID NO: 459148 - DNA, 573 bp, Homo sapiens
tggcacctgtgctggcacctgaagctgcctgccccactgctgtgggagccagtgactgtccaaagtgaccagaccccctgctcactcagacacccctcactgctccagtcctgaccctcccttaataggcatgtgatccaggcctgaagcatgagccaagcatagtctaccagtctgagtgggcagaacaaacccagtgaaccccatcaaaactccggcaaaggtgcccccagccatagaggcttctggccagaaaagtcacatcccaaggatttcataagrgaaaattacttaaacacaaagaaagacaataagaaaggaaggatggaagagagaagtctctaaccaaccagaaaacaagaaattaaatgggagtactaagcctttatcaataacaacaatgaagacaatatatctcagttctgcaagtgaaagtcttagggtcgttgaatgagtaaaagaataagaccatactatatgctgttttccagaaactcacttcacctataaggacacatgtagtctgaaagtgaaggggtagaaaaagatattccatgcaacacacctgtgttt

SEQ ID NO: 459149 - DNA, 615 bp, Homo sapiens
gggcaaagaaagccctgactcagaaacagactcactgcattccaggtgcagcctcgtcagctctaagactgggcaaggggatcctagaagggatggccccctgcactgggacctgtcccaggctctgccaacagcctggcacttctaggaaaaccagaggagtcagctcttcctgtggaaggcagacaaacttcccctccattggtcctgggtgcctctttaggtccggaagagcagctgaggagctccctgctttgtgccttgctatgtgcacccaaaaagctcagtagaatttggggagaatgtatgagtcactgctgattccagggagagtgtctcttagcattgtttgtggccatagtcctcggtgcaggagagatcggctgacatttccaggaagcagaggattcagcttctctcacagctcaggctgggggaggaaaacagaaattcagaaatattttagagaccccmatcaaaagcctggagaagctttggaatcccagtagaaattctgtgagtggaattgaagtcaggccgtcccttcagatgggctctgaaagctactctgacctggacagcagaggagcaccttcagaagcacaggcaaccaga

SEQ ID NO: 459150 - DNA, 647 bp, Homo sapiens
ctcctggaaacataaaacctacctagatcgaatcatgaagaaattggaaatctgggccaggcgctgtggctcacacctgtaatcccagcactttgggaagtcgaggtgggcagatcacttgaggtcaggagttcgagaccagcctggccaacatggtgaaaccctgtctctactaaaaacacaaaaattagctaggcatggtggcatgcacctctagtcctagctactcaaaaggctgcagcaggagaatcgcttgaacctgggaggcggaggttgcagtratccgagatcacaccactgtactccagcctgaatgacagagcgagactccatctcaaaaaaaaaaaaaagaaattggaaatctgaacaaaccaatgagtaaggagatagaattagtaattaaaagtctcccattaaagaaaaacccatgacgggatagcttcaaggctgaattctaccaggcatttaaagaagaatagcaattcttctcaaattcttccagagagctgaagagtaaggaatacttccaaattcattttatgaggccagctttaacctaatgccaaagccagacaaagagactatgagaaaataaaactacaggccaatatcactgataaacatagatagaaaaattatcaacaaca

SEQ ID NO: 459151 - DNA, 409 bp, Homo sapiens
gacatccatcccagaaatgcaattaagaaaattttggactccagaatatttgaaagtctgggagttttgttgacattctggaggacaaacaaatttttttaaaatggaatattaggaataaatacttaaagaaaccaataaacaaaaatacaaatatctctgaagaagggactgggttaaagatccatgggcttgaagaagtcagccaaaacatggtgaaatatctgyttgtcatgctgaaaccaagtataaacattatgtaaagaaatgggataagattttgaaaagactataatttatacagatgttagaagtaagtataagtataaggtatcctataaagtataagatatcctataaagtataaggtatcatataaaactgaaaaatataaaaatattcccaatga

SEQ ID NO: 459152 - DNA, 462 bp, Homo sapiens
tacttgggagccaaatccagcccaacacgtttaagatttctgagctaaagtcctacaaggcaatactgttttcatctagcactctttttcttttgagatgaatgccrttgaattttagttacatgagtaagtgacgacctcaggccatatgtaagtgttacagctaataggccaggtgaggtcccagctggaaggcggcatcaaccatgtatgtgagtaaggaaggtttcaaggcaactgtagccccagtctgactgcgtgagaaatcctgagcaagaaccacctgagttcaatcaaagctctccaatcatgagaaaaagcaataaaatgataattgccgggtttttttttaagccattaagatttggggtgattaattatgcaggatatagactggagcagattttggtaactgcaaatggggtgctgccacataaaacatgggagcaagcagtgggagga

SEQ ID NO: 459153 - DNA, 584 bp, Homo sapiens
ccctgcacgacaccgggaagttcacggacgggcagctggtcagccagaagagtgactcgtccaaggacatccgaggcgataagatcacctggatcgagggcaaggagcccggctgcgaaaccattgggctgctcatgagcagcatggacgacctgatacgccactgtaacgggaagctgggcagctacaaaatcaatggccggacgaaagtaagtgtgtgctgcgggtttgtgctggacaggcccttctcggcgggcagcccctgcctgcgactgaaactgcctaggctgagaagcagcattcctctatatagaagggactcgctctttcttgtgtagctccccgtaaggaagacggacagaatttgtagtagctgtttatctagttagcccctttgtatccactgttttccacttactgcccgttcacaaacttctccggctaattgcatggttttttgactcaacgtaggcgctttaactttcctattttcttttttccattccactattggtcacaattcaaaccttagtggcgttttagccacccagtgaaggrgtgttagagtaccacccaaagcaagt

SEQ ID NO: 459154 - DNA, 525 bp, Homo sapiens
agtggtttttctgtatgtgtgtgtcagatcatctactttgacagtcattacatgtgattctcaggctgcccgaaagactgaacataggcagtgagaaagttataaacgtgaacattttgtggggaaaaatacaatgtggagtctaatttacctattgccacttcattgctggatgaaggcacaagtcttaatttcttgtagtcttaaaaaggaacagttgaataatattaaactggaaggaaaagggggatctgatgaaatttcagcgttggtctttcactagattttcattgatatttttaagaaagttgtcagggcacaactttaagaarttgtcacatctgaacataaagtcctgagctccagagcaggaaagaaattagtttgagacaatagggctgtgaagactgaccaaagtatatagttgggacataagcttaaattggattcttgaagaagatgatgtcccaaatctttcttgatctgctttccttagttaatttagctttccaagttaagctgaga

SEQ ID NO: 459155 - DNA, 623 bp, Homo sapiens
ggtgtcatcaataaaggtcaactaaaatcccataattgtagtgttgccttggtgaaataattatattctgtggtatggttggtccccagcattgcaggttcagacacttcattctgccaacatatcaagatatggttcagttctgtggagatcttgagagataataatataaacctagatkacagtatagtaacttatgaaaaatataactagcaaaatcatcagccctttatgccctatggactaaactttctaattttgatttatagtcagaagtttccttaatgagtatatgcagtaaaatctgcaagctgcctgcctagaatctattccccatatagcccccatcatatccttcctagtaaagctccaattttgttcatatgcagcttgtgtgattaggggaagctgattccatacccaaattaggagataggctctatctggtctaagcctatgacactaattctgtccccttgtcaagtaattaactcagggataagatttaagccaatcagcacatggcatttccatggcaataatattgatgcaaatagtgagcacctaacctatactagtctaatcaaactgatgggaatgttcttgttcctctctgttcctct

SEQ ID NO: 459156 - DNA, 623 bp, Homo sapiens
ggtgtcatcaataaaggtcaactaaaatcccataattgtagtgttgccttggtgaaataattatattctgtggtatggttggtccccagcattgcaggttcagacacttcattctgccaacatatcaagatatggttcagttctgtggagatcttgagagataataatataaacctagatgacagtatagtaacttatgaaaaatataactagcaaaatcatcagccctttatgccctatggactaaactttctaattttgatttatagtcagaagtttccttaatgagtatatgcagtaaaatctgcaagctgcctgcctagaatctattccccatmtagcccccatcatatccttcctagtaaagctccaattttgttcatatgcagcttgtgtgattaggggaagctgattccatacccaaattaggagataggctctatctggtctaagcctatgacactaattctgtccccttgtcaagtaattaactcagggataagatttaagccaatcagcacatggcatttccatggcaataatattgatgcaaatagtgagcacctaacctatactagtctaatcaaactgatgggaatgttcttgttcctctctgttcctct

SEQ ID NO: 459157 - DNA, 591 bp, Homo sapiens
aatagaacacttgcaacactttaatgaatacaacaggcaaatatgaaatactgatttcaaatagttccaaagatccttgatttcaggattttcacctattcaggcttaataatctgaactaattccaaattagtgagttttcaccacaccatatgctggtgaacaatcttgtcaccaacacgattctggaactccagtagcattgtcgcagccgccacttactcagatgttatagagagacttcaaaatgtcatgcaagtatttatttatttatttacttatttaaactttaacggaaggcaacacaaaggaatttatcttataaacacatgtggtgcttgctgttatgtgcccaatctgtgttctaarcattttaaaaatattaaccaatttaatcatcatacaatgctatgaagtgggtactattattctaccaattttacagaaggtgaaacaaatagagagtgaggcaatgaatgtccctcccaatccttaatattgtatgattaggagcactaggtgggttaactaatactctggggcaaacaaagccttgtgtctctcaaagccattaattattacaaatgtttt

SEQ ID NO: 459158 - DNA, 609 bp, Homo sapiens
gcttttgtttgtttattcgttttacctgagtaactagatgaatggagttactattaactgagattgagaagactgctggagatatgtttgaggagggtggttatcaagagatcagtttcagacttgaaaaatttgaaatgtatattatcgatctaaatgttgaagtcaagcaaacaattgcatatacaggtctgaaatttaggggagaggtccaggctacagatataaacttgagcactgtcttcctccattttgtgcagtcataacagaataccgcagactgggtaatttataaagaaaataaatttattttgctcaaggttttggaggctgtgacatccaagatcaaggaaccacatctggtgaggatcttcttgctgagtcacaacatagcagaagccatcacatgacaaggaagcatgcaagagagagcaagccattgaactcacagcctcaagtccttttataatkagcattaatccattcatgagagtggagctcttatgacttaaccacctctcactgggccccacctcccaacactgttgcattggggattaaatttccaacacctgctttctggagggtacatccaaaccacagcaggag

SEQ ID NO: 459159 - DNA, 520 bp, Homo sapiens
cccatgaaacacatcataatcaaattgtccaatgttaaagacagagagagttctgaaagccaacaaaggaaaaacaaaytgttacatacatgggaaccaccataaagttataagtagatttttcagcaaaaactctgcagaccagaagggagtggaatgatatagtcaaaattccagtcaacgtgagaaagccaatttttaaaatcctgaaataaaacaattgtcagccaaggatattatactccacaacactgtctttcataaatgaagaggcggtaaggattttctaagacaaacaaaagtagtttatcaccactatacctgccttataagaaatgctaaaaggagttcttcaagctgaagaaaaaaatgctgattagtaacatgaaaacacatgagaatataaaattcactggtaaaagtaaatatattgtcaaattcaaaacactctaatactctaacaataaaccaattatatatatagtgtaaaggttaaaaggcaaaatcactataacaacta

SEQ ID NO: 459160 - DNA, 520 bp, Homo sapiens
cccatgaaacacatcataatcaaattgtccaatgttaaagacagagagagttctgaaagccaacaaaggaaaaacaaactgttacatacatgggaaccaccataaagttataagtagatttttcagcaaaaactctgcagaccagaagggagtggaatgatatastcaaaattccagtcaacgtgagaaagccaatttttaaaatcctgaaataaaacaattgtcagccaaggatattatactccacaacactgtctttcataaatgaagaggcggtaaggattttctaagacaaacaaaagtagtttatcaccactatacctgccttataagaaatgctaaaaggagttcttcaagctgaagaaaaaaatgctgattagtaacatgaaaacacatgagaatataaaattcactggtaaaagtaaatatattgtcaaattcaaaacactctaatactctaacaataaaccaattatatatatagtgtaaaggttaaaaggcaaaatcactataacaacta

SEQ ID NO: 459161 - DNA, 520 bp, Homo sapiens
cccatgaaacacatcataatcaaattgtccaatgttaaagacagagagagttctgaaagccaacaaaggaaaaacaaactgttacatacatgggaaccaccataaagttataagtagatttttcagcaaaaactctgcagaccagaagggagtggaatgatatagtcaaaattccagtcaacgtgagaaagccaatttttaaaatcctgaaataaaacaattgtcagccaaggatattatactccacaacactgtctttcataaatgaagaggcggtaaggattttctaagacaaacaaaagtagtttatcaccactatacctgccttataagaaatgctaaaaggagttcttcaagctgaagaaaaaaatgctgattagtaacatgaaaacacatgagaatataaaattcackggtaaaagtaaatatattgtcaaattcaaaacactctaatactctaacaataaaccaattatatatatagtgtaaaggttaaaaggcaaaatcactataacaacta

SEQ ID NO: 459162 - DNA, 573 bp, Homo sapiens
aggagttcaagaccagcctggccaacatgataaaaccctgtctctactaaaaatacaaaaattagccagatgtggtggtgcatgcctctagtcccagctacactggaggctgaggcacaagaattacttgaacccaaaaggcggaggctgcactgagctgagatcgtgccactgcgctccagccttggtgacaaagcaagactctgtctctaaataaacaaataaataacacaaagaaaaaaaacaacaacaaggtattcaggcaacaaccagcatgatgaatagaatagtmcctcacatctcaatactaatattgaatgtagatggcctaaatgctccacttaaaagatacagaatggcagaatggatacaaatccaccaaccaagtacctgctgtcttctagagactcacctaccacataaggactcacataaacttaaggtaaagtgtgggaaaaagatactccatgtaaatagaacccaaagttagcaggagtagctattcttatatgagacaaaacagactttaaagcaataactgttaaaaaaaatacaaagagagacattatataa

SEQ ID NO: 459163 - DNA, 573 bp, Homo sapiens
aggagttcaagaccagcctggccaacatgataaaaccctgtctctactaaaaatacaaaaattagccagatgtggtggtgcatgcctctagtcccagctacactggaggctgaggcacaagaattacttgaacccaaaaggcggaggctgcactgagctgagatcgtgccactgcgctccagccttggtgacaaagcaagactctgtctctaaataaacaaataaataacacaaagaaaaaaaacaacaacaaggtattcaggcaacaaccagcatgatgaatagaatagtacctcacatctcaataytaatattgaatgtagatggcctaaatgctccacttaaaagatacagaatggcagaatggatacaaatccaccaaccaagtacctgctgtcttctagagactcacctaccacataaggactcacataaacttaaggtaaagtgtgggaaaaagatactccatgtaaatagaacccaaagttagcaggagtagctattcttatatgagacaaaacagactttaaagcaataactgttaaaaaaaatacaaagagagacattatataa

SEQ ID NO: 459164 - DNA, 573 bp, Homo sapiens
aggagttcaagaccagcctggccaacatgataaaaccctgtctctactaaaaatacaaaaattagccagatgtggtggtgcatgcctctagtcccagctacactggaggctgaggcacaagaattacttgaacccaaaaggcggaggctgcactgagctgagatcgtgccactgcgctccagccttggtgacaaagcaagactctgtctctaaataaacaaataaataacacaaagaaaaaaaacaacaacaaggtattcaggcaacaaccagcatgatgaatagaatagtacctcacatctcaatactaatattgaatgtagatggcctaaatgctccacttaaaagatacagaatggcagaatggatamaaatccaccaaccaagtacctgctgtcttctagagactcacctaccacataaggactcacataaacttaaggtaaagtgtgggaaaaagatactccatgtaaatagaacccaaagttagcaggagtagctattcttatatgagacaaaacagactttaaagcaataactgttaaaaaaaatacaaagagagacattatataa

SEQ ID NO: 459165 - DNA, 573 bp, Homo sapiens
aggagttcaagaccagcctggccaacatgataaaaccctgtctctactaaaaatacaaaaattagccagatgtggtggtgcatgcctctagtcccagctacactggaggctgaggcacaagaattacttgaacccaaaaggcggaggctgcactgagctgagatcgtgccactgcgctccagccttggtgacaaagcaagactctgtctctaaataaacaaataaataacacaaagaaaaaaaacaacaacaaggtattcaggcaacaaccagcatgatgaatagaatagtacctcacatctcaatactaatattgaatgtagatggcctaaatgctccacttaaaagatacagaatggcagaatggatacaaatccaccaaccaagtacctgctgtcttctagagactcacctaccacataaggactcacataaacttaaggtaaagtgtggraaaaagatactccatgtaaatagaacccaaagttagcaggagtagctattcttatatgagacaaaacagactttaaagcaataactgttaaaaaaaatacaaagagagacattatataa

SEQ ID NO: 459166 - DNA, 556 bp, Homo sapiens
accagatgcccctgcagcacctaacactgctaactactcccaatcttttaagaaacactatactcttctggttgttcttccataagttggtttttgtagcgtttagcctaatgcttggcactcaggaagaacagttatgcattgcttaatcacatggttatgttctgagaaatgtgtctttaggcaatttcatcattgtgagaatatcatagactgtacttccacaaacctagatggtagagcctactatacacctaggctatagtgtataacctaatgctcctaggctacaaacctgtacagcacgtttctgtattgaatattgtaggcagctataacacaaagccaagtatttgtatatctaaacatatctaaacacagaaaaggtatagtaaaaatatgttattataatcttatggaactattattgtacacgtggtctgctgtttactgaaacatcgctatatggcacatgactgtattatacaagtacctgttaaataygtttctaatgactattatttagtctacttcgtagctcttattctgcctgtca

SEQ ID NO: 459167 - DNA, 588 bp, Homo sapiens
gctgaccctgtaagagagaactggccatcttgcagacagacagaggtgagccaggaattaacaagcatgccaaggagtacagctgtaagtgtgggagcggcaggagccacagagccgtttgctgagaagggctgcggtcggaggaggcagccgagacagaggcagacagtgtgagagctgcagcagctgctgctgaataaaatcatattttacctgcctacagccccgagtgttctttcaactacctgccacccatccaacaactcccctcggacctcagtatgggctggaacctgacacttggcatgacagtggtaagtaccatatacatgttggctaatagtataattcactggtctttctttttttaaataagagtaggcctggtggttctgttcttgaccttttmttttctctatccacagtcttccccagaactatctttaatcactcgcaaggttttaacttctatttctaggctgtagactcctgatccctatcctgagctgcctcccagacggtcctatatggaaatcttgcaaacaaatccaattcaatatgccccaaatcaaagtgattttcttgctt

SEQ ID NO: 459168 - DNA, 483 bp, Homo sapiens
ttacataattatggaaccctggagaagagaaaagcagatttagaatgtgggagatataaagtgcagcctttgataacttccaagtggggatggctagagggctctaaacatcagggcagacatgaaagtgaaatacgaagttattctgtaactatttcctgcctatattagcaattactatctgcaccrctcatcatttaactaaaacctgcattctattaatacccttttgtggggagatacttagacaccagacacttcatcatttaaaagtgaaaccaacccacgctggtgatgtatttcacaaagaatatcagatcaattacaggaaataatgaacttatattttctttgaacatcttgcatggaataggtgaatctgtgactacattacacgcagcttacactttcaccagtcatccacataagaaacatacctgttgaaagaattcaaacctgaccacctgccttccagccaggaaa

SEQ ID NO: 459169 - DNA, 586 bp, Homo sapiens
aaacagtgagcctggttccctacaacctgagacacaccacatttaatcccccaggagttgaattctaggatgtctttgactgtttctgcagtcaagtcatcaactccactaactactctgtgtttgtgtttctggtccactgagatttttgtcttgtatttgtagctggccatgtctttctctttatccccttttatatatcatctcccaatgccaaatgtttggagtcaatttggtaattaatcataaattggcctgtttcatatcaccctggaaatctaaatccaatctttaatgttgcttttgagctgttgttgggatgttcagggggasacccctggtggtatctagagatgggcttcagtacacaaatgggaggtcaccactggtcacagtctgtcctggattttcttgaatatttcttctagtattttcaactgtctactgactattaacatatgaagtcaatattttattttgttgggtctatttcctctatgaaatgaagatattcaatttactaatactactttactaataatacctgctcattgatatttatgtaatgattgctatgggccaggta

SEQ ID NO: 459170 - DNA, 567 bp, Homo sapiens
tccctgttttgcttttgggtaatgaattaaactctggtccttccactgtgacatctctctagaaaatgtttcatatagttccatgtgatatctttcatttagtattagcttgtactcctataatccccctctttaaccaaatatgcctacctgccttcaggctccagaccatgaacatggacattctgaagtgctcttggaggatgtggaacatctgaaggtcaagcaggaaccaacagacatacagcttcagcctatggtgacacagctcagatatgaatctttttgcctccaccaatttcaagaacaaggtaaggattttgacaggtcccttcaggagatctctggtgggtctatatagggcgatagttaagactgtggactctggggctaaattgcctgggttggaatttaaacgctgcatttaatagytctgtgacaatggacaagtcaggtaacctccctgtgccttcagtttatgcatatttgaagtggggataatcatagcacttcagtcacagagtcatttgagatttaaaaagttaacatatgtaaaacacttagaac

SEQ ID NO: 459171 - DNA, 574 bp, Homo sapiens
cctaactttgataataaaaaatatttctaattatgtgtacaagacttgctgcccctctttcctgtgggcagacagtttaatataccacatggatgattgctttctttttaatgttattattttcttaaccttatactgtttatatatccctcataaggccaataaaagagacatacttgttgacatttttatgagatacaaagttactataactctttttttttttttttttttgagatggagttttactctggtctcccagattggagtgcaatggcacgatcttggctcactgcaacctccatctcccaggttcaagtgattctcttgcctcagcctcccgagtagctggaattacaggygcccaccaccatgcccagctaatttttttatttattttttattttttttgtattttcagtagagatggggtttcactatgttggccacgctggtcttgaactcctgacattgtgatctatgtgcctcggcctcccaaagtgctgggattacaggcgtgagccactgtgcccatcctatggctcttaaatagtgaacaaatgaaggtagatga

SEQ ID NO: 459172 - DNA, 609 bp, Homo sapiens
tgcgttgtaacttgttttgaaagtgggtatttgtcctattctctagtcccaatactacaaagtcctcatctatctgtcctcatccttggagccatatgaagagcagtttcctttaggttctgtggattaaatccaatccttcctgtgctttactaagtacattacacttcactamtaatttgcagtgttaaacagaaggaagtttctcctgttcagtgctgaaattcaaactagaactataagacataacaaaaccacagacttgttgaatgtggttctgagttagaaatgtctcctacattctctcttagccccatagtttgtttgcctgctgtagagtcatggttggtcactacctgtttgtcatctccctaaatagggcagagaatgtgtctggttcattactaccttcttaacacctcacacaatccttaacacatggcaacattcaatcaagttttgtttaataaatgaagggacaagtgggctactcaatgattcagtgatagattcagcattccaaaatgaaaactcagaataccaactatttcattcattttccagtgtatctactcttcttctactattaatattctcttgaggacccat

SEQ ID NO: 459173 - DNA, 609 bp, Homo sapiens
tgcgttgtaacttgttttgaaagtgggtatttgtcctattctctagtcccaatactacaaagtcctcatctatctgtcctcatccttggagccatatgaagagcagtttcctttaggttctgtggattaaatccaatccttcctgtgctttactaagtacattacacttcactactaatttgcagtgttaaacagaaggaagtttctcctgttcagtgctgaaattcaaactagaactataagacataacaaaaccacagacttgttgaatgtggttctgagttagaaatgtctcctacattctctcttagccccatagtttgtttgcctgctgtagmgtcatggttggtcactacctgtttgtcatctccctaaatagggcagagaatgtgtctggttcattactaccttcttaacacctcacacaatccttaacacatggcaacattcaatcaagttttgtttaataaatgaagggacaagtgggctactcaatgattcagtgatagattcagcattccaaaatgaaaactcagaataccaactatttcattcattttccagtgtatctactcttcttctactattaatattctcttgaggacccat

SEQ ID NO: 459174 - DNA, 538 bp, Homo sapiens
cttcagccatgcagaactgtgagtcaattaaacctctttggtttataaattacccagtctcaggtggtatctttatggccatgtgaaaacgggactaaaacagttagcgacwtctccctgacccttaggcatgtgccttggttccctaattttaaacactgtaaatcctgaattactgctggtactagttttatggaagttcctgtgaacactgccttcctctgcaactacgtgggactaggagaaggattccattcaggcctgacctggagaggtcctcatctccaagctgctggaaatttccttgagaacagaatcatttccttttcattcatgacaacagtagcagtgacaactataatgacttaactgagaaagagttccaggccctgggtcactcagacgggagactgaatcctaactcagacacttcaaattggtggcaccatgggaaaggtttttaaccactctgagacttagtttctttaactgtaaaatgagggtaataaagtactcactatagggttggcctacaagt

SEQ ID NO: 459175 - DNA, 587 bp, Homo sapiens
atgcactggcgggaaatggtagtttctatgtaatgtgcaggtggtttccaagagattaaagtttcattaaggacataaaagctacagacaaaagtttgtttcttctattgacttggacataggcaggccactgcacattcacttcttgccatacacactgttattggtgataaatgaaatgacatagagcacatagcaccctcaccaactcactgagggcaaaacwtcttgatagctgcaactatgaaaaaacattgaaaatactaattttttttctcttcctccttggcattctcttagactcttcctctcacaactctgtctctaggagtgcctctcagccctctctttctctctgtcttatttcttctccattcttttctcttttctgtttcagaattcctgagggagggtgtataggaggttgctacttaccaagaatcagatgaaacagccaaagccctggtgctttaggatcagcaactgtgtgagcatctgtgcttgccctttatgtatgtacctgttaccaaacacaccatatcctccagaggatctgaccttcccgaagaactgcccaggactttctc

SEQ ID NO: 459176 - DNA, 587 bp, Homo sapiens
atgcactggcgggaaatggtagtttctatgtaatgtgcaggtggtttccaagagattaaagtttcattaaggacataaaagctacagacaaaagtttgtttcttctattgacttggacataggcaggccactgcacattcacttcttgccatacacactgttattggtgataaatgaaatgacatagagcacatagcaccctcaccaactcactgagggcaaaacttctkgatagctgcaactatgaaaaaacattgaaaatactaattttttttctcttcctccttggcattctcttagactcttcctctcacaactctgtctctaggagtgcctctcagccctctctttctctctgtcttatttcttctccattcttttctcttttctgtttcagaattcctgagggagggtgtataggaggttgctacttaccaagaatcagatgaaacagccaaagccctggtgctttaggatcagcaactgtgtgagcatctgtgcttgccctttatgtatgtacctgttaccaaacacaccatatcctccagaggatctgaccttcccgaagaactgcccaggactttctc

SEQ ID NO: 459177 - DNA, 580 bp, Homo sapiens
ctttgccattttgcaatttctgaaattcattgcattggatatgaaaaacttcagagtcctgggcatagagctaaagcttgggggtaccacagctaaaaatatttgagttataaagtcatattcctgggacaggaccgtaagtcctggtacaggagacagagaaggggtgaggaggcaggaggcagcataaagcaggaaaatcagagcttggcatgaggcagatcttgcttctcattctgcttctgccacatattagctgactcattcagttaacaatttatccaattgtttatttatcagatttatcaatttatccaatttatcaatgcttattgcaatcctagtatctcaggaacccactacttctttctgaacctcaactgcctcttatataaaatggtcattgtagttcygaccttgaaagatgtttgagaagactgactgagacatacagaaaagtacaactcaggagccttctatgtttggctttcctacccctttaccaggctgttcctagacaggagcctgcttatgggttccgctatggaggcaggagtcagaaaagtaattattaatatta

SEQ ID NO: 459178 - DNA, 548 bp, Homo sapiens
gaagtaaataccagctggtgtagaatgagtggaatataattactctctacaaagttaagtgaatattaaaatgcagaagtcataggcactggtgcttttccctcccaactccactgcccagtaaacagtatcctgacctgatgcttggcttcaatgcagcttacagcagggatctcagtaaagggcttgcttgtcagcaatgtggaagcaactgggacacaggctgctgagaaaggcaggaagtcaaccaccttccaggaacgtatggagactttcctgatgcctgagagcatgatatggtgaaaagaatgcggctttggaccagagaccaaatgtgaccagaatgtggctttggagccagagagacccatctctgaaatttacaagtcrtgtgaccttgacgaaggtctctcccttttctatacttcaatttgcttaactagaaaatggagtcatactgcgttgtgtgattaaagaactatacttcagaaatcacttgacaaagttttgcatagtgacacgcaggcagagaaaactgcaaaaagagc

SEQ ID NO: 459179 - DNA, 608 bp, Homo sapiens
aggaaaagtaaatttgcctaacttaaaagttatttaaggctgctttaaatttttaaaaaagggctgggtgccgtggctcacccctgtaatcccagcactttcggaggccaaagtgggtggatcacttgaggtcaggagttcaagaccagyctggccagcatggcaaaaccctgcccctactaaaaatacaaaaattagtcgggcatggtggcaggtgcctgtaatcacagctactcaggaggctgaggcaggaggatagcttgaactgtgaggcagaggttgcagggagctgagatcatgccactgccctctagcctgggcaataaagactctgcctcaataaataaataaagaaataaaaaagaatgacagataaaactaagtagatatagaaagttgagaaaaattagaaaaattgtaagaggttatataaaatgtttgcagaaatcttatcttgcggccaggcgcggtggcttacacctgtaatcccagcactttgggaggccgaggtgggcagatcacgaggtcaggagtttgagaccagcctgaccaatataatgaaactccatctctactaaaaatacaaaaattagctgggcatagtggtg

SEQ ID NO: 459180 - DNA, 608 bp, Homo sapiens
aggaaaagtaaatttgcctaacttaaaagttatttaaggctgctttaaatttttaaaaaagggctgggtgccgtggctcacccctgtaatcccagcactttcggaggccaaagtgggtggatcacttgaggtcaggagttcaagaccagtctggccagcatggcaaaaccctgcccctactaaaaatacaaaaattagtcgggcatggtggcaggtgcctgtaatcacagctactcaggaggctgaggcaggaggatagcttgaactgtgaggcagaggttgcagggagctgagatcatgccactgccctctagcctgggcaataaagactctgcctcaataaataaataaagaaataaaaaagaatgacagataaaactaagtagatatagaaagttgagaaaaattagaaaaattgtaagaggttatataaaatgtttgcagaaatcttatcttgcrgccaggcgcggtggcttacacctgtaatcccagcactttgggaggccgaggtgggcagatcacgaggtcaggagtttgagaccagcctgaccaatataatgaaactccatctctactaaaaatacaaaaattagctgggcatagtggtg

SEQ ID NO: 459181 - DNA, 576 bp, Homo sapiens
gttttatttctttttttacttttactgtttatttatttacttattttccagccagggtcttgctctctcacccaggctggagtgtaatggtgtgatcatggctcactgcagcttctgggcttaagagatccttctgcytcatcctcccaagtagctgggactacagggacaccaccatgctgaccttattcctcttctgtgagacagacaagttttgaattaaatgaccagagcttcagaccctttggagcaaaggagtcttaacgatgagttcagagaataggccaggatctcctgattcctttttgcttaagtttaggatgaatcttgagaacagagtgggtctgggtctggagtttcaggtcaagtatctccataagtagttaggtccaggatatatgttatttgatgccaccatctttgtaccttgccaagtctcttctcatctcttgatttctaagtcattccttgggaatcactgacagtttcaaaagatcaaaaagctcaaccttaaaccagtgtggtttctggaaaaacattttgtgtttgaaagaagtgatggcagctaatgttagt

SEQ ID NO: 459182 - DNA, 576 bp, Homo sapiens
gttttatttctttttttacttttactgtttatttatttacttattttccagccagggtcttgctctctcacccaggctggagtgtaatggtgtgatcatggctcactgcagcttctgggcttaagagatccttctgcctcatcctcccaagtagctgggactacagggacaccaccatgctgaccttattcctcttctgtgagacagacaagttttgaattaaatgaccagagcttcagaccctttggagcaaaggagtcttaacgatgagttcagagaataggccaggawctcctgattcctttttgcttaagtttaggatgaatcttgagaacagagtgggtctgggtctggagtttcaggtcaagtatctccataagtagttaggtccaggatatatgttatttgatgccaccatctttgtaccttgccaagtctcttctcatctcttgatttctaagtcattccttgggaatcactgacagtttcaaaagatcaaaaagctcaaccttaaaccagtgtggtttctggaaaaacattttgtgtttgaaagaagtgatggcagctaatgttagt

SEQ ID NO: 459183 - DNA, 566 bp, Homo sapiens
gacttttacttttggtaaaaaccctggttaataagcaattttaattgtgtactaggtgtggagcctagcctaggacacaccaggcagaagtgcagataagtgcagcatagctagggggcgtggctaactccacatgtccccaggccttatctagaatccaatgtctccaaggtaggtaaattgaacaattttcaaaagtcaaagaaacagtttgaccttaaggcatttagaaaatctgatgtctkaccttaatttagactagatgtttacattttcaaaacattttattttgccaatgatctttaaaactgtctttatttccaaaagagtactaaagtcatgtgaacaaaaaggcattaaagtttctatttatctgacaaaatatttgatttaatcacttatttttctaagctaattaattaaaactcttttgtatataaacatacaacacataaaaatacacagacaggcagaagattcagcacgtataagatttttcatttgccagtttcttagttggattactggcttcagggtggagcccttggaggaacagggccaggaaa

SEQ ID NO: 459184 - DNA, 566 bp, Homo sapiens
gacttttacttttggtaaaaaccctggttaataagcaattttaattgtgtactaggtgtggagcctagcctaggacacaccaggcagaagtgcagataagtgcagcatagctagggggcgtggctaactccacatgtccccaggccttatctagaatccaatgtctccaaggtaggtaaattgaacaattttcaaaagtcaaagaaacagtttgaccttaaggcatttagaaaatctgatgtctgaccttaatttagactagatgtttacattttcaaaacattttattttgccaatgatctttaaaactgtctttatttccaaaagagtactaaagtcatgtgaacaaaaaggcattaaagtttctatttatctgacaaaatatttratttaatcacttatttttctaagctaattaattaaaactcttttgtatataaacatacaacacataaaaatacacagacaggcagaagattcagcacgtataagatttttcatttgccagtttcttagttggattactggcttcagggtggagcccttggaggaacagggccaggaaa

SEQ ID NO: 459185 - DNA, 492 bp, Homo sapiens
ctgtttacacacagagagagaagccagaaatctgattggtaagaaattgttaccctttggctggcatgcctgggttctgggttccctttccctgagtggccctagtgatctgacttgcagcaccatcatcctggggaccaagccacatcataaaggaaaattgttgttgttgttcttttcttcattctgcccagagcaaaatacatgtgataaaacatagacattagtcrctttgcttagcacccaataaaaaaactgtcaaggcttaaatttgcccccagatgggccctgtcatctttaatccaatctccgacttggagtttcaacatgtggtctctgggcaagatggtcaccctgagtaaaagaaaagataagaaagggaaaggagagagaggaaaacattgcctgtggcagggtggggaaggcaaaaatgatcagagaagccagagaaagaccctcccattgcagcgacactaaaaagttcaggcagct

SEQ ID NO: 459186 - DNA, 492 bp, Homo sapiens
ctgtttacacacagagagagaagccagaaatctgattggtaagaaattgttaccctttggctggcatgcctgggttctgggttccctttccctgagtggccctagtgatctgacttgcagcaccatcatcctggggaccaagccacatcataaaggaaaattgttgttgttgttcttttcttcattctgcccagagcaaaatacatgtgataaaacatagacattagtcactttgcttagcacccaataaaaaaactgtcaaggcttaaatttgcccccasatgggccctgtcatctttaatccaatctccgacttggagtttcaacatgtggtctctgggcaagatggtcaccctgagtaaaagaaaagataagaaagggaaaggagagagaggaaaacattgcctgtggcagggtggggaaggcaaaaatgatcagagaagccagagaaagaccctcccattgcagcgacactaaaaagttcaggcagct

SEQ ID NO: 459187 - DNA, 555 bp, Homo sapiens
gcaaggtctttatgacctgtatcttgtgccaacctcctatctcatcctgtgacttagaatgccttaactgtctgggaatccagcccagtaggtttcagcctcattttacccagctcctattcaagatggagttgttctggttcacatacctctgacaagaaggcatggcctctgcaaaggtcttgaggcacaggctggcaaggcaatttgttcagtgtgtcctgggtcaytctccccccatattccctgccaagccacatccctgccctggagatggctggtagaaaggagtaaggaaggaaatggcagtatttatttacagagatgactaaccttctcagggaagaaagggccagggtatgggggcagtaatctagtgctcagagagattgagtttcttctttcacatcactttggccaacatttatgaatttaaattaaatagaatatttggcagttctgacatttcacaacattccatttgacctccagttatagctcaaaagtacagaaaaccttgttgtcaaaattatatacatacacacacacacatac

SEQ ID NO: 459188 - DNA, 555 bp, Homo sapiens
gcaaggtctttatgacctgtatcttgtgccaacctcctatctcatcctgtgacttagaatgccttaactgtctgggaatccagcccagtaggtttcagcctcattttacccagctcctattcaagatggagttgttctggttcacatacctctgacaagaaggcatggcctctgcaaaggtcttgaggcacaggctggcaaggcaatttgttcagtgtgtcctgggtcactytccccccatattccctgccaagccacatccctgccctggagatggctggtagaaaggagtaaggaaggaaatggcagtatttatttacagagatgactaaccttctcagggaagaaagggccagggtatgggggcagtaatctagtgctcagagagattgagtttcttctttcacatcactttggccaacatttatgaatttaaattaaatagaatatttggcagttctgacatttcacaacattccatttgacctccagttatagctcaaaagtacagaaaaccttgttgtcaaaattatatacatacacacacacacatac

SEQ ID NO: 459189 - DNA, 555 bp, Homo sapiens
gcaaggtctttatgacctgtatcttgtgccaacctcctatctcatcctgtgacttagaatgccttaactgtctgggaatccagcccagtaggtttcagcctcattttacccagctcctattcaagatggagttgttctggttcacatacctctgacaagaaggcatggcctctgcaaaggtcttgaggcacaggctggcaaggcaatttgttcagtgtgtcctgggtcactctccccccatattccctgccaagccacatccctgccctggagatggctggtagaaaggagtaaggaaggaaatggcagtatttatttacagagatgactaaccttctcagggaagaaagggccagggtatgggggcagtaatctagtgctcagagagattgagtttcttctttcacatcactttggccaacatttatgaatttaaattaaatagaatatttggcagttctgacatttcacaacattccakttgacctccagttatagctcaaaagtacagaaaaccttgttgtcaaaattatatacatacacacacacacatac

SEQ ID NO: 459190 - DNA, 496 bp, Homo sapiens
  misc_feature (1)...(496): n = A,T,C or G
tgagtaagtcattgaattcatctcccactacagagaaagagagatatgttgacctaaaatttgaagtgttgggataaggaataaatcatgtgtcatataccaaaagtctagcaatgttcttaatccagcatgtcccaaaaagacttctatttggctacaaaatacatactctctcctctaactcctactagtatccccngaatacttaggaaagtatgcgctctccacaactgctgattcccttttccgttttcttttttctgtgggagtggcaagcagaccctttaggctggcacattgcagttcctttgccttaggctaactgacctcttcagatgtcaaagtattgtgaactcatattgggaatccccttttctgaagtggcctgacagggctttgataatctgagaatctttggcatagtgactgttccactgtsagcttcctgcatttatcatttaatcagacatgtttagtttttacaatggatactttt

SEQ ID NO: 459191 - DNA, 619 bp, Homo sapiens
caggcaatggtggtgctaagcatgaggaagtaatttcactccaaagcaaacagcacatatagaatcagagacttgtgaaacatcatggcttcgaaacagtctcacctaatgcaaaacaatcactcagtggacccagcagccctttgtgatacttgtgatacgtacaccgtttcttcagggcagttgaacagttgcccagtggcatggaatccatgttacacctggaatttcaagaagaacaaactattcacaaataatactcttcattgtttcaaacagggcagactagagcctagagcctgctacagtctttcctggactcatgaagcctatatttgcatgtcatgcaagccaatttacattggacttatgagtgtaatctctctagagagaatgaggtcctttagactcaagtgtattctttgtcctttcctctctagatatatgcatttgaacacatgaacaacgakcaatttgtgtgtatctcaagaaaataatggaaatgtggccaaatatgtcaataattagggaaagctaaaaaagaaaaaaggaaaactccaggaactcaattggtgtagtgttttcccttcaagaatgtacaactactgtcattcgtgac

SEQ ID NO: 459192 - DNA, 621 bp, Homo sapiens
ctgggtttgattcccagattatggcagggaaggtaattggcattgattgatcatctatatcaaatttgaccctgtgtttgacattttacccacactcttttcatacagttggtgagtttctaggctctgatttgaacgcaagtttctatctacatctctgatttcacagaggtcaagacctaagttactttcctagtctcctttggcctattgggtctgtttgtgtcctgagcgayggactgtccacttgtctggttgtcagcttcctccccaacaagttcttgggtacccccatgtcacaaggctccagagaggagctgtcagatttcccaccctgggtgagaagatggagaaagaccctaaacatatcttcatgtgccaggacccacaggctcaaagaagtgcagtcatttctttgttaaaagcatagctgagtttggggtctctgtctgctttgaaagtacttctggcttcatgcgcaaaactaatcatatatccctctcctgatcttccacaaaagataataatttgagcttctataggcaaagcaatttttgtttacaaaccctggatctaaaaaagcatcaggatttcaagtattttaatgtttatgggcctttg

SEQ ID NO: 459193 - DNA, 568 bp, Homo sapiens
cctaagttactttcctagtctcctttggcctattgggtctgtttgtgtcctgagcgatggactgtccacttgtctggttgtcagcttcctccccaacaagttcttgggtacccccatgtcacaaggctccagagaggagctgtcagatttcccaccctgggtgagaagatggagaaagaccctaaacatatcttcakgtgccaggacccacaggctcaaagaagtgcagtcatttctttgttaaaagcatagctgagtttggggtctctgtctgctttgaaagtacttctggcttcatgcgcaaaactaatcatatatccctctcctgatcttccacaaaagataataatttgagcttctataggcaaagcaatttttgtttacaaaccctggatctaaaaaagcatcaggatttcaagtattttaatgtttatgggcctttgtcctacttattccctctgcctgcttagttttctcttgtactttcacatcccatcccgctaacctggtaaattattgtggattttttcaacattatcctaataatcaccttctccagggagcctcc

SEQ ID NO: 459194 - DNA, 568 bp, Homo sapiens
cctaagttactttcctagtctcctttggcctattgggtctgtttgtgtcctgagcgatggactgtccacttgtctggttgtcagcttcctccccaacaagttcttgggtacccccatgtcacaaggctccagagaggagctgtcagatttcccaccctgggtgagaagatggagaaagaccctaaacatatcttcatgtgccaggacccacaggctcaaagaagtgcagtcatttctttgttaaaagcatagctgagtttggggtctctgtctgcwttgaaagtacttctggcttcatgcgcaaaactaatcatatatccctctcctgatcttccacaaaagataataatttgagcttctataggcaaagcaatttttgtttacaaaccctggatctaaaaaagcatcaggatttcaagtattttaatgtttatgggcctttgtcctacttattccctctgcctgcttagttttctcttgtactttcacatcccatcccgctaacctggtaaattattgtggattttttcaacattatcctaataatcaccttctccagggagcctcc

SEQ ID NO: 459195 - DNA, 568 bp, Homo sapiens
cctaagttactttcctagtctcctttggcctattgggtctgtttgtgtcctgagcgatggactgtccacttgtctggttgtcagcttcctccccaacaagttcttgggtacccccatgtcacaaggctccagagaggagctgtcagatttcccaccctgggtgagaagatggagaaagaccctaaacatatcttcatgtgccaggacccacaggctcaaagaagtgcagtcatttctttgttaaaagcatagctgagtttggggtctctgtctgctttgaaagtacttctggcttcatgygcaaaactaatcatatatccctctcctgatcttccacaaaagataataatttgagcttctataggcaaagcaatttttgtttacaaaccctggatctaaaaaagcatcaggatttcaagtattttaatgtttatgggcctttgtcctacttattccctctgcctgcttagttttctcttgtactttcacatcccatcccgctaacctggtaaattattgtggattttttcaacattatcctaataatcaccttctccagggagcctcc

SEQ ID NO: 459196 - DNA, 454 bp, Homo sapiens
aagaagtggaaacatgtgcacctgagtgaatgggaccccaaagcctgtaagacagcaaccccatgtccagtattgaatagaatttattgcagcctcgtgctttttcttatacttgccaaagtgatttctctggtgctttcaattttgacacattttggtatgctgatgactttctgaggtaataccaattgctctctagtttttgagatgctctctagtttttgacactcrtacttgctggttgtttgcctgaaatgtttttttttttttttttaattcatgcccttgcaagaacatttgcgcctatagagtcaccacctgtaggctcattggtccttttccagcacatggaaggtgtgatgtatgcagtaattaactcttcactgaacagcatgctggaaagccatacctctaatgattcaaacattcaaagccaatgaactgaaggcagatg

SEQ ID NO: 459197 - DNA, 483 bp, Homo sapiens
agacattcctctgtgtgatgaaatattcagagaaacagtgacttatcctgtggacaggcacagggtgagtgccacttggaagaacaccacgttctttgtgggtgaactactgtgccaaggagccagggacacagctgagggtcactcaccagggccagtaaaaggcagcatcaaaggagcgatctgaatgtgcaaaagaatcgataatcattcttcaaaatgaggccttttcaaacatggcaaatgtcactggctcttagcaacactamttgggatttattctctcaaaaacggcaccaccacagggctggaataaaaagccctggtatgctattcttcaaaatggcaaaatgacaggaaagcagcatgagaattcagacctagatgtaaattaaatgtgcataattcctcaagacgttttgagttatctcttcctaaaggctgcgctgccagaggtcagcgtgggtcagtgagggggcacct

SEQ ID NO: 459198 - DNA, 562 bp, Homo sapiens
atgtcactttctatcaggtccggaagccccaggctatcttgggacctcaagagcaaagaaatttacccaactcataggtatttgagggtacaaaaccttggctgggctcagctttaaaaaaaagtcttatttgaaattccttctatggaacagaattccattaaaagccaatttaaaaggatcctatgtgaaaaaataattattctygctgcactttatacaaataatcaggccaagtataataaagcaaatcagtcttaccataaatgggaaactgaagagaaaaatattatgtttcaaaaatgatggtatacttgttattacattctagtttcatcagttgtttttaagtttgtttctgcaatttaggctaactctgcttattcctgtgaaccaatcagtgatctctgactgttgctcagaacaaacaagaggaatgggtaatgtaaaaatctggatcagtattctaattctgggcacattacaatccactatcaaccccatatcagcttagttccaacagttgcccagttcatgaaaaaccttttaatttagtttactt

SEQ ID NO: 459199 - DNA, 620 bp, Homo sapiens
gtggcccacgcctgtggttccagcttgcttgggaggctgaggtggaaggcttgcctgagcctgggaggtcgaggttgcagtgagccaagattgygccactgcactccagcctgggcaacagagaccgagtctaagaaaaggaaaagaaaaaaagaaaagaaaagaaaatgtgagtcaggctagtagaaatgcaacaatttaaattttctaggttgggcagacaaaaaatatttattgtgaagaatatggggagggagaatagaataaaataagagaaaaacgatgctctttatttactttcacattctttcaaaaattttttgatgtgcaagtagtgttctgtatattgtagatattaattccttgccagttctaaacattataagtattttcttcaagtcgtcatctatctttttgtccatggtgttcttccttggatgaaagtctttaattttggtataggaaatcaaaattaaggatattaatccttatagtttgtgcttttatgatctttttaaagaagttgttctctacccttaattcaccattcttctgcttttctgtaatagttttatccttcatatcaaattccattgtacttcaactttgcatgtggtggg

SEQ ID NO: 459200 - DNA, 572 bp, Homo sapiens
gtgctaccatgcgcagctaatttttgtttttttgtgtagagatggggtttcgccatgttgcccaggctggtcttgaactcctgggctcaagtgatctgcccaccttagcctcctaaagtgctgggattacaaaaagttacttttcaataacttcctcagctacaaattaattacactgtccaggactcaaagcaagtatatttcatctttcctttcattttctgcaacaattttctttcatgatacttatccaaggcctccatggtagtggcactgtgctrggcatgatccatgtaagtcagaaatgattcttgcaaattagtacctataacccccaacctaggacaataaattaggagcacatgacacgtacagcacagtgaggtgccaaaagcactgtttgatcattagaatccagccagacacacaacgtgtttaccgcaggtccccaatgatggtcaaggtcacattgactttcctgacaagaaaatgaatgtgccaaactggctgaaccatttccttgagactcactgaaagaatggatcacagcttcattgctagaggaaaaggtg

SEQ ID NO: 459201 - DNA, 572 bp, Homo sapiens
gtgctaccatgcgcagctaatttttgtttttttgtgtagagatggggtttcgccatgttgcccaggctggtcttgaactcctgggctcaagtgatctgcccaccttagcctcctaaagtgctgggattacaaaaagttacttttcaataacttcctcagctacaaattaattacactgtccaggactcaaagcaagtatatttcatctttcctttcattttctgcaacaattttctttcatgatacttatccaaggcctccatggtagtggcactgtgctaggcatgatccatgyaagtcagaaatgattcttgcaaattagtacctataacccccaacctaggacaataaattaggagcacatgacacgtacagcacagtgaggtgccaaaagcactgtttgatcattagaatccagccagacacacaacgtgtttaccgcaggtccccaatgatggtcaaggtcacattgactttcctgacaagaaaatgaatgtgccaaactggctgaaccatttccttgagactcactgaaagaatggatcacagcttcattgctagaggaaaaggtg

SEQ ID NO: 459202 - DNA, 566 bp, Homo sapiens
ggcaactgattagattgtggccaccagattaagggtgggtctgccttccccagcccgctgactcaaatgttaatctcctttggcaacaccctcacagacccacccaggaacaatactttgcatccttcaatcaagttgacactcagtattaacgataacagggctgggtgtggtggctcacgcgtgtaatcctagcactttgggaggccgaggcaggtggattgcctgagctcaggagttagagaccagactgggcaacacagtgaaacccagtctctactaaaatacaaaaaattagccaggcgtggcggtgtgcacctgtagtcccagctacttgggaggctgaggcaggagaattgctagaaccaggaggcggagattgcagtgagcggagattgcagtgagcygagattgtgccactgcattccagcttgggcgacagagtgagactccgtctctcaaaaaaaaaaaacaaaaacaaacaaaccataacagacgggttggcctatacaatggacactgttctggaggctaaaagttccagatcaaggtccaacagggtgagt

SEQ ID NO: 459203 - DNA, 576 bp, Homo sapiens
aacaagggcatgactttctccccaagttttgtcaatgaatctcaaaagttttgttgcgtttttattttcgttcagttccaaatattttgcaacttctaattttttctctgactcataagttatttagaagtatgctgtttaatttccaaatattttggaattttaaaaatatcttcacattattgatttctagttaattccataatcatactttatatagttacattcttctgaaatatagtgagactaatgacccaaaatacagtctcttttggtgaatgttctatgtccgcttgaaaagaatgtgtattctgctgtagtttagtgttctgtaagtatcagttaggtcaagcaggttggtagggttattcaaatcttttacgtcttaktttctgtttacttgttctatcaattacttagagacaaatgctgaaacctcaaactctaattatggatttgcatatttttccagtttgatcttatatatccatttttgtttcatgtatttgaagctctgtatttgaaatgctatccttagcatacagcaaattcacaaatataaatgagtctgtaatg

SEQ ID NO: 459204 - DNA, 523 bp, Homo sapiens
gttgagtccatgagtttaaattatttcctccctgaaaactattggcatgacckaagaaatatacaattatgggatgtttatttttcaaatcagtttttaataaatgcagaatgatatcattagcatccaggtacttttggaaatttctgctagaagtggcatgggcaaggttaagtcaagggaagtatcctatagtttgcaactgaacacaacagaggagaaactctttgtgggagtaaatgagtgatattatcctgcaaatctgaaacctgcaaacccagagcagcaggggccaggggaaaaaaaaaatctgatagttgactgcagacaaattctaggattaatggaattccaccactgtccccaaactagacagccatattttatgtccattctcagccttcatctggtgataggacatgttattcaaagcaaagatattgtggcaaaaggatgctaccaagggaaattgctccaagtaatatgggactcatctaacatggactgttataacaaatatgag

SEQ ID NO: 459205 - DNA, 571 bp, Homo sapiens
aatagagaagatggcctaggagtttcttttcaaaatggttgagtccatgagtttaaattatttcctccctgaaaactattggcatgacctaagaaatatacaattatgggatgtttatttttcaaatcagtttttaataaatgcagaatgatatcattagcatccaggtacttttggaaatttctgctagaagtggcatgggcaaggttaagtcaagggaagtatcctatagtttgcaactgaacacaacagaggagaaactctttgtgggagtaaatgagtgatattatcctgcaaatctgaaacctgcaaacccagagcagcaggggccaggggaaaaaaaaaatctgatagttgactgcagacaaattctaggattaatggaattccaccactgtccccaaactagacagccatattttatgtccattctcagccttcatctggtgataggacatgttattcaaagcaaagatattgtggcaaaaggatgctaccaagggraattgctccaagtaatatgggactcatctaacatggactgttataacaaatatgagagggaaaacca

SEQ ID NO: 459206 - DNA, 604 bp, Homo sapiens
atggcaactggtgccactcccatttccaccccttgattcttgaatcttggctatggtagaaacagcatcatatattggatgctgacatggggcatgtataatctcctgaagaacattaccccagccctgcaaggtactgccacctagctttcactgtaattgagtcttcaaaaggccattcatccattctgtcaagccagccgctttgagaggataaggaatatggtaacatagtggcaatgaggccattgccacaaggtatttgccacaaagtgagttctttgattacagcaatgctgtatggaataccatgatggtggataaggcattctgtaggtccacagatggtaaattggtgggagcactgtgtgcagggaaggcaaatccatacccagagttactgtctattctagtaagaaaaaagcactgctccatgcattatggaagtggtcccagtgtaatcaacctgccatcagctagctggctgatcatcccatggaatagtgcccatcaggtactcartgttggtctctgttgctggcagattggacactcagtagcagctgtagccaggtcagccttggtgagtggaagtccatgttgc

SEQ ID NO: 459207 - DNA, 661 bp, Homo sapiens
gggtaatggcaactggtgccactcccatttccaccccttgattcttgaatcttggctatggtagaaacagcatcatatattggatgctgacatggggcatgtataatctcctgaagaacattaccccagccctgcaaggtactgccacctagctttcactgtaattgagtcttcaaaaggccattcatccattctgtcaagccagccgctttgagaggataaggaatatggtaacatagtggcaatgaggccattgccacaaggtatttgccacaaagtgagttctttgattacagcaatgctgtatggaataccatgatggtggataaggcattctgtaggtccacagatggtaaattggtgggagcactgtgtgcagggaaggcaaatccatacccagagttactgtctattctagtaagaaaaaagcactgctccatgcattatggaagtggtcccagtgtaatcaacctgccatcagctagctggctgatcatcccatggaatagtgcccatcaggtactcagtgttggtctctgttgctggcagattggacactcagtagcagctgtagccaggtcagccttggtgagtggaagtccatgttgctgagctcatacataacytccatccctgccattatggccactttgttcatgag

SEQ ID NO: 459208 - DNA, 597 bp, Homo sapiens
ctccacatgtcccacaacactggacctctagaaatttcactgaagtagaaggccactgaatttttgttggatatatctcctaccctctgacagacaaataagactaaagcatttgctrcttcttgttcactagatccaatcagcacaatgtcatcaatgtaataaacctctgtaatatcctgtggaagggaaaggtgattgagatccctgagaactaaattacaacatagggctgaagagttaatacacccctgaggtaggacagtgagggtgtattgttggccctgccagctgaaagtaaactacttttggtgttcttgattaataggtatagagaaaaaagcatttcccagatcaatagctacatagcaggtatgaagagatgtgctgattttctaaggcaatgaaactatatctggtatagcagctgcaactagagtcaccatctgaggaagcttacaataatccactgtcattctccaaattccatctcttttttgtgtaggtcatataggtgagttgaatgggatgtgatagatatcaacatcacttcatccttaaagtccttgatggaggcattaatatcagcaatctctt

SEQ ID NO: 459209 - DNA, 597 bp, Homo sapiens
ctccacatgtcccacaacactggacctctagaaatttcactgaagtagaaggccactgaatttttgttggatatatctcctaccctctgacagacaaataagactaaagcatttgctacttcttgttcactagatccaatcagcacaatgycatcaatgtaataaacctctgtaatatcctgtggaagggaaaggtgattgagatccctgagaactaaattacaacatagggctgaagagttaatacacccctgaggtaggacagtgagggtgtattgttggccctgccagctgaaagtaaactacttttggtgttcttgattaataggtatagagaaaaaagcatttcccagatcaatagctacatagcaggtatgaagagatgtgctgattttctaaggcaatgaaactatatctggtatagcagctgcaactagagtcaccatctgaggaagcttacaataatccactgtcattctccaaattccatctcttttttgtgtaggtcatataggtgagttgaatgggatgtgatagatatcaacatcacttcatccttaaagtccttgatggaggcattaatatcagcaatctctt

SEQ ID NO: 459210 - DNA, 592 bp, Homo sapiens
taatacacccctgaggtaggacagtgagggtgtattgttggccctgccagctgaaagtaaactacttttggtgttcttgattaataggtatagagaaaaaagcatttcccagatcaatagctacatagcaggtatgaagagatgtgctgattttctaaggcaatgaaactatatctggtatagcagctgcaactagagtcaccatctgaggaagcttacaatartccactgtcattctccaaattccatctcttttttgtgtaggtcatataggtgagttgaatgggatgtgatagatatcaacatcacttcatccttaaagtccttgatggaggcattaatatcagcaatctcttcaggaatgtagtattgcttttgcttttttactattttcctaggtagaatcagttctactggcttccactggccctttcctgccataatattcctcactccacaggtcagagaagcaatgtggggattctaccagtttctgagtatgtttattccaattattcattccagggcttggaaaataatcacaagatggttttagggacctactgagtccactgtgaaatgaacttgaact

SEQ ID NO: 459211 - DNA, 592 bp, Homo sapiens
taatacacccctgaggtaggacagtgagggtgtattgttggccctgccagctgaaagtaaactacttttggtgttcttgattaataggtatagagaaaaaagcatttcccagatcaatagctacatagcaggtatgaagagatgtgctgattttctaaggcaatgaaactatatctggtatagcagctgcaactagagtcaccatctgaggaagcttacaataatccactgtcattctccaaattccatctcttttttgtgtaggtcawataggtgagttgaatgggatgtgatagatatcaacatcacttcatccttaaagtccttgatggaggcattaatatcagcaatctcttcaggaatgtagtattgcttttgcttttttactattttcctaggtagaatcagttctactggcttccactggccctttcctgccataatattcctcactccacaggtcagagaagcaatgtggggattctaccagtttctgagtatgtttattccaattattcattccagggcttggaaaataatcacaagatggttttagggacctactgagtccactgtgaaatgaacttgaact

SEQ ID NO: 459212 - DNA, 588 bp, Homo sapiens
tcagagccagtgtccagtagtttctgaaagttctgactattttctttttccaaatgtacagtcaccctggcaaaaggctatagatccctttggagaaggctgaaagattaacagtatacatttttagcagtgtgccagggtcctccctttcattcaaggtgttctctgtgtgtaaactggctcaagtctgggaagttattgactggttgtgattctctgttcctatggttcaggttagaattttgctcacttgacctagaactcttctgcttacacctatcaaggaagaattyagtagacgtcccatctagttcacttctaggaacaccatgatcaactaatcaacaccacaggtctctacaggtcagactgttctgattgctgctttgactctgctattaccataccatgctcaccttgcctttggctatcaagtgccaccacctggcccttatctctctgggatccaattatacccactgcattcaggtttcccaactcagtggcagcaatttccactgcaatatctgaactacagagaagaacaatcacagtattcttcaaggattctgggactcacctcacaaa

SEQ ID NO: 459213 - DNA, 588 bp, Homo sapiens
tcagagccagtgtccagtagtttctgaaagttctgactattttctttttccaaatgtacagtcaccctggcaaaaggctatagatccctttggagaaggctgaaagattaacagtatacatttttagcagtgtgccagggtcctccctttcattcaaggtgttctctgtgtgtaaactggctcaagtctgggaagttattgactggttgtgattctctgttcctatggttcaggttagaattttgctcacttgacctagaactcttctgcttacacctatcaaggaagaattcagtagacgtcccatctagttcacttctaggaacaccatgatcaactaatcaacaccacaggtctctacaggtcagactgttctgattgctgctttgactctgctattaccayaccatgctcaccttgcctttggctatcaagtgccaccacctggcccttatctctctgggatccaattatacccactgcattcaggtttcccaactcagtggcagcaatttccactgcaatatctgaactacagagaagaacaatcacagtattcttcaaggattctgggactcacctcacaaa

SEQ ID NO: 459214 - DNA, 632 bp, Homo sapiens
gtctagaagcaatgaaggatggtagctgtgagtcttgagaagaatcagcaatgtcttgcaaggcaacaaactcaggggaggtaataaaagtttcctcaggtaaagtagcatyaatctcctcagatgggggtggcatggctgcttttactggcaaggaagactcatcagggtcaaggggttcgatacacccagctttataaggctcttcacatatgtctgcactccagttttcaagatcccattccttctcagttaatgccctcattttaacagcagacaccctaaaagggtggggattcaatttgcactgtaattcagccattttcaggatgagattttgggtttggttttcaataatctcagctttgttgttataaaatataagagtttctttcagggcagaaagagaaacttttgggttattcatgcggcacttgagctgggaaatttaatccctaagatcatcctttccttctctacattaggagtaactagccaatctcattgttctcatgagaactcaaaaatgttctaaggtatcaaatacagatgcccagaaccttgcttcttgtaaatgtctgaataggattacctaatggcaatactttgcatatctctactgtcacattaca

SEQ ID NO: 459215 - DNA, 623 bp, Homo sapiens
gtaattcataaaactcatccttaaaattctgttcctctagaattgctctcagtaccaaattctgttactctagattctctagataaatagaatcaataggctgtatatatacagtgagaaagatttattttaaagaactgactcatgattgtggggactggcaagtcaatatctgcagggcaggccagcaggttagaccccagggaaaagttgacattgtagtcttgagtgcaaaggcagtctggaggtagaattccttcttcctctggaaattttagcgtttttttcttaatgacttcaactgactgaataaggcccactctcgttatggaggctaatcagctttactcaaagtctgctaatctaaatgttaattacatcttttaaaaaataccttcacaccaacatcyagactaatatttgaccaaatagctgagtatcatagcctagcctagttgacacatgaaattaaccattaaacaagctaaaaattttagtagatgatttgaaggaggaaattttttaaaaacttatattagtttcctataaaaccaagtgaaagaaaaaaataagaataaaaatgagagagagagagagatagagaaagtacttgcaaaactaca

SEQ ID NO: 459216 - DNA, 562 bp, Homo sapiens
ggggcctccaccacgcccagctaatttttttgtatttttagtagagacagggtttcaccgtgttagccaggatggtcttgatctcctgacctcctgatctgcccgcctcggcctcccaaagtgctgggattacaggcatgagccaccgcgcccagtcacaaaaggatcttagtaatcaataggaaatattattcttgtttcatggctcttaacattttttgtgaaatcattaaaaactcacttattgctggctatacatatatagagaagcaaaaaatagcaagagtaatatttagaacattgtaatttaagcccttagaaatattgggaattaaagcatttaatttgtttaaaaaaaaaaaaaaaacttacccagagtagtttgaacagtgtttgcctcttctttttgttgtataacttacaatacagagtgagcattttttctatgtctaggctaacttccaagtctggatcagtttccaccttttatccttggcacttatattgytgtgaaatagctccaaagtttctttaatgtcaggtttttctaccatcattgctt

SEQ ID NO: 459217 - DNA, 624 bp, Homo sapiens
gctcttggttgggatagacaggcacagaaatcctaaaatttctcacaaatatccctaaccttagtatgagaggaggtctaagcaggctggaaggggagataaaattcccacaagcgtagaagccattttgatcatctttgatgcccaacagaaaaacccttagatcttcccattgtgttccacctttgctagtacaaaagctgggagaatgaagagagaaaaaaatgaaaatgtagaatgactgtaacaaacactggtgttgactccccaacacygattctacccctctggttagttaaagccatttgtgatcattccatagtaagatccttccagtgaataattcagaaataggtaggagatttgcgccaaccatagaaataggctggtcttgtaaaaaagagaagcaaacctctcttctaccctcatccctctgtacacacataaacaaagaagtataaggacctaattatcatagtctgccctcttatggccataaaaggaaagagtatagcaaatgtgaaaaacataaagaaactatgttcttgatgacattagcaactgatcatattgaacctggaatccttcctatctctgggcttccattatggtagaaaatatata

SEQ ID NO: 459218 - DNA, 624 bp, Homo sapiens
gctcttggttgggatagacaggcacagaaatcctaaaatttctcacaaatatccctaaccttagtatgagaggaggtctaagcaggctggaaggggagataaaattcccacaagcgtagaagccattttgatcatctttgatgcccaacagaaaaacccttagatcttcccattgtgttccacctttgctagtacaaaagctgggagaatgaagagagaaaaaaatgaaaatgtagaatgactgtaacaaacactggtgttgactccccaacaccgattctacccctctggttagttaaagccatttgtgatcattccatagtaagatccttccagtgaataattcagaaataggtaggagatttgcgccaaccatagaaataggctggtcttgtaaaaaagagaagcaaacctctcttctaccctcatccctctgtacasacataaacaaagaagtataaggacctaattatcatagtctgccctcttatggccataaaaggaaagagtatagcaaatgtgaaaaacataaagaaactatgttcttgatgacattagcaactgatcatattgaacctggaatccttcctatctctgggcttccattatggtagaaaatatata

SEQ ID NO: 459219 - DNA, 583 bp, Homo sapiens
atttttggaatgactgaaagagtttttgtcataatattatttatgagttgtgggattcactgagagttccagataactcctctgcaatgcccacggcctgctctgtcatctaggtttataaacctctttctctgcagtttgcaggatgaacmaggctgcacagagtgtttaatgagatctaaccaaaggtttcaaaaacctgtgtattattttgctgcattttatagatgaagagactgaatgttctaaagataaagtccattgagccagtaactgtaagagcaagacaggaagctagttctctctgtctcagagtctgacactctttacaaagccaaggagtaatttttaccttaaattgaggatttatactatttcacttaattgagtgatcagaataagagcatgcatcttttactcccccttctctctcttttttcactttaatatatcataggcagtcatttctttttcccagtttttaaattataaaatatacataacataaaattgactttctcaaccattttaagtgaacaattcagtggcattaagtacattcttgttgctgtgcaaccttcac

SEQ ID NO: 459220 - DNA, 607 bp, Homo sapiens
ggcatagacagacatataggccaaaggaatagaagaaagagtccagaaataaaacccaaattattttcaaaaaagttgtcaaggccatttaatgggaaaaacacagtctttacaacaaatggtgctgggaagctggatatccacatgcaaaataataaaattggatctttaccgaacgycatatacaaaaattaacttgaaatggatccattacctaaatgtaaaagctaaaactataaaactcttacaagaaagcatggcaataacttcaagacattggatctggcaatgattccaaaggtacaaacaaattttaaaaaatataattaataatactgaaatatacacttaaaatggataagatagtaaatgttatgttatgtaagatttacaacaataaaaataatttggagaaaatacctctaagtaacccacagatcaaaggggaagtcataagagaaatagggagacattttgttaaaaatgtgtagattgtattttttagaaaagttttacatgaaaaaaaaatgagcacttagaattccatatatcccctgcaaagtttcacttattattaatgttttacatttggatggtacattcattg

SEQ ID NO: 459221 - DNA, 524 bp, Homo sapiens
tggaaataaaaagcaggtgaaccaggcctggggagaggtggaaggggaggcagattgtggccaatgacggcaatgtcagagggcttggcctgggagctggtttgattcttgagggatgaagaaacccaagatgagtatgtttctgtgtgtggctgagaagagtggagtcagaggccaccagagagggcctgggagcagggtttcagcagagtcagagcatggaggttggcgtcgtcttccattctggagacaatggcagggggcagagagaagagggtgttgagagtctgggccctcatactctgagaagatggagcttggtgggggtgtgctgtcagtgagtggcattattttccagtgatgtggtgaacataccaccgtggagtggacacagataatgtggtggkgctgtagcacagataagatgattagtaaggaaatggagagtcaaaaccacacgtttcttcttgatatgataagtaaatacacaaccttgcaattatcagacagtttttttttttaac

SEQ ID NO: 459222 - DNA, 565 bp, Homo sapiens
tgcagcttggctctcacactgcaggtaaaatgtcccatagcacttaaccctcactcccttctgttttattatcacattattcacctgagatggctttgaatcatgtgtacttcaacggcttcctgcatctggagagtgtcaggggagaatttcaaacatgaaatatgtcaggtttaaaatgcgccacatccttgcaycttcaaaccctcccacagctcatggcatcctgccctgaaaggccttttcccaagtcttccaggctggggctccctctgctctgactccaggttccaggagaggaagggattgcagagcctgagaggacaagccactcgatggccaatgcatagatgctagaagccaacatttgagttcgagcccactcatggctctgtgcctcagttgcctcatctgtaaaatggagataaccacactgccggcctcacaggaacacagtgaggtgaaccaagttaatgtatgtagggcaccaggagcagagcctggcctgtgctcaaatcaaatccacacatgagttgctattgtcacagacatttctcaagtactt

SEQ ID NO: 459223 - DNA, 532 bp, Homo sapiens
atgaacatttacatacaggtttctgtatgaacataaattttgattaatctgggataaatgccccaagagtgctattgctgggttatatgtcaactttagttagttttgtttttgttttctttccaagaaactgctcaattgttttccgyagtggctggtaccagtctacattcccaatgtctcatacatatgggtaatgtatgagcaatacagtttctccaaatcttcacataattctccaaatcctcaccagcatttccaaatcttcatcagcatggggtgctgtcactatttttacataagcctttctgataggtgtgtaatgctactccatcctggttttaattagcatttccccaagggctaatgaagctgagcatcttttcacgtgcttgtcatctgtatgttctctttggtgaactgtctgttcatgtcttttacccatttctgtttttcttttttttttaactattgatttttgagggttccttataaattctagatccaaggcctttgttggatatgtgccctg

SEQ ID NO: 459224 - DNA, 527 bp, Homo sapiens
caaacagatacacagctaagaggaaaaacggaggagccatacctttgagcatgtatcttgtggtgttttatatttatttttacattctccctttgtgtcagaacttttcataatggctaaagcttcgagttctgggagagtgctggaccttttgaggacatagactgacatgaacctgaaactttggggtagagaacaaaggggtggggccrtatgggaagtctgaggaatcatgtggatggtcctttaaaccagaacccatttgactggaggctagagaatcaaacattttaggcaaggtcaggaatgtggcagaaaacctaggctagccagaaccttcatggcagtgagttggtgaaatttagtatggcgctggcaaagtactcaacggaatgcatagaccacgcacagaataaacaggatatattattcttacttaccaggatttgggggctgaggtgggcttcctcctgcagataggagatggggatcaagagatctccctctttgtccctgtagggaagcgc

SEQ ID NO: 459225 - DNA, 343 bp, Homo sapiens
tttacagacagacttagaaaagagcagaatgggaaaatttttgtgtatgcctggtggtccttttttttttttttttttcctttccagacctcctgtctccttaagctgcctacactcactgccaatttgttcaacgaagctgtcgtgtgttgttaatattgtcaggatttatgagcattgctaaatgtgtgcctggaataatttcatttccttttctccatttctgtttttctccaaayagcagcatgaagggagagtagtgagattccaactctgggtacacatagatatggatttcattcctaaatctaccattgaagtgctgggtgatcttgagcaagtc

SEQ ID NO: 459226 - DNA, 598 bp, Homo sapiens
cactaacaaccttccaataagtcaccaaggtatccaaatttctcctgctctggagggggtggtgatctctgttgagtagctcacgtgtttccaggtagattacataggacctggatgatatcttggcygagtggcatgacttttcaggcaaaatcgatatcactttggggcactaagttccaaatataagacttagatcatttttctgactttataattcactaattatgaatcttttaataaagcatacaatttgtatgtatgtctaatattcaaattacttgctttctttttctggccgactttgcaaactcaggtaatgaccaagaggacattcatgtatattacatcacttggtcttcaaaacagccttgcaagctgaacaaaggccatggcctccattttgcagatcagatcatggaggattagctaaactcacagactgctcatggctcagtgcacctttttgcagtttcctaagtcctaggctcacatttatagagggttatcttcctctcaagcaccctcctcttaatttcagaaaatagccaagttttgggttgaaccaacacttccctgataagccattctctcacta

SEQ ID NO: 459227 - DNA, 598 bp, Homo sapiens
cactaacaaccttccaataagtcaccaaggtatccaaatttctcctgctctggagggggtggtgatctctgttgagtagctcacgtgtttccaggtagattacataggacctggatgatatcttggctgagtggcatgacttttcaggcaaaatcgatatcactttggggcactaagttccaaatataagacttagatcatttttctgactttataattcactaattatgaatcttttaataaagcatacaatttgtatgtatgtctaatattcaaattacttgctttctttttctggccgactttgcaaactcaggtaatgaccaagaggacattcatgtatattacatcacttggtcttcaaaacagccttgcaagctgaacaaaggccatggcctccattttgcagatcagatcatggaggattagctaaactcacagactgctcatggctcagtgcacctttttgcagtttcctaagtcctaggctcacatttatagagggttatcttcctctcaagcaccctcctcttaayttcagaaaatagccaagttttgggttgaaccaacacttccctgataagccattctctcacta

SEQ ID NO: 459228 - DNA, 611 bp, Homo sapiens
tggcattgtgggactctgtcctcaggagcttagtccaaggggctgagaaaagacatgctataaatagctataaagcaaagtagaaagcttagaggaaaggagattacttctggctggatctaaaaactcttcatggaggagtctcaaagaattggcaagatttcaacaaatggctrtgtggcaagagggcacttcagatggagaattggcacaagggaaggaaggcaagaaggtcacaaatgtacaaagggatacagtggggggaaccggtataaaacgcagaagccaccattatagagagaggctgggggttaccaactcttgcccatggagcatcacctagcagaataatacaagtgccaggtcccacttggggctcctttatgcaatcagaccaagcccgagctcagaggttaataaagctctccatatatcatgaattaagatgacaaggtggatggactgatgggtgaatgggtgaatggatggaccacagtcattctgacttaattaaacagcctgggttagtgaagagaatactaaattttgagtcagaagcttatatttttgtgatccctctacagcacctgactggtatcctggagcacaaa

SEQ ID NO: 459229 - DNA, 636 bp, Homo sapiens
gggagctgaaacaactctttgtagctgctaaatggtcacaggtggaatatcactttgacttagagcttggcagccagaaatctggacgaggggatccaatgcatcttttaacaactggcatggaagattaggaggctattgctaagttatcaatagacggtgcagtttgctgctggaagtggtcttcaattgacttctaagtgcagaagttacatttgtacaacaacagtcagtataaccaactgtaaatgtatatacaatggattagtctgttcaggttgtcataacaaaatcccacaagctgggtggtttaaacaacagaattttattctctcacagtcctggaggctcgaggtccaagatcaaggtgccatctgggttagtgtctagtgagggctctctccctggtttgtaggtggcactttgtgtcttcacatagcctttccttggcacatgtgctcaaaaagggggggaragaaagggagaggggggagagagaaaaggagggaagtgaagagagagtgaacaagagagagaaaatgagagaaagagagataagagaaagatatcttctacttataaggtcaccagccccatcagattagggtcccattctcatgaccttattgactttta

SEQ ID NO: 459230 - DNA, 576 bp, Homo sapiens
gcatcttaagtctctgtttctaagtctgacttgtcaaccccaacccccacaccccaacccaggggactcagcatctgaatgccacatgcatggattcagacctgacatgtaaaatgcaatgagtcaggaaagcatggcaccatgcagtgtgatgtgtgaggaggaaaaatgaaacctgtaaaacccagtgaccaaacagagcctagaagaataaacatacttgacattaagtccaacagctatttgcagaaagatgggagaggcaaggcttaaaggaatacctttatatgatgaattaatccccagggtcagacrctggcctaaatccattgcttatgggaatcatatcatggtccactagccccaagcaacattcttacctcttagcctttgttcagaccatgtcacctgcctgaaatgccttaatcttttcttctgcatacatggatgttacccatcattcaaaacccagctgaagtgaccctctaagagcccagttcaaaatgccctctccctctcctgagccctcaactcccctggcaggcttctacttccttccctgacttcacgaacttc

SEQ ID NO: 459231 - DNA, 599 bp, Homo sapiens
atggtgatagtggcacaagtgatatggcttggatatttgcctcatccaatatgagatacattccaacatgtatctcatgttgaaatacaacccccagtgttggaggtggggcctggtgggaggtcacagaatcatgggggtggatttctcatgaatggtttagtgccatccacttggcaccaccctcaagatagtgacggagttcttgtgagatatgatcacttaaaagtgtgtggcacctccccattttctctcttgctcctgcttttgccatattaagaagcctgctcttgctttgccttccaccatgagcaaaagctccctgagacctccccagaagcagatgccaccatgcttcctgtacagcctgcagaaccataagccaattaaacctcttttcttataaattacccagtctccagtatttctttatagcaatgtgtgaacagactaatacaacaagttcataattatatgaaaaaccactaaattttacacctttaatagggtgaattttatggtaygtgaattatatcttaagtaaaaagtaaattttaagaaaagaatgaatgaggtagagagggtaaaaataaggatag

SEQ ID NO: 459232 - DNA, 580 bp, Homo sapiens
attgaccataaaataatttattcaatgtgcaaagaaacaagtacagatattatgccaggatctggatctcaagccaaacagaaacaagatraatgtttaactaatccttactgtgctactccaatagtatgcgtgtgcctttcacttcaacctgagcaaggattaaagaaatcatttgcaatataccctgcttcagaaagcacctgtgaatgtcctgggtctacatcactcttccctttgctcacaatccaagcaggttaatttcctatatgaaagaagctgcaaagggggtgggcaagaggggagaaagggcttttggtttttcttctttaagcctattgactagagctgcttccaacagtagcagaagttgctcccaaggcatttgaaggagatgggaacacacaaacctaattgcattacactgcagcttgaccaagcgatcactaacttgattgcagagaaaggaaatgaaaatgacagagacaaattcaactcaaccgttctcttacttaaactcaggactcaggccaccagctggaaggcaaagggaatagaggcaaatgctcatggataattg

SEQ ID NO: 459233 - DNA, 445 bp, Homo sapiens
aacttcacatctttctgatgctttatattcctcaaagcccctcttacattcacttctccttttcttctttagtacggctctgccagatacccaaggttagraaatggtatctccaacatacatatgaggaggctatggcccagaggggtgaagtgattggcataaagccactcagcagagcagagctacctctcaaccgtcattgcttccttcaatttaacaatcagcagtattttttgagactccacaacggagcgacctttagttttagtctctttctcgtttctcttcaacgaacactgtgcattagacattctgattagggctgagtaagatcttagaagttttctctttttggaaaaacacatacactccccagccagacagcaatgttaattttggaccttacgcatgctcatcacgtggaggaacaaatcaaggcctt

SEQ ID NO: 459234 - DNA, 595 bp, Homo sapiens
cgcagcccgcaaacatgagagcttttcaatagaattacaaagacaatggatgaaaagatcacaagatgacttaatctggaccacaataactcaaaaatgtttctcacaaaattaattcaaatggactgggagaggctgcatagctgcaaggcttgaaaattaactcaaaggcagtaaacaaagaataatgatggaaataattcaaatacaaaagaaggcaccaagtctggtagagctcaaagccccttgcaatgtcattttattaatcctcctggcaaattgacaatgcagcaggactgggagaggtatagtcttgctgaataaagcctcattttgagacctggggttaacagaagtaaggtacaaataagggctagtttctcaccaggagcacctaccaaaggaaaagaggagctgtaggcattgcatgaaggagaaataatccaggttgaccagaagcctgactatctggacaaaccgaatactgtcaacccagaattgaagacccatcatttcagatcctgctcagcttatgtggttccccaccctgtctttttccaggtgactcagcyaccaagaacatctttagaaccaa

SEQ ID NO: 459235 - DNA, 598 bp, Homo sapiens
gctggtgaggagagttactaaactaccacccactgactcagggagaactagccccaggtttatgtagaagaggcagccttgacaaggtgaagtgatggtgactggctggctccaaaaatctctctccartcatcctgccttagatgactggaactccacccttaatccttccagttaagccttcgaaggcctccattagcagtgtaaatgtttctcttgggaggaataataaaatgtaattgaagtaaacaaacatttactgagtttgcttcaaaccaggcacttgtgagccatggcagggtgtccaaggatgaataagatgctatcctgtcctccaggagcatgtagatcattagaagcactgagatgtatgccaaattacttaaaacgagagagaaaattcaaaagaagataaaataagaagaaagttccataattgttctctcatctatatattttatcagagctggatgataggatttatcaccttggggaatttccattaacatggctgaaaagtttgtactttatttggaatataatagatagctatggatattttctgggtgaaggggagggagtggcatattttttaaaa

SEQ ID NO: 459236 - DNA, 660 bp, Homo sapiens
tgctttttgagctgtgcagtagcagcttttgaacacacaatttctctggttggacactatcctgcctcattctcaacttgattggtgcagtctcagcctcatcarctgagcattcttgggtcaggccttattagaaagccagtgacatgagaaaggggacatgcacaaagtatttttcctagccaagctgacagcaagtgcacctagtgttcaggtcagagaaagtggaagttctggtatttggcatccacggcaggggctatgtgctgctgttttcaggtcagggggcatagcagggtgggattagctggcatgtccccacactgtggtttgggggttgtatggtgtaaaaacttggatgttgatcactttcagtccaatcctttcgtcagtgcatttttctcctttaatgaccgtaaagggttattttcggctaaaaactctgaatgagctagtacaccctgctagtgtgccctagcgagcactcctgagctttccttttacattccacattgtgatttattacatcatgattgccttcttactcgcacatcaatttcctgcggtgtaagaccaaatatacattcttcataattatactccacatcattctgcaatgcctggtgaaataagtatccactgattaaataaatgtgcaaa

SEQ ID NO: 459237 - DNA, 612 bp, Homo sapiens
actatcctgcctcattctcaacttgattggtgcagtctcagcctcatcagctgagcattcttgggtcaggccttattagaaagccagtgacatgagaaaggggacatgcacaaagtatttttcctagccaagctgacagcaagtgcacctagtgttcaggtcagagaaagtggaagttctggtatttggcatccacggcaggggctatgtgctgctgttttcaggtcagggggcatagcagggtgggattagctggcatgtccccacactgtggtttgggggttgtatggtgtaaaaacttggatgttgatcactttcagtccaatcctttcgtcagtgcatttttctcctttaatgaccgtaaagggttattttcggctaaaaactctgaatgagctagtacaccctgctagtgtgccctagcgagcactcctgagctttccttttacattccacattgtgatttattacatcatgattgccttcttactygcacatcaatttcctgcggtgtaagaccaaatatacattcttcataattatactccacatcattctgcaatgcctggtgaaataagtatccactgattaaataaatgtgcaaatgttttt

SEQ ID NO: 459238 - DNA, 521 bp, Homo sapiens
aattttccttattttatataagtggaatcacacaatatttgtcctttacatctgggttatttcacttagcgtgatatttttaaggttcattcatgttgcagcatgtgtcaacatttctctgaataatttctgttttatgtgtataccacattttgcacatccattcatctgttgatggacatgggttgttgccacstttaggctgttgtgaataatgctgcaatgaccttcagtgtagaagtatctttctgacctgttttcaattattttagatacatacctaagagtgaaattgctggatcatagcataattctatacttagctttttgaggaaccgccaaactgtttaccacagcagctgcaccatttacattcctaccagcaatgcacgaagatgacaatttctccacattcttgccaagacttatttttttcttcatcttttttattatagccatcctagtaggtaggaagtgacttctcattgtggctttgatttgcatttccctaatgaagtaaa

SEQ ID NO: 459239 - DNA, 592 bp, Homo sapiens
atgaccttggacaaatctcttcccctctttggcaccaaaggtggctattcacaaacatatctattccacattcccataagcattccagcaaactgtttgtcatggccacctttgaggaatgtgtttgggtggaggagagactttcaggttttcctttacaatatctccgaattgcattaatgtgttacaacaaccttgtattctttctgttaatattttttgagatggagtcttgctctgccacccaagctggaatgcagtggcacgatcttggctcactgcagcctccgcctcccgggttcaagcaattctcctacctcagcctcccgagtagctgggactacagacatgcgctgccacatccagctaattttttgtatttttagtagagatggggtttcaccacattggccaggatggtcttgatctcctgaacaccttgtgatctgcccacctcggcctcccaaagtgctgggattacaggcgtgagccaccgcgcctgacccaaaatgtaaaattgaggttggaaatacaataaacacacrtgtactctctgctggagttacagatattaaagagaaatgatgtttaa

SEQ ID NO: 459240 - DNA, 592 bp, Homo sapiens
acagcttcttggtgcagctgcctctgctctcctaatttgatcctgagcctaacaattacagttatcaaggagccagctcttccaaaaggtttcctgcaaatcacgtcatcatctgtgatgtgtacaatttggtctcttggattatgcaatgattctgggtgttgttttaaagcctgactttaataaaaagccygagaaaagaacaaatgcaaatgggtgttgacgtggactgcccatcctctggcaccagcagtagaatacagacagtacctacagcaacacaatagataatgcatctgcaattaccgggatacttaacatgtgttgtataactcatcggagaaaatatagatcttttgtgtgtgtttcagatgtagaaggaatgaatgaatcacaggtcataaactcaggcgtgggacaagtatcagatctttgtattttcttccaagcagcttaatttcaatcgtgactactccatgccaacaggtaggcaggaaattccacctcattgattctctgggtgcccctgttcccacccagagggtctttctctagcaccaaggtgctgggagggctccctgtccgcctgtaa

SEQ ID NO: 459241 - DNA, 479 bp, Homo sapiens
tatacctctctaatgtgccccacaccatggaaattaatggcatctatggcagttaatggctaactaggctgtgcacccctcaagggcaaggactgtgtccaattcattgctgtaccccaaggtctgacacattggggctcaggcttcatggcagatgtgaatcccctcacagtccctggccctgggctggcacacagcagacaaggaaatcccagctggaaccagagtcatagccagtccttgtcagagctcaytggcttgcttgttgcagaaaagccaactcaaccagcttaggaaacacaggccaatttcataagctcaaataaccaagcagcccagcatggctggactcagagctcaaacagttatctctcgggtctccttccttcctttgtataggtgacagacaggcaggctcttgccaagaaagctcagggtttgcctcctcctggtttcaaatccatagaaaagaacagttt

SEQ ID NO: 459242 - DNA, 448 bp, Homo sapiens
ttgctgggcagaagctcccgcttggcgaggcccgtgtagcggcttgctctgccacgmctggcagcaggtgggcccgtgtcagcaacagaaatgaggtcacttactaccctgcctgccacccgcgtgaaccttgcatgcattccttgttcaatgagatgttgtttgcaaatgcttcccagggaattggtgagggtttctttctttctccttttattttcctcttctctgtctggcttaggaacagagttccagctgctacggcagcaggctggagactgagatcagggtttgttggcagcccagctactgagctccctgctccttggcctcaatcagctcagccggtgatatggccaagtgttaacggcaactatcctccactgtcctgtcaccagaggccacaagagaagggctagaccctctcctctgagaacccagggagctcagc

SEQ ID NO: 459243 - DNA, 610 bp, Homo sapiens
cctcccacattgcaccagggttgttctctgtcaccaaaggacaaggggtggcacaatacttctaagacagtgatgatatggtaccatatttgttctatgactgacggaacawgtgatggcgtgacacccttaaggttgcaaaagacactgccatccttacaaagatccctgtgggcttctttttagaaattaacaagcagatcccaaaatttatatggaaatgctaaagaggtagaacagcaaaaacaattctgaaagacaacagaatgaaagaacgtatactacctgatttcgaaacttactataaagccacacaaatcaagatagtgtggtattgccacaaagataggcacacagaccaacagaatggaattaagagtctagaaataaatccttacatttatggctaattgattttcaacaaaggtcctaagacattccagtggagaaacaatcatcttttcaacaattggtgccaggataattggatattcacatgttaaaaatatcaattgatacctttaccttataccatacacaaaaatcaactcaaaacagatcctaggcctgaaagttagaactaaaactctaaatattttagaagaaaaca

SEQ ID NO: 459244 - DNA, 578 bp, Homo sapiens
tgcagcaatatggatgcagctggaggacattatcctaagtgaattaacacaaacataaaaccaaatatggcaggttcttacttatgagttggagctacgtaagttggaatacacacggacacaaagatggaaacaatagatactgggattccaaaaagggggagagggcatgacagggtaaatgttgaaaaacaacccattaggtactatgtttgctacttgggtgatgggatattagaagcccaaacctcagcatcatgtaatatacccatgcaacaaacttgcgcrtatatcccctgagtctaaaagtaaaaatgtaaataaattgataaaaattgtggtaaaatacatattacataaaatttacaatcttaaccattttaggtgtacagttcagtagtgtttagtatattcacgttgctgtgcaaccactcttcagaactcctcatcttgcaaaactgaaattctgtaaacattgaacaacttcacattttcctcccccttcccccagcccctggcaaccaccattccattctctgtctctatgaattgaatacaacaggtatctcatataagtg

SEQ ID NO: 459245 - DNA, 537 bp, Homo sapiens
ctggtagaaccccctctaagtgaatggccccttgttccattcagctccatcccctcttcattctctcctcaaaagttggtgaggaggtgtcgagcattgtcactgagctccaggagaatgagacttctaagaaagagagagagtgggggggkggtggggtaagagggagatagccatcagcagtgcctctggctggctggcacctaacacaaggcagagttgggccagagggagagtccacagcactttttcttccaagcagtgtcctgctagagaaataacctcattctctggaagactaacaggaaaatcacagaccttgaagatgtttcaccacctggaaactggaccggaacaactgttcgcgaggctgggagtgcaaggctggacttctaagagagtctcagatcagtggccacttgactgaacatctctgcctccctttcccccctaaaaacaggtcacaaatgacaactctcacacctcatgccacccttgtgtcatccacattatcatgattgtccctattttacagat

SEQ ID NO: 459246 - DNA, 618 bp, Homo sapiens
tgcttaatagaccaaacatgggctaggggggaatgarggaggggcaaccaggcccaggatcagccagaagggatatgtggattctgctaaaattcaggccccctgatgaccattgacaaggctgaatgcctgggaccgtaaaaagtatatctatatggagggaggggagggaagggtgagaattcgtacagcatccaagttcactgcagtgcccaccttggtcgctcacaggagatagatgtccccatttattgcctcctgtttgtaatttgcagtcagcttttatgagtcctaagtggtcttcctcttctcacttgctaccattcctttctcagttcgggatttcctcctcttcctgctcacaaaggtgtaaacagtttctcaagttcagacattctttgacccccttctcagtgttgccttactcagatatcatgtcatcacttctgttgtgtctgcgtaccacgtgttccattgttttctccactttatttttgaacacattaataaatttagtaatggagaaaacttctgatcactgctgtacatagaaaatcagaatcatatgccatcaatataaataaataccgtgaaacccaatcagtgttaattaaattc

SEQ ID NO: 459247 - DNA, 435 bp, Homo sapiens
tctcattgccattgtctgagtctgggcagaagccatccctccgccccctgctgccttttcctagccgctccagactccygcagtccccagcaccggacggtgcatcggtttcccaactgctcctctgcatgggcagaactgtcactgatcaactggaaatattgctgccatttcttctaattctcctgcttttttttctgaagacagcacagagctttttttcttcctgcaggccctaatgtgattatttgtgtagcagacaaacatacaaatgtacatgactttgaattatggggagtgccaggatagactgtatttaaaacaacaactctattactcatagcttgagaagacggggatagcattattaggaggacttctgctgaagtttgctatgggattccattcactgatattttaggttgatcgtgcctc

SEQ ID NO: 459248 - DNA, 495 bp, Homo sapiens
cgtgtaaacagtcttcacttcacatggctgttgtgaggaattaatgagttaattgcaagggacttaccacaattcctgacccatagtctaaatgtgcaaaaaataatgcaagctgtggggattgttatgttcaaggtcatgggtgtcctggggggtgtcagttatggtccctgcctcctgtcctcctttgtcatagaccctgcatctcccacggcatataggctgcctcttcctgcttccctgagttcagatgaaacaccatgccctgtcctgttctcattcccagccttggagstggcttgtccctgctgagcctctgccatttgtttgccaaagggctccttacatgggcagaagttacactcagaccctgtgggctatgaaagttccctcagtaactcccttttttggagagctcgtgttctagacattgggctgagtagttgacaaagatctcattgaatttatagaatggtcccattttacaggtgagga

SEQ ID NO: 459249 - DNA, 569 bp, Homo sapiens
tgatctcccacagttctacaggttaactgggagttcaagatgtttctttactcgcatgtataacaccgccgctgggatggccagatcagctgatgctagccaggtgtctctctctctttctcccaacctggccaaaatgaccttcttcctagcatggcggacttggggcagtgagactcgttacatggcagctggcttcccctgtgtaagcattctcagaaacccagacagatgttgtaaagcttcttatgacctggccacggaggtcccagggcatcactgccacagcattccactggttgagcaagtgaccagggccagcccatattcaaagggcgaggaatcggctccacctataaatgggagaagcagtgtgagagcagctctctgtgggggccagagagcacagggccaacctcatcttggtgatcwtggaagtctacctggagggggtggcatgaacccacttgtgtaaggtggggaagatcatagtcaagctcctcaaagatttgggtgagctcaatgggaaagagaagcatggagaaatccattgtgggtggtgcctgaga

SEQ ID NO: 459250 - DNA, 601 bp, Homo sapiens
aatggtactttgatgtctgaggatcgattctagacgtgggactgcggtcaagggttataaacattttatgttttcatagattccagaggcggatttgaatcccaatatgtctgactccaaagctcaagaaagacccagggtaggctaggcgcagtggctcacacctgtaatcccagtgctttgggaggccaaggctggcagatcacctgaggtcaggagttcgagaccagtctggccaacatggtaaaacctcatctctactaaaaatataaacattagctgggtgtggtggcagactcctgtaatcccagctactcaggaggctaaggcaggagaatcgcttgaaccttggaggtggaggttgcagtgagtcaagatcgcaccattgcattccagcctgggagataagaatgagactccatctcaaaaaamccaaaaaaaccaacaagaaaaacaaaacccagggtaaaagatgagggcacgacccatggacaccatcctggcatccagacctcctgccccagctggtctggagcctctgacctaggcggcaggaattcaggcatcctagcctggcatgagctgctaggctgtaggctgc

SEQ ID NO: 459251 - DNA, 437 bp, Homo sapiens
tatactatatataatataataataattataaaaataataattattattattactacaaaataattatcacaaaataattttctataattggaaaattggtgaaggaggtcttgagaagaactatacagctagaactttctgaattggtagacaaggtgatagtatgtgtgtcccatgtaaatattcacagaagagtgacctcagtataggaggatcttattaattgggtggacaagatgatccatttagttcccaagacccagcccccatcattatccaatgggctmatgatcaaaacggccacagggaaggggatggaaactatgtaaggactcagcaacctggactttcactcttccaggctgactaggctacagtcactgccaatgcccaagtaccaacagcagagcccaacactgaactcccaatgtggccct

SEQ ID NO: 459252 - DNA, 492 bp, Homo sapiens
tcagacctctgacctccagatcgtaggagagtgaacgtgtgttgttttaagcagcagtaggaaccgaatacaaggtttggtgagatggtatctgtgagtggtgaacactgggaccgattcaccacggtagcgayggccccagggccccagggtcaggtcctgagaacaaagacaacaggctggcaagatcttagaagattttattggcatgtgctatatcaagggagttgggtaatacccaaaccaagcctgaatcagaaagagagattttcataaagattgtctgagctccaaaattatagaagttttccaagttccttccccaccatttccatcttcctctcagcatactactgaaaccactcacacgcgtataacagattcagggggcagaaagaggggacacatcaacctttttcctgagctatctcccttcactgcttaacatttcaaatcatccaaaacagactcttccatgccctggatcaaacc

SEQ ID NO: 459253 - DNA, 564 bp, Homo sapiens
cagtccagagtctctgacgtattcaagctatcacccattcccctgtttatgcttctagaccaaaactgtcctagaaataagaacttgttggtactctcctcctcagccctgtagggtcccaaccacatttctacaagcaggaggctgctaactatggagacatcatagtctccatagaagagaatggatagaagagaatccaaagagagttctcactgaaagaattyttaaacattacctcaccctaacaattcattgtacggatgggaaaactgagacccagacatgtggaaagagtggtccaataccacaaagacattcagcttaaaggctgtaaagccagcttgccaaggttctgtttctggctccatcatttattaactgtataaccttggataaatgaccacaatctctctgtgtctgttttctcatctataaaaatgagataatcacagttcctatattacagagttactatgagtattgatgtcaaagtgcttagaatagtcactgacacatagtaggtaaccaccaacgttataataattccacaaatagttatta

SEQ ID NO: 459254 - DNA, 501 bp, Homo sapiens
cataacgttgttggcacatgtttaataacagtctctctgggacattaataaaaacaggacctggtttgtagcatttgccagtttctgtgatgtaagtactcccaccatggctgatctcaagccatccaatgtgacgtcattgaacatggagttgggaagggaacctcagtaggacatcctagagtatcttgatcctgcagatacagaagacagaaataagctcaaaaacataggtagtactaaatatactaaaataattataaagtgatgaattttgagttttaatcatctttgtttttaatgtaatttaattaatggcaagttatgtaattttttaaaagaattacacacattattacagtcaagaacaggcaaagtaaaataacatgttaaagaygtatacatatacggcaaaactgtacaaaaggcaagggattaatacaaaattcagaaaactgctagtgggtacatggatatttgttattaaattattgttatcat

SEQ ID NO: 459255 - DNA, 608 bp, Homo sapiens
gcttcccctccaaagtttaagtctaagtcctatgcagccttcaaggctcaaatcaagttccaacccctgctgtaatgccttgaatgcccaaggcttcatggattccttctttctctgaatactcacagccacttctaatgtgcactatacaattcaacagttaacaaaatgttgtcttttattccttgctgctccatatcaatatcttaaaggcaatgttcctgttagctttgtaaagcaaagcctatactttgttttctctatattcttcacagtgtttagcccagtgctcaagttctagagaaatacttgctatattcacattactaactttcttctccaatatataaagggatttccttttctaaaatataaaaagtatattagaaatggtaactaaagtgttgcttaatttcttaaaatactcccttatgacctaaatgtatcyatataaaaaagtatgaagaaaggcaaagtaggcttgatactctcatagttttggctaataggcagcagcaatcttgttcttgcctatgagatattttttcccttaactttcccttttatagactcagcacactaaaaaaatacttaaataactttaggta

SEQ ID NO: 459256 - DNA, 629 bp, Homo sapiens
ctactgaaatatcaaagactgagaaagagggaatcctccctacatcgttatatgaagctagtatcaccctgacactaaaaccaggaaagggcacaacaaaaacagaaaactacagaccaatttccctgatgaacatagatgcaaaaatcctcaacaaaatactagctaactgaatccaacagcacatcaaaaagataatacatcgtgatcaattyggtttcatccaagggatgcagagatagtttaacatacataattcaatcaatgtgatgtaccacataagcagaattaaaaacaaaaaaaaattattatctcagtagatgcagaaaaagcattcaacaaaatctggaattcctttatgataaaaactctctaagcaaaaaagatacttacctcaaattaataaaaaccgtatatgacaaacccatagccaatatcatactgaatggggaaaagttgaaagcatttcccctgagaacagaaaaaagacaaaggtgcccactttcaccactcctattcaacttagttctggacgtcctggccagagaaattaagcaagagaaagaaataaagggcatccaaattgaaaagagaaagtcaaattattgctgtttgcagatgctatgatt

SEQ ID NO: 459257 - DNA, 629 bp, Homo sapiens
ctactgaaatatcaaagactgagaaagagggaatcctccctacatcgttatatgaagctagtatcaccctgacactaaaaccaggaaagggcacaacaaaaacagaaaactacagaccaatttccctgatgaacatagatgcaaaaatcctcaacaaaatactagctaactgaatccaacagcacatcaaaaagataatacatcgtgatcaattcggtttcatccaagggatgcagagatagtttaacatacataattcaatcaatgtgatgtaccacataagcagaattaaaaacaaaaaaaaattattatctcagtagatgcagaaaaagcattcaacaaaatctggaattcctttatgataaaaactctctaagcaaaaaagatacttacctcaaattaataaaaaccrtatatgacaaacccatagccaatatcatactgaatggggaaaagttgaaagcatttcccctgagaacagaaaaaagacaaaggtgcccactttcaccactcctattcaacttagttctggacgtcctggccagagaaattaagcaagagaaagaaataaagggcatccaaattgaaaagagaaagtcaaattattgctgtttgcagatgctatgatt

SEQ ID NO: 459258 - DNA, 597 bp, Homo sapiens
tattctctgttgctttcttcaacttttagtttaattttcttttgtacatcattttgctaacttttctttcatcttttcaacattatgttgaaacttatcattatgtgtctaggcagtaagtttcagagcagttgggcatttgaatattacaacatwcagagtaatttattccagaccattagtatatattgtatatctatttagtctaaaagtttgacaaagtttatgacagtggctgaggaagaggaatccctacagaaggaagaaaagaaatttcattctagctggctagactagacggcatttcctactaagctccccaaatattggcaattggcaagtaatgattttggtataaattatacactttgatatgtacagaaaagttatggaacattttacatgaagtaatagtattaagtaatttgattgaactaatgactgcttaatctgatatctgacaaaataagcaacactaaatatgacacacttgccctttatggacttaaattctggaacagtccaaatttccatttttactgttctttgtagatctttgaataactttaataaacaatcaggaaactttcaaccttc

SEQ ID NO: 459259 - DNA, 581 bp, Homo sapiens
acttatgacaatatttagggctaaactkatgttactggtgaaccagtatctggaatgatttccataactcacttaacttgcacatttataatgtggactttaaagaataattatcaggatggctactctgaagccaggagcttaggaagtgtcacagatggtatatatttgtattcctgcctcatgtccctttccctgaagtggcgtgtggagtatgagggattacggtgtatttgtaggtggtgtccctgaaaggctatcaggggacttctggttctgcttcagttctgttttgtgaagacagtcaagtgatttaaggtctcttgcttcagccatcccacttagaaagcagttgctttatagtcctttgggtatatacccagtaatgggatggctggctcaaatggtatttctagttctagatccctgaggaatcgccacactgacttccacaatggttgaactagtttacagtcccaccaacagtgtaaaagtgttcctatttctccacatcctctccagaacctgttgtttcctgactttttaatgattgccattccaaccggtgtgagatggtatct

SEQ ID NO: 459260 - DNA, 308 bp, Homo sapiens
cccttaacacagagactgccttctatggattccaggtctttagataaactctttcaaccaattgccaaagtatcagaaaatgatggctggtaactatttaattatgcacatatattagtagaatttggggggtgggcacggtggctcatgcctgtaatcccagcactccttcaggaggctgacagattgcctgagtccaagagtttgagaccagcctgggaaacatggtgaaamcccatttctaccaaaaaaaaaaaaaaaaaaaaaaaaaaaaaaaaaaaaaaaaaattagccaggcatggtagtga

SEQ ID NO: 459261 - DNA, 308 bp, Homo sapiens
cccttaacacagagactgccttctatggattccaggtctttagataaactctttcaaccaattgccaaagtatcagaaaatgatggctggtaactatttaattatgcacatatattagtagaatttggggggtgggcacggtggctcatgcctgtaatcccagcactccttcaggaggctgacagattgcctgagtccaagagtttgagaccagcctgggaaacatggtgaaaacccatttctaccaaaaaaaaaaaaaaaaaaaaaaaaaaaaaaaaaaaaaaaaaattagccaggcatggtrgtga

SEQ ID NO: 459262 - DNA, 538 bp, Homo sapiens
aattgtccatcaacagtggtgtattcacatattggataacactcaccagttacacccaaataaactagatacatataataatatggatacatttcaaagatgtgaaaaaaacgctaacacaaaaagtgaatttatatgaatttcaagaagagagcaacataatctatggtgataaacatcagaatagtgataaaccaaggggagaagggtgggattgcctggaaagggactcttggacctttttaaatattttttattttttgaatttgaaaaaaatttttatagggatggggrtcttgccatgttgcccaggctggtctcaaattgctgggctcagtcaatctttccacttcagcctcccaagtgctgggattacaagcatgagctaccgtgcctggcatccacagacatttttgggatgatggaaattttctataacttgatctgggtgatgatttcatttgtcaatatttaataacctgtcctagttaatatatttgaattttacactgtgtgaattacatttcaatagtctgct

SEQ ID NO: 459263 - DNA, 538 bp, Homo sapiens
aattgtccatcaacagtggtgtattcacatattggataacactcaccagttacacccaaataaactagatacatataataatatggatacatttcaaagatgtgaaaaaaacgctaacacaaaaagtgaatttatatgaatttcaagaagagagcaacataatctatggtgataaacatcagaatagtgataaaccaaggggagaagggtgggattgcctggaaagggactcttggacctttttaaatattttttattttttgaatttgaaaaaaatttttatagggatggggatcttgccatgttgcccaggctggtctcaaattgctgggctcagtcaatctttccacytcagcctcccaagtgctgggattacaagcatgagctaccgtgcctggcatccacagacatttttgggatgatggaaattttctataacttgatctgggtgatgatttcatttgtcaatatttaataacctgtcctagttaatatatttgaattttacactgtgtgaattacatttcaatagtctgct

SEQ ID NO: 459264 - DNA, 659 bp, Homo sapiens
aggaatctctaccagcagacacttgatttttacccttcctcggacctttaacagatatcttgttattactaatctttggtcctttcttgtttaacctccttgtaaagtttgtgtcttctagattrcaataattccatgtaaagacgatgctggcacaaggctttcaatccatcccctcttctgacccagaaaataaagacatcctgcctttgggtcttttagaacaggtatccagagattttacttctccagtgctagacagggtctatgcccataacatcagcaggaagcagttacagaagatgaacctccacccttctgcaagccccttaagattaaggaggagtatataatctctgatggggaaatgaggtaggagaccagaaggaccattgaacagagcaggatctggtcaaaacagggtgcagtgaagaagcctgctgaaaccagcagatgatgatgaaagtgacctctagttgctctcactgcttatgagcataaagacactaccactgggaccatggccagtttacaaatgtcatggcaacacaccttggcaatggcctggaagttactttatatggttctggaaactccctgccccttttccaggaagttctgaataacctacctcttaattggcatgtaattaaaagtgg

SEQ ID NO: 459265 - DNA, 503 bp, Homo sapiens
atgggaagtgaagatgctgatcactaaagggatagtcaggggcctctcgtcaagatccctgcctttcaccattcttttgccaacttcatcttctcatcagggaacataaggcaactttctttaagagcttttaaggtttcaaagaaagcatggccaagtgctaagcaaactccacagggatgcctcccacatggagatatgggaagtataaggcaggttgacaggaggtgggaaaacactgaaggtctctgagtagggcttttctagcactagaaaaggtatgaccacytccttgagatgacttataggtactagggaatatcttcctctctacaaaatatctctcctgaacatattttgtttttgttgttgttttttgacagagtctcattctgtcacccaagctggagtgcagaggcaccatcttggctcagtgcaacctccatctcccaggttcaaaggattctcatgcctcagcctcccaagtgactgagactacaggc

SEQ ID NO: 459266 - DNA, 503 bp, Homo sapiens
atgggaagtgaagatgctgatcactaaagggatagtcaggggcctctcgtcaagatccctgcctttcaccattcttttgccaacttcatcttctcatcagggaacataaggcaactttctttaagagcttttaaggtttcaaagaaagcatggccaagtgctaagcaaactccacagggatgcctcccacatggagatatgggaagtataaggcaggttgacaggaggtgggaaaacactgaaggtctctgagtagggcttttctagcactagaaaaggtatgaccacttccttgagatgacttataggtactagggaatatcttcctctctacaaaatatctctcctgaacatattttgtttttgttgttgttttttgacagagtctcattctgtcacccaagctggagtgcagaggcaccatcttggctcagtgcaacctccrtctcccaggttcaaaggattctcatgcctcagcctcccaagtgactgagactacaggc

SEQ ID NO: 459267 - DNA, 298 bp, Homo sapiens
cctggttagtttacttttcggtaagactgactggttaactaagtgtgagaaattactaggaactaggaaccaatacaacaactgcaaagagaacagagaaccatttttaaaaggacacattgtataatcagtcaacaaaaaaaggaacaatcagcagtttctgcyttttctagatctgggaccttcaacctcttgagtccttgcttctggaattctctctagatttggtcagtccattatcagccccttcatcatgtagagttacctggaagccagtggcttttgcctgtcttcattt

SEQ ID NO: 459268 - DNA, 298 bp, Homo sapiens
cctggttagtttacttttcggtaagactgactggttaactaagtgtgagaaattactaggaactaggaaccaatacaacaactgcaaagagaacagagaaccatttttaaaaggacacattgtataatcagtcaacaaaaaaaggaacaatcagcagtttctgccttttctagatctgggaccttyaacctcttgagtccttgcttctggaattctctctagatttggtcagtccattatcagccccttcatcatgtagagttacctggaagccagtggcttttgcctgtcttcattt

SEQ ID NO: 459269 - DNA, 550 bp, Homo sapiens
ttgttagtgagcattggggttgattctgtgaaaaatattccagtataaatcaacttttctaacaccagcttctactatatacagtgcctgaactaaccccaaaagatttggacggtttattgggacccaaaaataaaaaaataaataaccctgaaagagaaatacactcatgaacattaagatactacttcaactgatctgtacagcagccttggaattatgatttgacccactttacaaatggggaaacagaaattcaagaaggatcaatcacttgcacaaagttagtaaatacagtgctgagactagagcctaggtaatgctgattcttagcccatgggtcttcccattctaacaagctgccttctgtcatactgttctttctgaccacaaagatggaatggagacttctgcttctggccaatttggagtaatggggacctgatttgtcctccaccttaaacaactgagaaactggaaaaagtattttaaactctaycttcaacattggatacagtgcagtactataataaataaaagaggtgagccc

SEQ ID NO: 459270 - DNA, 550 bp, Homo sapiens
ttgttagtgagcattggggttgattctgtgaaaaatattccagtataaatcaacttttctaacaccagcttctactatatacagtgcctgaactaaccccaaaagatttggacggtttattgggacccaaaaataaaaaaataaataaccctgaaagagaaatacactcatgaacattaagatactacttcaactgatctgtacagcagccttggaattatgatttgacccactttacaaatggggaaacagaaattcaagaaggatcaatcacttgcacaaagttagtaaatacagtgctgagactagagcctaggtaatgctgattcttagcccatgggtcttcccattctaacaagctgccttctgtcatactgttctttctgaccacaaagatggaatggagacttctgcttctggccaatttggagtaatggggacctgatttgtcctccaccttaaacaactgagaaactggaaaaagtattttaaactctatcttcaacattggatayagtgcagtactataataaataaaagaggtgagccc

SEQ ID NO: 459271 - DNA, 519 bp, Homo sapiens
gtagcagacacctctcccttcytgtatcttctgttgtaagtgggtcagttcttcagcctgagcctgaattaagggatcatgtatcctaaggtgggaaagaagagtaaaatgtatgagggaatgtagtgaataataggttatagaagtttcagaggagagatctcttagaatccctgtaaggaactcccaagttgaattctttttttctttttttttgagacagggtctcactctgttgcccaagctggagtgcagtgatgtgatctcggttcactgcaacctccgcctctgactccgcctcccaggttcaagcaattctcttgcctcagccttccaagtagctgggactacagatgcccaccaccatgccaggataatttatatattttttgtagagatggggttttgctatgttggccaggctagtcttgaactcctgacctgaaatgattcatgcacctcagtgtcccaaactgctgggattacaggcatgagccactgcacctggcccaagatgaa

SEQ ID NO: 459272 - DNA, 519 bp, Homo sapiens
gtagcagacacctctcccttcctgtatcttctgttgtaagtgggtcagttcttcagcctgagcctgaattaagggatcatgtatcctaaggtgggaaagaagagtaaaatgtawgagggaatgtagtgaataataggttatagaagtttcagaggagagatctcttagaatccctgtaaggaactcccaagttgaattctttttttctttttttttgagacagggtctcactctgttgcccaagctggagtgcagtgatgtgatctcggttcactgcaacctccgcctctgactccgcctcccaggttcaagcaattctcttgcctcagccttccaagtagctgggactacagatgcccaccaccatgccaggataatttatatattttttgtagagatggggttttgctatgttggccaggctagtcttgaactcctgacctgaaatgattcatgcacctcagtgtcccaaactgctgggattacaggcatgagccactgcacctggcccaagatgaa

SEQ ID NO: 459273 - DNA, 580 bp, Homo sapiens
tttttgtgcgtgtgtgagacagagtcacccaggctgaagtgtagtggcacaatctcagctcactgcaacctctgcctcccgggttcaagcaattctcctgcctcagcctcccaagtagctgggactacaggcacaaaacaccaygcccagctaatttttgtatttttttagtagagacgggatttcaccatattggctggtcttgaacttctgacctcgtgatccacctgccttggcctcccaaagtgctgggattacaggcgtaagccaccgtgcccagccaacaatgctttatttcttgactctctttctacacccctactgcaaaagactaattttccccagaggacctgattttgactgaattttagcctcttcctcttccacataataaagctgctaattgcctgagagaagactgctgagttacagtgtagagggaagcatactcagggacaattagcaacaattctgtttctgttaaaccttataattcttatatcactactgcacagaactagacatggagctagtttatgtctcactgtaccatttactaattttttgaccctgatgaagt

SEQ ID NO: 459274 - DNA, 580 bp, Homo sapiens
tttttgtgcgtgtgtgagacagagtcacccaggctgaagtgtagtggcacaatctcagctcactgcaacctctgcctcccgggttcaagcaattctcctgcctcagcctcccaagtagctgggactacaggcacaaaacaccatgcccagctaatttttgtatttttttagtagagacgggatttcaccatattggctggtcttgaacttctgacctcgtgatccacctgccttggcctcccaaagtgctgggattacaggcgtaagccaccgtgcccagccaacaatgctttatttcttgactctctttctacacccctactgcaaaagactaattttccccagaggacctgattttgactgaattttagcctcttcctcttccacrtaataaagctgctaattgcctgagagaagactgctgagttacagtgtagagggaagcatactcagggacaattagcaacaattctgtttctgttaaaccttataattcttatatcactactgcacagaactagacatggagctagtttatgtctcactgtaccatttactaattttttgaccctgatgaagt

SEQ ID NO: 459275 - DNA, 580 bp, Homo sapiens
tttttgtgcgtgtgtgagacagagtcacccaggctgaagtgtagtggcacaatctcagctcactgcaacctctgcctcccgggttcaagcaattctcctgcctcagcctcccaagtagctgggactacaggcacaaaacaccatgcccagctaatttttgtatttttttagtagagacgggatttcaccatattggctggtcttgaacttctgacctcgtgatccacctgccttggcctcccaaagtgctgggattacaggcgtaagccaccgtgcccagccaacaatgctttatttcttgactctctttctacacccctactgcaaaagactaattttccccagaggacctgattttgactgaattttagcctcttcctcttccacatrataaagctgctaattgcctgagagaagactgctgagttacagtgtagagggaagcatactcagggacaattagcaacaattctgtttctgttaaaccttataattcttatatcactactgcacagaactagacatggagctagtttatgtctcactgtaccatttactaattttttgaccctgatgaagt

SEQ ID NO: 459276 - DNA, 592 bp, Homo sapiens
ataaattttgtgaatatcaactaatagatgctaaggtgtacatagagaggcaaaagacccagaatggccaacacaatattgaaaaggaacagagggctgatatgacctgacttcaagacttactgtaaagctacagtaatcaggacagtataagatttgtgaaagaatagacaataaagtcagcggaacagaatagagattccagaagactccaaaatatagcagattgatstttgacaaagggacaagggcaatacaatggagaaaagatagtattttcaaaaaatggtgctggaacagcgggacatccacatgcaaagaaagtgaatctagacacagacttcacattcttcatgaaaacttactcaaaatggatcataggcctaaatgtaaaacataaaatgataaaaaaaaaaccctaaaagataacaacagctgaaaatctagatgaccttgggtttggtgatgactttttatttattttatttattgatctaaagattcaatgcaataccaattttaatttagagacagagtctctaaataaattaattattttatttacttgttggagggcatgatcatggctcac

SEQ ID NO: 459277 - DNA, 600 bp, Homo sapiens
ttcctataaaatcatagatgataattttttaaaataaaagattgagtagtaagaataactaagaataaaaaattaatgagttcctagtggaaacttaaaattgaaccactgggggactttctataatgaatggcagttgaagaaaaaaattgggtaaactttatatgaatatttgagaaacacctcaagcattagcaactacataaaagttatacatttcacctgtccaagagctgttacaacagtatacaaaacatattaagcaaaattgtactatagacaattacttatatgcaattctttacttaaaatttagcagatacatttgaatagtttctaaaacacatgatcatcaaagaaggaattgagtaggaaataaagcattactgttttttactcataaagagatgaaaataaaataaattattggtcaattctttatgagatttaaattatcttagcatttatttgtttgtttttgagacagggtcttgctctgtcactcaggctacagtgcagtgacacaatcacagcgcactgcagccttaacctcccagactcaagcaatcctcctkcctcagcctcccaagtagctgggac

SEQ ID NO: 459278 - DNA, 503 bp, Homo sapiens
acttttagaacagctttaggaactgcacccagttttaaaatacattatttgtctaaaaattatgacatgagattaaactgtcatctttgtaggtttctacacatactccaactcattcaccaatccttgaaaagattatgtaaccaatctcaatgccctgacccaggccaagcccatttctacatgtgcagtgttctctggatctgatatttaaagccccttatcctgatactacacaccttttgtyttctggaatgcacctctcttctcatcctttttcaaggcactagaaaagcagaccatttctgcagcacctcaaaccagggtgagaaagctccactctaatctcatcattttagctacatagatacattggctcaagggaagataccaagtgtagtactttaccactctgaggatttttgaatctataacagttgtttcaactgggccaataattatgaagggcaataattaaaaagagtatccatagtaaaggagta

SEQ ID NO: 459279 - DNA, 503 bp, Homo sapiens
acttttagaacagctttaggaactgcacccagttttaaaatacattatttgtctaaaaattatgacatgagattaaactgtcatctttgtaggtttctacacatactccaactcattcaccaatccttgaaaagattatgtaaccaatctcaatgccctgacccaggccaagcccatttctacatgtgcagtgttctctggatctgatatttaaagccccttatcctgatactacacaccttttgttttctggaatgcacctctcttctcatcctttttcaaggcactagaaaagcagaccatttctgcagcacctcaaaccagggtgagaaagctccactctaatctcatcattttagctacatagatacatyggctcaagggaagataccaagtgtagtactttaccactctgaggatttttgaatctataacagttgtttcaactgggccaataattatgaagggcaataattaaaaagagtatccatagtaaaggagta

SEQ ID NO: 459280 - DNA, 503 bp, Homo sapiens
acttttagaacagctttaggaactgcacccagttttaaaatacattatttgtctaaaaattatgacatgagattaaactgtcatctttgtaggtttctacacatactccaactcattcaccaatccttgaaaagattatgtaaccaatctcaatgccctgacccaggccaagcccatttctacatgtgcagtgttctctggatctgatatttaaagccccttatcctgatactacacaccttttgttttctggaatgcacctctcttctcatcctttttcaaggcactagaaaagcagaccatttctgcagcacctcaaaccagggtgagaaagctccactctaatctcatcattttagctacatagatacattggctcaagggaagatrccaagtgtagtactttaccactctgaggatttttgaatctataacagttgtttcaactgggccaataattatgaagggcaataattaaaaagagtatccatagtaaaggagta

SEQ ID NO: 459281 - DNA, 590 bp, Homo sapiens
attttgcttccacaagttttgagagtcatgaaggcaggaacacattttgagatgccagagctcaaatcccatgtcactgggacatcaacaatagtgctatggggaagactcagggtgccagctcttgagtcacaatcacagaattagaatgtggaagtagctacagaacccaaggaagccctgccttctgatagcyacactcaatgcaaggctgcgtatttcaccctggaggtctctaacaggggaggccaccccctcaatagccagcttttttacccttttgcttacgttgtcaaccaatttctaaccacagcaaaataacctaagtatacctctccttgaaaacatcaaaacattttctcagcagcttttattttcttgaagacaatttcagtaaaaacaattcttgtggcttttcctaaatgaatttttttttaacttctagtgattcttactcttcgtttttaggaactctccaggttttcacttcctacattctttcaagagtatagtgactaaaactggagaataatcatttaagtctgactaataaatttagcctcatgttgtattactttttaatacataat

SEQ ID NO: 459282 - DNA, 590 bp, Homo sapiens
attttgcttccacaagttttgagagtcatgaaggcaggaacacattttgagatgccagagctcaaatcccatgtcactgggacatcaacaatagtgctatggggaagactcagggtgccagctcttgagtcacaatcacagaattagaatgtggaagtagctacagaacccaaggaagccctgccttctgatagctacactcaatgcaaggctgcgtatttcaccctggaggtctctaacaggggaggccaccccctcaatagccagcttttttacccttttgcttaygttgtcaaccaatttctaaccacagcaaaataacctaagtatacctctccttgaaaacatcaaaacattttctcagcagcttttattttcttgaagacaatttcagtaaaaacaattcttgtggcttttcctaaatgaatttttttttaacttctagtgattcttactcttcgtttttaggaactctccaggttttcacttcctacattctttcaagagtatagtgactaaaactggagaataatcatttaagtctgactaataaatttagcctcatgttgtattactttttaatacataat

SEQ ID NO: 459283 - DNA, 590 bp, Homo sapiens
attttgcttccacaagttttgagagtcatgaaggcaggaacacattttgagatgccagagctcaaatcccatgtcactgggacatcaacaatagtgctatggggaagactcagggtgccagctcttgagtcacaatcacagaattagaatgtggaagtagctacagaacccaaggaagccctgccttctgatagctacactcaatgcaaggctgcgtatttcaccctggaggtctctaacaggggaggccaccccctcaatagccagcttttttacccttttgcttacgttgtcaaccaatttctaaccacagcaaaataacctaagtatacctctccttgaaaacatcaaaacattttctcagcagcttttaytttcttgaagacaatttcagtaaaaacaattcttgtggcttttcctaaatgaatttttttttaacttctagtgattcttactcttcgtttttaggaactctccaggttttcacttcctacattctttcaagagtatagtgactaaaactggagaataatcatttaagtctgactaataaatttagcctcatgttgtattactttttaatacataat

SEQ ID NO: 459284 - DNA, 590 bp, Homo sapiens
attttgcttccacaagttttgagagtcatgaaggcaggaacacattttgagatgccagagctcaaatcccatgtcactgggacatcaacaatagtgctatggggaagactcagggtgccagctcttgagtcacaatcacagaattagaatgtggaagtagctacagaacccaaggaagccctgccttctgatagctacactcaatgcaaggctgcgtatttcaccctggaggtctctaacaggggaggccaccccctcaatagccagcttttttacccttttgcttacgttgtcaaccaatttctaaccacagcaaaataacctaagtatacctctccttgaaaacatcaaaacattttctcagcagcttttattttcttgaagacaatttcagtaaaaacaattcttgtggcttttcctaaatgawtttttttttaacttctagtgattcttactcttcgtttttaggaactctccaggttttcacttcctacattctttcaagagtatagtgactaaaactggagaataatcatttaagtctgactaataaatttagcctcatgttgtattactttttaatacataat

SEQ ID NO: 459285 - DNA, 640 bp, Homo sapiens
atcttctttctctctctctctctctccacccgctttctgtagctggccctgtgggtcctagcttttcaaagacttcaaacagaattcctttaaaccagattttatctacttcttttcgaagggagtgctggtttgccacaaaactccatcgtaactgaaagaggaaatcttctacaaattccaggtaaatcaaattttcctaccttgatttctgaagaaaacaaaaaaaagagaagaggccattggtagtatatacttgcatttttcttgtaatacttgcataagtctgaatgggtattaaaggctcttgctagaatcatgtgccaaagattgtctaccatgacctaaacaatcaggcctgtccaaggtccaagaatttgatcaggttggatccagtcctctggtgcactaacagagatcctgttggaggatagaatcctgctgtaggattctacrtctgtactttgagtagacacttcaagtaaccagtttttcagacacctggccactaatatggggagaagaggtcaaaaaaaccattgaatatttctaatttattgtagggaatgttaaaatttctcactggtacagttagaaatgaaaacaaagacaataataatagattaataataataactgt

SEQ ID NO: 459286 - DNA, 640 bp, Homo sapiens
atcttctttctctctctctctctctccacccgctttctgtagctggccctgtgggtcctagcttttcaaagacttcaaacagaattcctttaaaccagattttatctacttcttttcgaagggagtgctggtttgccacaaaactccatcgtaactgaaagaggaaatcttctacaaattccaggtaaatcaaattttcctaccttgatttctgaagaaaacaaaaaaaagagaagaggccattggtagtatatacttgcatttttcttgtaatacttgcataagtctgaatgggtattaaaggctcttgctagaatcatgtgccaaagattgtctaccatgacctaaacaatcaggcctgtccaaggtccaagaatttgatcaggttggatccagtcctctggtgcactaacagagatcctgttggaggatagaatcctgctgtaggattctacgtctgtactttgagtagacacttcaagtaaccagtttttcagacacctggccactaatatggggagaagaggtcaaaaaaaccattgaatatttctaatttattktagggaatgttaaaatttctcactggtacagttagaaatgaaaacaaagacaataataatagattaataataataactgt

SEQ ID NO: 459287 - DNA, 586 bp, Homo sapiens
ctggctttgtaagttagtggaattgtagccaatgtatgcttatacacagaaaggcaaccagaaatcctgcagtgagaaagcagatgcataaattcctgaggagcgtctctgtaggaagaaactacatgatgatggagacatcgcctctctacattgtcaacagttatcagctattgtgactggttgtttcctcatgggcatacaaaaaagcttttaataaaagtggaacaacaggaaaggatacaattaagtgccagcaatgcacctagctactaagacttctaggccaaagtacttgaaaccttttacagggtaacrttacgacaatcacaaaatgcaaattagtaaaggtcaaaacttttgagcaaatgcagacattcagtcctactttgcttttatcttgaaagaaatccaaaatctaattttagacaagcttgtttaaacatgtatactgatacacaggaatacaagtgctcttgtttcaaaccctacgtatgttccaatgaaggactcctgattgataattgagtccactccagacaaaattgttttggatagccaatacaaaagagaatagttcggtaat

SEQ ID NO: 459288 - DNA, 559 bp, Homo sapiens
gttgtttagttcctggggttgtcacgtttaagatgataagatttttccaaatgcttaggggctctttgtactgaaggttaaaataagacccaaaattgaaccctttgtgtggatatttgtaccttagaaggagatacttygtagccaccatcagcaagtttatttagtactaatattgtattttggtctaaaacagccttgttagtactacagattagcaggtccatccacatactgcagtagattgctatctgggagaaactgcagggtagacaggtttttagctagggcctatccaaaatggtgggggctatctctgaatccctgggacagaactgtctaagttaactttgagctagttgagtatctgagtcttgctattcaaaagcaaacaaaaattggctatctgggtgtacaggaatgcagaaaaaggcatccttaagatcaagtacagtaaaccaagctgtgatggagagaatttgtccaaaaagagtgtaagggtttgggacaataggatgaataggaataacagcttcattaacaattctaaggtcctgta

SEQ ID NO: 459289 - DNA, 513 bp, Homo sapiens
tgtaattccaccactgaactacagcctgggtaacagagtgagacactgtctcattttaaaaaataaataaatgaaaaagataacagggaaatctacaaacatttggaaattaataacatgcttctttaaaaaatccatgttggtaaaagaaaattttaaaagaaattttaaaaatacattataactgaatgaaaatgaagacatagcatatcaagattcgtgggcgactgctaaagtacgytgggaggaacatttatagcactaaatgcatatattagaatagaggaggccaggcacgatggctcatgcttataatcccagcactttgggaggtcgagatgggtggatcatgaggtcaggagttcaagaccagcctggccaaaatggttaaaccccgtatctactaaaaatacaaaaaaattagctggacatggtggcaggcgcctgtaatcccagcaactccggaggctgaggcagagaattgcttgaacctgggaggcagaggttgcagtg

SEQ ID NO: 459290 - DNA, 573 bp, Homo sapiens
aaacccatacaaaataattttgttgttacgtaattctaaaacaaaatttaattaggaagttgaatacaaactcttatgttaccctctcaaaatacctaaaagtcataattaatctacttacttaaagaggtcctgtatatcattacaaaggcacattaactgcaaattatttattctgtgcttcttaaaatgcgcttcttttaaaatgttaactatacatttggcagtacaaatttttcaagctttggcatgttttataaggraaacattaatttgaatgaaaggaaatattgagactgcaaacttttctaccacctggtaaatgtcaatttgtacaacaaaatattatcagagaaaaaaagtcacatggcaggaataaataatgcttaatatcccatatactccctatgaatctcattgctgtgcacagttactggaaaaacttaattagcaatggcattctgtgctgaaatcatctaacactttcatccattcctgtaattcaaacattagcattcaaatcagccctcaacttgcactttggtatttattcagtgaataccaattaaattg

SEQ ID NO: 459291 - DNA, 604 bp, Homo sapiens
catgaaataatatgaaaatatataaacacatgtaaatttaaaaatattaaagtttgaagtaaagtagttgcaaaataaatctatctgtaaaattagaaacaccaaattcattataaatgatagtgcttattattggttagaatatgttgataattaagctaaagtcatgcatttaattcccggatgctccagtttactctgctttgttttagagacgcagaatgaatcacaattcccagctgtcttggaagtgtgtattattgatgaagaggggtacactgccaatatgtggacagattagtccaattccattacaatgaccgaaaaaacaattctgagcacatttcccatagagagtgggtcagcacagcagcttaatttttatttcagtttggcactaaacatgtgtctcttgcagacagatgcatattgatagttctttgtaatggtgaagggaaaatctttttaaaaaaccatgtaacagctttctaaaacaggtaattttaagactgtaagattcctgaacaatatagccaatttatccaaatctttcaggctcaaattacaatgtacatattamaagttctgatttagtaatgttaat

SEQ ID NO: 459292 - DNA, 595 bp, Homo sapiens
ttccaatcatgtactatccacacactatttttgacctgtacagcataccactgtactgaatactgtgggcaattgtgacacaatggtgagcatttgtgtaactaaacatgtctatacatagaaaaaggtacagtgaaaagatggtattacactctacggaaccaccactgtgtatgcagtatattgttgactgagacgtcgttacgcagcacatgactgcatataaaaagccaaattgctactaatttcagaatataaaaaatccctataactcattaaaaaatcgccaaacagaaaataagggcacagggataaattttatatacaaatgcaaaaattaaacaaaaaatacaagaatgtacaactctgtgtaataaataaagatttaaaattttaatgaagaattaaaggcaataccacatatctcttaaaagcacacattytggagacagagaatgtggattcaagtactgtctcaaccagttagtatggcaccatttctgcattaaaaaaatatatatatatatatatattttggatctgtttcctcatctgtaaaattgaaatgataatataatctgtctgtggtagccag

SEQ ID NO: 459293 - DNA, 578 bp, Homo sapiens
acatcctgtatagtttgatcttttactcattatagaatcagattatcaaattccwcaaaatagtctatgtagttttgactggaagcttatggaatctatagattattttatcatattataaataacatttgttttccaaagcagttacatcaacttaaattatattgaccgttagtaagaaattcttactaatttgaggaagggctgttatagcataattttcaaaaggttaaaaacatatcctttatataaatataacatgagaacatgtcagaaattttatacacctcattaattaatgagggaaacagtaatgcattaaaactggtccaggagcttttgttaagctaagtaattctaggcaatgatagaataaaattgctgagttacccctccacctgcacttccacaaatacagtcgccaccccacaccaacccctagttctactggcccataaaccacaacctttgaaattatctttttaaattaggcagaaatcctttggatgcctattagacaaaactctatacattaatgtcttttccttcacatttgtaaaataccacagaaaatagaa

SEQ ID NO: 459294 - DNA, 550 bp, Homo sapiens
cacagatcagatagcacaaagactctatgattatcaagttgctcaagatgaactgttaagtatacctttcccaaaaacgaacaagctgtaactaatcaaattgtaattcataaaccagctttatatgaaaatgttgtaatcctactaaatttctttgtttctacctataaaggtaaaatcctagttctccacttcagaacactgaccccattcatttggagtctgtgtttcctgggcagccatccttaaatttcacacttgagtaaattctttagaactggattctgatcattttgattatttcaggttcacacattcttattgggagtttgaatgagaatggggtggagaagggtacaaaggtccacggactgagaataaggggggaaaaaaagtggttttccagagaggaatcaggaattrttaccaaaaatgagacaatggatgtccagtggtataaaataacatgtccactaaagaggatggcaagtaaataattatcactaatgccatattacataataattttccatatttcactaaatacaat

SEQ ID NO: 459295 - DNA, 616 bp, Homo sapiens
agctcattggagtggtattcttgggaagtatataaaagtgcattgacttttttacagggtgacaggtaaaggcaatgagacaagctgccactggaattgacacctattacatcttcttcatcattatgtcactagcgcatagaacaagaaattgatcatagtacaaatctagaaaatgttatgaaaaagtatttaagagtgaaagagagcatacctggtctttttcataagacatttatatcaaggaactacttggcagactaaataccataggcataggatatgatagaatatgtctggcactttctaaaaaattaagtattattttactctggtactcagaaccaagaaattgggtgtttgaaaatatacaactataaaaaacattaatggagataaacaaaagattattttagttaattaagtcataagtggcccacaagaaaatgtctcaaaatacytaatatccagtgtcaatttaatcaaatgtcaaggaaaataaacaggaaagatggcttaaacatcttttgcaatatttaaatttttaaattttcatttaaaaataatcaacaccaatgttaatttcttgttttgattaaatggataatggttatat

SEQ ID NO: 459296 - DNA, 587 bp, Homo sapiens
ctttcttctcccaattaattctaattatggcattcaggattccataaaaatttagaattagttttaagtcacagtaaagtttgtcatcacagagcttcttaaagttcgattaaacctcaagctccactgacgagatacttagaagtttttgcttataactgtatgmtcagcacctaattcaaagtgaatgctcactaatatatactgaattaaaagttactctgcagtggttacttctaacaccctgttagcatccaaagttgacaactatcagcatgcagaggttggcaatctgtggattctgccatctggcatctatgctgagaaacagaaactcccaaataaccttgctccaaaaaggaacacatttgttaattttaaaatgcatgcttctgatttgctggggataatatgaataatctagcacactatgatatcgctttatttcctcaaccagacttaattatcgtacaatttttcaacaagaatattcatttggacttttaagaaaaaaatgaacaactcttacgttaactaagctctcttttgccttgcctccaggccttgtccttcttccttcagctctc

SEQ ID NO: 459297 - DNA, 571 bp, Homo sapiens
ttacttaaacatttaaataaatatgtgttgtatttacctataaacttacatatttaaatgtgttgcatttgtatttacatatgtgcagtatttatataccaatgtacatacttaaatcaccagtatattgcttttctatatctacataaaaatataagatagttgatttatttctattttttgatgcttttcatatacttattaatgaatcattaaaaccataactktattaattctgctaaatgtgtcttttagaatcgcgaaactatttgtaccttaacatggaggtacctctcagaccaagcaagtctgaattttagatcattaatttttagagagaaacagaaataattacagctcatttcaaataacaaatgaaacaaacccacaacagatgagttctagacattctagacattcagcctcttgacataatccatgtctctaatttaggaaaattgtaaaatatgttctaaaataccaaaaggatatctgggaaacttttaggtcctggctcactatgatttccgataatgatggaaaaggactatgaggattctgttgtaagcga

SEQ ID NO: 459298 - DNA, 542 bp, Homo sapiens
acacccctttcacacacagtgacagagcaagaattgaacataggtctggtcttgtatcatggctcctgctaatgtaccaaatttcttctgccattttccttaatcctaaattgtcaactttctagcctcaaattgctttcagttaactatctctaataagcatttttgataaaacagaataatggtcagtaatggaatgacagctatgtcaccaatctaacaatctccacaatcagtgctatagaacaatgacccatgtctattacacaagcttccagatcacaaattaaaaccttacgttttttctgtcaaaacatccggtttcattttccattttctaatttgtttacttcactcatgctgtgatcattggcaatccacagaaagatgaatcattttgattttatatgagcattctcaagaaagttagaatcagatgtagaattattgtgaacaaatactttactctcaatattacaaayctgggtagccccaactatttacacagattgagaaatggtcttttgatacactagttttat

SEQ ID NO: 459299 - DNA, 597 bp, Homo sapiens
gttataccttgtaagatggaaagagaatttcccccatgtaattctccatgatttttccatatggttcaactatttagtgtgagtgagtttaagaaaagggacatctgacagtctttagacaagttggagtattttacatcatgtaagaacataccatgattccaggycttctggccctcccaagacactggctgtgtactggaagcacataaaatgacagtgacactggcttgatcatattaagggcaaatgtcaaaacagttcattttcttccaaattaatatccaagaaaagtttactgcatgtgaaatgattaaattgtagcaggactgtttaatcacaaaggaggaattgcttattctcttcaagaacaacttacttggggagaggcaactaaaagaaatgatctggaccaagctctcatgtattcaccatacagtccctacaaaatgatacaaacaaaacaagcagacctcgacattttgaaaactggagaaaacatgcatttattaacttttggggaatcaaagagcaaagatttctactatcctgattgagtttacatcaaatgctggaggaggaggagtgtcctttgag

SEQ ID NO: 459300 - DNA, 597 bp, Homo sapiens
gttataccttgtaagatggaaagagaatttcccccatgtaattctccatgatttttccatatggttcaactatttagtgtgagtgagtttaagaaaagggacatctgacagtctttagacaagttggagtattttacatcatgtaagaacataccatgattccaggtcttctggccctcccaagacactggctgtgtactggaagcacataaaatgacagtgacactggcttgatcatattaagggcaaatgtcaaaacagttcattttcttccaaatkaatatccaagaaaagtttactgcatgtgaaatgattaaattgtagcaggactgtttaatcacaaaggaggaattgcttattctcttcaagaacaacttacttggggagaggcaactaaaagaaatgatctggaccaagctctcatgtattcaccatacagtccctacaaaatgatacaaacaaaacaagcagacctcgacattttgaaaactggagaaaacatgcatttattaacttttggggaatcaaagagcaaagatttctactatcctgattgagtttacatcaaatgctggaggaggaggagtgtcctttgag

SEQ ID NO: 459301 - DNA, 555 bp, Homo sapiens
cacattatgccttcattcaggaatttatctcttaatctttaatgtccagtaggtcctaactaatatgtgggatgctcatgatataagcatggacaaaactcartatggcccttgcccttatggagtttacattctaatgaatgaacgtggtatgactgagaactggtgttgtcaccattatagaaaaagactgtatttaggactgccacaatgaagcaccacaaacttggtgcttgaaaacaatagaagtttattgactgacagtaatggaggccagaaatttgaacatagggtgtaggcagggccttgcgctttactaatgctctaggagaggatctttccttgtcttttccaggttctagtagtcccaggtgttccttgagttttgaaagtataactcaatctctgcctttgtcttcatatgaccatcttccttctgcatatgtgtctgtgtgcaaatttttcttttcttataaagacatctgtcatatttgattaagggctcaccctattatagtataccctcatattaatttaactaattatatctgcaat

SEQ ID NO: 459302 - DNA, 596 bp, Homo sapiens
ctgacttttgacaatctccttactaaaaacagaactagacttaataaatcttgtggttaaaccacagatagatattttcaacgtatgaaaaacttttgtaaatatgtttccaattggcttatttttttaaaaaaaatccacaatataaacaataagtggataagtaatttctagtaattttaaacaacaatgacatttgtcaaatggcatccccagaacatatatctctttaaaatattttactctgctattgtatgaaatcattagtttccatttagttacacaacacgatccaaccaattttatcttgttgcttagtatcatgattctaaccaaagtctaaatccatttatcttagctaccatattatttaacagtatctagrtttaaatattttacttaagtctaattacaaaagtgtttttttaaggttcttttaggacttactgagataatgaagggaactgcattaattatttccaagatgaagggtattcgtaaaatctgttcccagatgtttcccttccaagaaagaatgaataaaaacgaaagtcaattatactgcctcctattaaagggggaaaaagacagcactt

SEQ ID NO: 459303 - DNA, 541 bp, Homo sapiens
ttgctgtatcctatgggttttggtatgttgttcttccattatcatttgtttcaagaaatttttcaatttcctcttaacttcttcattgacccatggtcattcatgcacatactgcttaatatctatgtgtttttacacctttcataattgctattgttattgatttatagttttattcccttgttagactcaatgagtgatattatttcattttttttaatgttttaagaattgttttgtgacataaggtctatccttgagaatgaccgatgtgctgaggaaaagaatgcatattgtgcagccattggatgaagtgttctgtaaatatctattrtgttcatttgctctatagtgcacattaagtctcatgtttctttattgattttctttctgggaggtctgtcctatgctgaaagtgatgtgtttaatcagctattagtgtattgaggtctgtccctccctttagctctagtaatattttgccttacatattggtgtcttatctattatgttcatttgttctatggtgcacattaagtcc

SEQ ID NO: 459304 - DNA, 553 bp, Homo sapiens
tgaataaattattacacatacgtaaacacacacaacacacacacacacacacacacacacacacacacacacacaactttttaaaacatgcatggcttagcaaaaaagtaagggaagtccttagaagccagaaaagaaaataagaatccagagaaataagctatcactgaagctactgttcaccccggtgctatctgtcaatttttgctgataaggaatttctgttttgacaggccagaaaccttccaaagaaatctcctacaaaaagctccamagaaattccccacagaaatctgccacaaaaaccagggtccctaaaggcaacatcatcattgcatgaactaagaaaattctttcttacagcagaaatagatgttacaggcacttagctgtcttgtcatagttcggagcggtatggaaggggagacagagagacataatgagacttataattagtttgctagggctgctatagcaaaataacatagattctgggagcttaaaggtaaatgtattttctcatttttctggaggccagaactccaaatcaagg

SEQ ID NO: 459305 - DNA, 534 bp, Homo sapiens
aaaaggttaaaaataaatacatgggctattgatagtggtaagcatgtgtagggacagrggctatacagaaaccctgtaatttccactcagtttttctgtgaacctaaaactgctataaaatataaagtctactaaaacaaccaaacagtgtttatttttgttttaggaggaaatatggtcaagtcatatttttttcttatcctttcaattttgtctgattatcttccttgtgattttgcctagataaatcatactccgaatgcatattctgcaactcaaagattttattcattagagtaaaaaagttgaagatattttaattgccatgtgtgtttcaaagcttattggtttttatattttttctccatcttttatagtgcctcacatacacctaattcaatggtagctcttgctgttatttttagagatgtaacttcttcagttctcaccaaatatgtcaacttatttttaaaacactggtttattttcattttacgtgtacattttatcagatctttaaatatttttattaaa

SEQ ID NO: 459306 - DNA, 384 bp, Homo sapiens
aaaatccaatggccatgtattaattcctcaaggtatagtaagggttaggttaaaccatatgaaattgccatttttgaaggtcgatatgaataaacataagcaatatcttatggctgaagctattgtgatttgatgtcataaaccaaattttacaaaattcgtttttcctatgctttgtgtcttagcatagcataggaagcacagagtgtctttcttttttcttaccataaragttttttgagaaagtgaaggttatttcaaagcaatcgtccatgcaaaatcataaaaatgtattgacaatacaaaacagaaggagtagcaatttgtctttcagtaatactactttttaagaattaaataaagggtattttttcagtagtttag

SEQ ID NO: 459307 - DNA, 348 bp, Homo sapiens
cacagcagttcatagcattgtcactttaattaagttttgggcatggttgttacttcaaatgtggagtgtaggtgctattttaaatgtcttcaaaaagattcaactgtgattcagctttgaattgaaaagctattgtgcacacaggaagcctgggaacagagcagcagaatgcctgtgcgatgctggcgaggcagacacrtattcatccctgcagacaggcccacaagtccagattttcttgcaaagcaccaaccaaatacttaaaaacttaaaatgggacttaaaaaccatcccaggctgggcacagtggctcacaactgtaattccacagctttgggaggccttcag

SEQ ID NO: 459308 - DNA, 465 bp, Homo sapiens
ggaagatctagacaatataatagccgtgaagaaaataaaagttgatcataattccctcaatcagakagtcactgttaaaatttttgtcttatatatttacagttttgttttccatttgtgcatgtagaaacttttaaaaaataggtcttgctatgcatctatgtttgtaaactgctgtttaaaaaatctaattatatttttatgccactaactatccatccttagcttgattttaattaatttattcaacaaatatctattgggctttactgaattcttgttcttgaggaaagcagatgaggttccctggagtcaaacactttcactgcagccaatcatggagaaacagaaacttcaggtcagttgttttagaatgcaaaaggacaagaagatcaaaattttggataactcaaaattatttttagttaaattaagagttttaagatgacgcttgacagaacacag

SEQ ID NO: 459309 - DNA, 506 bp, Homo sapiens
agttctcagttgaaggcaataagactatctttctctaactttaaatgctacattcttttttgagttacccaagcagtgggtatcattgttccctaatacccattrgaatttataatgtgtttattcacagatccctctctcttcctggagtcccggattgacgttcatgcgtggctagggtgaggacaatgtatgattgcattccgaagtgcccctctgccctcacctctgaggatctgttcctgagttagcttcgctcagttctcttctgtgaggaggacgtctcactcgtgagggcttctcagtggttatataaatagactttgcccaccccataatacgaggcacacctgcacttggtcaaatctgacgccactgagccctcccttctgaactctgaccgagtgctatgtatattggatccctgcatgcctttgaactataataataattaaatagcacttggactatacatgaggtaaatgacaacagacagaatgaggcaa

SEQ ID NO: 459310 - DNA, 567 bp, Homo sapiens
atacttttaccaaggaaattacataaaggtgggggtatgtctgaaatcagacataattgagttcagatcccacatctactgctactaattgtgagaaccatggcaagttatttaatttatatgatcttcttttcttttgttttcatctggtagaaagggataatttcaaatacagtcatccctcagtacccatggtgagattggttccaggatcccaacagacaccaaaatctgcagatgctcaagtctctgttataaaatggcatagtatttgcatataacctacacacctcctctcatacattttaaatcatcgctaaattacctatcatgtctgacacaatgtaaatgctatgtaaatagttatttgtactctattrtttaggggaatcgtgacaagaaaaaaagtctgtacatgttcaaatacaaccatcccttttttctttttcaaatatttttaaatctacagttggttgaaactacagatgcagaacccatggatacatagggccaaatggatcttcaaaattaaaagcagtaacataaattaaaaggtttaataaatgc

SEQ ID NO: 459311 - DNA, 608 bp, Homo sapiens
ttttttgccactaacgtgacccactggacagagtgctgggagcaaagaaagacatgacttatggaaaatatgatctgtgtcctcatgttctccagttttaaatatacttcatgtggaaaataaaaatagttttttgaaatgatttatgttgtattcatttggcctgacaaaatgtccaatttgctattgttgtaggtgtgatacaagttcacgctctactccagggttgcaaagaggaaagagcatcagagtaaaatgcagaaaacctaagtattaattccaagtgtgtccgacttcctaactgtgtaatcttttgacagttcttaaagtctctttaagccttggttttcccatctataaaatcaggatrgtaatatctatcctactgacttgatggagttgtgaacatcaaataagatactgagaagtgtttgaaaaactgaaataagctatatgaatgtaccatgaaattgatttgttatattagttagttggattaggaaatttattgttttcactgcttataacagagatgcaaattaacaatggcttgaaaaatattgaattttatgtctctctcatcaaaatgtatgatcttcacagtcata

SEQ ID NO: 459312 - DNA, 608 bp, Homo sapiens
ttttttgccactaacgtgacccactggacagagtgctgggagcaaagaaagacatgacttatggaaaatatgatctgtgtcctcatgttctccagttttaaatatacttcatgtggaaaataaaaatagttttttgaaatgatttatgttgtattcatttggcctgacaaaatgtccaatttgctattgttgtaggtgtgatacaagttcacgctctactccagggttgcaaagaggaaagagcatcagagtaaaatgcagaaaacctaagtattaattccaagtgtgtccgacttcctaactgtgtaatcttttgacagttcttaaagtctctttaagccttggttttcccatctataaaatcaggatagtaatatctatcctactgacttgatggagttgtgaacatcaaataagatactgagaagtgtttgaaaaactgaaataagctatatgaatgtaccatgaaattgatttgttwtattagttagttggattaggaaatttattgttttcactgcttataacagagatgcaaattaacaatggcttgaaaaatattgaattttatgtctctctcatcaaaatgtatgatcttcacagtcata

SEQ ID NO: 459313 - DNA, 544 bp, Homo sapiens
tagtctaattcctttgcctttccatgtaaactttaaaataaacttctttatattttycaaaataccttgccaagatttggatagaaattatgttaaacttatagatcagtttgggaaaaactaccatctttactatgttgagtcttctaatccatgaatataattagtacatcatctccacttatttaggttttctttagtttctttcatcagcattttatagttttcagccgatgattcttttcaagttctgttatatttatacctaaatatttattttttgagcacttgtaaatgacactgttctttaaatttcagtttccatatgtttattgctagtatatagaaatctaattgatttttaatgttgattttgtacccttgctaaacttgctaaactcatttaatagttctagaagttattttcattgatttcttactattttctgtacagatcattatgtcatctacaaatagatccggttatattttttcctttttaatctgtgtgcattttatttatttttcatgccttattgtgctg

SEQ ID NO: 459314 - DNA, 544 bp, Homo sapiens
tagtctaattcctttgcctttccatgtaaactttaaaataaacttctttatattttccaaaataccttgccaagatttggatagaaattatgttaaacttatagatcagtttgggaaaaactaccatctttactatgttgagtcttctaatccatgaatataattagtacatcatctccacttatttaggttttctttagtttctttcatcagcattttatagttttcagccgatgattcttttcaagttctgttatatttatacctaaatatttattttttgagcacttgtaaatgacactgttctttaaatttcagtttccatatgtttattgctagtatatagaaatctaattgatttttaatgttgattttgtacccttgctaaacttgctaaactcatttaatagttctagaagttattttcattgatttcttactrttttctgtacagatcattatgtcatctacaaatagatccggttatattttttcctttttaatctgtgtgcattttatttatttttcatgccttattgtgctg

SEQ ID NO: 459315 - DNA, 626 bp, Homo sapiens
agcttttgtttatgtgtgttatacctaagtatgtttagtagattcaaactaaaaactgagaatatctaaaaatatgtattgataatttattttaaaaaatcccattacatgttaaaataaataacattttaataaaaatcttattttccaaaactaaaaaaaaaaaaaaaaagaaaaaacwctttagttagacgagtggcattgtttcacatttttgcaagttcctttaatgtccggattaactgaagacagctagattctgatatctgtttctgcgttcaatttcttgcaatatcactgatcatggagcctctgaaaaacttcgctatatgctgatgaaagaatgaaaatagaacagtcaaatagtatcttagtatgattatgaaaatagttttcacctcatggactccctgaaaaggtcttaaggacccacaggggttccaggccatactttgtgaaccactgtgatagattatacaaatgtggctatccttatacatctttattgtagaataaaaacattcatgagaaccattattgcagagtggtataggagtgttacagtctagggtttgaagagcagctctgctattcagttgttttgatatattgggagagttaaactt

SEQ ID NO: 459316 - DNA, 588 bp, Homo sapiens
cgtgtgttctggacatattatatgaatggaatcatataatatgtggctttttgtgttcaccttattttacttagcataatattttcaaggttcatttatattgtagcatgaatcaatacttctttcctttttataagtgagtaatattatattgtataaatatactatattttatttattcattcatcagttgatgtacatttggggtgttttcactttttgctatatgaataaagcagttataaacattctgtacaagcttctgtgtggacctaggttttcaattctcttgggtayacctaggcataaaattgctgggtcatatggctactctatgtttaatcatttgaggaattgtcaaactgttttccaaagcagttgtaccattttccattcctacaagcaatgtatgaggcttgtttctccttatcattaccaacacttgttattgtctgttttttttttttaattacagttatctgattgggtgtgaagtggaatcatcttgtggttttggtttacatttctctgatggctaataatgttgagaattttggaaaaaatatccttcaatttgattgttgtatg

SEQ ID NO: 459317 - DNA, 575 bp, Homo sapiens
taagatcatatgatcagcaaataaagataattttactttttccttccaatcttaatgcattttgttttattttcttgcctaattgccctgaccagaacacccagttcaatattacaagacacatgtgacatctttgtcttgttcctgatcttagaaggaaaattttagtctttgaccagtaagtataacgttggctgtgagtttttatagatgatttatttcaggttgagctagtttccttctattcctagttttttagtatttttttttttatcatgtagggtattggattttgtcgctccttcttctgagcctattgaattggtcatgtggtttttgtccttcattatatgaatatggtgtattacataattgattttcctaggataaatcccatttggacatggtatataaacctattctatgttgctgctgattctttttgttgcttagttttttgttgagaagttttgcctctatattcataagggacattagtctgtggttwtcttttcttttgatatttttgcctggttttggtatcaggaatactggcctcatagaatgaattggga

SEQ ID NO: 459318 - DNA, 599 bp, Homo sapiens
tttaaaaattctgagtggatattaagtgttctcaccacaaaaatgataacaatatgaggcaatgcacttgtcaattagctagatttaaccataacacaatgtatttaattagccctgcattgcttaatgacagggatacattctgagtgatacatcattaggtgattttgtcattgtatggacatcagagagtgtacttccacaaacctatgtggtatatactactacatacctagactatatgtataacctattattcctaggctacaaagctgtatagcatattactatactgagtactctaggcaattttaacacatggtaaatatttgtgtatccaaacatatctaaacatagaaaaggtaatgcactgtgctacattatgacagctatgacatcactaggtgatataaatttttagctccattataatcttatgggamcaccatcatataagcagtccattgttcaccaaaacatcagtatgtgccacatgactgtactttaaaacatgttgtacagaatacatgcatataactttatatacaaatttttcaaaaatagtcaatttgataaataaataaataaacctgatgctt

SEQ ID NO: 459319 - DNA, 570 bp, Homo sapiens
acttacctcttttccctaaagatgaagctaaaattccacctcaactatggaattcccctgatcgtcacagaaaactaaagtaacataactcataaatcattttactatagattttcaattaattaaaatgcctgatattagcaataaatgaaccttgattgacataaatacataaamattgttcttcatctaacgatgcttttgtttattgatacttttgtataaataccctttagtaagaatcaaactattttttgtttagtgccatgctatccaaacacattaaaaattgttttataaaacatgataatgctgatgaaacaaagaaagaaaaacaaaagagaaaagaaccttagggtttggtttcagttgtaatttctctggctgaaattatttttaaaaactacaatttcaacttaattgatggctgttatttttcttaaaaaatctgcaataattgacattttaagttcatatcagtttttaaatttattttcatttgttaggccaagattaagttcatagaatttatagtcaccatctctactattttttttttagatttccatg

SEQ ID NO: 459320 - DNA, 593 bp, Homo sapiens
agcactagtgaataacaaccatagactaagccaaagcaaacactgtaaacattaattaggtgaagtttgccaaatgstataaagataaaaaatggtataatctacatagtattcttatttaagtgaattcagcatttatcctttcggttcttgaggtttacaatgcaacatctgcttacctgtttgtaagtgccacttggtataatcgaaaatcttgcattcttccgacaaactgctctaaacctgcaaatacacacatgtgcataatataagaagtctctgtttaccaagcaatacctgacaagtatttaagtgatattcctttgaagatgttaaggttaaaaagatatttatgtcactgccctttgaaacttttacagatcaatctctagtttgctaattccacattaataacaaaaataatcatagttatctccatggacactgtaggacttaagtcaaagtgaatactttggccagcctatttactgatcgaactcatggctttctccagaagtcccttcccaagtcaaatttctctctagtttataactccatagatatattatctcatcagccctaaatttgattgt

SEQ ID NO: 459321 - DNA, 589 bp, Homo sapiens
tgccttgtctcagatgagactttggactttggagttaatgctggaatgagttaagactttgggagactgttgggaagggataattgtattttgcaacatgaaaakgacatgaaatttgggaggggccagaggcagaatgacatggtttggatctgtgtccccatgcatgttcagttgtaatccccagggtggaggtgatacctggtgggagatgattggattatggaggtggatttttcatgaatgatttattgtgatagtgaatgagttatcacaagatctggttattttaaagtgtgtggcacctcctcccactttgctcctgctttccacatgtgatgtacctgcttctccttcaccttctgccattattgtgggcttcctgaggcctctccagaagccaaacagatattagcactatccttcctgtaaagcatgcagaactatgagtcaactaaccctcttttctttctaaattacccagcctcaggtatttctttatagcaaagcaagaatagactaatacattatcctttgttactgatgtctaaaaatcttttttaaaaaaattaaaagcaagtatattaag

SEQ ID NO: 459322 - DNA, 507 bp, Homo sapiens
actagtgaaataaattaaattgcacaacaattatgaataacacaaaacaataaatagaagttattaaaaagaatagtcatttcaggccgggtgcagtggctcatgcctgtaatcccagcactttgggaggctaaggcaggcggatcacaaggtcaggagattgagaccatcctggctaacacggtgaaaccccatctctactaaaaatacaaaaaatttgctggtcgtggtggcgggcgcctgtagtccaagctactcgggaggctgaggcatgaacccgggaggcagagcttgcagtgagccgagatcctgccactgcacyccagcctgggcgacagagcgagactcgtctcaaaaaaacaaacaaacaaacaaacaaacaaacaaacaaaaaacaaaaaccaaaaaactatatatatatatatatatatatatgctgggtgtggtgtctcatgcctgtaatctcagcactttgggactttgggaggctgaggtaggcagatcaca

SEQ ID NO: 459323 - DNA, 473 bp, Homo sapiens
aagattgttgtataagtgactgaataaataaattgctcttgcagttaaattacttaaacttgtattttacacaagtttctactttctctgtaaatttgaaggtgttaagaaataagtaaaattgagtgtgtggcttgtcayggtggctcccgcctgtaatcccagaactttggtaggccgaggtgggcggatcacttgaagtcaggagtttgagacgagcctgggcaacaaggtgaaaccctgtctctaccaaaaaatacaaaaattagctgggcatggtgatgtgtgcctgtagtaccagatactcgggaggctgaggcatgagaatctcttgaacgtgggtggtggaggtttcagtgagcccagatagtgcctgggctccaacctgggcaacagagcaagactctgtcctttatctccaaaaaaaaaaaaaaaaaaacattgagtctatcaggagtggagttgataaaaat

SEQ ID NO: 459324 - DNA, 587 bp, Homo sapiens
acaaacgcaatagtttgtcctttgaaaaggttaataaagttgatgagcagaaaacacaaagtaccaacatcaaaaacacaaattaccaacatcagaaatttaaaaaagagacatcaatgtcgttgcacattttataaacattaaaaaattacagttttatgaacagctctgctaataaatctgatgtcctgaatgaaatgaacaaatgaacacaaaaccaacaacaaaaaatagaaatagcctcacatatattaaagacatttaattcatatctaaaaacctttcaacaaggaaaatctcagtcccaaatggcttcactaatgaatttgccactaacataaaggaataaataatattagtcctacacaaactctttcagaaaaccaaggaagggcatatatttctcagctcattttgtgarggctacctaactttaatcccataacctaacaaagcactaaaagaaaagcccattagaatattccatatgaacatagatgtaaaataccttaacagcatattagcaaatggaatcctgcaatatataatagggtaatgcatcatagctgattggatttctcccagga

SEQ ID NO: 459325 - DNA, 463 bp, Homo sapiens
agaaatagtttcacttcttcttttcctaattggatgccttttctttttttcacttgactgactgctccagctagcacttccaggactatgttgaataggagtggtaagagtgggcttccttgtcttgttccagttctcagggagaatgctyccagtttttgtccattcaggatgatgttggctatgggtttgtcatagatggatcttattattttgatggatcttattatttgatggatcttataataataataattattattattattattttccttcaatgcctggtttcttgagggtttttatcatgaggggatttggggttttgtgaaaagctttctccgcatccattggggatgatcatatggtctttatttttaatactgtttatgtggtgaatcacacgttttgatttgcatatattgaatcaactttcatcccaggaatcaagcctacttgatca

SEQ ID NO: 459326 - DNA, 463 bp, Homo sapiens
agaaatagtttcacttcttcttttcctaattggatgccttttctttttttcacttgactgactgctccagctagcacttccaggactatgttgaataggagtggtaagagtgggcttccttgtcttgttccagttctcagggagaatgctcccagtttttgtccattcaggatgatgttggctatgggtttgtcatagatggatcttattattttgatggatcttattatttgatggatcttatwataataataattattattattattattttccttcaatgcctggtttcttgagggtttttatcatgaggggatttggggttttgtgaaaagctttctccgcatccattggggatgatcatatggtctttatttttaatactgtttatgtggtgaatcacacgttttgatttgcatatattgaatcaactttcatcccaggaatcaagcctacttgatca

SEQ ID NO: 459327 - DNA, 463 bp, Homo sapiens
agaaatagtttcacttcttcttttcctaattggatgccttttctttttttcacttgactgactgctccagctagcacttccaggactatgttgaataggagtggtaagagtgggcttccttgtcttgttccagttctcagggagaatgctcccagtttttgtccattcaggatgatgttggctatgggtttgtcatagatggatcttattattttgatggatcttattatttgatggatcttataataataataattattattattattattttccttcaatgcctggtttcttgagggtttttatcatgaggggatttggggttttgtgaaaagctttctccgcatccattggggatgatcatatggtctttatttttaatactgtttatgtggtgaatcacacsttttgatttgcatatattgaatcaactttcatcccaggaatcaagcctacttgatca

SEQ ID NO: 459328 - DNA, 573 bp, Homo sapiens
gcactataaaatttcctcttaacactacttttgctgcatcccagaggttttggtacctgtgcctctgttttcatttatttaaattttttttatttctgccttaatttcattgtttacacaaaagtcattcaggagcaagttgtataatttccatgtaactgtggttttgagtcctttaaggtactgatttctatttttattccactgtggtcttagaatatggttgctatgatttagattttttcaaatttattgaaacttgctttatggctgarcatgtggtcaatcctggagtatgttccaggtgcagatgagaagaatgtatgttctgtggttgatgagtgaagtgttctgtagatgcctattaagtccaattggtcaagtgtttactttaagtccagaatttctttgttcgttttctgcctcagtgatctaatagtgacagtggggtgttgaatttccccactattattgtgtggctgtctaagtcttttcctaggtcttgttttatcaatgtggctactccaatattgggtacatatatatttaggacaattaaatccctcttggtga

SEQ ID NO: 459329 - DNA, 503 bp, Homo sapiens
ttaatgtattaagtacctcacagttggccctcaacggcatttaaagtgaacatggtaccaaaccagattcaaaatgccagtttaacatttattcatcccacagatatttgttaccatgtgccagacattgtgtttagaaagaaatgtaatattttaaaagtacctggcttcctggagtttacagtctrgcataaggacaattaatctgacaatagaaagcacaggatattaccagaacacagagcagagagacctgaagcaaagcagcagtgtgaggcagggaagtctcctcggaggaagaaaacctgaaggaaaagtaagagttctgaaggacttctagttacagctatgtggagaagtcagtaatttgttactatataaaacaactataaaatttggaaaaaattatattaaaaataacatttcagagcactgaaaatagaccaaagcagagaacaaaagaaaaagcatttcattcttgaaaatcacctcgaggttgaagt

SEQ ID NO: 459330 - DNA, 503 bp, Homo sapiens
ttaatgtattaagtacctcacagttggccctcaacggcatttaaagtgaacatggtaccaaaccagattcaaaatgccagtttaacatttattcatcccacagatatttgttaccatgtgccagacattgtgtttagaaagaaatgtaatattttaaaagtacctggcttcctggagtttacagtctagcataaggacaattaatctgacaatagaaagcacaggatattaccagaacacagagcagagagacctgaagcaaagcagcagtgtgaggcagggaagtctcctyggaggaagaaaacctgaaggaaaagtaagagttctgaaggacttctagttacagctatgtggagaagtcagtaatttgttactatataaaacaactataaaatttggaaaaaattatattaaaaataacatttcagagcactgaaaatagaccaaagcagagaacaaaagaaaaagcatttcattcttgaaaatcacctcgaggttgaagt

SEQ ID NO: 459331 - DNA, 503 bp, Homo sapiens
ttaatgtattaagtacctcacagttggccctcaacggcatttaaagtgaacatggtaccaaaccagattcaaaatgccagtttaacatttattcatcccacagatatttgttaccatgtgccagacattgtgtttagaaagaaatgtaatattttaaaagtacctggcttcctggagtttacagtctagcataaggacaattaatctgacaatagaaagcacaggatattaccagaacacagagcagagagacctgaagcaaagcagcagtgtgaggcagggaagtctcctcggaggaagaaaacctgaaggaaaagtaagagttctgaaggacttctagttacagctatgtggagaagtcagtaattygttactatataaaacaactataaaatttggaaaaaattatattaaaaataacatttcagagcactgaaaatagaccaaagcagagaacaaaagaaaaagcatttcattcttgaaaatcacctcgaggttgaagt

SEQ ID NO: 459332 - DNA, 588 bp, Homo sapiens
tatcattcctatgcctttgcatcctcatagcttagctcccacatatgagtgasaacatacgatgtttggttttccattcctgagttactttacttagattaatggtctccaattccatctaggtggctgcgaatgccattattttgttcctttttatggttgagtgttattccatggtgtatatatataccacattttctttatccatttgttgactgatgggcatttgggctggttccatatttttgcaattgcaaattgtgctgctataaatgtgtatgcaggtatcttttttgtataatgacttcttttccttttggtagaatacccagtagtgggactgctgaatcaaatggtagatttacttttagttctttaggaatctccactgttttccatagtggttgtactggtttacattcccaccaacagtgtaaaagtgttcccttttcactgcatctgtgcctacgtcgattatttttttgattttttgattatggccattcttgcaggagtgaggtggtattacattgtggttttgatttgcatttccctgataattagtgatgttgagcatttttccatatg

SEQ ID NO: 459333 - DNA, 548 bp, Homo sapiens
cagatagaaactgttattataaccatttgacagataaaaacactaaagccacggagatgagtgaatttgcccaaggtcacatagacagtaagcagtatgaagaaacatatgtataactgcactgactctaaaatattttaaatttattctgttaaagtttctgttttaaaaaaaatccatgcatttattaaaagtagcttttttctcagattcacttatagcaagactttattacatattaacttatcactgggtacaaaccacctggttctaaagacgtctgtcctgattactgtagggactgttatatatgaggcagaggcatcttttcattattattatttcccaaaacctatagaatttgtgtatagcagttatagactatgtctgaaatagttatattcacataacacttaataatcacatttaagtatycactaacagaacaaagcctgttactatggtaaataaatacacacagttctatcacagagcacagaagtcatcaagcagataatattttcttcattacacactgaaacttgtga

SEQ ID NO: 459334 - DNA, 324 bp, Homo sapiens
ggaggaatgagtcacgggtcccaagtaaggtgtaaccctagcaggacaaatattattaggttttaaggctttggattaatacctagtcctctcgacccaacagggttgcaactctaccccctcagccctgagtggaggtgtctggctctctgtaactgaggaggagacagcmttacttccaggcctgtgccctctaccctctggttataatgccattcctgtcaactcctgaactaacttttgggtcattattcctttttcttacagaatatcttgtttatatccatgtagctctattggcccatcctgtggattctcagaagt

SEQ ID NO: 459335 - DNA, 590 bp, Homo sapiens
gcagttttgttatacaggtacattgcatgtcattggtatttggtgtacagattatttcattacctaagtagcaagtgtagtattcaataggtagtttctcaatccttaccctccttccaccccgtaccctcaagtaggtcctggtatctattgttcccttctttgtgtcyatgtgtactcaatgtttagctcccacttataagtgagagcttgtgatatttggttttctgttcctgcattagttcacttaggataatggccatcagcttcagccatatggctccaaaggacatgatctcattgttgtgtagtattccatggtgcatatgtaccaccaattgtgtgcatttaggttgattccatgtctctgccattgtgaatagtgctgtgaggaacacagacgtgcatgtgtctttatggtagaatgactgatattccctttggcatatatccaataaaggattgttgggtgacggtatttctgttttaagttttttaaagaattgccacactgcttttcacaatgactaaactatttacaccctaaccaacagtgtatgaacattctcttttctctgcaacttcaccag

SEQ ID NO: 459336 - DNA, 497 bp, Homo sapiens
tatgccagatctctgtcttgaaactttttggtctaaaaatacaaatgtgggacagttgtatgttttaatggagggctaacataacctttactattccctctttcttgcttatccttcctttaaagttatatatttcagattcttgatgcagactgcttttagaaatctatagattaaactgctaaaaataataggtttatagagttctgttagtataaggctcttgaaataattggggtttttctctatmcccttgttattctgtataatttttctgtcacttcattagtgacttctagttcttggatttatttatttaagttagttattcctgcttctattttctcatatcctctgtttatgtttgtattctatagttctggctcattgtataagagaagtttgctgccttagtgagatttgtaagtactctcgaatgtagaggctgtgttactgtccttttattcccagcatgtagcacatggtacataatgggc

SEQ ID NO: 459337 - DNA, 592 bp, Homo sapiens
tgttcctatttaagttgttattaatagtattgagcagtttcactttaaaatatggaaatacaacatttcaagcaatctatctttttggttccatgtgtctccaagaatggtcttgtttgtttagcttttaaattctttttacagatccataattagctctcttcaaatgatttgtttgttcctcttttggaactgtttgtgaaaacagtggggagggaggagaaagatgtctagtaaaatgatgatgaatccagtattatgataaaaagacgaaaaaaaaaaacctcccagcaaattctggcttcgtggtaagatacaaagaacacctggtctttggtaaccagtttyggatgatcaggtcatgttaacttatcaggaagacagttgctgtttagcatgagattgtttaccaacatggaagggatttggcaacttctctcagaaagtaattctcaagcctattttgattagcaaccctcctatcctgccttacctatatatacaggccctgcagtgatattgagcactcctcctcctttttttccacattctattgtattatttgctccaaagtaatggaataaataaataa

SEQ ID NO: 459338 - DNA, 592 bp, Homo sapiens
tgttcctatttaagttgttattaatagtattgagcagtttcactttaaaatatggaaatacaacatttcaagcaatctatctttttggttccatgtgtctccaagaatggtcttgtttgtttagcttttaaattctttttacagatccataattagctctcttcaaatgatttgtttgttcctcttttggaactgtttgtgaaaacagtggggagggaggagaaagatgtctagtaaaatgatgatgaatccagtattatgataaaaagacgaaaaaaaaaaacctcccagcaaattctggcttcgtggtaagatacaaagaacacctggtctttggtaaccagttttggatgatcaggtcatgttaacttatcaggaagacagttgctgtttagcatgagattgtttaccaacatggaagggatttggcaacttctctcagaaagtaattctcaagcctattttgattagcaaccctcctatcctgccttacctatatatacaggcccygcagtgatattgagcactcctcctcctttttttccacattctattgtattatttgctccaaagtaatggaataaataaataa

SEQ ID NO: 459339 - DNA, 593 bp, Homo sapiens
tgttacttgctttctcttcttttgctgcttttaggatcctctccttttcatatttgacaattttgttatataatatgtcttgatgtagtctttttggggttgagtctgcctggagacatttgaccttccagtacctggtaatagatatatagataaatagatgtctatttccaggtacaggatttatttccaggtacaggaaagagatatgcctatatatctatatacatatagatatagatacatctatttccaggtacaggaaggtcaaatgtgtrtgtatgtatatatacatatatacatacacacacacacacatatatatatacatatatatacacatatatatacacatttgaaagacacatatatatatatatctttcccaaaatctaaaaagttttcacctattccttctttaagctgtatccatttatctttttcttctctttcattaacttttaaaactcaaatgtttgctattttcatactatcccataaatcccataagctttcttcattctttttgatcttcttttctctcctctgattatatatcttcaaatatctggcctttgagttcacagaatatt

SEQ ID NO: 459340 - DNA, 593 bp, Homo sapiens
tgttacttgctttctcttcttttgctgcttttaggatcctctccttttcatatttgacaattttgttatataatatgtcttgatgtagtctttttggggttgagtctgcctggagacatttgaccttccagtacctggtaatagatatatagataaatagatgtctatttccaggtacaggatttatttccaggtacaggaaagagatatgcctatatatctatatacatatagatatagatacatctatttccaggtacaggaaggtcaaatgtgtgtrtatgtatatatacatatatacatacacacacacacacatatatatatacatatatatacacatatatatacacatttgaaagacacatatatatatatatctttcccaaaatctaaaaagttttcacctattccttctttaagctgtatccatttatctttttcttctctttcattaacttttaaaactcaaatgtttgctattttcatactatcccataaatcccataagctttcttcattctttttgatcttcttttctctcctctgattatatatcttcaaatatctggcctttgagttcacagaatatt

SEQ ID NO: 459341 - DNA, 625 bp, Homo sapiens
gttctggtaccagtgtgggtatcagctgtgtagtctctgtgcagctctgtcagctgaagtcagtgttgataaatattgcagggatcctcagcagccaatatgtggatatttgcagtgatagcaagtgctrttggggtctttggtggtgatggctgctaaggtcatcacaatttctttttctctcaccagggaagttgtggtcaggggatccctcttggtactatgcctggatcataagcttgctagcagtcacggtggaactggtgtcttatgaatggcacccctgcaagagccacagagctgaggtctgaagctcaggcatgaatggaggaattatgactctgggattgagcaagtaatggcattgataaccagggaacaggcatctccactgccacattggtaactgaatgtaaggtacagatgcttgtgaagcagcctggaaagccaagaatggaagcacatatatgaacaaagttacagtggctccagggttagggtgaggtctagctctctatggcagctgagtcagtacctgaggctaaggcacctgtattgctgccttggcaaccgtagctgaagcacagatgcttatgaagtagccaggtagtcaaaatgtatgcac

SEQ ID NO: 459342 - DNA, 633 bp, Homo sapiens
gcatgtggccttggttaataggattaattgcttttatattacagaaaatagaaaatatgttttgcattatttgcagcttttcccccttcaggaattgcatgtggttttagtccgtacagatcagtgcacagccagtgttgtagcttttatttcgattttctcttgcaaatctttgagttagcaggctccgtgttggagggtagagaatgttattacaaagcaccatccttacactatagtcaaggcctgaggggtgagggatctcctcctcatcctaccacgtctgctttcatcccaaaagattggcccagctatcgagtgtaagggctctaaattgctgccactgaaaggtggaggttgttaaaaggctatgcctgggctgttcaaaaatttcatgggtgggaacctgtgtcacttggcccacaaaactagatggtagggcagttatgggcatgatgaattgtggctttggtcacttctaamcttgggctgaatcagagactcataggatgttggtaactgcctccctgagccaaagaaacaagaaagaccctctgcgttcacggtcttttctttctttcctctccttagtctcaaatataaaacgtacctgccttgttagatcttagaaaa

SEQ ID NO: 459343 - DNA, 585 bp, Homo sapiens
tacttaatctttccgtcattctcaatttatataggaggctatggaggcacacagaggctaagcaactttcctaaaaatcacatggctataaaagaaagatcaagatttaaactgaggatgccttgctccaaatcatacctttaactactatactataatatctggcacaggtattgcctgtgaactacctgcccatctaacagatttgttaacaataagattttataattataaagatattaaagtttcctgttttaataaaaatttgagttatgcatctaaaaatacaaaattaatcctaacacgtcaaatactaggatactatatagttaaagtaaataagtcattcatctgcttttgtttgatttttcaaagaaacgaactttcatagatgttacattctcacaaagcatgtagtgttcaacgttacttcaaacatgtaggatcaattaggtggatttctttatggtggtagttagtagaagagtaagtaatcaaataaaatactcacttctgcacaaatatttttaamagatgggagagaaaaatctacattaaacaaatggaaaaaaatttatattcctg

SEQ ID NO: 459344 - DNA, 517 bp, Homo sapiens
ctttccactgattcataatatataggcgaggagagacaaaaagtggcatgaataaatgtgcctaaggaaatcctattaaatgctggtttctaggcttcattttgtactaattggcatcatttttcgagcactcactgtgtgcctggcattgtgctaagagcattttaaaatactttatttcattcccatgttaactcatgtttgagttcatattgttcatattgttatttctattttataggcaagtaattgggtcttggaaagctaatggtttaccagaggtcacagaatctgagactctttttagacttaaaaatctatgctttctaattgtaaattaatcagttgttttaccacataaattactttctaggatttaattattttctcatatttaaagtataggacttggatgaggttgcgggggtaagagggtggtgctaaaactcttcctaataakagctactttaaatttttccaaaattttatgtttgtatttggggctaaaccaagtgta

SEQ ID NO: 459345 - DNA, 622 bp, Homo sapiens
ttggaaattgaacagataggtatactttttacattgttagtagataggaagtgactgtctaagatctctggatcctctagggaactttcagacaatactagttagtgattctcatgtaccttttactggccaaaatatatgttagttagccttctgtttttttaaaaaatgtttgaggtctgtttkaaagagtgtctgtaagaaggatatagcagtaataagagggattagttacaagtaggtaagggcagaattatttatttgttacaaaaagtccaataacgtttaaaggcaatgattgtcaggttagaaaacaattcatcatagtgaaaaaagtaatgcaatgaaaggagaaataatagaatctcataatgggagaatagactctatatttgaaaatattaggctgagagcaccctgataccaggaacagatgaagtgagtgacctcacagggcttttctaatttctgtgattccgtaacggagcactctgaaggtaccttgcttatgacatttctggatttacattttaccacataatgaactgctgaatgattttggttgaaacagtttccatattattggacgagtcacctcattattgaatggaacaacttcaca

SEQ ID NO: 459346 - DNA, 719 bp, Homo sapiens
aagaaaaagtagtctgacaatatcaggatttcttgaggtcggggatttgcagataattttatatgctgctgaagggcataactactctggaaaattatttgcattatttagtgaaactgaagatacatattccttttgatgccaaatccacttccagtgaaacgttttaacaatttcatcttgaaacatgcacatgactgtcacagcagcactgttaatatatccacatacatgcaaaaaatctgttgacagttaaatgtatgaataatgaatttggtatatccacgcgatgaaatactacacagcagggcaaatgagcaaagtacagctgtacatatcataatgttaagtgaaagagcaattcacatgagaacacatacagtataattccatttacacagaayaaaactaaaagttatatatactttagaggtgtctatatatgtgctaaaaccataaataaaggcaaaggcataattagttaccttgggttgtgggtaggaggatgaagacagcaggatcatcatgtagcagggcttcaaattatgtgacactctaatgatctgggagcagggaggaaactagcatggtgctgtggaggaatagcaagaataacaaagtgtctggaaaatacggcacccagaaaagagcaatggggagtaaagtcacagagtgaggcaggagcatggtcatgtggagccctgaaaaccaaggaaagg

SEQ ID NO: 459347 - DNA, 591 bp, Homo sapiens
atcttatttattccttttccccagtatctagtacctggtacctaataaacatttaataagtattttttgaaaaacaggrgacattaaggtttgaaaatgatacaatagagaaagttattcacctcctttgaataatccctcatttactaatcacatgaagactgcaaaacccaatgccatggagatttactaaaggatatgagatattgttttgttttttaatcttggaacactgatactacatatgaacacttaaaactaattcaagtatttattgaatagttataggaggagggaaagcatagctaacactagaagttttcttgatattggtgagtttgagccttaacttaaaaatgtgaggaaaatattaacaattaggaatggaatgggcatggtttcctatattgggttatacatacaatcataagggcataaattagcaagttttgatgtcttacccgaaggtctgctattctggagtggaatatttcttgatttgaaaaatctaaaattaaaatgcaggtttaatctaagctgagatgctataaaaatagcaatgatagtgatcacttacgagcaatttacctt

SEQ ID NO: 459348 - DNA, 588 bp, Homo sapiens
ttatggtaacattattctccttagctcttatagttaagtctctgccacatttggatctcatcattctcactcaaatcaaggactccattttgatggcaacatatgccactttccttcctgacttcagaggatagctatgactatactttctgaggatgttgttcctcagggggaactgttctgaggataaggtgttccttgtacaattcatttgtcaaggtctttgtgaagggaatgtgctttgggcctgggagatgtggcatgtgataggttcacttcaacatttcratttccctaagtcttacattctctcttatgtataatgctatacaaagatgtttccaacatcctcactaaatgattttaggactaaatgagtttaggtttcaggtaattaactgactacatgatgaaatttgatacaggtctggaagaaaatagggtgtggaaggagaagaattggcatgtttttacaaggtaatagcctcaaatggggacattatcaggtcttcatacaaggtagaaccagcctcatcagtcaggcagaggatctctgttgactggagaggtttggtaggatttgggggt

SEQ ID NO: 459349 - DNA, 583 bp, Homo sapiens
gttggtaattttggcataagcatgttatgaagagaagacaaatccatatccagagtaagtgtctattctggtagggacaaaatgcttccacttccacaattgaagtggtccaatgtaatcaacctgtcaccagatagctggctgattatccctagaaatggtgtcatagtgagggctccctgttgctctctgctgctggcagattgggcactcagwggtgatcctggccaggtcaggcttgttaatggaagtcatgttgctgagcccccgcatgacatccatcccttccactatggtcactgtgatcatgagcccattgggaatgactggggaaagaggctgactggtgtccacagaagagtcattctatctattcaattattaaaatcttcctcggttgtgttcactttttgggtagcattcatatggggcacaaatatcttcacatttttgctcattcagagagatctattcacatacctattcctcagatttctttgtcataaattttccaatcacgttatttccaagtgcctgaatctgtatataactgcacatctggccagttttcctttcaaccaaa

SEQ ID NO: 459350 - DNA, 574 bp, Homo sapiens
ttgtgatagtttatgttttttaaggaaatggtttatcttgtctaacttktcaagtttgtatttatagagttgttagcaatatttacttattatccttttatgttctcagaatccctagtgatagcctttatttcattcctaatactgacaatttatttattttctctattttcttcattagttttgctaaagaattgccagtttttcttttcaaagaaacagctgtttggtttttttctatggtctttgcttttaattttgttgatttctgctcttgtttttattattttcttccttttgcttactttgagcttattttcttctctctttctagattcttgagatagcttagattattgatttgagacttcgtctttcctaatctatgcacttagtgctacaaatttttctctcaacacagctaaagcaatttttatgtgttgtatttttattttcattaaggtcaatagattaaaaaatttcttctgagattttctctttgaaccatggattatttagagtgtgttgtttagtttcaaatatttgtagatttttccattatgtttttgttgtc

SEQ ID NO: 459351 - DNA, 580 bp, Homo sapiens
ccttttcgtggactccagaagaggaagatggcagataggaggcaggactaacktgcagctcccacttggatggacagagcagcatgtggagattcacgctgtgaacttttgctccaagaactaccataggacataccaggaaagccaagagaatccaaagaccctttgaaggaggtggcggccactgtaggctccgtgccaaagactgagtgccaaaatgtgtgaaagtgtaaaagggggatgctccacccccaagcacagatcctcactggggaacctgacggtccacatggtgggaaaaggatttaatcttacgcggagctaagaggaatttagagagccaagcaaaatattcgagtagaggaaacaacaagaagagccctgtgggaaaccatttcggactttgtcttgcaggggtcctttgggagggctgccagtggaattggggaaagactacaaggagaagcaagctttcagatgaattttgtaataatcttgactaacgtgaagcttcctggacagaacctgggggagggggcaaactgggagtgcagatacaagctcagaagctgaggcaggc

SEQ ID NO: 459352 - DNA, 580 bp, Homo sapiens
ccttttcgtggactccagaagaggaagatggcagataggaggcaggactaacttgcagctcccacttggatggacagagcagcatgtggagattcacgctgtgaacttttgctccaagaactaccataggacataccaggaaagccaagagaatccaaagaccctttgaaggaggtggcggccactgtaggctccgtgccaaaractgagtgccaaaatgtgtgaaagtgtaaaagggggatgctccacccccaagcacagatcctcactggggaacctgacggtccacatggtgggaaaaggatttaatcttacgcggagctaagaggaatttagagagccaagcaaaatattcgagtagaggaaacaacaagaagagccctgtgggaaaccatttcggactttgtcttgcaggggtcctttgggagggctgccagtggaattggggaaagactacaaggagaagcaagctttcagatgaattttgtaataatcttgactaacgtgaagcttcctggacagaacctgggggagggggcaaactgggagtgcagatacaagctcagaagctgaggcaggc

SEQ ID NO: 459353 - DNA, 580 bp, Homo sapiens
ccttttcgtggactccagaagaggaagatggcagataggaggcaggactaacttgcagctcccacttggatggacagagcagcatgtggagattcacgctgtgaacttttgctccaagaactaccataggacataccaggaaagccaagagaatccaaagaccctttgaaggaggtggcggccactgtaggctccgtgccaaagactgagtgccaaaatgtgtgaaagtgtaaaagggggatgctccacccccaarcacagatcctcactggggaacctgacggtccacatggtgggaaaaggatttaatcttacgcggagctaagaggaatttagagagccaagcaaaatattcgagtagaggaaacaacaagaagagccctgtgggaaaccatttcggactttgtcttgcaggggtcctttgggagggctgccagtggaattggggaaagactacaaggagaagcaagctttcagatgaattttgtaataatcttgactaacgtgaagcttcctggacagaacctgggggagggggcaaactgggagtgcagatacaagctcagaagctgaggcaggc

SEQ ID NO: 459354 - DNA, 579 bp, Homo sapiens
atctccggagaaacagatagcataaataaaaaacaatcacaactgctggaaatcaagaacacactagaaaaatgcaaaatacactggaaaatctcagaaatagaatcaaacaagtagaagaaacaagttcagagcttgaagacaaggctattgaactaaccgaatccagcaaagacaattaaaaaacacacctttaactgtgttttcttatacttcgggctttttgtaggttaatgacttttcttaattcctaagtaccatctgagtaattagtcacatggttataaagaatatcaaatgtcagactaaattcttttcaagcttccctcagcagcttaaagttgaaacyttttcattccttcttctataatcttgggtatttgaaatgggtattctcccacttgaacataggcaaaatctaatttcttgtctctaccctatggaatctcgtttagtaattatttctaaacttatcctgatgccatgcatcgttggtttgttataagtatatctaaaggagtacacaacatttactaaagaaacacattccccgtgtgatgtgtcctgataagaaaaatg

SEQ ID NO: 459355 - DNA, 579 bp, Homo sapiens
atctccggagaaacagatagcataaataaaaaacaatcacaactgctggaaatcaagaacacactagaaaaatgcaaaatacactggaaaatctcagaaatagaatcaaacaagtagaagaaacaagttcagagcttgaagacaaggctattgaactaaccgaatccagcaaagacaattaaaaaacacacctttaactgtgttttcttatacttcgggctttttgtaggttaatgacttttcttaattcctaagtaccatctgagtaattagtcacatggttataaagaatatcaaatgtcagactaaattcttttcaagcttccctcagcagcttaaagttgaaactttttcattccttcttctataatcttgggtatttgaaatgggtattctcccacttgaacataggcaaaatctaatttcttgtctctaccctatggaatctcrtttagtaattatttctaaacttatcctgatgccatgcatcgttggtttgttataagtatatctaaaggagtacacaacatttactaaagaaacacattccccgtgtgatgtgtcctgataagaaaaatg

SEQ ID NO: 459356 - DNA, 579 bp, Homo sapiens
atctccggagaaacagatagcataaataaaaaacaatcacaactgctggaaatcaagaacacactagaaaaatgcaaaatacactggaaaatctcagaaatagaatcaaacaagtagaagaaacaagttcagagcttgaagacaaggctattgaactaaccgaatccagcaaagacaattaaaaaacacacctttaactgtgttttcttatacttcgggctttttgtaggttaatgacttttcttaattcctaagtaccatctgagtaattagtcacatggttataaagaatatcaaatgtcagactaaattcttttcaagcttccctcagcagcttaaagttgaaactttttcattccttcttctataatcttgggtatttgaaatgggtattctcccacttgaacataggcaaaatctaatttcttgtctctaccctatggaatctcgtttagtaattatttctaaacttatcctgatgccatgcatcrttggtttgttataagtatatctaaaggagtacacaacatttactaaagaaacacattccccgtgtgatgtgtcctgataagaaaaatg

SEQ ID NO: 459357 - DNA, 579 bp, Homo sapiens
atctccggagaaacagatagcataaataaaaaacaatcacaactgctggaaatcaagaacacactagaaaaatgcaaaatacactggaaaatctcagaaatagaatcaaacaagtagaagaaacaagttcagagcttgaagacaaggctattgaactaaccgaatccagcaaagacaattaaaaaacacacctttaactgtgttttcttatacttcgggctttttgtaggttaatgacttttcttaattcctaagtaccatctgagtaattagtcacatggttataaagaatatcaaatgtcagactaaattcttttcaagcttccctcagcagcttaaagttgaaactttttcattccttcttctataatcttgggtatttgaaatgggtattctcccacttgaacataggcaaaatctaatttcttgtctctaccctatggaatctcgtttagtaattatttctaaacttatcctgatgccatgcatcgttggtttgttataartatatctaaaggagtacacaacatttactaaagaaacacattccccgtgtgatgtgtcctgataagaaaaatg

SEQ ID NO: 459358 - DNA, 550 bp, Homo sapiens
ttactttagtttttgtaaatgggattgccttatttctctttcagattgctcactgttggcatatataaatgctaattttgtatgttgattttgtatcttgcaaatttactgaattcatttatcagttctcacagtttttgctggtgtcrttaggatttttttaatatatgaccatgtcatctgtaaacagggaaaatttcagttccttctttccaatttggaggcctttgtttccttcttttacctaattgctctaagaccagacacagcttctcttttttctctcctgaattcatgggaattcaggatgttattgtttttgaatagtttccagttctatttttgtgggtgtggatgaatgatgctggaggatcttctattcatctatcttgttgctataactcctctctatgagtctttcttaactttttaaagatacagtttgctgttagagtatagaaactccaatttctgtctgttgatttcctgaaactttcctgaatttgttagggaatagtttttgttgaaggctttatgtttttttatatgt

SEQ ID NO: 459359 - DNA, 535 bp, Homo sapiens
aaccagcagcccgatgccaggaaaagacagaccctatggttcatgaggacagggtaacggagaggatggcagatggccacgtagcggtcataggccatggtggctagaaggaaaaattccgaacctgctagtgtcagatagaggaacatctgcatcccacactcaggggctgagaccttattcacacccatgacctggtccaggagcatcttgggcacagtgacagaaatgtacgccatgtccatgagagacaattgactgatgaaaaagtacatggggctgtggaggtgggcgtcacagtgtatcagaaggatcaggacagcatttccagacaacgccttcaggaaaaccacaaagatgaccacactaagtagagctggatgtttggatcgtctgaagagtcccatgaggatgaaatccaacyttccagtgtggttggccatcctggtgatgttggccatgaggtttcacctaggccaccaaggagagttttggagtcagtgtaacgcgtccctttgtaatgagtgtttcgtga

SEQ ID NO: 459360 - DNA, 576 bp, Homo sapiens
gtgggtttcatcaaagaaacataaaatgattgagacattgtttctagtgttttgtaaccctcagaaatmatcccctctcaaaagaaaatcagtcacttttcctctataaaacttcagtgacaggaaaataaatacatcattgtatgaaaatctaaaactatagaatatatattattatgtccataaataattggaaattaaaaatctatttaccattatgtcacagtaaataagtgttgtatagaagttataagaaagaataacatttgcttttctccattaaaaacagatgataaagaaaaaatgaggaaatgctgtgaagaactaatagaacgtttcagaagcagaacaagtcgagagcagtgatgacccttttcttcctgctagtacctcctgtctgtctggctgaactcaccatcagatgatgtcttgaacctcacctagatgggctggtggtgtgtggccaggttaagagcaccaacaggagtaagaaagtgacctgcctggttttaccgtgtgcactaggggaggggttgaaagctttcggttgatacatcacctctgggagttgaagaa

SEQ ID NO: 459361 - DNA, 576 bp, Homo sapiens
gtgggtttcatcaaagaaacataaaatgattgagacattgtttctagtgttttgtaaccctcagaaatcatcccctctcaaaagaaaatcagtcacttttcctctataaaacttcagtgacaggaaaataaatacatcattgtatgaaaatctaaaactatagaatatatattattatgtccataaataattggaaattaaaaatcyatttaccattatgtcacagtaaataagtgttgtatagaagttataagaaagaataacatttgcttttctccattaaaaacagatgataaagaaaaaatgaggaaatgctgtgaagaactaatagaacgtttcagaagcagaacaagtcgagagcagtgatgacccttttcttcctgctagtacctcctgtctgtctggctgaactcaccatcagatgatgtcttgaacctcacctagatgggctggtggtgtgtggccaggttaagagcaccaacaggagtaagaaagtgacctgcctggttttaccgtgtgcactaggggaggggttgaaagctttcggttgatacatcacctctgggagttgaagaa

SEQ ID NO: 459362 - DNA, 576 bp, Homo sapiens
gtgggtttcatcaaagaaacataaaatgattgagacattgtttctagtgttttgtaaccctcagaaatcatcccctctcaaaagaaaatcagtcacttttcctctataaaacttcagtgacaggaaaataaatacatcattgtatgaaaatctaaaactatagaatatatattattatgtccataaataattggaaattaaaaatctatttaccattatgtcacagtaaataagtgttgtatagaagttataagaaagaataacatttgcttttctccattaaaaacagatgataaagaaaaaatgaggaaatgctgtgaagaactaatagaacgtttcagaagcagaacaagtcgagagcagtgatgacccttttsttcctgctagtacctcctgtctgtctggctgaactcaccatcagatgatgtcttgaacctcacctagatgggctggtggtgtgtggccaggttaagagcaccaacaggagtaagaaagtgacctgcctggttttaccgtgtgcactaggggaggggttgaaagctttcggttgatacatcacctctgggagttgaagaa

SEQ ID NO: 459363 - DNA, 584 bp, Homo sapiens
taatctcatttatcatagccatgaataacattaaatacccaggtattaacttaacctcagaagtgaaagatctctacaataaaaactataaaacactgatmaaacaaattgaagaggaaacaaaaaaatggaaagatattccatgttcatgaatgggaaaaataaatattcttaaaatgtccatactatctaaagcagtatacagattcaatgcagtccctatcaatataccaatgacattttttacagaaatggaaaaaacaatcctaaaatttatagcaacccataaaagaccctgaatagacaaaactatctttagcaaaaaccacaactagaggaatcacattaattgacttcaaattatactacagagctatataaacaaaatagcaggatactggcacaaaaacagacacacagaccaatggaacagcataaagacccaaaaaggaaatccacacacctacagttaactcatttgcaatcaaagatgccaagtacatacattggggaaaagacagtctcttctataaatgtgctgggaaaactggatattcacatgcagaagaatgaaactacacccc

SEQ ID NO: 459364 - DNA, 584 bp, Homo sapiens
taatctcatttatcatagccatgaataacattaaatacccaggtattaacttaacctcagaagtgaaagatctctacaataaaaactataaaacactgatcaaacaaattgaagaggaaacaaaaaaatggaaagatattccaygttcatgaatgggaaaaataaatattcttaaaatgtccatactatctaaagcagtatacagattcaatgcagtccctatcaatataccaatgacattttttacagaaatggaaaaaacaatcctaaaatttatagcaacccataaaagaccctgaatagacaaaactatctttagcaaaaaccacaactagaggaatcacattaattgacttcaaattatactacagagctatataaacaaaatagcaggatactggcacaaaaacagacacacagaccaatggaacagcataaagacccaaaaaggaaatccacacacctacagttaactcatttgcaatcaaagatgccaagtacatacattggggaaaagacagtctcttctataaatgtgctgggaaaactggatattcacatgcagaagaatgaaactacacccc

SEQ ID NO: 459365 - DNA, 584 bp, Homo sapiens
taatctcatttatcatagccatgaataacattaaatacccaggtattaacttaacctcagaagtgaaagatctctacaataaaaactataaaacactgatcaaacaaattgaagaggaaacaaaaaaatggaaagatattccatgttcatkaatgggaaaaataaatattcttaaaatgtccatactatctaaagcagtatacagattcaatgcagtccctatcaatataccaatgacattttttacagaaatggaaaaaacaatcctaaaatttatagcaacccataaaagaccctgaatagacaaaactatctttagcaaaaaccacaactagaggaatcacattaattgacttcaaattatactacagagctatataaacaaaatagcaggatactggcacaaaaacagacacacagaccaatggaacagcataaagacccaaaaaggaaatccacacacctacagttaactcatttgcaatcaaagatgccaagtacatacattggggaaaagacagtctcttctataaatgtgctgggaaaactggatattcacatgcagaagaatgaaactacacccc

SEQ ID NO: 459366 - DNA, 584 bp, Homo sapiens
taatctcatttatcatagccatgaataacattaaatacccaggtattaacttaacctcagaagtgaaagatctctacaataaaaactataaaacactgatcaaacaaattgaagaggaaacaaaaaaatggaaagatattccatgttcatgaatgggaaaaataaatattcttaaaatgtccatactatctaaagcagtatacagattcaatgcagtccctatcaatataccaatgacattttttacagaaatggaaaaaacaatcctaaaatttatagcaacccataaaagaccctgaatagacaaaactatctttagcaaaaaccacaactagaggaatcacattaattgacttcaaattatactacagagctatataamcaaaatagcaggatactggcacaaaaacagacacacagaccaatggaacagcataaagacccaaaaaggaaatccacacacctacagttaactcatttgcaatcaaagatgccaagtacatacattggggaaaagacagtctcttctataaatgtgctgggaaaactggatattcacatgcagaagaatgaaactacacccc

SEQ ID NO: 459367 - DNA, 627 bp, Homo sapiens
acactttatccatttaatttctgaaggactttctgattaagtctatgttttggaatgtatgaaaaatctactgtgaacataagtttccaaatcagcagagttaacaccaagaaacacaattgccagatcatatgataagattatgttcaatattgtaagaaactgtcaaactgtattccaaagtggctgtacaagagagtgtgcttttgtctgtaacggatcgatagaaatgaaagaaattgtaaaaactgaatataaaagtcaatcatcttttcaaagaatagctgaaataatgactagcatttataaggttttattacattcatcattttacttgattttaaaatcttacaagaaaaaaagtatgtattaagtcaaattttataaaaaagaaagttggtcctcagaagcattgtatgattgacagaaattcacatggtgtttacgtggagctgaaactgatgatcagttcttatgggccagccctctccttctyttctgatttgttgtgttttttgtacctcaacatcttcttggttggaaatgctccctcatattatctggcacatactgttgtccaagacagtctgacaagattgaggagatgttgagcctccagctgaagag

SEQ ID NO: 459368 - DNA, 542 bp, Homo sapiens
ttggttggaaatgctccctcatattatctggcacatactgttgtccaagacagtctgacaagattgaggagatgttragcctccagctgaagagcctcggaaaagctgttcctggatttcaactgaaaaccctgctctgttaggcaagacctggtctattttcttgattaagtgctcagcccaatgccaagttgagctgttctatttggctaaatattttgtcaaatacccagcagcttttttcagtacaaaaggaggtgtggctatctttcattcacccaccatcttcagtcgctgcagaacgtcactgaacccggcttggattttgttaaaccaatgacagtacaaagcctggcacagcagcttgtagaggtggcctgaggggtttgggatgtggtcctggtttttactactgtgtctacagtttaggccaaacattttttctccagttcttagccacttaaaaagaaatcatactaagtgtatagaacacccttgacgtagccaactccatcttagaaaaagactttattttatatttc

SEQ ID NO: 459369 - DNA, 593 bp, Homo sapiens
acattgttggtccttacatttttgaaggcaactcaagtggtcctctatgaacctacataatattctttatattcaaattgggcagatgctttgttgttgtttctgttgtttagaagttgttcaaaattaaattttatgcaacttagtgtcctccatgggtcagataaagttatttacttatatttgatattaaataaatattttaataagttatttcactcaaatatacttatcgctaattatttatcaatacagattctgatacagagaacaaaactgttcaccyacatcatgaagatattgtctttatatgcttaagaattgaatgaacaaatgtatgttctggatagtttcttgaggttctttagatagaggggaaatacacaataatttgtagtgattaaaatcctagctttgatttttagttagctacttcaaaatactggtctccatcatagtgtgaaatgggcattttagttacaggcttagtctccattcctttatagaactctaaaaaatgttctttctgtcatagtgcttcatcaggatgagataagatttataaaatccttaggaaattgtctaggacatca

SEQ ID NO: 459370 - DNA, 593 bp, Homo sapiens
acattgttggtccttacatttttgaaggcaactcaagtggtcctctatgaacctacataatattctttatattcaaattgggcagatgctttgttgttgtttctgttgtttagaagttgttcaaaattaaattttatgcaacttagtgtcctccatgggtcagataaagttatttacttatatttgatattaaataaatattttaataagttatttcactcaaatatacttatcgctaattatttatcaatacagattctgatacagagaacaaaactgttcacccacatcatgaagatattgtctttatatgcttaagaattgaatgaacaaatstatgttctggatagtttcttgaggttctttagatagaggggaaatacacaataatttgtagtgattaaaatcctagctttgatttttagttagctacttcaaaatactggtctccatcatagtgtgaaatgggcattttagttacaggcttagtctccattcctttatagaactctaaaaaatgttctttctgtcatagtgcttcatcaggatgagataagatttataaaatccttaggaaattgtctaggacatca

SEQ ID NO: 459371 - DNA, 564 bp, Homo sapiens
tcctttcatttaagagctaaagagttgttatgactaggaaagttactacaaccggcccccattgaaagaagaggtgtagactgagcacacccagtrtatggaaatccatgattagagaagaaagcctagtatatggaattcagtaacatttattaagattgaatattgtgttgctatttgcatatatacaaacatttgtgcctgtattttgaataaattataattttgctctacatgtataattcttatatcccagatttaagcaacctagctatttttctccataggagcaatatttattgataatcaaaataaagaaatagagtttgcacttcaaagttttatgaatgttgtagtcattcaccatcagtaaacagtttgttttttaaataattgatctaaacaaatcacattagttttgtcaaaatagatcactcgacctggtaagaagtacttatatttctgtgcttttatatgtagatgtttgaagtcttctgaaaatggacttctgctagcacaaccttaaatctctgtaaatatattaaagttggtaaaatgctacac

SEQ ID NO: 459372 - DNA, 564 bp, Homo sapiens
tcctttcatttaagagctaaagagttgttatgactaggaaagttactacaaccggcccccattgaaagaagaggtgtagactgagcacacccagtatatggaaatccatgattagagaagaaagcctagtatatggaattcagtaacatttattaagattgaatattgtgttgctatttgcatatatacaaacatttgtgcctgtattttgaataaattataattttrctctacatgtataattcttatatcccagatttaagcaacctagctatttttctccataggagcaatatttattgataatcaaaataaagaaatagagtttgcacttcaaagttttatgaatgttgtagtcattcaccatcagtaaacagtttgttttttaaataattgatctaaacaaatcacattagttttgtcaaaatagatcactcgacctggtaagaagtacttatatttctgtgcttttatatgtagatgtttgaagtcttctgaaaatggacttctgctagcacaaccttaaatctctgtaaatatattaaagttggtaaaatgctacac

SEQ ID NO: 459373 - DNA, 564 bp, Homo sapiens
tcctttcatttaagagctaaagagttgttatgactaggaaagttactacaaccggcccccattgaaagaagaggtgtagactgagcacacccagtatatggaaatccatgattagagaagaaagcctagtatatggaattcagtaacatttattaagattgaatattgtgttgctatttgcatatatacaaacatttgtgcctgtattttgaataaattataattttgctctacatgtataattcttatatcccagatttaagcaacctagctatttttctccataggagcaatatttattgataatcaaaataaagaaatagagtttgcacttcaaagttttatgaatgttgtagtcattcaccatcagtaaacagtttgttttttaaataattgatctaaacaaatyacattagttttgtcaaaatagatcactcgacctggtaagaagtacttatatttctgtgcttttatatgtagatgtttgaagtcttctgaaaatggacttctgctagcacaaccttaaatctctgtaaatatattaaagttggtaaaatgctacac

SEQ ID NO: 459374 - DNA, 453 bp, Homo sapiens
  misc_feature (1)...(453): n = A,T,C or G
ctgtgggatctgacactatctccagatagatagtggcagatggtcaygggagtttagcttgggctagagcatttgactgtagatagtggcagatggtcacgggagtttagcttgggctagcgcatttgactgtagatagtggcagatggtcacgggagtttagcttgggctagagcatttgactgtagatagtggcagatggtcacgggagtttagcttgggctagagcatttgactgtagatagtggcagatggtcacgggagtttagcttgggctagcgcatttgactgtagatagtggcagatggtcacgggagtttagcttgggctagcgcatttgactgtagatagtggcagatggtcacgggagtttagcttgggctagagcatttgactgtagatagtggccgatgggcacgggagnnnagctngggctagagcatnngactggng

SEQ ID NO: 459375 - DNA, 453 bp, Homo sapiens
  misc_feature (1)...(453): n = A,T,C or G
ctgtgggatctgacactatctccagatagatagtggcagatggtcatgggagtttagcttgggctagmgcatttgactgtagatagtggcagatggtcacgggagtttagcttgggctagcgcatttgactgtagatagtggcagatggtcacgggagtttagcttgggctagagcatttgactgtagatagtggcagatggtcacgggagtttagcttgggctagagcatttgactgtagatagtggcagatggtcacgggagtttagcttgggctagcgcatttgactgtagatagtggcagatggtcacgggagtttagcttgggctagcgcatttgactgtagatagtggcagatggtcacgggagtttagcttgggctagagcatttgactgtagatagtggccgatgggcacgggagnnnagctngggctagagcatnngactggng

SEQ ID NO: 459376 - DNA, 453 bp, Homo sapiens
  misc_feature (1)...(453): n = A,T,C or G
ctgtgggatctgacactatctccagatagatagtggcagatggtcatgggagtttagcttgggctagagcatttgactgtagatagtggcagatggtcacgggagtttagcttgggctagmgcatttgactgtagatagtggcagatggtcacgggagtttagcttgggctagagcatttgactgtagatagtggcagatggtcacgggagtttagcttgggctagagcatttgactgtagatagtggcagatggtcacgggagtttagcttgggctagcgcatttgactgtagatagtggcagatggtcacgggagtttagcttgggctagcgcatttgactgtagatagtggcagatggtcacgggagtttagcttgggctagagcatttgactgtagatagtggccgatgggcacgggagnnnagctngggctagagcatnngactggng

SEQ ID NO: 459377 - DNA, 453 bp, Homo sapiens
  misc_feature (1)...(453): n = A,T,C or G
ctgtgggatctgacactatctccagatagatagtggcagatggtcatgggagtttagcttgggctagagcatttgactgtagatagtggcagatggtcacgggagtttagcttgggctagcgcatttgactgtagatagtggcagatggtcacgggagtttagcttgggctagagcatttgactgtagatagtggcagatggtcacgggagtttagcttgggctagagcatttgactgtagatagtggcagatggtcacgggagtttagcttgggctagcgcatttgactgtagatagtggcagatggtcacgggagtttagcttgggctagmgcatttgactgtagatagtggcagatggtcacgggagtttagcttgggctagagcatttgactgtagatagtggccgatgggcacgggagnnnagctngggctagagcatnngactggng

SEQ ID NO: 459378 - DNA, 548 bp, Homo sapiens
agcctggctgggagggtctatcgatggtttcttgctcacccccgtcaccatgcagttccccttctgtgcctctcgggagatcaaccacttcttctgcgaggtgcctgcccttctgaagctctcctgcacggacacatcagcctacgagacagccatgtatgtctgctgtattatgatgctcctcatccctttctctgtgatctcgggctcttacacaagaattctcattactgtttataggatgagcgaggcagaggggaggcgaaaggctgtggccacctgctcctcacacatggtggttgtcagcctcttctatggggctgccatgtacacatacgtgctgcctcattcttaccacacccctgagcaggacaaagctgtatctgccttctacaccatcctcactcccatgctcaatccactcatttacagccttaggaacaaggatgtcacrggggccctacagaaggttgttgggaggtgtgtgtcctcaggaaaggtaaccactttctaaacaaattgcatatgctgctagagacttgaaatga

SEQ ID NO: 459379 - DNA, 448 bp, Homo sapiens
gccaaggacagaatatgctcattctgtctcctggtgtcagtatctgcttctgcagttgggcttatgagttggattctgcatctgargattcaaccaatcatggacttaaccaatcatggattgaaaatataattaggcttatcatggtcacattggtacagacttttctaaattttatttttgttgtgacataggtgtatacatttatggggtacatgagatgttttgatacaggaatgcaatgcataataaatgcatgatgaaaaatggagtatcctctcaagcatttatcttttgtgttataattttattatacccttttagttatttttaagtgtacaattaaattgttattgacgatgtcagtctattatgctagtacttattcattctaacaaatttgttgtatccattaaccatccccacctaccccttcaccacccccagt

SEQ ID NO: 459380 - DNA, 448 bp, Homo sapiens
gccaaggacagaatatgctcattctgtctcctggtgtcagtatctgcttctgcagttgggcttatgagttggattctgcatctgaggattcaaccaatcatggacttaaccaatcatggattgaaaatataattaggcttatcatggtcacattggtacagacttttctaaattttatttttgttgtgacataggtgtatacatttayggggtacatgagatgttttgatacaggaatgcaatgcataataaatgcatgatgaaaaatggagtatcctctcaagcatttatcttttgtgttataattttattatacccttttagttatttttaagtgtacaattaaattgttattgacgatgtcagtctattatgctagtacttattcattctaacaaatttgttgtatccattaaccatccccacctaccccttcaccacccccagt

SEQ ID NO: 459381 - DNA, 471 bp, Homo sapiens
gtagtaatgtgaggtgaaccaatacatgaagtacaaactacttatgttcatatagaattattgatttttttcatattcgaaaaactgttgtaggtttacatatttattcaatatatgaacattaggtgttagatattttgatatataggcatacaatgagtgataatcacaaacaatctaattattctctttcagttatttttaaatggacaataaattattgttgacagtagttaccatattgtgctatcaaatattagatcttcttcattctatctaactatattttatatccattaaccatccccactttcttcaccccacactaccctycccaggctctggtaatcatccttctactctgtatttttatgggtttagttgctttaatttttagcttccacaaataagtaagaacacgttaagtgtgttttcctgtgcctggcttatttcacataacataatggcctt

SEQ ID NO: 459382 - DNA, 569 bp, Homo sapiens
cactcagcctagttagagattatgaaaatctctcaaaccttttctacggatgtgacttctttggatttgtgtgtgtgaatttataaatagaggaatactgcttgaatatttttcaggagcctatattatcttgctctctctggtgtctgctgtatcacaggttaatattttggagatatactgcactattcttcttccrtgcctatggaatccttgtattctgcatcttttccattgttgcaaatctgtatagggtttagtatgttacctactccatttcctttatttttagccctcacaaaactatgccagttccattagcattctgggtgaggtgagatagaaacctcaggcagagaatcaaaaggttagcatgttggaggcaagtccattgctctatctctttctctggagccaaaagccttggcattgtatgccttctctcattcttgcagagtcatgccagcagaagaaggctgcctgccctttttctttgtgagtagcttccttagtcatccaacctcttccatttacttcagtgcttcaggtgggacaaaacagtaactggt

SEQ ID NO: 459383 - DNA, 495 bp, Homo sapiens
gatgagctctcaccaggcccttttaatgttatctctttgacttttggaaaatatgtcaatatttggtaatgttctctctgttttttattctctttctagaactcatattattcaggtgtgtgatcctatgcattaacacttcaattttattatttctttcagattttcatttatgttgtttttctttcttctcatagttttcttgggaacttctcactctttgaaagtcctgatacctagaatctaatcttgtttcattcatgcagccaatatctatttgkatattaactataggattttaaaatattctctgtgattttctctgtttttctctaagtttctttctgtctttcctgtattggtctctaactttcatgttaaatccttgcctccaagtctggtgattctggggtatccatttacatttgagttagatgctaaaagtctgattgcatgtggatagagctgatacactattagccctcacagaaaagt

SEQ ID NO: 459384 - DNA, 615 bp, Homo sapiens
tgcctactatgtatcacactcttttagacactagggataaaatgtaagcaaaagtctttgctcttgtgggacttacattcattgaaaatggctaaaattatattctgattgacagccagttatggtttactacataaattaaattcgtaaaggagtgtttacgaattaaattacgaattaaattcgtacagagtgttctaggccagggagagcacagattttgttaagtagtaaagataagcagagcgaggaggacaacagatcagagagacaatgagaccttagcaccaatttagagacactggagacatacaaactcttattatatatgaaccakatcccttctccctctgccactgcatttggtacatcctaaaaagaaccaagaaggatgaaggctgaggtcctgacatttgttacggggacctatagaaaaattggaaagtgaaaagaagctacatagattactcctgtaagcacaagtgagaattctcagatattttattggaagggaacattggagaaaaatcaaatctggacttctgtgagataatcaagtgagaacctggcttgttgagatttggaattacagtttactgatatgttttcaatgtt

SEQ ID NO: 459385 - DNA, 575 bp, Homo sapiens
gaatctggctctatttagttgccacataaaaacccatttccactggattagatctggattataagatttatacyaggtatagctggaaaggaaaagatataaagtgacaaacttgaggaaagccatgacaaagtcattgacagaagacaaggtttgaaatttggagagattttgtctaaacaagaagctcctggtgtctgagacagagtagaagtagaagtcaaagatggagtctgatgtcctgagctgggtggaggcagtccaactaatccacacactcacgatgagctcactgatctacatagacaagctataaaaacacaaggctcagatcaactgccttgggacctgctttactcattcccagcatgctttcacattaatcctgttgccactgaagaagaaactatcttccaagggctctaaatgtcatttttatgtttgcctggtctgtcctagattctagaagaaaagtcatctgatagccacagtgctgtggctaatataagagcagatctttggcaacagttaatgaggtgtctcctagacatcagtgaatagcctgcaagatttgt

SEQ ID NO: 459386 - DNA, 437 bp, Homo sapiens
aacatttaatcttatagtaagaatgttaattttagatatcaggagtccaagagcaaagtttatttattctaggcctacaagatgtgaattttttttaacctgtgtttagcaaccacagtgatggtgagcataggtagagaggkggctttgtcataaaaccaatacaataatcctaaggaatagtgattgattcattgatccacccatccattcatcatgtcatgtcccatctatctatttttgtcagcttgggctgctattaaaaaaataccatagactttgtggcttaagaaacaaacgcatatttctcaccagcatgaagactgagaagtacaagatcaaggcattgacagatctggtgtctgatgacgacaatcttccaggttttcatatggccatcttcttcttctatcttcacatggcagagggaaagagag

SEQ ID NO: 459387 - DNA, 335 bp, Homo sapiens
aacatttaatcttatagtaagaatgttaattttagatatcaggagtccaagagcaaagtttatttattctaggcctacaagatgtgaattttttttaacctgtgtttagcaaccacagtgatggtgagcataggtagagaggtggctttgtcataaaaccaatacaataatcctaaggaatagtgattgattcattgatccacccatccattcatcatgtcatgtcccatctatctatttttgtcagcttgggctgctattaaaaaaataccatagactttgtggcttaagaaacaaacgcatatttctcaccrgcatgaagactgagaagtaca

SEQ ID NO: 459388 - DNA, 609 bp, Homo sapiens
gaaagaaaaatatcccaattgcaaaaggacaatcacaaaggaagctgtgcactgccaacttgtctctttctaaaccacacggagcagagaaaaaccatgtctcgcaaaaaacattttctttgaggctaggcacggtggctcatgcctgtaatcctagtactttgggaggctgaggcaggcagatcactagtccaggagtttgagaccagcctgggcaacatgacaaaaccctatctctaagaaaatacaaaaaattagccgggtgtggtggcrcgcatctatagtcccagctactcaggaggctgaggtgggaagattgcttgagcctgggaggtcgaggcttcagtgagcagagatcacaccactgcactccagcctgggcaacagagggaaaacctgtctcaaaaaaataaaacaaagaaaaaaaacccattttcttcaatgcataaagaagttatagaaaaggtagagtgatttgggaagcaaacaaaggctttctccctaagaagttaaagtcatagtagactgcctacccagacttctggcagtacattagttgtagtaggtgcaaattacctcataagtctttgtatctgaaaaatacgttta

SEQ ID NO: 459389 - DNA, 574 bp, Homo sapiens
acttggtgattaattcagcatgctcttttagagggttaaataaccaaggaacaaaataaataattatcaggcaagcgtgtatgttagattttaagaagatatgaaggtatagtatatttgtaccaccaaagatgctagaactgaaaataagagcaataagtaycaggaactctgtcaattaatcccagccagttatagagagagaaaaatggagggatttgctggggaagtggcaaggtggtgaggtgggaccagaaagtgagtccttcatattcttagattttcatttgctctgtttttttttgtttttgtttttgttttttttcagaatacatataaaggatggacttaactttaaataaatgctacaaaagattggcacagaccttttaagagtgacatcaggctaaaatccagaataaataagagtgtaaaaaatactaaaaaataatagtttatgaaagtgaaggagagacgaatgatttgcttatgccaaaaagataataaaggattttccactgctggcaataaggtggcccagatactgtaatgggcactcccactgcaatacaag

SEQ ID NO: 459390 - DNA, 574 bp, Homo sapiens
tgcttggttgaatagatggtagagatccactttgggctcaaataaagtttttkttttttttttgcttttattataggttcatggttacatgtacaggtctgttatgtaagtaaattgcatgccacaggggtttggtgtaaagattattttcttacccaagtaataagcagattattttgttacccaagtaataagcatagtacctgataggtagtttttcattcctctcccttctactcatcactctcaagtagccctggtatctgttgttcccttatttgcatccatgtgttctcaatgtttagttctacttataagtgagaatatgcattatttggtcttctgttcctgcattagttaatggcctccagctccatccatgttgctgcaaagaacatagcctcattcttttttatggctgctgatatggttgggctctgtttttgcacccaaatctcatcttgaattgtaatctccagcgtccagggagggacctagtgggagatgattggatcatgggggcaattcccccatgctgttctcatgatagtgagtaagttctcatgagatctga

SEQ ID NO: 459391 - DNA, 639 bp, Homo sapiens
cactttgggctcaaataaagtttttgttttttttttgcttttattataggttcatggttacatgtacaggtctgttatgtaagtaaattgcatgccacaggggtttggtgtaaagattattttcttacccaagtaataagcagattattttgttacccaagtaataagcatagtacctgataggtagtttttcattcctctcccttctmctcatcactctcaagtagccctggtatctgttgttcccttatttgcatccatgtgttctcaatgtttagttctacttataagtgagaatatgcattatttggtcttctgttcctgcattagttaatggcctccagctccatccatgttgctgcaaagaacatagcctcattcttttttatggctgctgatatggttgggctctgtttttgcacccaaatctcatcttgaattgtaatctccagcgtccagggagggacctagtgggagatgattggatcatgggggcaattcccccatgctgttctcatgatagtgagtaagttctcatgagatctgatggtttaacagtgtttggcagtttctccactctctctctcttgcccccatggaagacctgccttgtttccccttctgcatggccttctacca

SEQ ID NO: 459392 - DNA, 581 bp, Homo sapiens
atcatctttttttttttttttttgacattgagtctcgctctgtcacccaggctggagtgcagtggcacgatctcagctcactgtaaaccccgcctccggggttcataccattctgctacctcagcctcccgagtagctgggattttaggcacctgccaccacaaccgaataattttttgtatttttttttagtagagacggggtttcaccgtgttagccaggatggtytccatctcctgacctcgtgatccgtctgccttggcctcccaaagtgctgggattacaggcgtgagccaccacgcccggcctacaaatcatcttgtacacatttccacagtaataaatttcacttctcaaaactaaaggggctcacattcagggggaaaaaaacattggctgcttcttaccaagcctctactcatctactccatacatgccagaaagcctttcttacaatcatcacttttctctatatccccaagtgcttactaatccttaaaccatactggagaacctgtttattttctttaaaatatataatgaacatcattctacatcaaggaatgaacagtattcatttt

SEQ ID NO: 459393 - DNA, 581 bp, Homo sapiens
atcatctttttttttttttttttgacattgagtctcgctctgtcacccaggctggagtgcagtggcacgatctcagctcactgtaaaccccgcctccggggttcataccattctgctacctcagcctcccgagtagctgggattttaggcacctgccaccacaaccgaataattttttgtatttttttttagtagagacggggtttcaccgtgttagccaggatggtttccatctcctgacctcgtgatccgtcygccttggcctcccaaagtgctgggattacaggcgtgagccaccacgcccggcctacaaatcatcttgtacacatttccacagtaataaatttcacttctcaaaactaaaggggctcacattcagggggaaaaaaacattggctgcttcttaccaagcctctactcatctactccatacatgccagaaagcctttcttacaatcatcacttttctctatatccccaagtgcttactaatccttaaaccatactggagaacctgtttattttctttaaaatatataatgaacatcattctacatcaaggaatgaacagtattcatttt

SEQ ID NO: 459394 - DNA, 581 bp, Homo sapiens
atcatctttttttttttttttttgacattgagtctcgctctgtcacccaggctggagtgcagtggcacgatctcagctcactgtaaaccccgcctccggggttcataccattctgctacctcagcctcccgagtagctgggattttaggcacctgccaccacaaccgaataattttttgtatttttttttagtagagacggggtttcaccgtgttagccaggatggtttccatctcctgacctcgtgatccgtctgccttggcctcccaaagtgctgggattacaggygtgagccaccacgcccggcctacaaatcatcttgtacacatttccacagtaataaatttcacttctcaaaactaaaggggctcacattcagggggaaaaaaacattggctgcttcttaccaagcctctactcatctactccatacatgccagaaagcctttcttacaatcatcacttttctctatatccccaagtgcttactaatccttaaaccatactggagaacctgtttattttctttaaaatatataatgaacatcattctacatcaaggaatgaacagtattcatttt

SEQ ID NO: 459395 - DNA, 581 bp, Homo sapiens
atcatctttttttttttttttttgacattgagtctcgctctgtcacccaggctggagtgcagtggcacgatctcagctcactgtaaaccccgcctccggggttcataccattctgctacctcagcctcccgagtagctgggattttaggcacctgccaccacaaccgaataattttttgtatttttttttagtagagacggggtttcaccgtgttagccaggatggtttccatctcctgacctcgtgatccgtctgccttggcctcccaaagtgctgggattacaggcgtgagccaccacgcccggcctacaaatcatcttgtacacatttccacagtaataaatttcacttctcaaaactaaaggggctcacattcagggggaaaaaaacattggctgcttcttaccaagcctctactcatctactccatacatgccagaaagcctttcttacaatcatcacttttctctatatccccaagtgcttactaatccttaaaccatactggagaacctgtttattttctttaawatatataatgaacatcattctacatcaaggaatgaacagtattcatttt

SEQ ID NO: 459396 - DNA, 535 bp, Homo sapiens
tgttaggtcttgaattgggctttgaaaaacaggtaaatttaacaagggtaaagaaacattctaggccagatgaacacaacaagtaaagagctggcaaaagggattgatatgatgtatgtraatgacagaatagcttgtaaggagggggagatttgttggttaaattagctagaatccgtgcagatggccttaagggccgtggtggcaagattgcacttgatgtagtagcagcagcaaccattgtctggtgctgtatgcttgtctctatttcagttttgtgaactatgcctgggacctgccatgttaccaggcctgcaaattccaaatctggcatggaaagggatatggtcaggaactgagtattttagtggagcaataggttaggtaatagacccatgtctgaaagaggcaatgaggaaaatgtgcagacctaaaacatttatttctatttggatgaaccttaaaactgaccacatgatatatattctctgagattccctgaatgtaacagaaagactccacatattctgataaa

SEQ ID NO: 459397 - DNA, 576 bp, Homo sapiens
ccattcactactccctctacttaaggtaagtttcttcccatcttacacttacctggttcactactacttactacctaggcagttactcctcattcttggggtttcagctcaattgtcacctcctcatagtctttctttcctttatctctttatatatgttctctgctcctgtaccttgcaccctttatcacttcacagtgtttatttcttcrtggtacttatcacaacatgctattgtcttatttatttgtttgcatttttatctctagctctctctctctacccacttggctgtaagagccacgtagacagaagatgtgcctatttcgtcccagtaccaagcacaatgcctgatacatagtagaggctcaatgaacattggttgaatgaatgaatatgtcttatgcaagatggtgtagaattttgttgtctgctttgaggagtgtgtgtgtgtctgtgagtgtgtgtgtcaaaccttgatcccttaaaagaatctcttttggattattctctttactgatagacactaacatagacataggattatctacctactcagttaccttgattccagac

SEQ ID NO: 459398 - DNA, 588 bp, Homo sapiens
tatgtataacagaaaatccattgataatggtttacttgtgaaggagaaaaggagaaaaaaacttttagttaagattagttaatattttcccaggtcttacttacaagattcagacatttaaattaatgtaaattaaattacatttcatttttagataatataaatcgaaagcatgaactttaaaagtaatatgtagaacttcttataagaagttcaacataaaaatatcttcttatattgctgtttatcactgtaaaacaatctctcagaataaattctattcccttatgtttcagaatgacacaagtatcttaaaatttaagacccagcmtaatacacatatgggaagagaagtttattgctcattttttgtctttgaaaaaatggcactcatttctcttaactaagaatttcttgagtcttttgttacatatctatggtatgaacacttggttctcatttttcatcctagcaaaaaagagagagtaataatttaagatataccctgaaaatatttttacttttaacattagctttgtaatatccttgaagcattttccttaaaactagggttcttttgtttgcata

SEQ ID NO: 459399 - DNA, 591 bp, Homo sapiens
ttgttttacaaatttcaagaagagtttattacaatagccattccttcagactttgcaaatctctgggtagggagaggaaggaatgatctagagagaaggtcttcgttactggacaaaacacaaaagtaaactcctgcatttaggaaaattctacggaacaataaagcaatagcagaagaacatttttcatacactaaagccatggactattggaattagcatgttgagctattttagtacagattcaacatataaaagtcaacaagttattaataaaaacaatattccatcctttataacatcaacaaaaggagctgttatcrcatcacttcataagcctagatatttctatccctatgcaaaaagctattagtgagtaatgaaatattaatagcaagaatgcagttgcatctttggcatctgacaaaatttaagccattagtaaatccatttgtatttatgccaaaagaaaatccaaggatagcactcatttgctctctctctgttaagtactaactcaaaagtttgttggattattctagaaacataacatcacaagaatctgttgaccatacttatatcctgaataag

SEQ ID NO: 459400 - DNA, 608 bp, Homo sapiens
ttccttacacactgtaatgtgctatcacacctcctggagtaatgtktaagtcagtctctttttctgctacgggttcatggatagaattcccttgttcatcttcacctctaatcataataaatgctagacagatcaaaaccagctgatcacaccaaaacaacattaagttatagaaaagagtgatattcatctaattcaagtactaaaattatgtcagcaaagagcaaaatactgctaaatgtggtatactatcccctaaggaagaagtgtcatccctttcccttaccagtggcagatatgaaagcagtattctactcagtagatagaaagtattgtcttaaaaataaaataggcatttattagactgagcacagtggttcacacctgtaatcccagcactttgggaggctgaggctggaggattagttgaggccaggagtttgacacctgcctgggcaacatagtgagactctgtctctacaaaaatatatatatataaaagctaggcacagtggcattcacctgtaatcccagctacttaggaggcagagccatgagcattgcttgagcccaggagtaggctgccataagctctgatggcactgctt

SEQ ID NO: 459401 - DNA, 561 bp, Homo sapiens
gaaatttgctatccagatggaagtataagtttctacagagatatgttattgcagcagtgttctgaatctcatcgggtttgttggcaatttgcctttcaacaaagggtttttttttttttttttgataagggtggcttccacagagatttaaggagaacaataaaaattttcattttaataaataagccccatttcaacgtcccttctcctgtatcattcctctgattcttctctgtcgttatttgtttctattaggttaaatcattttacatttctggtatttaaccattttgacccacaaaaacagrgatttcatttgtttaacctaatacagaaacatcttttcaagcagaatttaggaatctacaacaatgagcaagattatattttcatctccaaaatgtacgttaagtctgtttgtttctctttatatccactgtgaacccatggtccatgccactaccttctttcacttgggttactacagtagcctctggactgatttccttacttctgctcttttctcattcttgcctctttaaggagccagaatgatctttt

SEQ ID NO: 459402 - DNA, 588 bp, Homo sapiens
ctagttgcactcccaccagtttcttctgtgggtttctacatgcttactaagacattgcctgcatctccagagtaccagcaactacttagattttctttgacctcatgcctcttttgccttttgcctgcagttatcctagatcccactgactgttcttctcttacctacatcattctaggctgtctctggccccatgtctttatgtccctccctgactcttaccattacccttctggttaacattagaccaaacctgtggtgggcactgtggtggcaatttggaatcaacataaaacctaaaaagggtacaatggttrtagtgctccagactactcttcactcagcctttaagggtgcaggactctaagactagaacagttctttgtacataataggtattcaaaactactagctgaacggaatgttctgtcatatatagcaggagtccccaagtccctaccgtggccaggaaagcaggaggtgaggggccagtgagcaagcaaagctgagctctacctcctgtcagatgagcagtgggattagattctcacaggatcgcaaaccctatcgtgaactgcacatgcgagg

SEQ ID NO: 459403 - DNA, 557 bp, Homo sapiens
ctggggccacactgagctgccctagcttggtgataaaacctgtgatctcatttgaggatgaaaggatagtaagccactttcatgtcactattcttgtttaaacaatattcagccattacctggaggctaaataacagttttmtcattgatgttctttaatttcataaagcaattaatctaaactgtaagaacccatatattaccctcttgaatcccaataaagctgtttatttttttgagtaagaaaacttttaccaatagctttttttaggtttctttcaattactctttattttttaaagtatgcataccttccctagattattctaaggaaagaggaagagaggccagtcaagaaatttttgcaatagtcttggtttgaaaatgactaacatctgagctaataaaatggtgctcagtgttcacatgtcatgcatgaggtgcatgaggcgttatctcatcccaaccctgtgggttctataactatcttgattttaggaatgagaaacagagaggttacagaacttgtccaaagtcatagatctagtcaacagagg

SEQ ID NO: 459404 - DNA, 557 bp, Homo sapiens
ctggggccacactgagctgccctagcttggtgataaaacctgtgatctcatttgaggatgaaaggatagtaagccactttcatgtcactattcttgtttaaacaatattcagccattacctggaggctaaataacagttttatcattgatgttctttaatttcataaagcaattaatctaaactgtaagaacccatatattaccctcttgaatcccaataaagctgtttatttttttgagtaagaaaactttkaccaatagctttttttaggtttctttcaattactctttattttttaaagtatgcataccttccctagattattctaaggaaagaggaagagaggccagtcaagaaatttttgcaatagtcttggtttgaaaatgactaacatctgagctaataaaatggtgctcagtgttcacatgtcatgcatgaggtgcatgaggcgttatctcatcccaaccctgtgggttctataactatcttgattttaggaatgagaaacagagaggttacagaacttgtccaaagtcatagatctagtcaacagagg

SEQ ID NO: 459405 - DNA, 557 bp, Homo sapiens
tttcttactgtaaggtctgcagactaagagaccagggtagacacgatggaggaartaacttagtctgttaaaagcccacaaatcaccaaactctgtttctgcaggaactcctagaacaagtcaccttgcatgtcactgctgcagcttagagacctcggtccacctccagggcctgatccctgtcatttgcatactaccaatcaaggaataagaactacatctcaggatctgaagctctaaaatgcatctgttcatgtgcatgttgcagagaccagtcagtattttggtggaaaacatcagcccaatctctacctaaaggactaccatcagcaccaggatccattcagggtatgaaactgaatactgttaggaaacctggtccagaaaagccaaagcaactccaaatttagggaagtaaatgtgttttcattgcgtgtggtttcatgcttgtaaatgaggccacaaagttaaacttcacttaggagtgataaaagttgttcctccacacacacaaaaagcatccaaatagaagatgccttatctgcagacataatcct

SEQ ID NO: 459406 - DNA, 554 bp, Homo sapiens
accttgcatgtcactgctgcagcttagagacctcggtccacctccagggcctgatccctgtcatttgcatactaccaatcaaggaataagaactacatctcaggatctgaagctctaaaatgcatctgttcatgtgcatgttgcagagaccagtcagtattttggtggaaaacatcagcccaatctctacctaaaggactaccatcagcaccaggatccattcagggtatgaaactgaatactgttaggaaacctggtccagaaaagccaaagcaactccaaatttagggaagtaaatgtgttttcattgcgtgtggtttcatgcttgtaaatgaggccacaaagttaaacttcacttaggagtgataaaagttgttcctccacacacacaaaaagcatccaaatagaagatgccttatctgcagacataatcctatcacaaggtaccagttatgtttctactcttgggatgacctccatggagragcctaggcaaatttcctttatgcccaactgttaggcaactttcagtgctcgtaggctgttgcctctcc

SEQ ID NO: 459407 - DNA, 553 bp, Homo sapiens
acataataaatggtacatcatttttagctgtttttattgtttcaggaggcaggaggcattttctttatcaaagcattcattaaattcctactgccattttagcaaaaggaatgtttattgaagttagatttctttactttgttaaagagatcccctactttaggacctttcctggattaacaatcctattaatttacatttagcactcagggattattggtatataaatgttttagttatttcttttgaattttaatccaatgctatatttatttttaatcatacatgtattttaagtatgaattttcctccttaagaactgaggggcrgggggcggaaatccacctgcaatgcatttgcagaagaatgctcaattagaaagatcttcaaacttgccctagcagcacaagtatccttagatcagttttcttcaatgtgcctcaaccaagaaaatgaccttttccttaattacctattctaaaggtggtgatcaaaatttttaagtggtcagatatcaaatgtattgttccgaaacaaaatgagaggctttgtt

SEQ ID NO: 459408 - DNA, 503 bp, Homo sapiens
aattgtacctctaagaagctgcaagactaacctaacttataccagcaggagctgggaaagtatggctcccatgggtgctgaatcaagtgtgtatgtgttgggcagggggaaatataggagaatataaagaagtttattaacatgggagcattctcctataatagaggatttagcacctgggaaggacgtaagaatatgatgctaacatgcagctagaattgcttttaaagattgtaggaggtgatggtccacastaagtaaagcagagatgccacaactgccatgacagatggtggacagagaaattaaaatgctcagagaagagatcatgctacagtgggaatactatataagtctgaagaacctatcagtcaactatattctgagtgagagtttaaaggacactccacttacaaaagtgataatgcactggtgagaggggtgctggcattgttgagaggctcagtggtagctatcctctggggccagggctgatagaaggg

SEQ ID NO: 459409 - DNA, 524 bp, Homo sapiens
gtatgttctcatctaaatgactgtataggagttcgtgtgcaccaaggtcaagaaccactsttgtaacctatcattcacagaacaaacctggcatgcctccagcctcttctttgtaatacactggtcttaagtaagttacccatgagagaagaggttgggaatagaaagaaaagaagttcaatgaaacctaaaaagattccttgtcaaccattcctcttttctcccctcagtccctagcttcacattccatctttgtgtttctcaatgccatgctcaaaaagagagttttgggggaaaatgacatttaggtagaagaggtgggaaactcaaagtgcccccaggggccaggaaagcaatacagatgagggaggcagtcttataggactgcggcacaccacagccccactagctagtcctggccaaacactagctagtcctggccaaacactagctagtcctagccaaacactcacatgcagttattcaaccccactgaccccggacaagttaatttttctaaagat

SEQ ID NO: 459410 - DNA, 582 bp, Homo sapiens
gtcattcggtatcactttttgaagagcagyactgacaagatttaaaaaaaattttattctagcaatgcagaaatggctacactgtgctacactaatcagagaatgtcagatgagaaatgcttacaactgtggccttttatattacctttattatgcaacatgaagaaacataactttttaaattgacaaagtaaaagttgtcacctttctagaaacgttaataaacccatgtttaactcaatgtgaataataattggtggagctacgaaactagcgatgggaagatagtagataaacattttgaaaaagtaccatgttctttgcaagggaagtcagaaaaatgtgtcatttcagtaaagtcaagttagttttatcaattgtattttttgccattgataaaaagcattagcagggacaatagcaaatcccagatagactttacttagaaatcaattttttagaagtataaaagcaggggtaacactggtatgacaaatctcctaagaaatacaattctgttaggaaagtggataatcttttgtgagcttccctagccaaaacaaaacaaccaaaccaaaccaa

SEQ ID NO: 459411 - DNA, 442 bp, Homo sapiens
gtgacctcaccacctatctctgagcactctggccctatttcattaaagaagtcaaagacttacagtggggagaagggagcaccaaagccatctcacaaattcagctatgttttatatcttgtctatttttttaatgcagaaaaaattctgatgtttatttctcagattatgaagatttcagatcaattgtgtctacagtccatatgctggattcrtattagtttttattccttgaacacacatcagctgtctagagggaggtggttaatggcatcctcagtgagaagcagcagccagcagggctttgaaaatgtgctattgatgttcaccaaagacaacaatccacatccagacacccaaatgctgacagggctgctgtgggtgccaggtccacacagcctgccatgaccacccctgcgcacccctctcctggccgcacatg

SEQ ID NO: 459412 - DNA, 454 bp, Homo sapiens
aacatttcagcaaatcacccgtcagaagaaaaatgtcattctttgacagaggagtgaacgttaaatccctagcgggcaggagcccgagcaccttttttgcacacagtaggaaatgcaaaaatgtctgtgggagtaaatgaagtggaaaagaattgcaaagagtgtatgagattctgtttattgtaatggaactacaaagcaaaacattccctgaaaaattgctatccctgaccctggtctccacaaatatcaatcatggaaacatctgatgatasattaatacatcacaaccgcctcttaaaagtctgaatttctgagactctggaaagaaaagttcacgaaaccatgcctatgttccaaccagcagctgtttctgaggaattagtagtaagaacacaccatatttgtgactctgatgcagaccaaacctttggatggcccctcacctgcccct

SEQ ID NO: 459413 - DNA, 544 bp, Homo sapiens
agtctcatctctgccactacttggcctgtgaccctagacattacctcatctctttggatcttaatttccttaagcataagataaagttgcagtaagaaaatgggcttcagaktctgatggatctgggtgactgggcaagttctttagcttgtcaaaccttcatttctctaatttataacataaggacagtaccttcttcctgtcaaggttgaggcaagcattagtgagaaacgtctcaaggcctggttcacagtgagtatttaattatttgcttcccttgtcctgtcctctggatattgagagctgacgccttctacccaaaggagcagcagatgtggaaatccactctttagcttgttggaggtcaggctgtttcagcttttacagggcagaactggacttcttctattctattctcttagtgatcaaagtagacatgcctagaaaaggagtgtgttggagacatcatccattacatatcacagtcactgtgagcactgtaccagataaggacctagccctgtgcaaaagcagggatgggcac

SEQ ID NO: 459414 - DNA, 544 bp, Homo sapiens
agtctcatctctgccactacttggcctgtgaccctagacattacctcatctctttggatcttaatttccttaagcataagataaagttgcagtaagaaaatgggcttcagagtctgatggatctgggtgactgggcaagttctttagcttgtcaaaccttcatttctctaatttataacataaggacagtaccttcttcctgtcaaggttgaggcaagcattagtgagaaacgtctcaaggcctggttcacagtgagtatttaattatttgcttcccttgtcctgtcctctggatattgagagctgaygccttctacccaaaggagcagcagatgtggaaatccactctttagcttgttggaggtcaggctgtttcagcttttacagggcagaactggacttcttctattctattctcttagtgatcaaagtagacatgcctagaaaaggagtgtgttggagacatcatccattacatatcacagtcactgtgagcactgtaccagataaggacctagccctgtgcaaaagcagggatgggcac

SEQ ID NO: 459415 - DNA, 544 bp, Homo sapiens
agtctcatctctgccactacttggcctgtgaccctagacattacctcatctctttggatcttaatttccttaagcataagataaagttgcagtaagaaaatgggcttcagagtctgatggatctgggtgactgggcaagttctttagcttgtcaaaccttcatttctctaatttataacataaggacagtaccttcttcctgtcaaggttgaggcaagcattagtgagaaacgtctcaaggcctggttcacagtgagtatttaattatttgcttcccttgtcctgtcctctggatattgagagctgacgccttctacccaaaggagcagcagatgtggaaatccactctttascttgttggaggtcaggctgtttcagcttttacagggcagaactggacttcttctattctattctcttagtgatcaaagtagacatgcctagaaaaggagtgtgttggagacatcatccattacatatcacagtcactgtgagcactgtaccagataaggacctagccctgtgcaaaagcagggatgggcac

SEQ ID NO: 459416 - DNA, 544 bp, Homo sapiens
agtctcatctctgccactacttggcctgtgaccctagacattacctcatctctttggatcttaatttccttaagcataagataaagttgcagtaagaaaatgggcttcagagtctgatggatctgggtgactgggcaagttctttagcttgtcaaaccttcatttctctaatttataacataaggacagtaccttcttcctgtcaaggttgaggcaagcattagtgagaaacgtctcaaggcctggttcacagtgagtatttaattatttgcttcccttgtcctgtcctctggatattgagagctgacgccttctacccaaaggagcagcagatgtggaaatccactctttagcttgttggaggtcaggctgtttcagcttttacarggcagaactggacttcttctattctattctcttagtgatcaaagtagacatgcctagaaaaggagtgtgttggagacatcatccattacatatcacagtcactgtgagcactgtaccagataaggacctagccctgtgcaaaagcagggatgggcac

SEQ ID NO: 459417 - DNA, 595 bp, Homo sapiens
ggcagcaatagaagccacgagccttcacgacattccgacatcgtcaccttttgtttgaaagaaggcaaaagaagtacgacagtgtatccttggattctgaaagcccttagtcatgagtcacaggttatgctgttgccagtgccgactgtttgatcctgagtagtaggggcatctgtagtctttaatacatttatttcctatagatatgtgacacttgagaccctataaaacaggatttgacaagggcttcccttgccactgtctatagtggtcctgcttcagtacaaatctccgtgataatttaaatggcttcctaaggcacgtacagaagaacagtgtcatgtatatgaatatggatctatatgaagctatatgtatatacatgaacacrtatatctgtacatatgaaatgtatttatacctactatgaaatgggtttttcattgttttaggagtaagagaaaatactacttggagaatcagaaagtgttgaacatctttcctaggaattaagagtaagaataaggaaggggaaagggaataagagaagaatatgcttctggttgagtttttgttttagcacaaagatacaata

SEQ ID NO: 459418 - DNA, 595 bp, Homo sapiens
ggcagcaatagaagccacgagccttcacgacattccgacatcgtcaccttttgtttgaaagaaggcaaaagaagtacgacagtgtatccttggattctgaaagcccttagtcatgagtcacaggttatgctgttgccagtgccgactgtttgatcctgagtagtaggggcatctgtagtctttaatacatttatttcctatagatatgtgacacttgagaccctataaaacaggatttgacaagggcttcccttgccactgtctatagtggtcctgcttcagtacaaatctccgtgataatttaaatggcttcctaaggcacgtacagaagaacagtgtcatgtatatgaatatggatctatatgaagctatatgtatatacatgaacacatatatctgtacrtatgaaatgtatttatacctactatgaaatgggtttttcattgttttaggagtaagagaaaatactacttggagaatcagaaagtgttgaacatctttcctaggaattaagagtaagaataaggaaggggaaagggaataagagaagaatatgcttctggttgagtttttgttttagcacaaagatacaata

SEQ ID NO: 459419 - DNA, 586 bp, Homo sapiens
cttgtaactcaccagttaatttgattgacagcagccttgggcatttcttagcactcacgtactgtattgcatggagtcaaacttccatggtaattggcttcaacaacaacaataataatagaaataataattccagagttaatttaaaggagcaaaaagaagtaagtcaaatataagaacaataaattatgggaatttctcatttgagtaagtaacaggtttaatagcttttcctaagtactgagatcattcaattgaacatctgctttccagctgtgcatattgatatattactaggtttttattcccttctagtctaaatgtatccataagtttttaggagtttcactacctgactttttgacaatgccttgattgtgaaagatataaaaatgtcaaaaattctgtaggccatattatgcccaggatattatttttcaatagrctccaaagacagatgtctatgaacaattaaaccatgcttcaaccacaccttgttccagctgggatcagagaattaaaaggaaataagccctcataatttacttattgctgaagttcctatagtttcctgactgttaatgga

SEQ ID NO: 459420 - DNA, 567 bp, Homo sapiens
agctgatgagccactgcattatcagtgttcataagatagtaattcaaaaatgctcatcatacccacaaaggaaaagcatttcttctctcttttcctaaygaaagtatggttaataaaagtatttcaccatattctaggctttatggattaaatagcttaagaagtgggatgatgtaatctgaagggaccaggtactcagcacagtcccaggactcacttcacagtggcaatctgctggcttgcaaagtaatatacaactgaagatgagacttattgattgattggtttaattttattaaatgacactaaagaaatgtgggttgcttttctgttgttaacaacgtatgtaattaggagaataccatatatgagagtgtaaagtaggacagatttggagtactcaggaaaatgagttctataaataataaacccttgagccactgaagcttttcacattctttaaagaacaccatattctgtaagatgttttcaaaattttctaatttattcttatttagagagcaatactgttctgggtatctatatactttaggtgtatatctaagg

SEQ ID NO: 459421 - DNA, 567 bp, Homo sapiens
agctgatgagccactgcattatcagtgttcataagatagtaattcaaaaatgctcatcatacccacaaaggaaaagcatttcttctctcttttcctaatgaaagtatggttaataaaagtatttcaccatattctaggctttatggattaaatagcttaagaagtgggawgatgtaatctgaagggaccaggtactcagcacagtcccaggactcacttcacagtggcaatctgctggcttgcaaagtaatatacaactgaagatgagacttattgattgattggtttaattttattaaatgacactaaagaaatgtgggttgcttttctgttgttaacaacgtatgtaattaggagaataccatatatgagagtgtaaagtaggacagatttggagtactcaggaaaatgagttctataaataataaacccttgagccactgaagcttttcacattctttaaagaacaccatattctgtaagatgttttcaaaattttctaatttattcttatttagagagcaatactgttctgggtatctatatactttaggtgtatatctaagg

SEQ ID NO: 459422 - DNA, 567 bp, Homo sapiens
agctgatgagccactgcattatcagtgttcataagatagtaattcaaaaatgctcatcatacccacaaaggaaaagcatttcttctctcttttcctaatgaaagtatggttaataaaagtatttcaccatattctaggctttatggattaaatagcttaagaagtgggatgatgtaatctgaagggaccakgtactcagcacagtcccaggactcacttcacagtggcaatctgctggcttgcaaagtaatatacaactgaagatgagacttattgattgattggtttaattttattaaatgacactaaagaaatgtgggttgcttttctgttgttaacaacgtatgtaattaggagaataccatatatgagagtgtaaagtaggacagatttggagtactcaggaaaatgagttctataaataataaacccttgagccactgaagcttttcacattctttaaagaacaccatattctgtaagatgttttcaaaattttctaatttattcttatttagagagcaatactgttctgggtatctatatactttaggtgtatatctaagg

SEQ ID NO: 459423 - DNA, 622 bp, Homo sapiens
ttagcatagttcttaaagactgcaggattttctggatgttaatgagcattggcttcaacttcaagtcaccagctgcattaacccctagtcagggaatcagcctgtcctttgaagccttgaagccagccattgacttctccttttgattatgaaagccctaaatggcatcttctttcagtattaggctattttgctaccttgaaaatttgttgtttagtctagccaccttcatcaattacatcagctagatccactgagtaacttgttacaacttctccatcagcaggtgccgcatcaccttacacttttatgttatggagttgacttcttttcttaaaagtcatgaaccaagctctgttagcttccaacttttcttctgcaggttcttcatctctctcagccttaaagtattgaagagagttargaccttggatcaggcttttgtttaaggaagggcacatctggtttgattttttatctaggccactcaaactttctccatatcagtaataagactgtttcactttctatcatttctttctgttcactggaggggcacttttaatttccttcaacaaattttgtttacattcacaacttaggtaacatgtgcaagaggcct

SEQ ID NO: 459424 - DNA, 618 bp, Homo sapiens
cagcaggtgccgcatcaccttacacttttatgttatggagttgacttcttttcttaaaagtcatgaaccaagctctgttagcttccaacttttcttctgcaggttcttcatctctctcagccttaaagtattgaagagagttaagaccttggatcaggcttttgtttaaggaagggcacatctggtttgattttttatctaggccactcaaactttctccatatcagtaataagactgtttcactttctatcatttctttctgttcactggaggggcacttttaatttccttcaacaaattttgtttacattcacaacttaggtaacatgtgcaagaggcctagtcttcagcctatctcagctttttacatgccttcctcactaagcttaatcatttctagcttttgacttaaagtgagacatatgtgactcttcctttcacttgaacccttagaggtcattaaagggttttaaactcacttaattttaatattattttgtctcatgtactagggaagcctgaggagggtggagggaatggtcgggtggtggaatggttagaatgcacacaatatttatcaaytaagtttatcatcttatataagcacagttggtggt

SEQ ID NO: 459425 - DNA, 555 bp, Homo sapiens
ccaggcaaagacctagaagatcagtcacaacaattcagatgagaaatgatgcagctgacggaagagagaggctgtgggagccaacaggcaggtatgaagatgagcatgataaaaagtcaaaattgatgggacttggtcaccactgagtcaggagagaggaaataaaagcagcggcgtgagggatagcagcagtgcgagtcccattcatcctgggacacaatgtgtttccagatcctcaagtcctgaactgttaacctattgtacaaagtgtctagaagtggaaaaatctagctgtggccaaattaaggcactggtgctagcaatggctggtgtattctaaggaattctatgttggtaggccaggaggagtagcagttccttggaaaaaaaaaaaaaagaagagaaagatggcatttcttgacatcctttyaccttttgagtcagaaagaagaaatagaaaaggctgagctaacagtcagttttcaaatagaagcttataccctgcattagtcctggccttgtggctttccaaaaatacatattataattttaaac

SEQ ID NO: 459426 - DNA, 577 bp, Homo sapiens
ctacaatgtgctcactgttcaaggggctgatgatataggaatgaacaaaatagatacaaacctccgccytcatggagcttacatttcagggaaaggacaggtaatagataagataaatgagtaaaatgtatagaatgttagatcatggtaactaagtgctgaaggaagaaaaaataaaggagggaaagggaatagggagtttccagaggtggacacaattttagagaaagtagtcaaacctggtcacactaaaaaggtgattgtttgaataaagatacaaaagaagctaaggagcaaggcataaagatacccagagagaaaaagtgaaagtttccaagcagagagagaaaagatgcaaaggccaagagatttaagggacagtggggacagaagaagactagacagagagaattagaggaggaaaagttggatatgagatcagagagataatgagtgatcacatctggtagatataagccctgctaaagtaagggctggctgctattctcagtgggattggagccattggtggctccttagctgtgaaagtgtcttagtatattttgttctgctataa

SEQ ID NO: 459427 - DNA, 536 bp, Homo sapiens
agttgtcattattcacagaacaggatttattgaaaatctacaatgtgctcactgttcaaggggctgatgatataggaatgaacaaaatagatacaaacctccgccttcatggagcttacatttcagggaaaggacaggtaatagataagataaatgagtaaaatgtatagaatgttagatcatggtaactaagtgctgaaggaagaaaaaataaaggagggaaagggaatagggagtttccagaggtggacacaattttagagaaagtagtcaaacctggtcacactaaaaaggtgattgtttgaataaagatacaaaagaagctaaggagcaaggcataaagatacccagagagaaaaagtgaaagtttccaagcagagagagaaaagatgcaaaggccaagagatttaagggacagtggggacagaagaagactagacagagagaattagaggaggaaaagttggatatgagatcagagagataatgagtgatcacrtctggtagatataagccctgctaaagtaagggctggc

SEQ ID NO: 459428 - DNA, 610 bp, Homo sapiens
gactcatgtttttataggatcattctggctactgtgtttagaatagactgtagtgaggggtgaaattggacaaagcaagaaagaattaggaatattgtgcaattatacgtgaaagaaatgatgacacccccaaaactgcaccaagatagaccaatgtagaagattagaagtgatcagtttctaaatatgccatataccattaaacttcccatattaagggatagaaagccaattgagagaacagcatgtggtgactgggtttgaaactgctttagtcacctaaatcaggagtattagccaatatatatatggaaccaaaaatgatcccaaatagccaaagcaatcctaagcaaaaagaacatagccagaggcatcacaccacctgacttcactacattataaggctacagtaaccaaaacatcatggtactggtacaaaaacagacacataggccaatggaacagaacacagaacasataaataaagccacaaatctacgaccatctgatcttccacaaggctgacaaaaataagcaatgggaaaagaactcccttttcaataagtagtgctgtgatagctggctagccgtatacagaagaatgaaactg

SEQ ID NO: 459429 - DNA, 552 bp, Homo sapiens
ttgatgaaatatcagaaatttgaactcaattatttgtacagagatgattgccacaaaagtatatctaaagacagaagtggaaagtattttgattatggagcattcaaataaacgatgacataataacatgatgaatattatgtcagatatataatgttcctaaaatattaataaatgaaatagtatgtataaattcaagtatgtatatgygattgtatgtgtgggaaaatataacaaattatcaacaatgtgtctttgattagagagtacaggtgactttttgttgttgttattgttgttggatttttgccagttttctacagtgacgtataaaatgtaatgagaaaaaaaaatccatggggttttagaaaataaagcataaaaatattttagttggctattctgcaccattaatagtgtggcaaatacaagattttgagtctaaatgatagttagattgatgtacctagaaaaatcttgagttttacttgcttatcgacaagctttattatgatattctgaaaacccagaaagacatcttcacttatgtga

SEQ ID NO: 459430 - DNA, 496 bp, Homo sapiens
aattaaggcagaaaataatattggtcacaatatgctggttttgatatgatacttctgtgggattattttaaagacaattctggggatatcaggcatgacagaaaaaaggaaagagaaattaatgaagcataaacatagtcaacaatatttttatattttagaaccagagaaagggctgagtaatattttatggggctcactatcagccctaagataaaggcagaaggaatggaaagggagagtagcatacaaggaaacagaagcagtataatrtaatagagtgggagggagagaaagtggagcagagagaaaagaattgcgtatggaggggaggggaagactgacatagaaaatgacttcagctgtcactcagggttaccactgccataactgcctacattgatctagcttaatcccctgcagtatcactcccttttcttttgctgtcaggggcaaaaatataaggggaggatattttttactagatagattccat

SEQ ID NO: 459431 - DNA, 635 bp, Homo sapiens
gaagtccaaaatccaagtgccaccaaactcagtgtctggggagggcctggtctctgcttgcaaggtgaggacttcgtgtgttctccggagaagatgaacgctttcatctcgcccagcagaagagctagaagaacaaatagggcatagctacttccctcaagcccttttttataagggtactaattcattcatgaggagtaaaaccctcctgatttaatcattctaaaggccccatcttttaatactgtaacttgagtctcaraatatgaattttgagggacacatacattctagccatggcactttcgaatactccagcatgcatctccaaaaaatacatttttctagaaaaccaaaatgccattatcaaatttagaaaaactaacagtgactccttaatgtcctctattatccaaacccatttagcctacatatgtcaccctaaacttggataagttcacacactgcattagattgtcttgttccttaaatgtctttaaatttctcctgcacaaccatctttttatttttctcataatattgtcctttggacagcctaaaactttttgttttgtggaatgtactatgtttgggttttatctgattactttctcatcgtgctgtttaatttgttt

SEQ ID NO: 459432 - DNA, 561 bp, Homo sapiens
acctgaactcagctctggttccagtggacctgatacatgtctacagaactctccactcccaaaatattgaatatacattcttctctttgccacacagcacttactctaaaattgatcacacaatagaaagtaaaacactcttcagtaaatgctaaaaactaaaatcatataaacagtctctcagacaacagcacaataaacttagaactcaatattaagaaattyattcaaaactacacaactacatggaaattgaacaacctgatcctgaataactcttgggtaaataataaaattaaggtagaaatgaagacattttctgaaactaataagaacaaagagacagcacaccagtatctcaaggatgcagctagagcagtgttaagagggaaatttatagccctaaatgcccacatcaaaaagctagaaagatctcaaattagcaacctaacatcacaactaaaagaactagagaaccaaaagcaaacgaaccccaaagctagctgaagacaataaataatcaagatcagaggagatagagacatgagaaacttcaaaaat

SEQ ID NO: 459433 - DNA, 485 bp, Homo sapiens
ttaaaaccacaatgaaatatcctctcgtcctagttagaatggttactatcaaaaataaaaaataaatgctagtgaggattcagagaaaaggaacttttatacactctgcttgagaatttaaattagggcagccatcatagaaaataatctggaggtttctcaaaaaactaaaaatagaactacaatattgtccagcaatccctactgggtatttatcaaaaggatatgaaattaatatattgaagagacatctgcatccccatgcttactgtaatgctattcacaatagccaagaaatggaaaaaatctgagtgttcataaacggatgaaagaataaataaaatgcagtacatatacacaatgagatactattcagtcataaaaatgaaaaaaaattgttaatcagatggaattccagtaatttaaaggccataatatgacttttattagtgtattratgactaactcctcttattatattaaaa

SEQ ID NO: 459434 - DNA, 398 bp, Homo sapiens
ccttcctttgcccatttggcagatgaagttactgagacccaaacatcatagaaccacaggctcccacagaatgccactgttagggggaaatctagaaccacgatgttgtccaggggttcacaacaggcagcagcactgtcccctagaagcaggtagcaaagaccagggctgttgtggtggtaacggagcctaggtatgctactgacatttaacacacacggcctgggagtgctaaatgtccgacatggcagaggacagttctgcacagtgaagaattgtgccacccaacacagaaggcactgccaacagtgccttctccccaattatagrtgaagaactgaaatccaatgacgaaaagtgatccggtcaaagttacggtggcagaaacttccagttgc

SEQ ID NO: 459435 - DNA, 473 bp, Homo sapiens
catgtctgggttttttttaagtctaagttttaaaattttggcagggaataagtaactataaaaagtgacatagcaagtctgaaaaagaaccaaatagaaattctagctctgaaaaaaaaaaagttaggatctcaaagaatagggttaacagcagtttatatacagctgaaaagagaattagtgaactagaaattaggtcttaagaaattatctagaatgcagcacagagagattaagaatgaaaaatatagatgcaattataagagacctagaagacagagttagaagacttagcacacttttaagagaagtctcaggagagaagaaaaaacatgcagcagagcattccytactctatcctatgggttccttgatgatagtgaggtgtttttttccttaagtaagtagaacactggtcacagccctggtagagaaagcctaaacttttccttctttgtcaaatccctctccta

SEQ ID NO: 459436 - DNA, 536 bp, Homo sapiens
cagcttggtgtactccccactgccccacactgcctctcctgggggccttgtcaggaggcataaacagggcagatctcctggctggcggatctgctgcagcactgaccacagagctactacacagggcactctgcagggtgctgctgtcactcattatctcaggaagccttcagcaaccagcactaccagtacatagatgctattaactctrttttacagataaagaaactgaggttcaaggtccaacatacacaggcccaaggacacaccactaggaagtgctcagaattcagcacaggtcagtctgactccaaagcctagactatgcctgccgcaccacatacgctgccttcccgtgcctgtgtactccacaccaacaaggaccaagtctctttcacatccatacctggcccatagcaggttctatttaagtgttggttcatgaaatcattattcttaaggcctaaggcattaaaagaaacaaaaaaggatatttcatacagatagaagttacaattcaaccagaagctataata

SEQ ID NO: 459437 - DNA, 448 bp, Homo sapiens
agataaacaaatccacctgaaactagaaagagaaggcagggaggagaataaggtagagataaaacagtccagattgatggacagtcttagagcaagaagacagaacaccacagataaaaactaaaagaatgtaataatgtggtgctaatattaggagcaagatattgaggaaggtatctttgtaacaaacttgggaatcctacagttagtgttgatcatcattaatcttagttaaaacaagcaggtgggccaggcgcagtggctcacgcctgtaatcccagcactttgggaggccgaggtgggcagatcactagtggtcaggagttcaagaacagcctggccaacatggtgaaacccagtctctacyaaaaatacaaaaaaaaaaaattagccgggcctggtggcacatgcctgtaatcccagctactcaggaggctgaggtaggaga

SEQ ID NO: 459438 - DNA, 557 bp, Homo sapiens
tttccacttcattaaaaagtcttcaataatatttaaaaaggcatgtcattgtattaaaygtttccctccctcccttaagttgctcccaattgtgtgttttgtaccgttggcttagcagtttcaccaaagggaggacctgttgttcaccttggagcggtgaatatttgtgtatatctgtcatattctgctctagtgttgatagattcctagagttggagttagaggctcaaaggccaggcatattaataaatttcttatatatttgtcatattgccagcttgtttcaccagaatggtggtctttgccttgttccagccctgggcagcttaggaaagtgcttttctccacagagggacagctttgaggtctcgatttaagtttctccaaaagaaaaaactgggctctgaatgtgctgttgcccttgtgtgtgttggtgcattataagttacatcaagcgagtaggagtagtgaagggaaaaaggagtgagtgtgggtgttttcaaactctctgcttagcagactgaaagccagtgtcatctcagtgttagggggtggtg

SEQ ID NO: 459439 - DNA, 557 bp, Homo sapiens
tttccacttcattaaaaagtcttcaataatatttaaaaaggcatgtcattgtattaaacgtttccctccctcccttaagttgctcccaattgtgtgttttgtacmgttggcttagcagtttcaccaaagggaggacctgttgttcaccttggagcggtgaatatttgtgtatatctgtcatattctgctctagtgttgatagattcctagagttggagttagaggctcaaaggccaggcatattaataaatttcttatatatttgtcatattgccagcttgtttcaccagaatggtggtctttgccttgttccagccctgggcagcttaggaaagtgcttttctccacagagggacagctttgaggtctcgatttaagtttctccaaaagaaaaaactgggctctgaatgtgctgttgcccttgtgtgtgttggtgcattataagttacatcaagcgagtaggagtagtgaagggaaaaaggagtgagtgtgggtgttttcaaactctctgcttagcagactgaaagccagtgtcatctcagtgttagggggtggtg

SEQ ID NO: 459440 - DNA, 517 bp, Homo sapiens
cacccttttaccaacctgtggcattattttcttgctgttgatgcccaagcctttccttatttcctcatacaaactctgatgtgagtcctgactggsttagctatttgtgattgtccctattgtaaagatatgtaaagtatggtctggggttccctgtgggaagtcccaggatccttccaggggttctgagagatcaaaactatttttatactaaggtcaagacattttttgcccttttctctcttattctttcataaatttatagtttatgagactggagctgtttgggagaagtagtttcttcaaatgttctctggtggtttcattgggagtttagtatctttttagcttttctgctaggtctgacatctatctggcttaccgtcttttagagacaatgcaaataggtacttttttgtcactgttcggtgacttatgtcaaaatgaagactgtcaaaaagtatttttccccctggttggctttaccatgctcctctcagattgtaagagtatggca

SEQ ID NO: 459441 - DNA, 517 bp, Homo sapiens
cacccttttaccaacctgtggcattattttcttgctgttgatgcccaagcctttccttatttcctcatacaaactctgatgtgagtcctgactggcttagctatttgtgattgtccctattgtaaagatatgtaaagtatggtctggggttccctgtgggaagtcccaggatccttccaggggttctgagagatcaaaactatttttatactaaggtcaagacattttttgcccttttctctcttattctttcataaatttatagtttatgagactggagctgtttgggagaagtagtttcttsaaatgttctctggtggtttcattgggagtttagtatctttttagcttttctgctaggtctgacatctatctggcttaccgtcttttagagacaatgcaaataggtacttttttgtcactgttcggtgacttatgtcaaaatgaagactgtcaaaaagtatttttccccctggttggctttaccatgctcctctcagattgtaagagtatggca

SEQ ID NO: 459442 - DNA, 566 bp, Homo sapiens
catgtttagttacagcattttcatttttttttttttttaaccacagatggcataaaattcatctccagagagacttctaactaaacctgagtatgaatttttatctctcagtttcttatgcartttttcactgcatacctacatagccttcttttggaagttgttttattgacttttaaattttgcttttgtgtgttttacttgctgcttctcttgtcttctccccagctgatttttcttaacaaaaaatctctagagatgaagaaccgtggcagcacagtagcatcttcattacatttatgatttgcattcccagctcagcactttgcaatgcatattttgcaaagcaagtttaatttgctagaagtcagattgagatttagcatctatctttttaccatctgttatatgccaggtataatgctggacacttgcacacttatttcattttatcatagaaaattaaaagagaaaattatatgattattaagagccttgaatctcatactaggggaagtagtcctctgggttttatgtgatggtgggatgagataactgatgttaaa

SEQ ID NO: 459443 - DNA, 543 bp, Homo sapiens
tgttgggcagtgtggtagcaggaggggagacttcatgagcaaacttaagttgtgatggagtttagctgtgggggtccgacagcacgaaggtcctcaggtaggttcatgcctgacacattcacgaaacaacaaaaggaggtcatgtggccaaggtgtagagcgtgtgaggaagaaraggttggaaaggtggcaggagccagattatgcatggcctgctgactgctgtcaagactttggcttttactctaaataatagggagtctttggagttttgttgttttgggttttccatttgtttgttttgttttgtaattttgagaaagacaagcagcactgaattaccatatttacacttaaaacggatccctctggctgctctggaaaatagattgtgagagtatgaggtggaaagagggtgcccagttaagaggctgttgaagtaagtagtttaggtgagatcatcatttagttggtgatgtacttcctgtgtaaaattgaaaacatcacacatttgaacaaggttgaaattaaacatgagattgt

SEQ ID NO: 459444 - DNA, 401 bp, Homo sapiens
tattctctaaaaatgtttaaattttaggctctatctttagggatatagtccatttagaggtatttttttgtgacttaaaatatatgtcaaaatcattttttaaaatatatgaagattatattttccagcaccatttttacrtccttcttcactgaataaccttgacagctttgtcaaaaatcagttgtgtatctatgtagatctatttcttcactttttttttttttttttaaatgaagccttgctctgtcgtccaggctggagtacagtggcatgatctcggctcactgaaacctctgcttcccaggttcagtgatactcctgcctcagcctcctgagtagctgggattacaggtgcctgccaccacacccagctaatttttgtatttttagtagagata

SEQ ID NO: 459445 - DNA, 525 bp, Homo sapiens
gttagaatagaggtgttcagttgcagaatgtaactattgcacttcatttttacataatgatattattaaaaattgtaagaactttaaatgtatttgcataaaagaaaaacatttgaaaaaacgtagatctactctaaagactgtataaacaaaaagctcaaattgcatatttgtggtcttattccatttatttatttatttctatttatttattaacccttcttttttccaaaaaaggttagaraaaaggtcagtttcttgaaaggttggggtaatgggcatttaatggcagccatgttttgacatatccaatgaattccgtgaatttgtattaggttggtcaaagacctgcctttctaaagtttggcccttataaaaaatcatttctatcttaaataggcaaattcttgtaaaatcctactttatttttcttttgaatagtaacactgtttaacgtggatcactgtactcagaaaaaaatctttgcaggcttatgtgaccagtgcagcagtaagcattaaggta

SEQ ID NO: 459446 - DNA, 527 bp, Homo sapiens
tgaatttgtattaggttggtcaaagacctgcctttctaaagtttggcccttataaaaaatcatttctatcttaaataggcaaattcttgtaaaatcctactttatttttcttttgaatagtaacactgtttaacgtggatcactgtactcagaaaaaaatctttgcaggcttatgtgaccagtgcagcagtaagcattaaggtagcgtattcagtactggtgatacttaaggaacaggataatatagtcaagaagattcacttaaaaggaaagtgtaattaagttgcaagaccatatttgaatcacagctcagatacttataggctgtgtgaccttrggagattggttcaacttctctaataccactaggtttaacttttctaaggagaatatggatatagtggtgatacccatttcataggattaatcaaggttcaatgaggtgattttcaatctcctctcccagattaagggtagagggctggggtatgggcaggaggctagcactgtatgatcctgggtggaca

SEQ ID NO: 459447 - DNA, 555 bp, Homo sapiens
cttagctcaaagtatgccatcaagaattacctgttactgggtgtgatggtgcatggttgtggtcccagtgacttgggaggccgaggtgagaggatggcttgagcccaggaggacaaagctgcagtgagctgtgattgcccccactgtacccagcctgggcgtgatggtgcatggttgtggtcccagtgacttgggaggccgaggtgagaggatggcttgagcccaggaggtcaaagctgcagtgagctgtgattgcccccactgtactccagcctgggcaacatagcaagaccctgtctctaaaaataaataawtaatcatttgttcatttttttctcatgccttttttcttatttatttatttatttatttatttatttattttaaataagccttagctgaaaaacctccctgaaacatttataatgcaaaatgaaatgaaaccatcattaaatttaggttttgctgctgattagggacatgatgctgggcaagtaattcaacctctttcagtcttaagtttcctcatctggaaaataaagaaggcaggggttg

SEQ ID NO: 459448 - DNA, 615 bp, Homo sapiens
ttaggttttgctgctgattagggacatgatgctgggcaagtaattcaacctctttcagtcttaagtttcctcatctggaaaataaagaaggcaggggttggattactgatatataaagttccttgtctaccaaacatccatttttccatgtttctatgatctagatagacagtagaatttatatcctagtgattcactttttttccctcacacatacaaaaaaaaacctaagaaaattcaatgcctgcartgctcaagacagtatagagtagatattgccaccaagtacaaatggatacacaaatagtatacatatcctattaattgtgatcttctccttacatctgtcatgttttgacttaccaaatattctctttaagagggatttttattacagaaaacaagatgcatgtgagtttatctcagagcctgtgatacatcaaccacttttgcttcttccttgatgtgacacaagttttctggtcatttccacatgcgctgttttactcacctgctactcagttgtcaggctgatggtcacaggccttccgtgacaaggagttccactgtcatacagagacattaaattgaacaacttctatcacaaggagttaa

SEQ ID NO: 459449 - DNA, 373 bp, Homo sapiens
attcatttgaagacaacaatgttcatgcatttttttgttacattatctgtatgtatcacaagcaaccatatttcctcaattggcaaatcaggttggccgtttcctggtaaattaaagcccatttggaatttgaatagatcttattttgaacaagccttttccccgtttctgctctcaaattggccacattggcttagagcatacccatctaacctgcacttagttttggatagacagaatttggagacttgaattaaaaaataaggaagctccatgttcacctcaccccaccccaaccaaagsagtaccactcttatctgaattcctgatcaagtgctgctaaataattttaaaaccactgtactacaaataa

SEQ ID NO: 459450 - DNA, 529 bp, Homo sapiens
ataattctcaaagttctcttaggtttccaattttagcattaaaattaaattaaaattaatgctaattttattgtgaagattttgatgaggttccaatttatatcaatgattgctaactcccatatcaacccaaacttgtcttttgtagcacccatcatactttcgaagatttgctaagtttctatatcccagatagactgtaaactccatrtgatcagagagaccttgtgctagtcactgttctattccagctacctaaatactttgtcccagcctgttactccactgggtcatgtagccactctggtgagagcaagcaacggggagagattgcagtgtcaggtccagacagctaacatttcagaaatttaagcctactaagaaaagttaccaaaagaataagatctgatattatctaggccatttttttttttagtttgctttacttaattttgtttcttttccttaacagggaaaagaaacatgttagagggatgtgttcatttgaaggtcattgcattgaagcata

SEQ ID NO: 459451 - DNA, 607 bp, Homo sapiens
atcttttctggtttgtgagaaaagggtaaaaaatcaattctttgtcatgaaacatagtcttctaaagggaattattactctaaatggaccacctcaaggcaaagaacaaagggttttcctagtttctttcttaggtaaatgattcttctaatactaattctgaatkctgcctcttgaatagcttatagtttagagatagaaagaatattacagataatgaagccctggtactggattctttttagagaggaggaacagatccagaaggttaaggcaattgcccaagatcacagtgccatctagtaggagatctggaatgagaagttcagtctttgagactttgcctggtgctcatactgctctgctctgctgtcctttcaccaagcagttactgaaaacagttgaccacttccaccatctatttttagggttatcttcttctgctggatggataaacactcagaaccccaaagcagtgttctaaggtgagtccttcatttagtaactatttatttctcagaagcttatgccattcttaccattcctacaaattagcacctactctctttcctttgggatgccaggcatcacacagctacccaatggc

SEQ ID NO: 459452 - DNA, 607 bp, Homo sapiens
atcttttctggtttgtgagaaaagggtaaaaaatcaattctttgtcatgaaacatagtcttctaaagggaattattactctaaatggaccacctcaaggcaaagaacaaagggttttcctagtttctttcttaggtaaatgattcttctaatactaattctgaatgctgcctcttgaatagcttatagtttagagatagaaagaatattacagataatgaagccctggtactggattctttttagagaggaggaacagatccagaaggttaaggcaattgcccaagatcacrgtgccatctagtaggagatctggaatgagaagttcagtctttgagactttgcctggtgctcatactgctctgctctgctgtcctttcaccaagcagttactgaaaacagttgaccacttccaccatctatttttagggttatcttcttctgctggatggataaacactcagaaccccaaagcagtgttctaaggtgagtccttcatttagtaactatttatttctcagaagcttatgccattcttaccattcctacaaattagcacctactctctttcctttgggatgccaggcatcacacagctacccaatggc

SEQ ID NO: 459453 - DNA, 480 bp, Homo sapiens
tatatttttcctattaccctgtcttgttgtcaatttgttgaaattctccaatgatgtaatcatttcttaagtgctttgcctctggtatatctaaagaaattagtcagtgtgtatagttgctgccatttattttggaatgatttgagaatcatctgggactaaggaccggatcaaatgtcaccttctctgagggtgtattgagaarctgttcttgatacccccagactggaccagatgctcactttttggcgcctgtgtacactgcacttccctctatcagaaccctcatccctctacactattattgtttctttatgagtttttctcctttgttataaggtaggttcttttaagacagattttttttttttgtagtcagacacacctgggttcaagtcctgactctgtcacttaccagcagttcattttgtggcagttacttaaactatctgaatttcagctagctcatctgtaaaatgg

SEQ ID NO: 459454 - DNA, 517 bp, Homo sapiens
ttttatactgccactgctctctatatttaattatattttgtttttctcttagcaattagtaaagtgccagtctgtgtcagatgtggttccaagagaagatgtttttgtccacacttgagccaaagtgttaaaggaatagcagcacacttagggtgggaggtgggggagagtggagatggaaagtaattaatatttattgagcaaccatcatgtacttttttagacatgatctcattttatcctcacagcaaccctgcaaagtatattctaaataaagaatcaggtttagccaggctaggtaacttgctcaaatcctagagttagtaartggaagaacttggatttaaaccgtggtctttccacacaaaagcatcctgcctcccatttctaggagtatcatggtggctggtgatagcaggagtgatcaaagccagagaactcaaggggaaggtaacaccttaagacggtgtcagacccacccattctctatctcttcccctctctatctctcgtttct

SEQ ID NO: 459455 - DNA, 534 bp, Homo sapiens
tccttgtgctaagttatatggtaaagggacatcagcagtgcttggagtagcccaaaagaagagatggcgtgacctgggctttgaaggatgggttcaatttgagcaagcggagaagagtcttgggaaacagcaccatagacacttaagtgtagagaaggtaatgagtgtggcagttgggaggrgactaaagatgctgacctacatagaggaaagggtctgtgtaggaataggaagaagtagagttggacaagaacagtaagtcgggatatgccaaacattctaaaaaattgttgtgattggaaatagggtgttattataggctgatacagaattgctgaattgtgatgtgggtaaaagtggtgatcaagctcctcaggagaacaaggcactggagttagggaagccagctaaggcagatattaaaggaatgcaggagtgaggtgaggatgccctattctgaggatgatggacaaaggctggaagaaatgcaactcatacttttattcaccaaatatgtattgagtatcatttctg

SEQ ID NO: 459456 - DNA, 534 bp, Homo sapiens
tccttgtgctaagttatatggtaaagggacatcagcagtgcttggagtagcccaaaagaagagatggcgtgacctgggctttgaaggatgggttcaatttgagcaagcggagaagagtcttgggaaacagcaccatagacacttaagtgtagagaaggtaatgagtgtggcagttgggaggagactaaagatgctgacctacatagaggaaagggtctgtgtaggaataggaagaagtagagttggacaagaacagtaagtcgggatatgccaaacattctaaaaaattgttgtgattggaaatagggtgttattatrggctgatacagaattgctgaattgtgatgtgggtaaaagtggtgatcaagctcctcaggagaacaaggcactggagttagggaagccagctaaggcagatattaaaggaatgcaggagtgaggtgaggatgccctattctgaggatgatggacaaaggctggaagaaatgcaactcatacttttattcaccaaatatgtattgagtatcatttctg

SEQ ID NO: 459457 - DNA, 585 bp, Homo sapiens
caatgacttctttagatcagaaaggtcaagggtagaaaatactggaagasgatgtttgaggtaagctgatgaggctgcccgcagccacaccagtcccatgaaagttagtggcatcagttccacctcgccttttctccagcacatggagtattgagacatgatgtatctttctgaattgtttggtacagatggggagtaacagagctcaagatttccaagctattactaccaagcctgttagttaagggcaaaggcaagaaattgtaatttggggctgtggaaattagcctgcctctattcattacttaaacaaattgatcacatgctactaggctcctgcaaaactcctttttgagataaagggaaaaaaccaaactatctcaccctaccctccctaggatccacttctttggaatgacaaaggatttgaaagtaggtttgaaagcagtttcagcaatttaataaatataattaatttgtctacaaatatatttgtataaataaatagctcctttagaaagaattagccatgggggacgaggggaaactgctgttttctaggatcctgtctacatcaatcttcta

SEQ ID NO: 459458 - DNA, 585 bp, Homo sapiens
caatgacttctttagatcagaaaggtcaagggtagaaaatactggaagacgatgtttgaggtaagctgatgaggctgcccgcagccacaccagtcccatgaaagttagtggcatcagttccacctcgccttttctccagcacatggagtattgagacatgatgtrtctttctgaattgtttggtacagatggggagtaacagagctcaagatttccaagctattactaccaagcctgttagttaagggcaaaggcaagaaattgtaatttggggctgtggaaattagcctgcctctattcattacttaaacaaattgatcacatgctactaggctcctgcaaaactcctttttgagataaagggaaaaaaccaaactatctcaccctaccctccctaggatccacttctttggaatgacaaaggatttgaaagtaggtttgaaagcagtttcagcaatttaataaatataattaatttgtctacaaatatatttgtataaataaatagctcctttagaaagaattagccatgggggacgaggggaaactgctgttttctaggatcctgtctacatcaatcttcta

SEQ ID NO: 459459 - DNA, 576 bp, Homo sapiens
ggtcttcccatctagatcttctatctcaggtactatcatggtagaactactaagttgtaaggaagcaaaaaaaaaaatcaagattgataattatgaataagaaaaaacttttaacatgtttataggcactagaaactaaatggaaatatctgaaggagctgattgtcaaagaaactaggagaccagactaaaaatgcctttctttgaacaacctttgggctcctaaacttgatgaggagaaaatagactacgaaacctgtacaagaccaaggaggatgactctccaacatccactttgaatgtggtcatggaaggtaatggataaggaagaactttccagatgatagagccaggagccatggagaacaatggacaagggaagaatgttgcccctagtgagaagmagcagcatctaatccaggaacttcctccactggcctggcaaaaggatttcataaagtttgcccagtagggtttcatcattgcttaatccagtgagctgtgtctcccattctttcttcttacgaatagaagtattattgtgaacggagttattgcgcaaagtgtccgtacttc

SEQ ID NO: 459460 - DNA, 586 bp, Homo sapiens
taaaattttaagatgggtacccayacgaatacagcatttctggaatgaacaaatccatggaacagaaaaggcaatgacctgtgtgtttggtgaggctgcttcatctctgggtggcagggttggagtgggtgcagctggggcttactggataagctgccccttggaattgcgagcaggtgccaggtgcctgagctcctcctcagggcaggcagggcagctcttgttggtgtgggatttctttaatcgccaccacccgctcctgctgtgccacaaaggtttaatgcttggccagactgaaaactattggtatgaatcacctataaagtttgctccagctttaaaatattattatactaaataaaccctgggggaccattttgtgggccaaagatatttgaggtagttgaattagatatagaaagatccaaaatattagatcgcataggctactccctttgatctaaaaaaaaaatacatttaccatcttttaaaatgaagtagaaggagggggcaaggttttcccccacatttgagcggattagaaaactgttgtgtccattaagtaaggatgatgacacgtgatcat

SEQ ID NO: 459461 - DNA, 559 bp, Homo sapiens
atgtaagttcatcctgttcccaattattttataaaaccaatagatgctcagtaatgttcaccgaatgggtaacaaatgaatccatctcaaaaggtattgggaaacactaaaacactacttttcagggtccccagaggcagatagcaaaagaagcagggtctagtgctgtgtccccagcgaactctgcctctcactgagccctccttcagtcttccrtattttttaggaacctcctgctttggccttggcattgccactgtattggccttaaggtttgtcccctgattaaagaaagaaatttgcctttaaacagcacaaattctcctttgcagtgaaattagggttaaacactgtcaacatagcagcatttcactccgagggacgatatgtaccaaattggatcacatggctggtgtggtttgttggtgatccaagccatgttcattttttaaatgaacttgtgaaagcatccgagcctctgagtgaaatcagcacgcacttgcagcttccattgccttcagctttgttcctctaaaaccatgacgtcacacttgttttt

SEQ ID NO: 459462 - DNA, 534 bp, Homo sapiens
agctggcatggtggtcaatatgctttttaatttgaaggcccttcggcaggcttctgacaggtcactgcggcccctacaactactgcatccrcatcctgcatggctgattgatggtctctactgacaggcagaattctaaaagtgaacctcctcttgccctggttatttaatcaacggctactctactaccgctgtgaaagggttttgcagatgaaattaaagtcccaagtcaattgacttgaagatgatcagatggacccgatatgatcacatgaaccttttatggtgaaaaggactccaagcatcactgttagttaaaagatggaggagctccgtgggaagggatgtgggcagtggatgggaacacacagcagccccaggctgacagccagcctggagacagggacctcagtcccacagccacaggtaactgaatcctgctgcaaccacataagcttggaagaagagcccacgcctccagaggagaaccctgcctggttgccatcttgatccaactggagccctaagcacgag

SEQ ID NO: 459463 - DNA, 565 bp, Homo sapiens
gcttggtctatacgttattgcaaactgatctggcacagctaatcctcattttctcctgcttgacataaacaatctctcaggacatggatgcagaccaggtcactgtgcaaccaacaaaaccccagacatccccttctcttgttcactgagtaactactayatgtttatcaattccagccttttcctcactctagtctggccttcctctagatcagattgattgagatacccactcagagtattgccgtattttctgatgatacctactctagggcaaacctctgcctccttagactctcccccaaatcacccaatcaaagccctcatcctataataggttctaacatccccttatggagatgtcccatggttctcatggtgtgagtgctccctcactgcaatgagtggtcaacccaacttgttaaaccacaggtgtgctcctggagggtagccagtggctactgtaatgggcagtgttgttctgtgttcagtgtcttgtctaaaggatccaaggaaaatcagagccgtcactgtggctcctaggcagggagaaatggggactggg

SEQ ID NO: 459464 - DNA, 565 bp, Homo sapiens
gcttggtctatacgttattgcaaactgatctggcacagctaatcctcattttctcctgcttgacataaacaatctctcaggacatggatgcagaccaggtcactgtgcaaccaacaaaaccccagacatccccttctcttgttcactgagtaactactacatgwttatcaattccagccttttcctcactctagtctggccttcctctagatcagattgattgagatacccactcagagtattgccgtattttctgatgatacctactctagggcaaacctctgcctccttagactctcccccaaatcacccaatcaaagccctcatcctataataggttctaacatccccttatggagatgtcccatggttctcatggtgtgagtgctccctcactgcaatgagtggtcaacccaacttgttaaaccacaggtgtgctcctggagggtagccagtggctactgtaatgggcagtgttgttctgtgttcagtgtcttgtctaaaggatccaaggaaaatcagagccgtcactgtggctcctaggcagggagaaatggggactggg

SEQ ID NO: 459465 - DNA, 565 bp, Homo sapiens
gcttggtctatacgttattgcaaactgatctggcacagctaatcctcattttctcctgcttgacataaacaatctctcaggacatggatgcagaccaggtcactgtgcaaccaacaaaaccccagacatccccttctcttgttcactgagtaactactacatgtttatcaattccagccttttcctcactctagtctggccttcctctagatcagattgattgagatacccactcagagtattgccgtattttctgatgatacctackctagggcaaacctctgcctccttagactctcccccaaatcacccaatcaaagccctcatcctataataggttctaacatccccttatggagatgtcccatggttctcatggtgtgagtgctccctcactgcaatgagtggtcaacccaacttgttaaaccacaggtgtgctcctggagggtagccagtggctactgtaatgggcagtgttgttctgtgttcagtgtcttgtctaaaggatccaaggaaaatcagagccgtcactgtggctcctaggcagggagaaatggggactggg

SEQ ID NO: 459466 - DNA, 522 bp, Homo sapiens
gggagaccatttctgcctcattgacttcagagctgaatgaatcatattctcttttgggggagattgtgccctgaccttgctagggtattagtctgggtcatctgtgagctggggaccaaggtcatttgatgcctccatacaactgcacccctcttccggctccaactcacaatattcctgcaagaggaaattcatcatgagaagcaaacctggycccctgacaggtgttcgtgttgcacaggagctgaggatttgcagcctgctaagtcctgtgcttcaagcagaggaattaagcgccatcatgcaagtgtatccaatttccattggagaattgctttgcagaaaaatggcatggagcctgctctccttttggccagttgattccctcagctttcaggccctgacttaggatgactgcagagagcactcggaaggtaggatgagagaggcttcgagtaaaacctcattctgttttacaattcagagctgaaattgaagctgagagagaagagcaggggacag

SEQ ID NO: 459467 - DNA, 645 bp, Homo sapiens
aggtgccagagtcagacagcttataagtggaagatctgggattcaaatctaggacttctgactccaaagcctatgttcttgccttaattttttcttatattctacatttaattttcacagcaacctatcaggtagttattttgaattttcctattttataggtgaggaaacataggcttagagaggtyaagaagcttctaaggttacatacatagtaagtgttatgattcaaatccaattctttgactctaaagcttgtgttctgtaccattatgtaagcctaggctttagaaacatgacagacctcctgctaaatgtagcagattgaatatgcatatttctgttaactccactataaagaatagcaaaggtataatatggataaaaagaaggagaacagagatgatgacagacagtgatgccagcagaattttggaatatggaaattcagtggacgagtagtaactgactcagcggaatcaacagagctgctttctaaagtcaaatgaggaagaggagcaaaaagaaacagcctgatttgtctattgaccacagtaactacttgggaattggattgctaagatgtccctataagcatagagactaaaaaacaagaattgatagaagctgaaaaacagagtaatt

SEQ ID NO: 459468 - DNA, 534 bp, Homo sapiens
gtggagattataagaaagaaaatgacttcataaatcagttcagggtgaatgaaagtttggatactttgcagtcctttttcagcctaggtgtgtactgtactgacttttagtttctccccaaagatatggagaaatctgctgtatatttgtggcccaactcatgaattcagtgtacatggattatagctctgttaaaacgatcttagaaaagctaggactttctctgtacatagaytataatattgtcaacatgcatttgaatagattgtctgtataggccacaacagaaatggacctaaaccataaagtagtaaaccatttttttattaattggtgaaattgtgaagtataagtacctgtgatggagatgatcttgtgttctaatgacatagatgtagattatgttcacatttaagtaagaggaacaactatgttactagcatttactatagaaatgatattgtttttgtgaggatgtgtcagaagttattttacttggggataaaatagactaaataatgcttgcagggttta

SEQ ID NO: 459469 - DNA, 534 bp, Homo sapiens
gtggagattataagaaagaaaatgacttcataaatcagttcagggtgaatgaaagtttggatactttgcagtcctttttcagcctaggtgtgtactgtactgacttttagtttctccccaaagatatggagaaatctgctgtatatttgtggcccaactcatgaattcagtgtacatggattatagctctgttaaaacgatcttagaaaagctaggactttctctgtacatagactataayattgtcaacatgcatttgaatagattgtctgtataggccacaacagaaatggacctaaaccataaagtagtaaaccatttttttattaattggtgaaattgtgaagtataagtacctgtgatggagatgatcttgtgttctaatgacatagatgtagattatgttcacatttaagtaagaggaacaactatgttactagcatttactatagaaatgatattgtttttgtgaggatgtgtcagaagttattttacttggggataaaatagactaaataatgcttgcagggttta

SEQ ID NO: 459470 - DNA, 562 bp, Homo sapiens
gattgtatacatttgtcaaaactcataaaattgaatgcccaaaatgggtagattttactgtattcaacttatacctcaataaacttgatgtttttaaaaaaacacactttataggtacaaatttagctcactcaattaatgaaaatatatttgccatgtaagtaaatcagcaaagtcagttaggaaaaggtcaattttatctttcagttgaaatggatgtgttaatatgtagctgcatgaaaaccatatctctttttaattctaggaacccagattcatatatacatatatagatatatatattatgtatacatatatatgtatgtatatatgtgcatatgtgtgtatacacacacaycacatagaacttttctgtgactcagaaaaagtaagttaatcccctttaccaaacttaccaaactccctttgctttgttgtcactagacaacctctgaagtgattcattatttgacaatagttgagagagtaggaagaggcaacatggttaagtgaaaaatgtcatcatttccattgtccactctacagtatatctggattcaga

SEQ ID NO: 459471 - DNA, 578 bp, Homo sapiens
cataagcctctgcacccgaccagaagaatttctatatgaggtgtttccacttccagaacttcccttcctgtcttcaggaaagtagtatgggttctgagtcatgccttagacagaaatgcggtatgctgaggaggraagaggagttagagaaagtgataatgcttttcctttcccctaaggatgcaaaaagaattcctaattgcagttttctatatgcatattatacttcaatacaaagttattcaaaaatctcttgtctggcctgtattctgtctagctcatgcacagtcactgttaggcatagctgacatccaccctccatcaagcactgaataggggttatacctgtgtgtatgatcaaatccattagatggaagagattgaggtcagtgatcttggcttctggcattcagaatcaatggatctgtttggtgcttctttcctttgaagaaagaaatctttccattcataccctactcctttttttgcaattgcatgggatgcccataggatgttcaggatttcatagaagtaattatagagtttgaagggaccttgaaaggctgttttcatttaaa

SEQ ID NO: 459472 - DNA, 578 bp, Homo sapiens
cataagcctctgcacccgaccagaagaatttctatatgaggtgtttccacttccagaacttcccttcctgtcttcaggaaagtagtatgggttctgagtcatgccttagacagaaatgcggtatgctgaggaggaaagaggagttagagaaagtgataatgcttttcctttcccctaaggatgcaaaaagaattcctaattgcagttttctatatgcatattatacttcaatacaaagttattcaaaaatctcttgtctggcctgtattctgtctagctcatgcacagtcactgttaggcatagctgacatccaccctccatcaagcactgaataggggttatacctgtgtgtatgatcaaatccattagatggaagagattgaggtcagtgatcttggcttctggcattcagaatcaatggatctgtttggtgcttctttcctttgaagaaagaaayctttccattcataccctactcctttttttgcaattgcatgggatgcccataggatgttcaggatttcatagaagtaattatagagtttgaagggaccttgaaaggctgttttcatttaaa

SEQ ID NO: 459473 - DNA, 504 bp, Homo sapiens
aattccccattcccccttccctcaggctcctagcaatcaccattctactccctgtctctatgaatcttactactctaggtacctcaaataagtagaatcctacatgtcttcaaggctcatccatgttgtaacatgtgtcagaattttcttcctctttaaggttgagtaatatcccattgtatgtatatatggaacattttgttgatctgttcatttgtcaataaagacttgggttgcttttattttttgctattgtattaatatataacactgctatgaacatgggcgtacaaatatctgtttgaatctctactttcatttcttttgtgtatatacccagcmgtggaattgctgcatcatatggcaattctatgtttaatttttggaggaatcaaacttgtgcttttaaaattcatacattcagcaaatgttcattagactcctattatgtgccatgcagctatgccagaggtggggaatgaatgaacaggatgcactgccttc

SEQ ID NO: 459474 - DNA, 571 bp, Homo sapiens
atcacgcacaattatgtgcaatttggcacaacttccaatccctgcttagtagaggccctctgtttgggacagaaggggagcataaaatacttcttgtgcctagagggagcagttctcttaggtcaaggttgtgttacatatggaaagggatggggtagaagtgttgtcaagcacaaagaatctaggaatatgtgggtactgaacattagttgtgtttaccatttgaaatttctcactgtaaggwtcttcattcaaacagaagatgacagttctgacaccagtgggcacatagattctctcccagctaaaactggaacaggtgagttaagatccatacaattttgttctcacctaacactggaatatagagcagaatgcaaaagcagtttagaacgtagttggaaaaaaaactcagacctgatgaagtgcctaatatgttggaacaaatatattaggaatctctagaaatatcacatatgtctagtattgcagtaatgcagaataattgtttgattgaacataggccaactcaggaaatgaaaattttagcaattaacttactttccatggt

SEQ ID NO: 459475 - DNA, 600 bp, Homo sapiens
gtgttcatctcaaattataaattagcatacaaattgagggaagtgttgatgtataaatattctagatgtagtcattttaaattatattgccttttggtctgattgttacaagacgctgccttgaaagccattgtttaagagagtaaaagctttttattggaattcttgtgaccttcatatccaattatttttttaattgctatatttgagtaacaacatatctcaatttaaaaactaaattcttgctttaagtaatacatggattcagatagaataagtccttagtttttgtaatacttatacaatttttattcatgttctgatgctttgttttttgagccatatgtgtgtatatgcattatctactctgacctggtttaaagatcttgaatcaagtttgctttttgatataaagttcagcatagctatcatgcattccatcattagaataatacattctgataaaacaccaagtgtctgtctcctgcagtttkgtattttaataagggtggagtacatctgaaacttatatcacattgcaagctgcatatattgccaaaccttaaaaacacactagacacaagagggaggtctttcttt

SEQ ID NO: 459476 - DNA, 595 bp, Homo sapiens
gtgtgttcaccaacattataaaaatacataatcgctaagctctatcatcagggtcttttggtttggctcttaattgaaggcttgctcccatctatcgtagagataatacagtawtgaaggctttggttacatgtggggctctctaaaatatatgctttctgtatacctaaccacttcctgattccagattgaaatatgggacaaatcataataaaataataaccatagcaaaaataacactaaatgggacaaagcaacaaactatggaatcatctcacttcctcacttattcacaatgcttgggctgaagccacaccataaagaagattctgtcctgggcatattataactcctaaagtgagagtgaggctggtatcagggaaagcctgaaggaggctagccgcatgatccttagggaatcccttaccttttggaacttcctgctataatttctaaaattataggtttaagttggattatttctggagtctattcccatccaactctatgatttaattactcttagttgaccttctcagtccccagaagtctgatcgttaatccttatgtcacaaaataacctatgaattaattg

SEQ ID NO: 459477 - DNA, 565 bp, Homo sapiens
agcaaaacctcttcagctctgggagggatctatgtgacaccaacatagttagaatgtttcagaattatttaaaaaaacaatgaatcagcacagctgtcatcatcatttattcctttctttccctataatgaagcactgctccttttcctctcccaaatgaaaatcagttgggcatgtcctagaatattgaactatttggggttttcaggcctttttgctcatgccatttatcactgaggctactgactggtgagcaatgggtccaccattgtgctctaaggagatttttgtttcaagcactgctttgttttaagttaggtgttgaatgcggcatcaaaggtaggcaggcagacattcagaggcagatgtgggcacattcccaaaagttcagtgccaagggccttgtgtttcttaacagaggtgacctggaaagattccaaaaacaagatgaaaactacaaagttgaatttrgttaaagggaagaagaaaggaaagcattgaaagcttgaatcctgttaacttgaaaagttgagttctggtcttttaaaagcttccttccaaaata

SEQ ID NO: 459478 - DNA, 556 bp, Homo sapiens
gtttaatctctcgccaattgtagatttaaatttagcttctcacacttactaatctttttagcagtgaaaatagccattgttgctaataggaaattgatttagtattttctgtttataatgaacttttagttaacttggatggttaaaacaaagaccattgttactgaatttattaatgggtccctagctgaacagatggagggagagtcacgggttagggccagcacacagaatcagccacatttgcacacatcttccatcacttccactactgctgcttttcatttcaagcactgctttgttttaagttaggtgtttaggatgaatttyggattttggacaagttgcttaatttctctaaacctcactagtgtcatctataaaatgggaatgtttttgtgacatgtaagtgagcaaatgaatacgaagtataacacttgctacgtaatgagtagattctaaaattctctagaattattccattcattctataactcatagacatgttaaattgcatatatttggaaagatctggaagtagtatcaggaccaactg

SEQ ID NO: 459479 - DNA, 592 bp, Homo sapiens
accgcaatttttaccaaacatttaaagaagaaataacaccacgtctacccaatctcttccagcaggtaaaaatgcagagaaaacttcccaactaattttataaagccagaatgaggctgatacaaaaaccagacaaagataataaaaaataacactatagagcacaaaaattctcaacaaaatattaccaaatcaaactcagcaatacagagaagaaataatacaatatgaccaagagcagcttatactggaaactstaggctaatttattacttttagaaatcagtcagtgtaatccaccacttgatagtgtaaagaagaaagaagaagtaaaattgatgcagaaaaagcatttaacaaaactcaatatttattcatgataaaatctctcagtcagctaggaaaagaagggagtttcttctaactgataaagagtatctgctaaaaaacccaaccaaacaaacaaaaagtcactacaggtaacatcaaacttagtgcgaaagactgaacgtttcccccccggcactggggaaggcagtgatgtccaatctcactgcttctattcaacattgtactgggagtcctagccaat

SEQ ID NO: 459480 - DNA, 593 bp, Homo sapiens
cacaaaaattctcaacaaaatattaccaaatcaaactcagcaatacagagaagaaataatacaatatgaccaagagcagcttatactggaaactctaggctaatttattacttttagaaatcagtcagtgtaatccaccacttgatagtgtaaagaagaaagaagaagtaaaattgatgcagaaaaagcatttaacaaaactcaatattyattcatgataaaatctctcagtcagctaggaaaagaagggagtttcttctaactgataaagagtatctgctaaaaaacccaaccaaacaaacaaaaagtcactacaggtaacatcaaacttagtgcgaaagactgaacgtttcccccccggcactggggaaggcagtgatgtccaatctcactgcttctattcaacattgtactgggagtcctagccaatgcagtaagtaagaaaaagaaatgaaaattatacagatcagaaaggaaacaaaagtacccctatttgcataatacacagttttgattgtctatgtagaacatcccaaggaatctaccaaaaactactagaagtttaagtgagtatagcaaggtagcaggataca

SEQ ID NO: 459481 - DNA, 499 bp, Homo sapiens
ttacagtttgctgaatgaatgggggaatgaaatccttcaagacactttaaaaggtatattccttaaggtgcttaaaattaaaaggactagattcaggaaaaaaatagtttttgtctcgaatgccaactctgaatggtaatgggtgcctagagctcccagttgagtagaaaattaaggctgtgccttggccctctgagaaaatgtgccaggcataatcctcaatgtctgcctagatcataggagaaggaayggaggataggaagctaagcagaggctgaagatgaattcagattgggcagactgggactggaacgtcatcagcaaaggtgaaagttgaagcctttccagtagatgagcacctgaaagaggaaatgcagagggtaagagaggtcccacatcactggaatgcgttccctgatcaccttcctctcctgttcccaaccagctttcaggtgggcgggaagctttacattcttaaatccttgactatttataataa

SEQ ID NO: 459482 - DNA, 432 bp, Homo sapiens
gagaagttgtgcaatgtccggggacacattcagtgaatactttagaccaaatactgtgctaagcagagggcctggaaaggtgaatcttatacagtccccatgacagcactcagctcagtggggcaacagtgaacatgcatctcctacattaccatcaatcaatatataacataataagtgcacaaaaaaagtgaaaacaagtactatggggtagataattctccaggatagcctgcacagaatgatctcatttgataacataaaccccaaagttagaaaaatgcaagaataaaaacaccaaacatatacaaggggargaaagctgtgcccatattgtcctgtttattagaaagaatgaagattatttattcactcacagtctagaaagaagagctttgcattgtctttctggtagttactttcatggagcca

SEQ ID NO: 459483 - DNA, 514 bp, Homo sapiens
cttttgttaattcacagccatctcattttttcctgcttcataaattaacatagttaccaagcggctagagcagtgttttggagatgggtttaggggaaaatgtatgaaaggaagaagtaaaaaaaaaggaaaagaacaaaacatgaaccaaacctccctcatttactgattccacgtccaaatgtttttcttcttggtgtatccagaaaaagaaccagaaaagacyccttgcaccccaaaagggaaagtatcagatcccattagggctaagaaagcagaaaggagaatcaatgagggggcagacaccggtctaggagtttccatctgccttcgcaagtgtgacccagcaatggaatggctgcgaatgtgcttccattcaaactcatcacttaaaggaaaaagaatctagagtaattcttggaaattcagtcttaagtcacaaatgtctctttctcagcaaatataggtatatggttctttgtataaattactgcagtgtgctctggccaagaat

SEQ ID NO: 459484 - DNA, 542 bp, Homo sapiens
gaaataatagcattgtcaataagtgaaatatacctgtctacatattttgatacttaagagcagaaaggaaagttagttgctgcagacaaaatcaatgatgaaatgatttgggttggaatgatgaaatgtcactgaattccctccaaaatgtggattaagcaagcaagtgattttcacatggtggtacctggatgacaagaagtaaatgaaaatagtatttattcaccttttgatccaaactgtaggccagcacccagtcctcttgcttgggatgaaagagcaggctctggatatagaaggtgagccgatacttctgataggtcgccccttcgtctgagctgatcaatatgctgctctccatctcaggatcactgagaagcataatctaaagaaaggatagagggacatatacagacagagttagtaggaaataataaatataataactttaatcataaataagtcatctgyatttgtacaccatagcacataaaggagcatctgggcctctgtaagaaaacgttgtatcaacttttctcgtg

SEQ ID NO: 459485 - DNA, 542 bp, Homo sapiens
gaaataatagcattgtcaataagtgaaatatacctgtctacatattttgatacttaagagcagaaaggaaagttagttgctgcagacaaaatcaatgatgaaatgatttgggttggaatgatgaaatgtcactgaattccctccaaaatgtggattaagcaagcaagtgattttcacatggtggtacctggatgacaagaagtaaatgaaaatagtatttattcaccttttgatccaaactgtaggccagcacccagtcctcttgcttgggatgaaagagcaggctctggatatagaaggtgagccgatacttctgataggtcgccccttcgtctgagctgatcaatatgctgctctccatctcaggatcactgagaagcataatctaaagaaaggatagagggacatatacagacagagttagtaggaaataataaatataataactttaatcataaataagtcatctgtatttgtacaccatagcacataaaggarcatctgggcctctgtaagaaaacgttgtatcaacttttctcgtg

SEQ ID NO: 459486 - DNA, 534 bp, Homo sapiens
  misc_feature (1)...(534): n = A,T,C or G
nnnnnnnnnnnnnatgttaccagaaaataatgcaactcaaacatgtctaaaccatgaagtatatgaagagaagtagaaatgctaggggggatctagactgaaagactcaaatgccaacctgaagtgtgggcaatggagacaacgggccattctcctatgtggaatgacatactatacgatatagagtagcacaaactgatttaatgacattaagtaatggtcatattctcccttcagttttttcatctgtaaaatgaacaaagagtagaaatggcttctgaagaagggtcagatatgtagttttgtagaaattttaatctggtgtcagtacataaagaagcttaaatggaagaggcaaagagggacatctgaagaattagyaagccactacaggtgttgtcaaacaaagataaaaaatgaggtgataacaatgaaaataaaaaggaagtgaagacagtgataggacagccagatataataatttcaacatggaggacaaggaagagggggaagtcccaagatagtgacaggaag

SEQ ID NO: 459487 - DNA, 432 bp, Homo sapiens
gacaaggaagagggggaagtcccaagatagtgacaggaagaatggatggagcattgatacaactaggggagataaggaaaaaaaatcagattgsagtttggcagatgatgtggatgatttttaaaatatttcataagtgtaaccaataatataagtttgagagagagagaggtaatagaaagtgagagagagattcacttagagtatataactataattagtcaagggagaatttgaaggagcaactatatctatggcctcttctagcctctcctgagggagacaattcaattcaattttgttgagcctgtagaattattgctatatttagttttcaaaagttagggaagaagaaaaacataagctcatatgtaataaccttacaatttaattcagaaaaatgtcaaatccacatttctacaaggagcaaca

SEQ ID NO: 459488 - DNA, 588 bp, Homo sapiens
tctgctgtttttgttgccagtacatagaacaaatggaaaaatcagtaagaacataaaagaattgaacaattcaaccaactaagttaactttattgacatctctagagcacttcatctaacacaagtagagcacacactcaagtgcccatggaacatttatcaagataggccatattctggtcatttgtgactgagtacaaatattgtaactttaatctggaaaatggtactattttactagtttctgagaaatatgaaaattacttaatgtgtgagaaagcattttgaaataattagagggattttcagagctaagacttaataatagaaaaaaaaawttttactaccaaaatgtgtcttcaaatgtcaagcaagtacaaacttctgccctcacctgtcactgaagaaggaaagttagcatctcaagagttcagtggagggagatccagcggggatgtgtggatgttgagaagagtggcatttattttttcgatgatccctggaagaggtgtgagatttgcacatggagaggatattctagatagtgcaaacagcccaaataaacttgtgaaggtgtagaaatggggc

SEQ ID NO: 459489 - DNA, 620 bp, Homo sapiens
gataagcactttgtcgtagtcagaccatcacaggagctttcatgaggaggcagggcacacaaaactctttgtaaacaatamaacccatctcctgctttgacatgaagttgcccgtaggttggtagtcttgctgattccatggtttcaaacaaaaccagaagctgcttccactggcagagcgtatttccatgtctcagagtctcatttctgtgcctctccccacctccctgtgggtatgaagttaactgaacattatctttctcctcttcttctgcctaagaacccatcacatgtggcccaagggagcagaggcatcagagcatgcttctttttatatggaattaataggtttatgtttctttagtggaatttctaagtcctagaggaatagaaggccttgctccctctgaactctgaggtcatttggtgtggtgatatgggagggcagatgtagcaggaatggggacagcaggatggatgaaactgtgctgaggttcaacttacctctgggaggtggtagcctgagattgtctgcggtccctggcatggaagattgagagagtagatggcagctcacgttctaggaaaagcaggggatgacttgtacaaatccgcaccga

SEQ ID NO: 459490 - DNA, 625 bp, Homo sapiens
ttgccattctctaaagtaaaatgtctcactggaagttgctaaatatttttaaatcactaaggttgttattcttatcaaattatactttttagtaagacattatttatctcaatgaattttaagtattacaaaaagctaagtatgataatttagatgaaaataatatcctatacagaaaacaaattgggagaaaatcaagaatagttgtgtgttgatgatatttataaacagtaaaagttactaaagtggaaatttatttctgataaaagtgcaatagagattatacaccatgaacagtgagcttacttagaagtcaaaagatgtaccgtgaatgtgcctggtggctcatgcctgcagtctcagcaatttgggaagccaaggccggtgggttgcttgaccccaggatttcgagaccaacctgggcaacctggtgaaaccccttctctacaaaaaatacaaaaattagacgggtgtggtggtgcatgcyggtagttccagctactcgggaggctgaggtgggaggatcatttgaatcagggaggtggaggtggcagtgaaccatgattgcaccgctgcactccagtctgagtgacagagccaaggccttgtctcaaaaaaaaaaaaa

SEQ ID NO: 459491 - DNA, 529 bp, Homo sapiens
aaaatcttcttattgagaaggttaaggttatggctgttgtccttcccctcccagcaaatamggtgttagcaatttaatattattgaggattagagagttcattttagagatctgtaaggttgcttttatttttcccttagccacaggatatgaccctttgggattattagctgaaattctgagtggtttgcccgtttcagtgctactgtgttcagattaaaatcaactttgttcttgctagcatcttacatctctgatactgcttaattctctagccttccagggattacagccttctgagcatcttactttgtcttgacttctgtatgcaaagttttgaattttgcaaaggatttgtaaaagtatataaaaatatttccgctcgcttctgtgaggattctttgatgtcagttttgtctttcagatcacagccactttggaggatctgaactccaattctgtttgcacactagaggccctgttgctgtctgctatgattcaacagccctgttccctaactgtcctcagg

SEQ ID NO: 459492 - DNA, 529 bp, Homo sapiens
aaaatcttcttattgagaaggttaaggttatggctgttgtccttcccctcccagcaaatacggtgttagcaatttaatattattgaggattagagagttcattttagagatctgtaaggttgcttttatttttcccttagccacaggatatgaccctttgggattattrgctgaaattctgagtggtttgcccgtttcagtgctactgtgttcagattaaaatcaactttgttcttgctagcatcttacatctctgatactgcttaattctctagccttccagggattacagccttctgagcatcttactttgtcttgacttctgtatgcaaagttttgaattttgcaaaggatttgtaaaagtatataaaaatatttccgctcgcttctgtgaggattctttgatgtcagttttgtctttcagatcacagccactttggaggatctgaactccaattctgtttgcacactagaggccctgttgctgtctgctatgattcaacagccctgttccctaactgtcctcagg

SEQ ID NO: 459493 - DNA, 560 bp, Homo sapiens
gccagcattccctatgttaacacttaaaacataaatatatttaagtttttcagaatgctctatttttttatagtcattgcactttaaatggtccatcttatttctttgttgacactttctcataccagtgtattttttaatgaactttttaagagctaatattctccagaatttgtgtcttgtgaaagtatatacatctcttctggggtttgcctgttataaaggctctactttttaagcagttatgattttttttttgagacagtctcgctctgttgcccaggctggagtgcagtggcatgatctcggctctgcaacctctgcctcycagggtcaagcgattctcctgcctcagcctctggagtagctgaggctacaggcgcacaccaccacaccaagttaatttttttgtatttttattggagacagggtttcaccatgttggccaggctggtctcgaactcctgacctcaagtgatccacccgcctcggcctccgaaagtgctgagattacaggtgtaaaccactgtgactggttgatctactttttatatgagtgt

SEQ ID NO: 459494 - DNA, 640 bp, Homo sapiens
aatgtatttaaaccacaaacagccagtttaaaagattttgcattgaataataaaagtgaaccaacaaatgtattatgtgtattttttaatcaggtagaataacagacacagtcttttaaaaatagtttttgatttagctaaatacttcattttgtgtgctttattccacattctttccttccttcctaccttccttccttcctttttccttccttccttgcctcttcctttctttattttcttctttttttaactaaaagaaacatcttcattcataaaactttggaagtcactatgaaagaaaccacaaaatgttactgtatgtaatttagtagaaaaaaacatttataggcagactcattggcttatgtttgtattcctgccactttgggagaccaaggcaggatgagtrtttgagcccaagagttcaagaccagcctgggcaacaaagagacaccccatctctacaaaaaattgaaaaacaaagtgactagacatgatagcaaacacctgtagtcccagctactcaggagagaagattccttaagtccaggagatggaggctgcagtgagctgtgattttgccaccgcacttcaacatgggtgacagtgtgagaccctgtaacgaagaaaaaaaaaa

SEQ ID NO: 459495 - DNA, 640 bp, Homo sapiens
aatgtatttaaaccacaaacagccagtttaaaagattttgcattgaataataaaagtgaaccaacaaatgtattatgtgtattttttaatcaggtagaataacagacacagtcttttaaaaatagtttttgatttagctaaatacttcattttgtgtgctttattccacattctttccttccttcctaccttccttccttcctttttccttccttccttgcctcttcctttctttattttcttctttttttaactaaaagaaacatcttcattcataaaactttggaagtcactatgaaagaaaccacaaaatgttactgtatgtaatttagtagaaaaaaacatttataggcagactcattggcttatgtttgtattcctgccactttgggagaccaaggcaggatgagtatttgagcccaagagttcaagaccagcctgggcaacaaagagacaccccatctctacaaaaaattgaaaaacaaagtgrctagacatgatagcaaacacctgtagtcccagctactcaggagagaagattccttaagtccaggagatggaggctgcagtgagctgtgattttgccaccgcacttcaacatgggtgacagtgtgagaccctgtaacgaagaaaaaaaaaa

SEQ ID NO: 459496 - DNA, 629 bp, Homo sapiens
cagtgtcagtagctagtgacaaagaggctgaaaggttttcattgaatttagaatagggaggctatgagtgagcttacagagaatggtttctacaggtgcagaaaattgatcatgatcatttgaacaaatggaaatatagacaactttgtccaaatgcttggctgtggaaggaaggtaaaggcaagccacaagggggggtctyaggttttgaggattaagcctgtctaattatattatacatgagaggcagtatttgagcagggccttgaaaaagaggtgaaatttggacacaggaaaatgattggaaaaggcattacagataaagttaacttccattaattgacttgaagtaataacagtcaaccatttattgaggactttcatgtgccagacaatgaactaagggctctacatgcattatctcattgatccttgccccagccctttaagagagaaggtaccattgttatttccacttagagatgtgaacactgaggaactgagaggctacctcactgtgggtgtctgtgtgtatagaggtccaggcagtcacaggacagtctggtcacacagctagaaggaagtgaagagagttggtaatgtgctgcttttaaaaatgtatttattgt

SEQ ID NO: 459497 - DNA, 622 bp, Homo sapiens
ttaaaggttaaaaaaaaatcaagtgtttaatgaatttgagctgattgagcactgaccagatacaggatccttaaacttcataatatctagtccaaagatgaattttttttttggtacagattctgacttcaagggatttgcaggctgggagggaaattaaatatataaaaagtcattttcggccaggcgctgtggctcatgcctgtaatcccagcactttgggaggccgggcaggtggatcacttgaggtcaggagttcaagaccagcctgcccaacatggggaagccccatctctactaaaaatacaaaaattagctggactttgtggtgcttgcctgtagtcccagctactcaggaggcttaggcagaagaattgcttgaacctgggaagcggaggttgtaatgagctgagatcacaccactgcactccagcctgggcracagagacagactccagctcaaaaacaatacgtttttttaatcttgtcccttaatggaaatattgagaaaatgtctaggggaactcgaaggagatgattataggagttgattatgtatgtaaaatcaaagtgaatgaggcagtggcaggggggaaagggggaaccagtaatgacttagaag

SEQ ID NO: 459498 - DNA, 601 bp, Homo sapiens
atgaatcagtgacatttctagctcaagggctagacataaaacaaagttaaaagaaagcacgaacaagtaataatgttaatatataaagcagacattaatgagggagaaacagaaataggagacacaaatattgaagagtgtctttttaaatcaatgaggcagatgaagcagtagctaactgaatcaaagatgcagagatagtgtttctgtatatatataataggtacacagacaggtagataggtaggcaggtagatagatagctagatagataggcatagagatagatagatagatagatagatagatgatagatagatgtttgcacaggagacacacaactaccagcatactttgtttgattgtgctttattgcactttgcagatgcagcttgttttggaaggttcctaatgaccctgatttgaataatccgtgggcaccatttttcacakcatgtgctcacctcgtgtctctgtgtcacattttggtaattcttacaacatctcaaattttcagtaggactatatctgttttggtgatccgtgatcagtgctctttgattttgctattgtaatcacattgggaagccacaaaatgcac

SEQ ID NO: 459499 - DNA, 458 bp, Homo sapiens
tcactggcatcttccagtcattaaagcaaatatttggcttaaaatagccttcttcccacctcaaatatcaaactttttgcctattcccttactctatcatggttgactcaccagcagttgcatgatggtgtatgtggcctaagaacagagtttgattctaaaagggaagtgaaatactctttaacatctgcaagtgagactgtttgaacagcaggccagccttcagtatgactacattgtttttctgtccattgtggtgctgactcagcatcagttaataaaccctcttgagcaggctggatttctcttgtttaattatcagcttggagctttctgaggactcttaggaattgttcattcagttttccasccccagcagatctgccttctaaaagtcctgcttcctcttggtgctagcgtcccctctggcataacatgcaatcacaggtgggccacgc

SEQ ID NO: 459500 - DNA, 635 bp, Homo sapiens
cagtcttccatgtgagaggatgaaagagagctcgcagcagagggaggaggcagttgttttgaaagttgttttgcgttgggagctggtgggaaagttcggtcttccccatttggaaaaggcaggctgggttccgctcctgcaccacacgcgctttccatttttagcttcattcagaggcagacagagctccttcctcttcctctccttgtttgtgacacttttctgaggcagcttttccacagtgccgagggtctggcggccatgaccccaggcattctgggacactggactgtgtgcccagaacatttttctgccatgagaggtaaagccagggattgttcagaggtgattctttttttttttttccttttccccacagtgaggttgccacattcttttttttttttttttttttaactaagagtagcatttaaaaaccttgcttcttttcaaggcagtttactttatacggcttyttggctctttctcaactgtaccaagcactctgcatctgcttttaaagtcttcagactactgtattagtcatagcctctcagaaggagccacaggaacggcgggacaatggggattaaaggcctttcctttctcttccaggctgcccccaagtgtaactc

SEQ ID NO: 459501 - DNA, 445 bp, Homo sapiens
ataaaatatcacaaaccagacctaaaatttctctcaagaccttttctccattctaatattttctttatggttggtggcactacaattattacagttttatccgtttcataaacttkcagttattttgtatttctccctattcttaactccttatatctctttagtaacaagtcttttatgttactaacctttagattcactggaatttcacatcacttttgttggttcttttctttcctctcagatattttcttttcactcaattttctagacttgtctctttctgccaatctatggaatgcaaaggtaaacaagactttcaaaatgtcctcaaaagactaacaggaaaaaacatgtgtgtatgagtaagtgtatgtgtgtgcctggagatctactgagtttactatcctgcgttaattaactagaaaatctgaacaaaaatata

SEQ ID NO: 459502 - DNA, 577 bp, Homo sapiens
tgctacagaaaatgcactaagtgaataaacagagcttttatttacatcgggttggagaaatgttggggagaggggttactgttttattttatctgaagaaaagctgaaataataacataaaacagagtgcactgtaggcaactctgtgcagagttgcaataatatggtcaacatatggggaatttctgatggtcttcctgaattgatttgaacttagaccctattgaatactgagaaaactagatcgayttaatttcctttacagaaatattacttctctcccgcagccttccacttgatctccagcacttcattatttaaatatcttagtttgtgactgggacacatgctggtttcatcaagtcattgtgagccccttgttatcctccctctacaactctcaacctactaatcagcttgataagctactgatcatcctagtactcaggatgactctaactgcaggtgtttcactgatgacagctcttctttccccatttcttactcaccagctctattaggacagatgcctactaaaaatgttctaaaaatcaaagaaattagccatgttaaacag

SEQ ID NO: 459503 - DNA, 577 bp, Homo sapiens
gatgaggacacaagtctttttcgccattaagacccaagaattctggcagacaggcttatgcagtccaggacaggaattagaagattatgctgtggagaaactcaataacctaagagaagagatatacagttgctaactcttgggaattcccaaaagaaatatctcaatcctattgtcatacatgaagccaaccatttattaattcattaaagcatcatctatgcacaaagtttctgataagtattttatgcactcactcttaaatatgagtgtagagccatagtcactagatatttgaggaaaacctatagcaagaaacacagaacaaaacaatacaataggtaacagaaatktataaaaaaaagagagacaatgtagagcatgggaaaaatactcatttaaaaagcattattgctatccttacaagtataggaaaaaagaacagaaggctataagaaggaaaaattaagatgattcaaaggagttcttgaaatacacaaaatgtgacaacagaaattaaaaatttaacagaagctttagaaagtaactttgagacttgtgtatagaaacatttcaa

SEQ ID NO: 459504 - DNA, 539 bp, Homo sapiens
gcacccttgactcatgccagttttcawtggggatgtttccagcttctgctcattcagtatgatgttgactgtgggtttgtcacacatggctcttattattttgaggtatgttccgtcaatacctagtttgttgagagtttttaacataaaggactgttgaattttatcaaaagccttctccgtatctattgagataattcaacagtgcatggaactttctccaagatagaccatatgataggccataaaaggtgactcaataaatttatgaaaattaaaattatatcaagcactctctcagactacagtggaataaaattggaaatcaactccaaaaggaaccttcaaaaccatgcaaatacatggaaattaaataacttgctcctgaatgagcattgggtcaaaaacaaaatcaagaagaaaatttaaaaaatttctgagctgaatggcaataatgacacaacctatcaaaacctctgggaaacagctaaggcagtgctaagaagaaaagttcatagccccaaacacctccatcaaaa

SEQ ID NO: 459505 - DNA, 572 bp, Homo sapiens
aattcatgattaagaccccaaaagtaaatgcaaataaataaatatataaataaatggaacctaattaaactaaaaaagcttctgcatggcaaaagaattaatcagtagagtaaacagacagcacacagagtgggagaaaatrttagcaaactatgcatctgacagaggattcatatccagaatctacaaggaactcaaacaaatcagaaaaaaaagctcatcaaagagtgggtaaactacatgaatagacatttctgaaaagaagatatacaaacagccaataaacatatgaaaaaatgctcaacatcagtaatcatgagggaaatgcaaattaaaatcacaatgagataccaccatattcctgcaagaatggccataattaaaaagtaaaaaaaaataaaggctgacattggcatggtgaaaagagaacacttttacactgctggagggaatgtaaattagtacaaccactatggaaaacaatatgaagattccttaaagaaccaaaagtagaactaccattcaattcagtaatcccactactggatatctacccaaaggaaaagtcatta

SEQ ID NO: 459506 - DNA, 572 bp, Homo sapiens
aattcatgattaagaccccaaaagtaaatgcaaataaataaatatataaataaatggaacctaattaaactaaaaaagcttctgcatggcaaaagaattaatcagtagagtaaacagacagcacacagagtgggagaaaatgttagcaaactatgcatctgacagaggattcatatccagaatctacaaggaactcaaacaaatcagaaaaaaaagctcatcaaagagtgggtaaactacatgaatagacatttctgaaaagaagatatacaaacagccaataaacatatgaaaaaatgctcaacatcagtaatcatkagggaaatgcaaattaaaatcacaatgagataccaccatattcctgcaagaatggccataattaaaaagtaaaaaaaaataaaggctgacattggcatggtgaaaagagaacacttttacactgctggagggaatgtaaattagtacaaccactatggaaaacaatatgaagattccttaaagaaccaaaagtagaactaccattcaattcagtaatcccactactggatatctacccaaaggaaaagtcatta

SEQ ID NO: 459507 - DNA, 649 bp, Homo sapiens
ctgtgtctgggcatcaaagagttaggtatttattgttgtcttctcagtttgagcttgttttcacccattcttcttgggaacactttccagatattcgaaaggacttagattttgtgatttaggctgtttctgctttagtggggaccccaagcccagtaatgctgtgattcttccacattcttagatgtaccaccttgataatcttgaacaagttcttgaagatttctctggattacacaggagagatatttgttctcttctgttactttctgccaaacaatcaaagtttctctccctgtactgagtagcctggagttgtaggtgtgatgacacargcatctctgtgactaccacccataagattgtgcagggtcagacctgaaaccagcacagtactgggtctcacctgaggcctgctgtaatcactccctggctactacccatgtttgttcaaacttctggcaccctacagttagcaggtggcaaagctagtcaggcctatgtccttcccttcagggcaacaagttccaccaggccttaggatggtcaagatgtactgtccagaagccagagactaaagtcataaaccttggaaatctaccctgtgttctattgtattgtggctgattgacactcaaacaacaagatg

SEQ ID NO: 459508 - DNA, 607 bp, Homo sapiens
tggagtctacaaaggcatacaagtctccttcagctgyggtgggctccacccagttccagcttcctggtcactttgtttacctactcaagcctcagcaatggtgagcgcccctcccccagcctcactgccgccttgcagtttgatctcagactgctgtgctaacaatgagcaaggctccgtgggcctgggaggagggtcccagaagttatgacttgcctgatgtgcagacagaacatgaaattatattctgcctttaattacaaagctttacattacatcacactgcctgtatagagattctgtagtttagaatatggttaattaaatgtagaaattatttcattaaatgtgatttacttttgtcacactctattgttttgtttcaatcaaccacatgtgagattttttcttcttcttttatttgagtattatcaattatggctgaattttctgcagctctaaacaaccaatagagtgtagtggaagtggtgctgcctgacttctgaggataggtcataaaaggtaatgaggcttttgctttgtttgctggaacacttgcacttaagagtcccaagctgtaatgtaggagatctgactactgtaagat

SEQ ID NO: 459509 - DNA, 508 bp, Homo sapiens
tctctgcatagcaaatttcttaagtagaaagtatccaagttttaaccagaccagaaagagtgactagatcccagtagaagctagcagaggaaaagatgaatgttctcagacaacaatcaggtatatgattctccagtagggggccagaatccaggagattattgaaagcttgcagataaagaatctgggtggaaggtgggaagagtaatggggaaagcaatttacagttaagggcagctataccaagtgattacagaaaatctggacatttttgatgagacaaaagtagaaagatctgtgaaaaatagtattaaggaattattaggggagtttcaaggcagtacacttatttgaggtaaaaatttagttataacatgtattccaagagaagaagtttgagaaatttaatgaattaggactcaaaagaaatgcatatcaaaaatgagacatgttaaaggggattgaaacaggataatgatmgttcaagttcagacctgggttagacatt

SEQ ID NO: 459510 - DNA, 419 bp, Homo sapiens
tcaaatctttgtgcttccttttgtttacttgtctgtaaaagtacttatatattcttgaaaattagaaggcttcactagtgtctcatattaaacaccaagttgacaaactcaacatatttttatgttttataaaacaaaccctatataaagatttggaaaatactgatgggggaaaaccttgaaaaaataccttcaaacattttcatgaacttccattctcatgttctaaaattaataatacacatataggaaattaaaaatgtattattgttactatcaattgataccaattgaatgaacgtaatgctgaaattttctagaaatgcatacataccattgtttgcacataactatgcattgactrttagcataatagtacccaaatactgcatgcatcctgcatttacttaggaaaccta

SEQ ID NO: 459511 - DNA, 467 bp, Homo sapiens
ttcgccccccgccatgattctgagtgtcacgcacgtctgtgtgaaragaccaccaaacaggctttgtgtgagcaataaagctttttaatcacctgggtgcaggcgggctgagtctgaaaagagagtcagtgaagggagataggggtggggccattttataggatttgggtaggtattggaaaactacagtcaaaggaggttattctctggcaggcaggggcgagggtcacaaggtgctcagtggggaagcttctgagccaggagaaggaatttcacaaggtaatgtcatcagttaaggcaggaaccagccattttcccttcttttgtgattcttcagttacttcaggccatctggatgtatacatgcaggcttgggctcagaggcctgacactgaggcctccccagccatgtggaactataagtccagttaaacctctttttcttcccagtcttgtgtatgtcttta

SEQ ID NO: 459512 - DNA, 578 bp, Homo sapiens
cacggcaagtcccttccacctatgagcctgtaaaatcaaaagcaagttagtcacttcctagatacagtgtgggtacatgcgttgggtaaatacacacattccaaatcagagaaattggctaaaacaaagggccagctcaccccatgcaaattggaaattcaatagagcagtcattaagtcctamaatttttaaatggtcttctttgacttcatgtctcacatctgggtcacactgatgcaagaggtgggctcccacagccttggacagctccacccctgtggcattgcagggtacagctcccctcctggctgctttcatgggctggctttgagtgtctgtggtttttctaggcacatggtacaagctgttggtggatttaccattctggggcctggaggacggtgggcctcttgtcacagctccactagtcaatgccccagtgttaactctgtgtgggggctctgaccccacatttcctttctgcactgccctagcagagactctccatgagagctctgcccctttagcaaacttctgcctggacatccagtcatttccatacatcctctgaaatcta

SEQ ID NO: 459513 - DNA, 610 bp, Homo sapiens
atgctatttggttgtccattcccaagttacttmacttagaataatgtcctccagctctgttgtgggaagtcagggacgccgaatggagggactggctgaagccatggcagaagaacataaattgtgaagatttcatggacatttattagttccccaaattaatacttctatactttcttatgcctgtctttactgcaatctctgaacataaattgtgaagatttcatggacacttatcacttccccaatcaatacccttgtgatttcctatgcctgtctttaatctcttaatcccatcatcttcgtaaactgaggaggatgtatgtcacctcaggaccctgtgatgattgcgttaactgcataaattgtttgtagagcatattgtgtttgaacaatatgaaatctgggcaccttgaaaaaagaataggataacagcaatgttcagggaacaagagagataaccttaaactctgaccgctggtaagccgggcggaacagagccatatttctcttctttcaaaagcaaatgggagaaatatcgctgaattctttttctcagcaaggaacatccctgagaaagagaatgcattcctgaggttaggcctctaaa

SEQ ID NO: 459514 - DNA, 496 bp, Homo sapiens
tctttgagcaacagaacagctctcaggagacccaaaatatgtcgctcctttctgcaggcaagtcatcccaagaatgtccagttctcatcaggaagtagacctgtgatgggtagctcctttccacaggcaggtcatctggatgattcaaggagacctgagatggctagctccttcccgcagctggtagtcctgatgtctgtgtgagtctggctgagtccagggtttttatgggctcagaagagaggacatgtgtgctgattggttcaatggtgggcaatgagcaggcccagaaaaatcaccataggttctccaggccacagactccactctgaactggcayggcaacctggttcccaggcttcaggccggccctggttggaaggtggggtttcaccagggacttgcccctttccacccaggagcctgtctgcctcccaccatcaacgtgctgtccatggcacccaggctgttcctgcggagggatgcctgcaggccc

SEQ ID NO: 459515 - DNA, 516 bp, Homo sapiens
  misc_feature (1)...(516): n = A,T,C or G
gataaatgctgactttgaataacatcttccattgtactctgtcagtaatagaaaaaaaaaagggggggggggaatcaagaagttacaaaaatgcaaaagcagacacaacttaagaggaagaaaggtaaggtggatgttggtgtctcctaaaattttgttttcrttttcattctactttagggctgatttcttctccctcagaaagcacattccttctaatttaaattacatttatccttgtctattatttcagcagntgattacgtttcatgtcactactgtactaagaaaggaccaaaaagtttttcatcccctgcccagcatgcattatacttttttcttttttatttagaattgtttgtacattacaaggagactcaagtggccctatgcagcacaagatgaccatttctcttactaaatcaaagagaacatctcagttgcacagctaagagattttggaaagttttttgcaagttatatctccatgctttctaacaggcttaaaataactgg

SEQ ID NO: 459516 - DNA, 595 bp, Homo sapiens
tgtaaatagctgttaatttggctcattatatgtgtgtatatgtatatatataatatgtatctatacctctagatagatagatagctcagctgttttttctctttctttctttttctttctccctccctccctccctccctcccttccttccttccttcctttctttcgttctctctctctctttctttctttctttttttttgacaggatctccctattgtgcccagactggtcttggactcctggactaacatagatagacagatagataatacagagatagaaatagatatagttatgtagagaaattttttctctctacatatatatatatatatatcatctatctatctatctatctatctatctatagagagacttttctgtagaacatgtcgaataacaaaagaaggttagaatattatgaaataatgaagaaacacttttaaattatcatacaaataatattcaaatatatttatatgtcatcttattatccttttaargattagtggaatcagaaggcataaatttacactatcaaaaactttggtgtctttgagcacccctctccaattatctttttggacaataa

SEQ ID NO: 459517 - DNA, 602 bp, Homo sapiens
aaataatttggtgctgttttcaatgtttcctccaaaattaatgtgttggaactttaatccccaaagcaacagtgttgattggtgggacccttgagaggtgatgaaaatcatgagggctctgccaccatgaacagattaatgcctttattgtggagatgctttgttataaaaagtaagttyattcccctcctcttatgcatgttcactctcttgactttcccttatgggatgatgcagcaagaaggccctcgccaaatgtgcccctctgatcttggacttgccatcctccagaaccataagaaatcgatctctgttctttatatattactctgtctcagggattttgttatagcagcacagagtaagacatattgtttgggacatttggggtttgcaatgtctttgtaactattggatagtttatctagcaaaacattgaaattattgggtttaatgctcaatagactctcacaactagagatgaagaattttcaaggaattgcatgatgatggttgaaactgagggaggtaataatatttcagacaaattgtgaagaattagaaaaagaaagggcaaagaccaacacttaggatacatgcag

SEQ ID NO: 459518 - DNA, 598 bp, Homo sapiens
aataggactgaataattcaaattcattaactatgagagtgaatgaaatgtatctaatgaatttatcaagaagaaatttactggtgatatttaccagattttttcatacaatttttatagaatrgtaaagatataaacttgattgtaatagattagaagaaaatgaaaagcaaggaatttgatactggacagatagaacatttttcaaaaatattagcaataaatttagagacagatgcatacactcaagggtgcccagcatgtgggaccaggtgagtggcctaagcccaaaaggcactgtgtaccattcacaagagaagaatgaaaagtgaatggcagccctggagaggcggaacacggtggcttgtgcaactcagtatattgtaatcaaatgtactgagataataaaaattggggaagaaaaagatttgaatgggtgcaattgaatatattaagtccctagtacctctgggttggaaataaaggaatgtaaagaattaagttgcttttcctgatttatggacaccaattcgggcattactatcatatagactttatttaaaatgattgaggtagataagatcactcaggaaaggatg

SEQ ID NO: 459519 - DNA, 598 bp, Homo sapiens
aataggactgaataattcaaattcattaactatgagagtgaatgaaatgtatctaatgaatttatcaagaagaaatttactggtgatatttaccagattttttcatacaatttttatagaatggtaaagatataaacttgattgtaatagattagaagaaaatgaaaagcaaggaatttgatactggacagatagaacatttttcaaaaatattagcaataaatttagagacagatgcatacactcaagggtgcccagcatgtgggaccaggtgagtggcctaagcccaaaaggcactgtgtaccattcacaagagaagaatgaaaagtgaatggcagccctggagaggcggaacacggtggcttgtgcwactcagtatattgtaatcaaatgtactgagataataaaaattggggaagaaaaagatttgaatgggtgcaattgaatatattaagtccctagtacctctgggttggaaataaaggaatgtaaagaattaagttgcttttcctgatttatggacaccaattcgggcattactatcatatagactttatttaaaatgattgaggtagataagatcactcaggaaaggatg

SEQ ID NO: 459520 - DNA, 567 bp, Homo sapiens
ttacaaatgccaaggcaacatcagaaagttaccctacatgctctacaatggggaggaaccctcaattccgggaattgcccccacccctttcccagaaaactcatgaataatccacccctcgtttagcatataatcaagaaataaccataaaatagccaaagagcagcccgtgctgctgctctgcctatggagtagccattctttcactcctytacttttttaataaacttgctttcactttactctatggatttgcctttaattctttcttgcgtgagatccaagaacactctctcgtggtctggatcaggacccctttctggtaacagtatttgtttactgaagtcaaatctgtttctgtgaggataaaggaggaaatatcagtgtaagtgaataaaaaatgggccatgaagacagtcatacaaaagcctacagccatcacaatttccagggcagcagcaagaaagaagtagaaagctaatgaaaacttattctgaggaagaatcttcccaggccaatctcagagagcgtactgtgaaagaaacggccagagagtagctgctcaaa

SEQ ID NO: 459521 - DNA, 634 bp, Homo sapiens
tgcccttactcaaaagacttgtatgcttgtttcctgtgtgatgttatcagtgatctctcaacagcagctrctgtggtgaaatccatgaactttttgactttatgtggatttgtaaaaaaattccttgctcatatttgttacataaccaccaagttcattgatttttatgcacagatatgggtagtttgtgtatttctcaaatagttactttttaatattttattttataaggaagatttcaggaagagtaaaaaataacctgagacaacctcccttttctttggctaagatggtcttctaacattgaaagaagttcaatttaacattccccggctcaaagtggtgtccctaggccaactcccataaaacttgtgttctaccctttctcttgggaccctcctctccctttccccaaagttgtacagacaggaaaagcacctttgttacctggatttccaacccacatctctatggtagatgccattttagagaacacttttctaaaagacatagatttgcttaaatatattctggaacaaaatgggacatcttttctgctcttatggggactaaaagaaagtgaaatagttactgtcttgaaaagccaagactatgttcagatggatgctttgtc

SEQ ID NO: 459522 - DNA, 634 bp, Homo sapiens
tgcccttactcaaaagacttgtatgcttgtttcctgtgtgatgttatcagtgatctctcaacagcagctactgtggtgaaatccatgaactttttgactttatgtggatttgtaaaaaaattccttgctcatatttgttacataaccaccaagttcattgatttttatgcacagatatgggtagtttgtgtatttctcaaatagttactttttaatattttattttataaggaagatttcaggaagagtaaaaaataacctgagacaacctcccttttctttggctaagatggtcttctaacattgaaagaagttcmatttaacattccccggctcaaagtggtgtccctaggccaactcccataaaacttgtgttctaccctttctcttgggaccctcctctccctttccccaaagttgtacagacaggaaaagcacctttgttacctggatttccaacccacatctctatggtagatgccattttagagaacacttttctaaaagacatagatttgcttaaatatattctggaacaaaatgggacatcttttctgctcttatggggactaaaagaaagtgaaatagttactgtcttgaaaagccaagactatgttcagatggatgctttgtc

SEQ ID NO: 459523 - DNA, 634 bp, Homo sapiens
tgcccttactcaaaagacttgtatgcttgtttcctgtgtgatgttatcagtgatctctcaacagcagctactgtggtgaaatccatgaactttttgactttatgtggatttgtaaaaaaattccttgctcatatttgttacataaccaccaagttcattgatttttatgcacagatatgggtagtttgtgtatttctcaaatagttactttttaatattttattttataaggaagatttcaggaagagtaaaaaataacctgagacaacctcccttttctttggctaagatggtcttctaacattgaaagaagttcaatttaacattccccggctcaaagtggtgtccctaggccaactcccataaaacttgtgttctaccctttctcttgggaccctcctctccctttccccaaagttgtacagacaggaaaagcacctttgttacctggatttccaacccacatctctatggtagatgccattttagagaacacttttctaaaagacatagatttgcttaaatatattctggaacaaaatgggacatcttttctgcwcttatggggactaaaagaaagtgaaatagttactgtcttgaaaagccaagactatgttcagatggatgctttgtc

SEQ ID NO: 459524 - DNA, 634 bp, Homo sapiens
tgcccttactcaaaagacttgtatgcttgtttcctgtgtgatgttatcagtgatctctcaacagcagctactgtggtgaaatccatgaactttttgactttatgtggatttgtaaaaaaattccttgctcatatttgttacataaccaccaagttcattgatttttatgcacagatatgggtagtttgtgtatttctcaaatagttactttttaatattttattttataaggaagatttcaggaagagtaaaaaataacctgagacaacctcccttttctttggctaagatggtcttctaacattgaaagaagttcaatttaacattccccggctcaaagtggtgtccctaggccaactcccataaaacttgtgttctaccctttctcttgggaccctcctctccctttccccaaagttgtacagacaggaaaagcacctttgttacctggatttccaacccacatctctatggtagatgccattttagagaacacttttctaaaagacatagatttgcttaaatatattctggaacaaaatgggacatcttttctgctcttatggggactaaaagaaagtgaaatagttaytgtcttgaaaagccaagactatgttcagatggatgctttgtc

SEQ ID NO: 459525 - DNA, 566 bp, Homo sapiens
taaaatgtaaaaggcaaacttttcaaaatgtaaaatacagcaaaggagaattgcggtgatttgagtttgggtccttccaaaattcttatattaaattttgaatccccaaggtgatggtattaggaagmgggtcatttaagaggtgagtttataatgatggcagacccctcagaaatgggattagcatctttataataaggccctaaccggaatcctggcctgttccaccctgtgaggacacagaaagaaggtatcatccgtgtctggcctcttgtgagtcactgaatttgccttgatcgtatacttccacactccaggactgtggaagaaataaatttctgttgtttataagctacccagtttatggcattttgttatatcagcctggatagactaaaacaagaatgtctttaagattatgtgctaaaaaaaaaacaccacattttgaaacaagacacagaaagcatcaaccataaaagaaaagataaattctactacatcaagagatatctgtgcaccaaaggacaccatgaagagttagaaaataagccacaagccagtagaaa

SEQ ID NO: 459526 - DNA, 566 bp, Homo sapiens
taaaatgtaaaaggcaaacttttcaaaatgtaaaatacagcaaaggagaattgcggtgatttgagtttgggtccttccaaaattcttatattaaattttgaatccccaaggtgatggtattaggaagcgggtcatttaagaggtgagtttataatgatggcagacccctcagaaatgggattagcatctttataataaggccctaaccrgaatcctggcctgttccaccctgtgaggacacagaaagaaggtatcatccgtgtctggcctcttgtgagtcactgaatttgccttgatcgtatacttccacactccaggactgtggaagaaataaatttctgttgtttataagctacccagtttatggcattttgttatatcagcctggatagactaaaacaagaatgtctttaagattatgtgctaaaaaaaaaacaccacattttgaaacaagacacagaaagcatcaaccataaaagaaaagataaattctactacatcaagagatatctgtgcaccaaaggacaccatgaagagttagaaaataagccacaagccagtagaaa

SEQ ID NO: 459527 - DNA, 581 bp, Homo sapiens
aaaatttacatacactagacagagacgcaaaacaaaggaccttaaactccttatctaatggtacatttcctggatttgtcagccattgtcarctccgctccctcttatccctatggagttggtccacacctcaattccagcatccgctagcctttactatctgctttaacagttaggactgtttcatcattggtgtgccctctgcctgtgctgtttctgtggtcttagctactggtagcccctccctctgcagtgttgctcatcagctagccgtcacctcctacttcattcaggtcccctcccagactagccctcagtagaggttggcctgaaatctcctttggaagcaggagttgccagatttgacagatggctatagaaaggaaggcaattccaagagaggaaactgaagagaggccaaatggtgaacatattttaattatgtttctgataaagaggcattgcagcagtaaaggtctcagaaggaaacggatctctctgaactcatgttagtacagattaagaaatatttaccaaagaatctatttacaaggatatgaatggagtacagggagtcccaa

SEQ ID NO: 459528 - DNA, 596 bp, Homo sapiens
aaggcataattaatatcaccttgatcttggagggcatggtgaaagggaacagtgaaagaaagaagataaaaccctatggtaaaaaaatagtatgaagagacagctgaaggcttccatggaagggatgaggagaaagtgggagcaggatagcatggagcagcagatgtgagaaagaaggggcgcaaccagcgccagaakaacagaaaatcaatgagatcaagaagggagaaataaaaacgtgcattcaactggcaattaggagatcacaggtggctctagaaaaaggaatttcagtggagggaggggaggagggaatcccggttgcagcaaggggagagagtagatgcaaaccaatcttctaagatgtttgaccgagcaggacagtggggaaactggtcattatcctttgggggtgaccaccaccagagatccccacagccaccaaggacaatagcgatctgaagaggtgttttcattcttggctgctggaaaatagccaggagaccaagaaaggatgaggatctcaactaaaaagagaatagttcatgaaacaatgttttggcaaaaatggaatcaaaataatggaggaaaaggat

SEQ ID NO: 459529 - DNA, 596 bp, Homo sapiens
aaggcataattaatatcaccttgatcttggagggcatggtgaaagggaacagtgaaagaaagaagataaaaccctatggtaaaaaaatagtatgaagagacagctgaaggcttccatggaagggatgaggagaaagtgggagcaggatagcatggagcagcagatgtgagaaagaaggggcgcaaccagcgccagaagaacagaaaatcaatgagatcaagaagggagaaataaaaacgtgcattcaactggcaattaggagatcacaggtggctctagaaaaaggaatttcagtggagggaggggaggagggaatcccggttgcagcaaggggagagagtagatgcaaaccaatcttctaagatgtttgaccgagcaggacagtggggaaactggtcattatcctttgggggtgaccaccaccagagatccccacagccaccaaggacaatagygatctgaagaggtgttttcattcttggctgctggaaaatagccaggagaccaagaaaggatgaggatctcaactaaaaagagaatagttcatgaaacaatgttttggcaaaaatggaatcaaaataatggaggaaaaggat

SEQ ID NO: 459530 - DNA, 596 bp, Homo sapiens
aaggcataattaatatcaccttgatcttggagggcatggtgaaagggaacagtgaaagaaagaagataaaaccctatggtaaaaaaatagtatgaagagacagctgaaggcttccatggaagggatgaggagaaagtgggagcaggatagcatggagcagcagatgtgagaaagaaggggcgcaaccagcgccagaagaacagaaaatcaatgagatcaagaagggagaaataaaaacgtgcattcaactggcaattaggagatcacaggtggctctagaaaaaggaatttcagtggagggaggggaggagggaatcccggttgcagcaaggggagagagtagatgcaaaccaatcttctaagatgtttgaccgagcaggacagtggggaaactggtcattatcctttgggggtgaccaccaccagagatccccacagccaccaaggacaatagcgatctgaagaggtgttttcattcttggctgctggaaaatagccaggagaccaagaaaggatgaggayctcaactaaaaagagaatagttcatgaaacaatgttttggcaaaaatggaatcaaaataatggaggaaaaggat

SEQ ID NO: 459531 - DNA, 489 bp, Homo sapiens
gaaaaatcaaaagcaagttaggtactttctagatacaggcattgggcaaatacacctgtcccaaatgggagaggttggccaaaatgacaggactataggcccratgcaagtctgaaatccagagggctgccaaatctttaacctctgaaatgatcccctttgactccatgtctcatatccagggcatgctgatacaagaggtgagctcctatggcctcaggcaactccgaccctgtggctgtgcagggtacagcccgcctcccagctgctttcatgggctggtcttgagtgtctgcagcttttccaggttcatggtgcaagctatcagtggatctgccattctgggatgtggaatatggtggccctcttctcacacctccactaggcagtgccccagtggggactctgtgtggagggtctgacaccacatttcccttccacactgccctagcagaggttcaccatgagggctccacccttgaagcgaac

SEQ ID NO: 459532 - DNA, 608 bp, Homo sapiens
ctaaaatgcatgagagagtgaaaagctaagatagcctaaagagtagaaggaaaaaatgatgattgtctatctgccactgaaagccgtaaaactagggaagttacaaatgtggtgtgttgcagggctaaacaaatgcactaaaaaaagagaaatagccacacatatggattcttgactcatgagacaaatgtcattactaaccayggtgggaggagaggatagcttatccaaaatcagctagagagcacttggttattcacagctgaaggaaaggacgatccttttcctatataacaccaaatacaagaatcatttctgagtcaaattgaagatttaaggtaaaaggcaaaatttgaaaacttagaagacaatgtaagtaattcttaaaatattgtcaggtactaaatgatttcataaacatattgcaaaaacaacatgaacagtaaagaaacaaggtttctaaatttgactatgttaaaataaaaaatttggtccatcaaaagatagtataaaagaaagccataaactcagaggagatatttacaatacatataatccataaagaaccaaattcagaatacatatatacacacatgtgtatgtttgta

SEQ ID NO: 459533 - DNA, 608 bp, Homo sapiens
ctaaaatgcatgagagagtgaaaagctaagatagcctaaagagtagaaggaaaaaatgatgattgtctatctgccactgaaagccgtaaaactagggaagttacaaatgtggtgtgttgcagggctaaacaaatgcactaaaaaaagagaaatagccacacatatggattcttgactcatgagacaaatgtcattactaaccatggtgggaggrgaggatagcttatccaaaatcagctagagagcacttggttattcacagctgaaggaaaggacgatccttttcctatataacaccaaatacaagaatcatttctgagtcaaattgaagatttaaggtaaaaggcaaaatttgaaaacttagaagacaatgtaagtaattcttaaaatattgtcaggtactaaatgatttcataaacatattgcaaaaacaacatgaacagtaaagaaacaaggtttctaaatttgactatgttaaaataaaaaatttggtccatcaaaagatagtataaaagaaagccataaactcagaggagatatttacaatacatataatccataaagaaccaaattcagaatacatatatacacacatgtgtatgtttgta

SEQ ID NO: 459534 - DNA, 608 bp, Homo sapiens
ctaaaatgcatgagagagtgaaaagctaagatagcctaaagagtagaaggaaaaaatgatgattgtctatctgccactgaaagccgtaaaactagggaagttacaaatgtggtgtgttgcagggctaaacaaatgcactaaaaaaagagaaatagccacacatatggattcttgactcatgagacaaatgtcattactaaccatggtgggaggagaggatagcttatccaaaatcagctagagagcacttggttattcacagctgaaggaaaggacgatccttttcctatataacaccaaatacaagaatcatttctgagtcaaattgaagatttaaggtaaaaggcaaaatttgaaaacttagaagacaatgtaagtaattyttaaaatattgtcaggtactaaatgatttcataaacatattgcaaaaacaacatgaacagtaaagaaacaaggtttctaaatttgactatgttaaaataaaaaatttggtccatcaaaagatagtataaaagaaagccataaactcagaggagatatttacaatacatataatccataaagaaccaaattcagaatacatatatacacacatgtgtatgtttgta

SEQ ID NO: 459535 - DNA, 598 bp, Homo sapiens
tatggactatcactttaataggcatcatgaaaagtcaaaattcttatgtaatagaaaaacactaaatattcgtagacacagtaaaataatctacagagcaataattaatagcatcacgacaatgtgtcatgttttattatgtaaaaaytattttgacttgcttttcatgcccggatttatatatattgatgggtggaataattcataatgccattttactattaaactacccaagtttcacttcatatttttcactaaacaattaatggtgtccatgtgcactctatctggatagactgacatgaatttgtcatttattctaattatgcatgcaaagcaagttgcagacagcagcacagttgagctgtatgtttactgtttaatatttatagggttccagcaatgattaggcaggatgtaccacaaaatccctgctcctctggacatgtaaattcaagagtttttatagattttgtagtcaagatgcccgtattatacttaacagtaggttagttctgcaaaggtgtaaaccatgctgcttagcccaaaggtcatggatttgctcctccagttataaaattaactttgctttgtgctg

SEQ ID NO: 459536 - DNA, 598 bp, Homo sapiens
tatggactatcactttaataggcatcatgaaaagtcaaaattcttatgtaatagaaaaacactaaatattcgtagacacagtaaaataatctacagagcaataattaatagcatcacgacaatgtgtcatgttttattatgtaaaaattattttgasttgcttttcatgcccggatttatatatattgatgggtggaataattcataatgccattttactattaaactacccaagtttcacttcatatttttcactaaacaattaatggtgtccatgtgcactctatctggatagactgacatgaatttgtcatttattctaattatgcatgcaaagcaagttgcagacagcagcacagttgagctgtatgtttactgtttaatatttatagggttccagcaatgattaggcaggatgtaccacaaaatccctgctcctctggacatgtaaattcaagagtttttatagattttgtagtcaagatgcccgtattatacttaacagtaggttagttctgcaaaggtgtaaaccatgctgcttagcccaaaggtcatggatttgctcctccagttataaaattaactttgctttgtgctg

SEQ ID NO: 459537 - DNA, 537 bp, Homo sapiens
ctgctggtgccttgatcttggacttcctgcctccagaactctgaggcacagcctagggtattctgtaatagtagccagacctggctaaacagaatgtgaccgtattgggagacagtctttcaaaaggtaactaagtggaaaggaggtcattaggctgggccaaatctaatatgagtggcatctttataaaaagaggaaatttggacacacgtacagagggaagattaggtgaggacacagsgacaaggcggccatccacaaagtaaaggagagaggtctggaacagatcctttcctcacagcctcagaaggagccaaccctgccaacatcttcaccttggacttccagcctgcagaaatatgagaaaatagatttctgttgtgtaagccacccagtcttttgtatttcgttatagcagcccttgcatgcagtatactctatctttatagttagatgcaataaacagaaacattcttcattgcataagcagaacttgatggtatttccctagtaactttgttctccagcttattcccc

SEQ ID NO: 459538 - DNA, 567 bp, Homo sapiens
gatttgtcaactcaagtcacttgttatttgcctccacatttctaaagatccctcaccagagaaagaaaattgcattagctgcatttttaagaaagcataaggccgggcatggtggctcaagcctgtaatcccagcactttgggaggccgaggaaggcggatcacgaggtcaggagatcgagaccatcctggctaacacggtgaaaccccgtctctactaaaaatacaaaaaattagccgggcgtggtggcgggtgcctgtagtcccagctactcgggaggctgaggcaggagaatggcgtgaacccgggaggtggagcttgcagtgagccgagatcacgccactgcactccagcctgggcaacagagcaagactccgtctcagaaaaaaaaaaaaaaaaaaaagcatagaggaagtgattctgaagtttcttccactagggtatgacattggagytgacatttcaaatcatagtgcaggtgtttataaaagatagaggaacctggaccaagactgtctagaaatggtctcatttttcataccggagaatggaagcatctattacttc

SEQ ID NO: 459539 - DNA, 572 bp, Homo sapiens
aagtggttagaagtataatgggaatggggaatttctcctgattcaggccatgatgagctgatatttttgttagctataaaaacatttgcgaaatatctttttgttcttcatagtctttgacatttaataggaattgatgttatttgcatgatcatcatgacctaattttcatagcaactcctctgtttgaaatagctaaccatttaataaatatcagatttttaaaataattacttttaactttggaaacatgatagaaactactgcatgatggtacatctacaagcccatcttatccccaactcatgagtcaaacaacagaatgactttctgtggccattcttcttgcagcagcaaaggaagtgtgcgcaactagcaaatgggccatctgtcttgaagcctgtagtyccaacaccacagcaccctcatcaatagatgtctgggttccaattggctgtgtgggtggtaggaactaacatctctttttgatgaaagagccctacaatgtcattaccaagggtgacattttaaatagcaatcagacgtatcactcttatctaaaaagtcactaa

SEQ ID NO: 459540 - DNA, 589 bp, Homo sapiens
ccctagacaaaacaaaacactgagtatcctctcatgtggatgtaatttaaagcctctggtttggataacattatcaaagggktgattatagttgaacaagagatgatgtctgagaactagctgggcctgtgagtatctcagctattagagatcaagagaaaagggacattgcaaaggaggctgtgaagaaatagtcaatagattcagaggaaaagcagtggaccttggttttctggataccaaataaaaaataattaagtaaaagattccaggaggaaggagtggtaaagtgtccaatattgctaatacatcaaataatgagtctttgaaaaatgactgttggatttaacaacagggttttagaaaaattgttggattttttttaatgtggcaggtacataataactctactttttgttaactgtcttcccttttcaaaaagtttgttcccataactcttctgagtgtacattaatttttatagtcctaaatgtctagccaaggtgactggaccaggggtagatcgtcagcactgagtggaccaatcagttcatccctcctgggaagtcagaaatccccaaatttggga

SEQ ID NO: 459541 - DNA, 597 bp, Homo sapiens
tttggtgttcatcaattgtttgtcgaatgaatgcacttggtaaacattggctccacccacaaggtcgaccttaaatcaattattcacacctgggctcctgaaatcacctgctgattctcaaaggggatgattcattaacaagtaagagaaagtttccgagaaatgcctccagtagaattttaaaatgcagtaaaaagaaaaaaaaaagtcactgtaaaataccacgtggaaaaagaagtggctttttgttcttacattttaccgttatctagaaaactaatgaagtggcttatttttgtcacttagttccaattaaaatagagtattgctgttttctaaatgaccacaaaactacaagtaagaaaagattattcaaggtttacattctgaaataaatggtttgtgtgaagttgggaactagcagaattattagagtgaacaatgctttgaatcctcagatttaggytgaagatttgacctttgagaatctatagttaaatgctgtttattcttgtgaatcccataaaaggcctggagcttcaacggattaacttaaggcttaaatggtaagcatcaacctgaacattctgggacaag

SEQ ID NO: 459542 - DNA, 598 bp, Homo sapiens
agtattgggagaactaaacactgaccagctgtaaaagacatctatcctgtctgcagaaaagcctatttaatgggcctctgaggggaattgtttaaaataatgctatgcaatttctccaagagtttctgctggaaaaaaaaaaaaaatgaacaaatggaaaatttaacgcctgaatgatcgatactttcttcatgaagcaaggttattctcttgcctttttctcttgtggatgaggtattttgcaggtactttaagaagtcaacctaccttttattcagcaatgtatcaaatatttattgagggttttattacaagatacagtacaggtccatggggttataagggtagaaataagtggtgcccagcactgaaggattttaataataataatgttagcaatgccaatcataacctctaatgcatctactaagctttactttttacagtgctttaatatatcctgtcattttaataattcttataatttgttataatgtgataactttttaacatcattttagcattatattttatktcatctcatttgataatataagatgcttagcccattgtgtgcccagaagtacagtaagtcctt

SEQ ID NO: 459543 - DNA, 612 bp, Homo sapiens
ggactgctttgatcatcagtctcatctcccactgcaattctgctccccatttatactttaatcttctaatgttgtaggattatttgccctcccctaatactctgccaatttttatgaccctgggccattgaccactttttcttctatatctagaatacattttccttttttctttcagtgaaatccctacttttccagcataaatgacagctttctgacccaatcataatgaagaggggtgtgtgtgtgtgtgtgtgtgtgtgtgtgtgtgtttaatctgcatttgcatggcattttgtataacaactttttacaccatggctgagttttgataaagaaataattgtaaaatttgtatctattttatccggcatctaatataatccttagtatgaaatagattcccagtaattgtttttagaatgaataaatcaaawacttaaagttttgtattgtgtacttattattattatgctagccatttctgtgtgaagactattttttattcctctgcataccttaccttagacttttaaactcttgttgtattaacctaccaatactccactcacaaaagcattcttggtaacatggaaggcacagaaaacctaa

SEQ ID NO: 459544 - DNA, 593 bp, Homo sapiens
actatctacctttctgaaagtggytcctcctttgacttctgggcattgcacgattctcgtctcccttctctttccaaactcttttgtctctcctgtacttactgtttgtcctcctcccattctctaactgggagtcttcccccaggatttatccttttatactttgcaactattttacgtgtattttatcagaattcttcatcttatggttttaaataagtccacagcataagtgacttcctgttttatatcaacagccttaacattttcttgacatctctcccaaattatcattgtctcttgaatattactgccccaccctaaccgctccagctctatatgtctgggacctagttcatgtttctcccctgagcctgctctccctttgacatccccagacttcctaatggttaaatagtttctataataaaatgattggagttctccttgacttcttctattttacttgttccaaggagtccattaaaatatccagtcaatccttgctttgagatgtttctgaaaatatttcatttctttccaaactcgctgtatcctatatgtacattaaacctcccccaacacacatattc

SEQ ID NO: 459545 - DNA, 548 bp, Homo sapiens
tggcacacaaacatgtgtgcaggaaaagaatgaaaagatagggatrctggcagagagacgctgtgttgaaccaactttccaggacatccccaggagacctgtgaagacaggtggaaggtttgggggagaatcagagcttaatgtgtatgtgatcatatttacacatataggctggtagccccataagtggggggccataaaaaagaagttgcaaattagaaagtaaaggttaactagaagctggagaccaaggtggaaacacctgattagaagggaaacagagaccaggaagagcacgccctgcctctctgaaacctgggcagagagagagaagagctcagcctggggaaggtaatttgaaatgtattttaacaaacaccaaaacccctattttgtttcttttatttgagacttgacaaatcttgtttattataggtaacatgtgtttttaaaccacacaagcacctctgacagtacttcaattttgcttcttgttaatcttcctcttttttagcctcttttctgtgttttattcacatttctcttaa

SEQ ID NO: 459546 - DNA, 560 bp, Homo sapiens
ctccactctttttacctagcaattggattttcttggagtaatataagccattacattattcaatgatgcctttgatttcactgcaaactgctgagattagagtgaggttccattgcatattaaaaacaaatagttttccaaagcagaattttaacctgtaaactctaatgtaccttcaaattaatttgtgtggatagagatggatagagtraagaattttaaaaggtgtctattttttaagtgattttttatagcatcagatgctcatgttttccattcagatcgatgaagccacagcctgagatccacatgcatgccctgccacactgtatatgttttcaatcagttctacaaggttgttattttttttttcaatgtcaaaacttaacccacacacggtctcatgaggcatagagatgcctaagccacaatgctgggttgtaggacctaatatccgtgtaatgatgggattggctgcccggcacatttggaaataatcttcagcttttggaattgagaccaagggccggaaataataaaactgtgtgaagctacactgc

SEQ ID NO: 459547 - DNA, 563 bp, Homo sapiens
aaaagtgcacatcaacagcaaacactctcattcacttagaccaatcatcatggaggctgaaggactttctgggtttggtctcaagaaagactggagaaattaaggctggtaggcacctgttttagctaactagatacaaacttgtaaaaatgttaaattaaaaaaaaaaaaaaaaagagtcttcctccaccacaaccccaggccacattcacagaaataactactgttcactataacagtagctacatttatagaatattggtattctatgcctatgcaaagaggacatgtgtttgtgtgtgtaaaacatacaagatacgtaaataaatatatataattcatgtatatgggttcctatatattcatctgctatctatctatctatctatctatctatctatctatctatctacctatctatctatagatgtgaagtatacccatactacccattgctggtattattctaaaatgactatctcagaatttgtacacattcttctgtgaattatctgtattgcactggaargattgatggagaggaaaaaggtatctaagataag

SEQ ID NO: 459548 - DNA, 602 bp, Homo sapiens
cttgggccgcacataaaatacactaacactaacaatagccgatgagcaaaaaaaaaaaaaatcacaaaacaatcttataaatgttttaaagaagtttatggtgttgggctgcaggcagcccgtgtgcagcaggttggacaaacttgtactacagcatscacagggctgagaagtgggtagggtttgaatttagtatagtcacagtggaaacatctcattaaactcagaacattcagcagagacccttgcaaagccatgtcttaggagtagtccccacatagttagtcaaggcttgacctaacaaagcttaataacaagactcaaaagaatcaagctaatcctcaaataatttaattgatgctggaacaaaaattcaatgatctctaaagaaagacaacaaaattaaaaaaaaaatcagcaatctaatcacatcaatcaaaatgtgcttgacacaaagaaacagaaaaatatgactcataatctggagaaaaaataatgaatagaaacagactcagaaattgtagaaatgttggaattaataagcatttaaataaagatatacatgtaaaatagagattaaaaatgagagatgaaaagcacaa

SEQ ID NO: 459549 - DNA, 606 bp, Homo sapiens
cagaaggaattctttcttactagactttatgttctattaaggtcttcaactaattggatgacacccacccaaattagggatggcagtgtgctttactcattctactgattcaaatgttaatctcatccagaaactcactcacagacacactagaataatcataaaccaaatacctgggctccctgtggctcagtcatattgacacaaaattaaccatcagagctcccaataacctttggttacttataaaatttattgtttacaagttacatatctgacagcattaggaaaccagagaatgcaatgcatttgttgaagacaatttccaaagagattttccaaaagtattttggayttggcctctcaaagtctacactcaagaagataccattcatatgtatatatttatatgttctgtatgattgatgtgaactaaattacatgtatggagttcattgtctgttagaaaacgctagtagtagctgagactttcagagtgtcaaagataagattacttttcatgtaacctgagataacctggacaaatgaaatatctttaatctggaaatgggagaatactgtcaacattcctgggttaaatcataa
